United States Patent Application Publication US 2014/0230087 A1 - sequence listing, part 4

SEQ ID NO: 1201 - DNA, 6452 bp, Zea mays
  Intron number 3 from transcript GRMZM2G341732_T02 (locus G RMZM2G341732) derived from phytozome v7.0 (chr-ID 5; pos 1 57449513 to 157455964 reverse strand)
gcgcacacacggcatattgggaggtagctgcagaactaggtgtttgaccggagagcgccgctatattgagtgggtttcgaggtcagcagtagattcctcattcaatttgtgcctgtaatgaaatgtagccttatgcaagcggttggaattcggtctgtcattatggtatcacacattattgttttattactgcaatgtaattttatagttggtgattgtagctactgcttgcaacagaagcaacctttatgatcctgtctcacttccaccgctttccttgatcaagctaacaagaatctaagctgatagttagggaagttttattgtgttagctaacaggaacctaagctgataattagcaaagttgtattgtggttatctctgaggcattggctagcaatgcagtcaaatgttaaggttgtggattgtgatgtttaggtaacaaaatatggatctttcacttattttgggcatcactttcataaatgaataatgatgtggaaatttcagaaaatgtatttaagaaaggtcaccgtatcatcgataagtcagatagcatatcagtttctttttcttgatataatttgccacatttgtagaggatgtggcacatggattaagataaagaataaactgatatgtgagcaacagatctcatgatgcccgctatccgtgaactgcatttgattgcttaagaacctattaaatttgttagaggtaaacagagtggttttgccggaggtactaacctcagccatcattgcttgattatatagaaagatgagatgagtcatattgattacataacagctcattagagcttagctaatcagataggagccttggcagccgcacacacctgttgagctgcccaaggtctttaatgactataattaactagcacaagtaactaggagagtgcttaggaaacaggacttaataacaacatttctccccctaaggcctgtttcaactgatcttgatctccttgatcccaattctgcttctcatatcttccaacttggtcttgcccaaggctttggtcagtatatcagcaagctgatctgtagtgggaataaattctgttttgatgctaccttcttccacacagtccctgatgaagtgatgcttgattctaatatgtttgctcctgtcatggaaaacaggattctttgccaaagatagagcagatttattgtctactctaagttccaccacctcaacttctcttcccaataatgctgcaaacaaccttgacaaccacaaggcttgggttgcagctgttgtcattgccacatattcagcctcacagcttgataatgcaacaactctctgcttgatagattgccagctgaccagactgtttccaaggaaaaacaaacatccagtagtgcttttacttgtatcaatatctccagccaagtctgagtcactataacccacaagtcttgccttgcctgtcattctagtatagcatagcccatgatctagagtaccagtcacatatctcaagatcctttttacagcctgaagatgttcagctgttggcttctccagaaatctgctaacataccctacagcaaaagccaaatctggccttgtgtgcactagatatctcagactaccaactagtcttctatactgagttggatttacctcctttgctgtactttccttgctcagtttcaacctttcttccatgggggtggtagctggattacagtctgccataccaccgagctcaagtatcttcttagcataatgagtctgtttcagagtaatgcttccctctgattgtcttacctcaaccccaagatagaaagacaacagacccaaatcactcatttcgaatgtctgcttcatttttgccttgaaagcttcaatcttctgctgattgactccagtgatgatcaaatcatcaacatagactccaattatcagcaaagaatcacctgaacctttcctgtacatggcagcctcatatacattctgctcaaaacccatctgcttgagagtcaagtcaagtttggcattccacgcccgatgagcctgtcttaggccatacaatgccttgtgtaacctgtacactttcttctcttctcctgatacttcaaaacctggtggctgagtaacataaacctcttctttgagttctccattcagaaatgcagacttcacatccatgtgatgtactgtccaaccttcttgtgctgctagagcaagtaaaacacgtactgattccattcttgcaactggtgcaaaggcatcttcatagtcaatcccttccttctgaacaaagccacgggccacaagtcttgccttgtgcctgatcacaacaccatgttcatccttcttcaatttaaacacccacttcaatgaaattgggcgatgacctggactaggagtaacaagttcccaagtcccattccgctcaactgagctcagctcttccttcattgctgcctgccaatctggatcatcttttgcctcttcatagcttgtaggctcaccgacatgagtgaggtttagttctgcaaacaacctctgtgccggcaaaggggttggctgattaccaataatatcatggaccttcctataacgaagctcttcaccatcatgataagcatccaccctttcactatcattttccagaggagtcacatgctctatctgcgggcttgctggagctggtgtaggtgttctaggtgacacaggcacctctgtctccactgcggattcctctgcttctgctgcagactctcctgcactcaccaaagggagactaggtgatgtaggatgtggctgaagaggtggtgagggtaacactgaactttctgcttcaggaaactcttctgcccatggaaactcaacaacaaaatcgctgcatgctgcctctgaagtacctgctgccgctgatgcccagtcccagccacgtccttcatcaaataccacatcacggctgactcgcacgcgctgggacactggatcaaatacacgatatgccttggccccttctgcatagccaatgaacactccagccttaccgcgatcatcaagtttctggagctgagtaagctgccgggtataagccacgcaaccaaataccttgagatggccaactgttggtgcgcggccatgccatgcctcatacggagttacattcctcagtgcctttgttggagatcgattcagaatatgcacagccgtcatcacagcctccccccaaaaccgagaaggcatctggcgttgcttgagcagagctcgtgccatggccaccacagtttgattcctgcgctcaaccacaccattctgttgcggtgaataaggagcactgaaatgccttttaataccttcattggcgcagtatgcggcgaactccgcgacggtgaattccccgccattgtcggtgcgcaggaccttcaacttgcgcccactttccacctctgctgccgccttgatcttcttgattgcttccgccgctgcgtccttggatggcagcaacacagcccacataaaacgggtggcatcatcgacgagcagcaggatgtagcggttgcccgccggtgttgctggcgtgactgggccgcacagatcaccgtgcaccaattcgagttgattctgggcacgatatgctgctgcggccggaaaagagcgccgcctctgcttcgtggtgacacaagtgtcacatacctgctccacatgatcgaccatcggcatcccacgcgccatctcctccttgctgagtcgtcggagtgcatcgaagttcagatggccgaaacgttcgtgccactgccatgcctcaacatccttgcgcgccgcgagacagataggttgtgcagcctcgaggtgcaaaatgtacaacctgttcttccctcgatgtaccttggccagcaatcggtgatgattgtcccaaatgtggagcacgccatggttaatcacaaccttggaccctccttcatcaagctgtcccaaacttagtatggagttcttcagcgctggaatgtagtaaacgccgtgaagaactctctgctcaccggtcttggcttgaaaaatgatggatccaactcccttgatttccaccttcgatgcatccccgaaccggtccgttcctcgaacgccagtgttcagatcagcaaagagttcctgacgcccggtcatgtgatgtgttgcgccagagtctaggtaccaaccgctgtccatatcttcttcatccacgccaaggtaggcacatgcacgtggctcagaaagctcgacgtgctgcgccgtgtagctgtgcgccggcgtgctctgctctaggctgataaagccctgtgccagaaacagagcaccatcttcttcacattcggcgtactggacgcgcgcctcatgccttccttggttcccgccacgctgtccagcctgatttccaccgccgcgacctccaccacggttgccaccgccgcggccagcacggtttccaccgccaccgccgcgctctgcatcctcacgacgcggctgcggacactcacgtgcccagtggccttcctggttgcagttgaggcaggtgttggggccgacacggccagcaacattgccgtctcctcgtccgccaccacgtccacctactctgcctcgtcctcgtccaccaccgcggctgcgtccaccgccaccgcgctggttcctggaaccagagccacatgcatcgtctcccttcttttcctttctgcatcgcgctttccactgctcctcagtgtacaacagcttgccattgatggccaccggctcagtcagtatttgttcttcgcgattgtccactgccttaagccttccagtcacctcctcaagagtcagtgcctcaaaatcaaggaactgctcaatggcgacgacgatctgcgagtacttggccgacaccgtgcgcaggaatttctccaccacgcgctcctcggtgatgtccctatcgccatggatgacaagctgctggtgcagagttgacaaccgcacagcaaagtcatccacttgctcaccaggattgacgctgatgttctcccaatcacggcgtaggcgctgcagtgttgctcgacggaccctgtccacgccgatgcgggtcgcagcgatggcgtcccacgcctccttcgccgtagccttgtcgagcagtgggagacccatctccttgggtacagccccgacgatcacctccagtgcgcgtctgtcatcgcggaactggacaggaccgccttcaatggcgtcccagagatcgcgcgcctgcatcctcagcttcatggtctggctccactcgtagtagtttgtcttgtccagcattggccacgacgtgccgctgccggagtcgcggtacaccacccttccttgcggcgactcgtagcgagcgccgccacggcagcgccttcggtcccgtagtggtgactgcgagcgcctcctatctcgcggtggagtcctcatccgcctgttcctctctgtctcctcttcctcctcccagtcctcctcatcttctcccttctcggcggcgatttcggcccgcagctcctgcgccgtccttgccgctgcctctgctgcagccgctgcctgcttcgctgcctggactgccagcgccgctgcttcctctgcagccttcaggcgtgcagccctgctggagaagtcgcccagctctccttcgctggttcccttggccttgagcctggcagcgcgctcagcagaggtcgacatgagtagagaagagaggagtcggccttgagactctcaggtgtctaacctaagctttgataccaaatgttagaggtaaacagagtggttttgccggaggtactaacctcagccatcattgcttgattatatagaaagatgagatgagtcatattgattacataacagctcattagagcttagctaatcagataggagccttggcagccgcacacacctgttgagctgcccaaggtctttaatgactataattaactagcacaagtaactaggagagtgcttaggaaacaggacttaataacaacaaaattcatgtagttaggactaccctactgctcttttccttctttttcactttctgtctggggctaagtcatcctgcgtggtgagaggtgcacgcctcacttcaggcactgcactttaagaaccttgaagtaaccctactccctcagtgctcaagtgaatattgtgtgtgcctttgactgaactgctatcttgtatctcatcaaactttgggcattactatctttcatatgtcccatttgcttcgtaaagtgaataccttgtttattttctttcatcttttgtacttatttttttaccttgtcgacttagaagtgtcttggttctgggatcttctgtacatatcttgctaatatattatgagaataatgttttgttattgccttccctactgttccacctgaagaaaaaagcaagaacactgatatgctgatttgaacagggaccacaat

SEQ ID NO: 1202 - DNA, 2469 bp, Zea mays
  Intron number 2 from transcript GRMZM2G158237_T04 (locus G RMZM2G158237) derived from phytozome v7.0 (chr-ID 7; pos 1 76222893 to 176225361 reverse strand)
gtgtgggctgctaccagactcaatttggctgtcaggtttgttattcctttatcatttttttgtttttctattttgcttttaaatccaggtttttaattcccgttttcttttctacttcattctccctatttcaaaatagattcagtttcaattttcgaattaaatttgaatacagttcaactccaactaaattaaatgctcacacaaaacccttacatggataaaagactattaataaatttatttatttatttatcatcatcctatttaggtaaaagcattgtttaaaatatgaaatttcctacacccaaaaataggtacgttacgagaaaaaaatctagtatataaaatcctttcgagagtattcaaacaagggaattcatatagggatgcttttataaagtctttattagaaatcactcattctaggagatgtgacttcgaggaatcaaaagatattataatcctaaatctttagagaattttactcatctcccagaataagattttggatgttacaaattctacctttcaacttaacttgtctcaaaaatttgagtacaaatgcaatcatgcaagaactccagcatggaatgcacattcacgtatttattttttttatttatcatttgactactttatttcctttagttgattatgcgcaaagaaaagaagatcaagaaattctcaaaattctagcatagaagtatatttatttatttatcgtattatatttctcttataccaattttaggcattacagcccctcacctcttcgagctggtcagaaggaagaacaaatcagtggcccaagaactgaccaacagtgcttggattcagtctctgcggggggaaatcacaaccaccacgtaaattgaggaatttgtctacctctggattaggatccaacaggtgagcttgcagccagatgtagaggacaccttagtctagaaatggacacaacatggactctactcctccagttcagcctacagagcccaattcttgggttcctacattagccacaagatcagcctcatttggcgggctggcgggctagaacagagaacaaatgcaaattcttcgcttgggtgctcatccgaaataagctcctcacgacagacaacctagcacgacgtggatggccgcaccaaccgtcttacgccctctgcaacggacctttagaatcaggactccatctgtgcctaacctgccccttcgcacaggaggtctggaacacagttcttagagcatctccaaaagctccccagaagtctcccctaaatccaattttttgggaaaaacacaaaaacgtgtctccaacagttcccctaaagcgctttcaactttttcatagcccttaaaactccctcatttgtagctacaaatgaggggttttttgggctcaccagaaacaatctgtctctttaagagatatgttggagaaatgattaaaatctacccacactaattatttagatgtcccttaaagctgattttgatgagtcgttttctggagagctcttggagatgctcttagagcatctccaagagcttcccagaagtctcctaaatcaagtttttttttgggaaaaacacaaaaacgtgtctccaacagttcctctaaaacgctcccaactttttcatagcccttaaaactccctcatttatagcaacaaatgaggggttttttgggctcccagaaacaatctgctgctttaagggggatctgttggagaaataattaaaatctacccccactaattttttagatgccccttaaaacttattttgaggagtcattttctggggagctcttggagatgctcttacttgggaaagcttttcccttccacaacaggttgatttgaacaacatctctagcattagagagtggtgggagcagacggaaactctcttctcacaagatcgcaaaagggcgttcaatggtgtggtcatctatactatgtggaacctttggaaggagcgcaatcgaagaatctttgagcattgctcgttgtcaccactccagatcacagggagagtgagggagtgtgttttgctctataacaatgcatatagtcgccttggtttgtactagagctgcatgtcttgttccttcttgggtgcccgatcctttggcctgagtgtcgccggccctgtgtactctaactcttttccctctcttaattgaaaggcagagctcctgccacttcgttaaaaaaaatatttttagtagctagtcatgttgcgtgacattctgaattgatgcgtggtatgtatttatttctttattaccgaagatgatggagatgcattgtatgtactaatatgacactttatcagagaaaatcaaagaaaaaaagaactatgacagtacttgaatgataagaatttcaaaagatttatcttacttttttctcatgttgcatagggcgttgcagaggttcaattaccagcagttactca

SEQ ID NO: 1203 - DNA, 42731 bp, Zea mays
  Intron number 2 from transcript GRMZM2G407913_T02 (locus G RMZM2G407913) derived from phytozome v7.0 (chr-ID 4; pos 3 6217641 to 36260371)
gagcaggtgaagcgagcactgggtatgctgatggatggaggattgaatggggagcaggggatgcaaggaagacgaaagctgaggagctcaaggccaaagcaaagtctgcttgaaaatggttcatatatgaatctggagctcgtatagtttaccgcttgaaaatggtggattggtccactggtcgtggtcagcttcagcaagcaacttacgagtagtttattattacgtaatcttttttcaaggtgtttaactgactttagaatatgtttgaatgcactattagttagctaaaaatatactagtagaattagctagctaacaaatagttagctaactagtagctaatttactattttaggtaatagctgaactattagctaggttgtttggatgtctctaactaattttagccaataactattatctttagtgtattcaaacacccccttaatctaaaacgggctctactatttctacggtgttttgggtctgtttgcagtgctccatcttttctaaaaatggttctagtttcggctcttacaaaggagcagctccttcataggagaaaaatgttttttttacaaattgtttgacaaaatggctcattctatatattttttattttgtgtatggggcaaatgtccgaagccactacattgaacctgctacttgctgctaaacatggagaatgacattcaacctgctacttgccacttgatgaaaccactgcttgcttaagctgctaaatcatgctacttgctaagctagaacctgctgcttgctaagctaaaacctactacttgctgagaagtgctaactgaagccacgactagctgaaacctgttgaagccacagctaattgaaacattgtgaaaccactacacggatccacgaccaggcccaagtccatcagattcagtcttagccaccatggatccacgatcgcgaccgcgagaagctgtatgtgagcgcgagagtctacgtcggcggcgaacgactgcgcgaggaacgccggactgctccagagagaggaacgacgctgaggaacgacgacagactccgcctaggagagaggagccatgggagagagaaatgtgcatgggagagagggagcggagcagcgcagagccagatttcggggctccggctccatacctgtgggggacagatatccctcgggtccactagaaggctagaaggcctcgcgaaaggctttgggcccattacttcgcaaggccatcccttcgtgggccaggggaggagccgcaggcggaatggattgacacaagattggatagactcaagcccagacggctcattgggtttaagcattatccacagcgttgatccgattctcccgcacagtgccctcaaacgtcggaactaaatgaggataagtaggcaggattataggaagataagttcagtcggttcactattacttaggtgcacgttgttatcatacccgcatgtaacgccccacggtcgagtatataaggcctaggaggcaccccatcaaaagggaggtcactcattagccatctactccattctctagcatccttcatactagaggatccccctataacccaccacataaagatccacaccaggaagtagggtgttacgcctctctaagcggcccgaacctgtataaaattgtctatcgtctctcgtgcgcctagcacgaaccatcgagctacagtcggtaacaccgtcctacccaaaagcacctcgaggggtaaccccgggtgcgcggtcgggtcccaaacaccgacagttggcacgccaggtagggggtgtgtcgctgatccaagctagctcaatggccatcgttttccaacacaagattgccctccgacctggatccgtgttctgcttcggaaccatctcatccttggcagacgaagaaggaattctgcatcgtataacggatccaccggagaagaagccttcctcgaaaatctccgaaaaggccagaacggagcaagaaaaagcacaacctccagcactccgggcgaagactacctcctacaagccaggagcagagaatttgtttacccggagaaccccgttgtccacctcatccacgaaaagatggacacggattataaggaaaaaagaagcaaacgaaataaaggccccatcaagctgctcttctggcaccttcgccctcaaaggagaacagagagaagcttgtcgtcacgacaactccattctaccccgacatactcttcatcaggggaagagtggaatcgtcccccatctccgacgacgagccaaccgtgcctggggaagaacctcctcagcgagaagctcgccgacggaggaaccgacgccagaatgttcggcgacatcatgaagccggagaacgtgacccagcacaacctgtatttcgagatgagatctcggaagtgggagaaactcctaatgaacgagtctttagggaaaggaggaattcctactgacgtgatcgacggcaggctcaggagcaagctgagcaggatgcgagacaacgccgagagaaccctctcttcagacgaaacctgaaccttgacttcacccgagccatgaacacgccgagcgaggtcggtggtgtgttggctcggatagccgatggcctcccccggactccagacgctgagggctatcgacggctgctcacccgggcagctaatcatcttctacctctcgctcatcctccgagcgatctgcgacacgccatcaacagtcgacgggacgcgcggagctccatcaacgcttcacgtgaacggcgacatgagaatgaaatatgacgttgagaggagtacgatcgagatcatggcgtccctgcacaaagtcaggccactagagttgagtcggcaacgactttaactggtggcacaacccagggacggtcgagacagcacgtcggcaactcccctccctgggaccgacatcacaatcgtcgataggaggacacgtgtggagtatctgcgctcactccgtgtcttagggccattcaatgccccccaaacttcaaggtctccaacgttgacaaatacgagcccaagcaggactcgggaggctggttggccgtctataccactgtcgcccgggccactggggcaactgaagatgtgatgactgcgtacttacccatcgtccttgggcaagatgcactgcaatggctacgacacctaccccgacactacatcgacgattggagtgacttcagtcggtgttttatcaccaacttccaatccctctccgacaagccggcgcagccatgggacctcaaatccattaggcgccgaggggatgagactcttcagtcgtacctcaaaagctttcagaccatgagaaattgtattcccgaggtcgctgaagcagcagtgatcgagaacttctaccgggggtctaatgactcggccttcgtccgagacatactacaaaaggcgccaaccacttccaaacagctgttcagggaggcagacctctacatcaccaccgacgagcgtgcccaggacctcatcgggggaacaaagcctgctccatccgcaccacggcgcgacgcgaaccagcagaccgacaagcgctgggagaaaaggcctcatgaagaagtccatgccgctagaccacctgtctctcgtgcccaaggggcaccccacggaggcgaacgaacattggacgacatcctcgacgctcagtgcccgtaccacaaggatatgcgtcataccctccggaactgcagagacttcaatcactccgtcgggaatgacctacccttccaacctctaccacctcccccaccacaaggaggacctggagaacctcgacaacctcaacagcaggaaggggaggagacggagtgttcccgcgcgtcgatggagaagtcaacgtcatcttcggcggacacgggtcataagagaacaaaaggcagcagaagctcaacgatcgataggtactgatggcgaccactagtgctcctgccccgtatcggtggtcagagcacccgatcacctttactcgggcaaatcaatggctcaacttcgatcatcctggcaagtacccactcctcgtcgatctggtgatctgagagagcagggtaaagaaggtgttggtggacgggggaagcagcatcaacgtcaccttcccccagacactcttaggattgggagttgcactcaaagagctccacgagtcagacactcctttcttcggcattgtgccgaccgaaggagaatacccgcttggacacatctacatgcttgtcacctttggaactccgaaaaactacagaaccgagttccttaggttcgaggtagcaagcttcgactgtggatacaacgccatcatcggcaggctaggattggcgaaattcatggccattctacactattcgtacatgatattgaagatgtcgggaccacaaggaatcatcaccgtgcatgctgacttccaaggagccatggaatgcttccgggtggccattcaggcggccctcaccaccaaaccactgacgacttcttccgcgcaggcgaactcagagcctgaggaagacctcgcgatacctgcgaatgaagctcaagacgtgacctctatgcggccgaccgaggagacgaagagaatcaacattgggttcgctgacgaacgcaagactaccatcattagctccaacctggacgacaaataggaaggcgcgctcatccagtttctgcaagataaccgagacgtattcgcatgacagcttgcggatatgctgggagtcccgagagaactggccgagcacaaactgaaggtctatccccaagcaaggccgatccgacaaaagctgcgtcgtttcacgcctgacaagggagatgctattcgcgccgagctagctcacttagtcgtagtagggttcattagggaagtattgcatcctgagtggctagcaaatcctgttcttgtactaaaaagaataaagtggattggcgcatgtgtgtcgactatacagatctcaacatacactgtccgaaggatccctttggacttactagaatagatcaagtggtagattcgacagccggatgttctatgttgtccttcctggactgctactatggatacaatcagattagcctggcaaaagaagatgaggaaaaaactgcatttattaccccgtttggagctttctgctatacctccatgccatttggcctcaagaatgctggagcgacttaccagagagctattcaaacatgcttagccgatcactggggcaagcgggtagaagcttatgttgatgatgtggtgattaaaacagaaaacttcattgaagatttgcagctggtcttcaacagcctgaggcgataccggtggaagctcaatccagaaaaatgtgtctttggagtaccagcagggaagttgctcggattcattgtcagccaccgaggaattgaagctaacccggaaaaaatcgaggctatcatgagaatggaagcaccacgatcacaaaagaaagtgcaaaggcttactgaatgcatggtagccctgagcaggttcatatcaaggctaggataaaaaggcttaccgttctacaaattgctcaagaaggtagacaagttctagtggaccacagaagcacaggaagttctcgatgcactaaagaagttcttaaccacgccaccagtgctaaagccaccacgccgagccatgccagatcagccggcggaagatctgttgttatacatctcctgcacgactcacgtggtaagcaccacgttattagtcgagcgggcagaggaagggcacgcatatccagtacagcatccggtctacttcatcagtgaagttctagggccctctaaaaagaagtatcctcaagttcaaaaactattgtacgcagtccttctaactgctcgtaagctccgtcactactttgacgaccacaaagtcatagtagtcaccggttttccaataggggatattcttcacaacaaagaagacatcggaagaatagccaagtgggcctgtgagctgggagctcacgacatcgagtttcggccttgcacaacaataaagactcaagcactggttgacttcgtatcagaatggaccgagcagcaagtacctgacaacccggaggctacagaagtatggcgaatgtatttcgatggctcgctgaaactgcaaggagcaggcgcaggaatcctcttcattgcccttggaggtgaacaactcaaatatgctcttcagttatcattcccagcatcgaataatgcagcagaatatgaggctctgatccatggattgaacattgccatatcactgggcattaagaggttgatggtatatagagattcactggtggtcataagccagataaataaagactgggattgctcgactgattctatgggcaagtactatacagccgtccgaaaattagaagacaaatttgaagggctggaatttcatcacgtggaaagagatcgcaacgcagcagcagacgcattgtcgaagctaggatccagtcgagcctaggccccacccggagtcttcgttcaggaagtgtcgcgcccaagcgttccctcatatcagacggaagaatgcaacactttgagccagccagagtcagactctaatgactggagagagcctatcatcaggtatataaataatgaagaagaaccggatgataaggctgcagcagagcacatcgcaagacagtcggcccactacaccctcatagggggcgcactgtacagaaggggcgcaacaggagtcctcgtgaaatgcatttcctcggttactaggagacaactattagatgagattcacgccggacagtgtggaatacacgcaacatccagaactctggttgggaaagtctttaggtctggtttctattggccagcagcaaagagtgatgcaaccgagttagtctagagatgtgaagcttgccaattcttgttgaagcaacaacatttaccagcacagcagctgcagaccatacctgtaacatggccatttgcgtgctggggattggacatgattggacccttcaagaaagctcagggaggctatactcacgtgttggttgccatcgataaattcaccaaatggatagagtacaaacccattgcttctctaacttcagccaaggtagtggaattcatacaagatataatattcaggtttgggataccgagtagcatcataactgacttgggatccaacttcactagctctgaattctttgatttctgcgaacaacagggcatctagatcaaatatgcatcagtagcacacccaagagctaatggtcaagtggaaagggctaatggaatgatactggaagcactcaggaagaaagtcttcgacaagaatgaaaagttcacagtgaagtggatcatagagttatcttatatggtttggagcctaagaactcaacccagtcgagctctgcatggaaacacccccttcttcatggtctatggttcggaggcagtgctacctgccgaccttaagtttggggcaccaaggctggtctttgaaagcatagctgaagtagaagctactaggctagaagatattgacgtgctggaggaagagcgattgaatacagtaattcagtcagctagataccagcagaccctaaggcgctatcatgataaggctatacgacattgatcctttgtagtgggagacttggtctttcgccgaattctaacggaagaaggacgacacaaattgtcaccgctatgggaagggccattcatggtatcggaagccactcggccaggatcatatcgacttactcaaatggatggcacagaagtggggaattcatggaatatagagcatctcaagaagttttatccttagcaagacttcaaaagctatcggagcaatgttgtactctgtaattggaaaatacgtcatcgataaaagatttcattctcaaaggcattcaaactattggttatcaattgacttcgatttgattatacttggaatcaacacacttactcgacttagggtgacctctataccgtactaacagagaaatcagcttaagtcggcaatgacttaagacggtgcaacatgctcgcgcttactcgacttagggtgaccactataccctactaacggagcaatcggcttaagtcggcaatgacctaagatggtagaacatgctcgcgcttactcgacttagggtgaccactataccctactaatggaggaatcgacttaagtcggcaatgacctaagacggtgcaatatgctcgcgcttactcgacttagggtggccactataccctactaacggagcaatcggcttaagtcggcaatgacttaagacggtgcgacatgctcgcgcttactcgacttagggtgaccactataccctactaatggagtaatcgacttaagttggcaatgacttaagatggtgcgacatgctcgcgcttactcgacttagggtgaccactataccctactaacggagcaatcgacttaagtcggcaatgacttaagacggtgcaacatgctcgcgcttactcgacttagggtgaccactataccctactaacggagtaatcgtcttaagtcggcaatgacttaagatggtgcaacatgctcgtgcttactcgacttagggtgatcactataccttactaacggagcaatcggcttaagtcggcattgacttaagacagtgcaacatgctcgcgcttactcgacttaggtggccactataccctactaacgaagcaatcgacttaagtcggcaatgacttaagacggtgcaacatgctcacgtctactcatcttagggcaaccactatgccttaccagccaaacgattggcataagtcaggaaaaaactccaaaaccagcacgccgcatttacttccgcaattgttcaagatgactgttacatcctgacaacagaaacaaatgttatagttgttagcaccaggggcacattatagtgctctatccaccgaatatccgagcacaatgatcacacacacatataattcacaaatacattcagtatcttctaaacacgtcactatggtgaaacatctctatttggcaatgtctttcgcaggggcaattgaggaagaagggcgactcgaggcatcaggcgcagccttgacgtcggcaacaatgtcatcaggaacaactacatcgggccttctcatcaagatccgccccgcgcgaatggctttgtccatagccttgtcgcgctgagccttcagaatggcgcagttgtcctctgaaactttggtagccagtcgagcgggcctctagctcttgggcgacggacttcttggaggcacacagatctttgatgatggaatccttgcttgacaccaactgtctaagccgcaggacctcatcttgggacacttgcagttcacgacgatgatgatccagatgtgacatagtaaagcgatggcttctctccaagatggttaaggaattgctggcatcacgatacaacctatccatattgtcacgagaagctccaagtgctcgtctctcctcctacaaacaagaatcaactttcaagcatccagtaaacagtaagcacggcagagccgattaaggaagtttacctcatgagttgtcctttcagagttaagctgagcattgagagaaaaattcaaaaaatgcgcatcgtccaaagaagcagaaacccgagccaggtcagtctgaccttgagaatacttctcttcaagatcatagtactgtcaggttgagtcggcttggtgttgaagatgtttttcctcaagctcagagcaccgctgggccatatctgacaaagtagtcgaagaaggatacacggttaaaaacaagttgatcaatcagccaaggaagaaacaaagttaccaaccagcatttgacgccttcaagtcaactatctgtttctgaagcagcaatgggttccactgcgtcagagacagagccccttctaggatagtggcaccatgtgatctcaactgagcagacatttcgtcaaccaaagcctgtgatcaaaggcaaatgagtatatggaagataatttactaggaggaacgataaaacgaaaagagttgagttacctgaagattggagaagaaggagggtaatcccaagtcaggagaagctgcgtcgtagctcgacgaaggaagatcaaccgaaagaatttgaagaacattgtcaggggttgactcagccccaccagcggatatcagaattcttgcatctggctcgctgacctccaaggcgactcgctcgctcgaagtcaaagaagcatgcatcgccatcaccccatcagattgtggtggagacgacccgacatggacatccatggaggtgtgggaaggagagctcacttggacaccctcgggggctgggttgtagctcgcgccacccaccagagccggatcattaccggcaacaccctcgggggctgtgttgtagctcgcgctacccaccagagccggatcactaccagcgacaccctcggggtctaggttttctgcaacagccacttctaaggctgaaggatcctcagccacctccatgggagtcgggcaatcctgaccaacttcttgacatcgaagactgccttccaaagtcgacgatgcgtgagacactgctcgagatacctctaatcccacgtctggaatttcagagaaaacatccatcatgtcgccagcagtcggctccgacagcatatcttcaggaacgacatcctcaagggcctgatcaaaatctgttatggacaattcttgaaggctgacaagagcagacagagctggagaaggaatatcactatcccccctactacctctgtaacaccggctattcttacgaattagcagaacttcttcttcctcttcttcgtcctcataaaaaatacggacaatagtcggtgcacggtcacacccattgggatcggcttctgcacggtcacacccattggggtcagcttctgcacggtcacacccattggggtcagcttctgcacgattacacccattgggatcagctttagcatggtcacacccattgggatcaacctcaggaaggacctctgctggtacttcttcacaaacaggagcagaagggccagcatcctggtccaagcatgacagtcgccgaagccgcctcttcttcttctcctcaacaggcgtagttggacggctaacttggcgaggacgctttgggcgagtaccctcaggccttcgggtgttcattgttttgttaagctcttgttaagctcttgtccaaccgtaacagccatcggttcagcatgggccaagtcagaagattctccagccaacatattgagtacaacatctatttctgcatcattcggacttgtcggcatctcaaagtgaacttgcctctcatcattgggaagatcacgaagaggagcaactagaacctcaatgtcttcaggagagggtcgcactctaagacctagaccactatcacttgcaggagggttggacacgaaattgaaaatgaccgaggaggtggcagattccaagcagaataagcaacatgagcaccaacatttgatactttgccccttaggatcatgtctagtcagctcactagatcctcagtaggaattttcttgttggtgacccgagttgagtcagtaataccactgtacaagtaagctagatactctctgtctttcaaaggctgaatattcttgaaaacaaagtcagcaaccacagcttcggcagtcatacctctctcctttagcagacagatctcagcaagcagaaccctagcctccgtcacctccaaggcagtgggagactcaacccaacttggagtgcgtacatttggctgtctccccgaccgaggggggagggacttgtcgtggttttccacaataaaccactcaagacgtcaccctttaatgttgtccttgagaggaatgtcaaggtattccatcttcctcctgcggcgcatcaccagacttgcaccaccaacatgctggtattgccccccagtcatcctaggccgacagtgatacaaatacttccataatccgaaatgaggaagaattccaaagtaggcctcacacagatgtacaaagatagaaatttgaaagatggaattgggattcaggtgagccaggtttagattgtaaaaatcaaggatgctgcggaagaagggagaaatgggaagagcaaaaccgcggatgagaaaaggaacgtagacgacggactcgtgggtatcttctatcggaacagtgaccccacgataaatccaccaagagcagagctcttttggaggaagaactccgacatcaacaaggtggaggagatctgattccgagataacagacatatggacgacaactggctgttgggatcgatgggaggaatgactaccacaatagaactctggttcttccgcttgggcgccatcccaatctcgccggcgggtcgaacaagggcgaaatcggaggaaaacagagtggtttgaggcggaaacgtgaagttagggctcagaactcaaaagcgcacgacgacatgagtataaatggggttttcccgtgttaggcaccgtttctaaagaagtgccaagtcatcactcgggaaaacgagatttctgacatagctcggctgttacctctaaaacgccgacaacatcaaacaccactcgaacgttacctctaaaacgccgacagtgtctgccatagctcggctgttatctctaaaacgctgacgggatcaaacaccactcggccgttacctctgaaacgcaaacaacgtcaagcgccactcggctgttacctttaaaacgccgacagtgtctgtcataactcgactgttttctctaaaaaacgccgagattcaccaaacatgactcaacagttaccagttattgcttggtaattatttctaataatgtcagcagcgttaggcgcgaaggcaaactatcaatcgactataaaggaagaacggcggaaaagcaaaaggttacttagaacaagctaaaattttcttggatatatagaggagggaagtttttcacaaacttaaagaccaactcattatgagtcggccttttctccctttttcactacactacattacattactacattactcacactacactatactactaactgctactacattattctgctactactactactgctactactaattatctatactaatatttaaaccagtggcgctttgccactggccttgctgctgccaccgctgcccttgtcgtcgccatcgcccttgccgccgtcgtcgtcgcccttgccgctattgcctccgtcgcccttaccgtcgctgtcgccgtcatcaccgccgtcacctccatcgccttcgtcgtcgtcgttatcgccgctctcctcctcggacgagtcggaggagttctcctcgtccgaggagacctccgactcatccgagccctcgagcccgaagcgcgcgacgacccggatgtacgtccacacctcggcggcgatcccctgggaatcgtccgagtcatcggacgacaccgggggagaggcgtagactggcgccccctcggactcggaggaaaactcctcctccgagtactcggagtccccaaagtcctctgagggaagacttggctcgcttttccacttgttgccggagtggtgcgacgaacttccacccttcttgttcttgcccatggttggttggaagagaagagaaaagtgggaaaataagcaacaaatggctagaagatgtgtgaagacaccagtgaggcaggcagtctatttatagaggccagaagcaaccgctcatctcctaccacggtcaccgaacagtcgcaagtattcaataagcaattcaaatcgtctggaagcaagtcaggcagcagacgtcgttttgcgtaacacgacaccatttggactgaggtcaactgcttggacgatatgattacaccccacggtcacgtcaagttactactcaaggacagtttgctaaacgctcggcgtaccaagccgtccctcggttacacccattggggaggggatgtccaagaatttttaatagattttcccaagcagtcacatacatacagtatacgcaatgaatgtatcaagactgaagaaagatatcgatggagatcagaggaaagccaaatatagctactgaagtacaagtctaatcaacagaagcattgaagcacaaagcgaaatgaagaccagccaagagccatctaccagacgtccaatctgtcgccgatcaaataaatttcaaacctaacaggacatgggcagatcacgctgctggtttctaaagcaggaattgaagacaacatgttgatctctaaagcataagctggtgatataatgctgagttctaaggcatgagacaaagataagataatgacttctaaaagcatgagatgaagacctttgagtggattattttcagtaatccactcaaagctcgggggttatttcatgtgtacaccttcggtgcacccaatgaacccaatgaatcctcaaccccttaggacagaatgctgatatctaaagcatggaccgacgacaaaatgctgatttctaaagcatgagacgaagataaaccaatgatttctaaaaagcatgagatgaggacctttgagtggattattttcagtaatccactcaaagctcgggggctacacccattgggtgcacctccagtgcacccaatgaatcctcaacccctaaggacagaatgttgatctctaaagcataagccggtaaccgagcactgatctctgaagtataaggtgaagactgttgaaagagctaaagaaggataacagaaggttgttttttacaggattgattagagttcagaagcaacaattcaacaggtgtactttcagagcatccactacctaaaatcaaaaccgcaagctggacctagaatctttgggccgattatttcgaaatcaactcaaagaatgggggcttgtgggggacagatatcccccgggtccactaaaaggctagaaggcctcgcaaaaggctttgggcccattacttcgcaaggccatcccttcgtgggccaggggaggagccgcgggcggaatggattgacgcaagattggataaactcgagcccagacggctcattgggtttaagcattatccacagcgttgatccgattctcccgcgcagtgccctcagtcattggaactaaatgaggataagttggcagttataggaagataagttcagtcggttcactattacttaggtgcacgttgttaacatacccgcatgtaatgccccacagtcgagtatataaggcctaggtggcaccccatcaaaagggaggtcactcattagccatctactccattctctagcatccttcatactagaggatccccctataacccaccacataaagatccacaccaggaagtagggtgttacgcctctctaagcggcccgaacctgtataaaattgtctatcgtctctcgtgcgcctagcacgaaccatcaagctacagtcggtaacaccgttctacccaaaagcacctcgaggggtaaccccgggtgcgcggtcgggtcccaaacaccgataatacctataaaccagctcctgctctctacacagagtcgttttctgagcgttgtttgggagggctgtagcaagaagctagagccagagctgctgaggagccctaccaaatgggcactttgtctttatggtttgcagttgcaacagcccgaacaactgactttaagcgaacaaccttgcactggaattagagcgtcctgggttcagtggggtctttactagaggtcaaaatgatacgaatattgtccatctgtatttaaattcgacctgtctaaagctatgtttggttgcatataaatcacaggagattgagagggattaaatccctatctattcaattttggcaaggaaatgatttaatcccctccaatctacccctaaccaaacaaggcctaaaagagctgaaatcttatccatatccgaatccgagtacttagtatccgattcatatctgatctttatccgtattcgtattcttaaagttgaatatttaaaatgtttatattcattcaaatttgaaagggaaatagggtcaaacattttcctaaatgattttggtggttgaattgcccaacacaaataattggactaactagtttgctcgagataatatgttctacagatgccaaaggttcacaataaaccaatacaaagttaaaagaagggtccaaaaagaaaggagcaaagcaaccgaaggctgccctggtctggcgcaccagatagtgtccggtgcacctgggagatcaactccgaacttgccaccttcgggtttttggggagccactctgctataattcaccagactgtctggtgtagcaccggactatccggtgtgccatgtggagcaacggctaacagcgccaacgatcatctgcaaaagtgaacagtgcgtgaacagtgcgcggacagcgcgtgcagagtcagagcaggtgccagaaggcgcatcggacagtgaatagtgactgtccggtgcaccaccggactgtcccggtggccccacttgtcagagctccagcagtcgaaccctacggttgggtgacgtggctggcgcaccagacagtgtccggtggctcactagactatccagtgcgcccttcgacagcagccttccccaacggccactttagtagttggggctataaatatcccccaacctccacacttcaaggaatccaagtttttcagccaacacattcaatacaagagctagtgtattcaatacaagacacaaatagattcaatcaaagcctctccaagtcccaattccactcaaagcaattagtgactagaagagagagttttgcccgtgttcatttgagttcttgtctcttagatcgcttttcttcttccccatttcttgttcccaagacatttgtaatcaaagcaagagacaccaattgtgtggtggtccttgtggggactaagtgtcccatttgattaaggagaaaagctcactcggtctaggtgaccgtttgagagagggaaagggttgaaagagacccggtctttgtgaccacctcaacggggagtaggtttgcaagaaccgaaccttggtaaaacaaatcaccgtgtcacactcttcatttgcttgtgatttgttttcgccctctctttcggactcgattttatttctaacgctaaccccggcttgtagtggtgcttaaagtttataaatttcagatttgcctattcacccccctaggcgactttcaattggtatcagagcctggtacttcattagagcctaaccgctcgaagtgatgttgggagctcacgccaagaaggagatggtgaccggcgagaagcccgccacaagccacgggaaagctccatcgggggagtccggcaacaagaagagtgaggaatcacctccccgcatcaagtcgcactagagtggcaacaagaagaagaaaatgaagaaagtggtctactacgagaccgattcttcgtcgccttccacctccggctccgacatatcgtccgtcacttctaagcgccatgagcgcaagaagtttagtaagatccccctacgctaccctcgcatttctaaacatactcctttactttccgtcccattaggcaaaccaccgacttttaatggtgaagattatagtaggtggagtgaaatgatgaagtatcacctaacatcactccacacaagcatatgggacattgttgaatttggagcacaggtaccattcgtaggggatgaagattatgatgcggacgaagtcgcccaaatccaacatttcaattcccaagcaactactatactcctcacctctctaagtggagaggagtataataaggtgcaagggttgaaaagtgccaaagagatttgggacgtactaaagaccgcgcacgaaggagacgaggtgaccaagatcaccaagatggaaacgatcgagggggagctcggtcgatttatgctcaaccaaggagaggagccacaagccatgtacaaccggctcaagaccttggtgaaccaagtgcgcaacctcgggagcaccaaatgggatgaccatgaaatggtcaaggtttttcttagatcactcgtttttcttaatcctactcaagtacaattaattcatggtgatcctagatataagctaatgtctcccgaggaagttatagggaagtttgtgagctttgaattgatgatcaaaggctccaaacaaatcatcgagtgaggcgccacctccacacccgaggtgcaacccattgcattcaaagcgacggaggagaagaaagaagagtctacaccaagtagactccccatcgacgcctccaagctcgacaacgaggagatggtgctcatcttcaagagcttccgccaaatcctcaaacaaaggaaggggaaagattacaagccccattccaagaaagtatgctacaagtgtggtaagcccggtcatttcattgctaaatgtccattatcaagtgatagtgacaggggaaacgacaagaagggaagaaggaaggagaagaagaggtactacaagaagaagggcggtgatgcccacgtttgtcgggagtgggactccgatgagagctccaccgactcctcctctgacgaggatgccacaaacatcgccgtcaacaagggtctcctcttccccaacgtcggccacaagtgcctcatggcaaaggacgacaaaaagaaggtaaaatctagagcctccactaaatatgcaacatctagtgatgaggaaaactctagtgatgatgaggataacttgcttgccctttttgccaacctcaacatgcaacaaaaagaaaaactaaatgacttgataggagctattcatgagaaggatgaactcttggatagccaagaggatttccgtattaaagaaaacaagaagcatattaaggttaaaaatgcttatgctcaggaagtagagaagtgtgaaaaattgactagtgagctaagcacttgccatgatgttatctcaaaccttagaaatgaaaatgcaaaattaattgctaaggttgagaagttagatgtttgtgatgattcaattgttagtcttagaaatgataatgctagtttaattactaagattgacaaattgaatgcatcactctttagccttaaaattgagaatgaaaaattaattgctaaggctaaagaattaaatgtttgtaatatttctatttccaatcttagagatgagaatgctattttacatgctaagattgatgaattaaatgcttgcaaaccctctacatctactattagtatgtctctatttgcactagatgtagagatgttaatgttgatactatccatgatcacattgctatgattaaacaacaaaatgatcatatagcaaaattagatgctaaaattgtcgagcatgaattagagaatgaaaattttaaatttgctcgtagtatgctttatagtgggagacgccctggcattaaggatggcattggcttccaacagggaggcaatgtcaagctcaatgcccctaaaagattgtctagttttgttaagggtaaggatcccatggctcaggataacgagggctatattttatatcctgctggttatctcgagcacaagattaggagaattcatgctaagaagactcattcggtttctcaccatgcttttatttatgaggcttctagctctaggcgttctacacatgttaaaatgcctaaaaagaaatctcctatttcatcaaatgaacctattgtttcatttaagacttttgatgcttcatatgttttaactaacaaattaggcaaagtagttgccaaatatgtgggggccaaacacaagggctcaaagacttgtgtttgggttcccaaggtgcttgtttctaatgtcaaaggacccaagaccgtttgagtacctaagaacaaggcctaaagttgttttgtaggtttatgcatccgggggctaaagttggataattgatagcgagtgcacaaaccacatgactggggagaaaatgatgttctcctcctatgaaaaaacaatgatccccaaagagctatcacattcggggatggaaatcaaggtttggtcaaaggacttggtaaaattgctatatcacctgaccactctatttacaatgtttttcttgtagattctttagattacaatttgctttctgtttctcaattatgcaaaataggctacaattgtctttttacggatttaggtgttactgtctttagaagaagtgatgattcagtagcatttaagggagtattagagggtcaactatacttagttgattttaatagagctgaacttgatacttgcttaattgctaagactaatatgggttggctctggcatcgccgactagcccatgttgggatgaagaatcttcacaagcttctaaagggagagcacattttaggactaacaaatgttcattttgagaaagacaggatttgtagcacatgtcaagcagggaagcaagttggtacccatcatccacacaagaacatcatgacgaccgacaggccgcttgaactactccacatggatctattcggctcgatcgcttacataagcatcggcgagagtaagtattgtcttgtaattgtggatgattattctcgcttcacttgggtgttctttttgcaggaaaaatctcaaacccaagagaccttaaagagattcttgagacgggctcaaaatgagttcggcttaaggatcaaaaagattagaagcaacaacgggacagagttcaagaactctcaaatagaaggctttcttgaggacgagggcatcaagcatgagttctcttctccctacacaccacaacaaaatgatgtagtggagaggaagaatagaactctacttgacatggcgaggaccatgcttgatgagtacaagacttcggacctgttttgggcggaagcaatcaacaccgcttgctacgccatcaaccgtctctaccttcaccaaatcctcaagaagatatcttatgaactcctcaccggtaaaaagcccaatgtttcatattttagagtctttggtagcaaatgttttattcttgttaaaagaggtagaaaatctaaatttgctcctaaggttgtagaaggctttttacttggttatgactcaaacacaagggcatatagagtctttaacaagtccactggactagttgaagtttcttgtgacattgtgtttgatgagactaacgactctcaagtagagcaagttgatcttgatgagctagatgatgaagaggctccatgcgccgcgctaaggaacatgtccattggggatgtgtgtcctaaggaatccgaagagcctccacaagcacaagatcaaccatcttcttccatacaagcatctccaccaactcaagatgaggatcaagctcaagatgatgaaaatgaagatcaagaagagccacctcaagaggaggacaatgatcaagggggagatgccaaagatcaagataaggaagatgatgagggtccaagaccgccacacccaagagtccaccaagcgatacaacgagatcaccccgtgaactccatcctcggcgatattcataagggggtaaccactcgatctcgtgtcgctcatttttgtgaacattactcctttgtgtattctattgagccatacagggtggaagacgcattaagggattccgattgggtgttggcaatgcaagaggaactcaacaacttcacgaggaatgaggtatgacatcttgttccacgtcctaatcaaaatgttgtaggaaccaagtgggtcttccgcaacaagcaagatgagcatggtgtggtgacaaggaacaaagcccaacttctagccaagggatattcacaagtcgaaggtttggatttcggtgaaacctatgcacccgtagctaggcttgagtcaattcgtatattactttcctatgctacttaccatggctttaagctctatcaaatagacgtgaaaagtgccttcctcaatggaccaatcaaggaggaggtctatgttgagcaacctctcggctttgaagatagtgagtaccctaaccatgtgtataaactctctaaggcgctttatgggctcaagtaagccccaagagcatggtatgaatgcctaagagattttcttatcgctaatggcttcaaagtcggaaaagccgatcctactctctttactaaaaccattgcaaatgatttgtttgtatgccaaatttattttgatgatatcatatttgggtctactaacaaatctacttgtgaagagtttagtaggatcatgattcaaaaattcgagatgtctatgatgggggagttgaagtatttcttaggatttcaagtgaagcaactccaagagggcaccttcatcagccaaaccaagtatactcaagatatacttaccaagtttggaatgaaggatgccaagcccatcaagacacccatgggaaccaatgggcatctcgacctcgacacaggaggtaaatccgtagatcaaaaggtataccggtcgatgataggttctttactctatttatgtgcatctcgaccgaatattatgctctccgtatgcatgtgtgcaagattccaagccgatcctaaggaagttcaccttagggccgtaaaacgaatcttgagatatttacttcatacacctaagtttggtctttggtaccacaaggaatccatttttgatttaattgattattcggatgctgattgggcagggtgtaaaattgatagaaagggcacatcagggacttgtcagttcttaggaagatccctggtgtcttgggcttcaaagaaacaaaactcagtagctctttcaaccgctgaagccgagtacattgccgcaggccattgttgcgcgcaattgctttggatgaggtaaacccttagggactatggttacaaattaaccaaagtttctctcctatgtgataatgagagtgctatccgcatggcagataatcccgttgagcacagccgcactaagcatatagccattcggtatcactttttgagggatcaccaacaaaggggggatatcgagatagcctatgtgagcaccaaagaacaattagccaatatattcacaagccattagacgagaaaacttttaccaaacttaggcatgagctaaacattcttgattctcggaattttgattgatactttgcacacatagctcatttatgtacctttgatcatatctttcatttgctatgactaatgcggttttcaagtgtatttcatgataagtcatagatcgaaagggaaataaagtcctcggcgaagacaaggcttccactcaactctatcgtattatttctccttcgccgtcactccgcatcgctctccaactttgttataattcttcactcatatattatttgccaaagggggagagagtttgaaacgggctctaatgactccgtttttggcgattcatgccaaagggggagagagtattagcccaaagcaaaaggaccgcaccaccacgtcaatttcaaaagttttaaatgttattttcaattggtattgtatttatgatatttcaaaattggtatctttgaaataagttttcctctaagaaattctatctcaattggtatctaaaatatttgatcttctttcaatttgaaaaaccctcttgaacactaagaggagaatttcattaagggggagttttgttgaagtcaaaggaaaagcatttgaaactgggggagaaaatttcaaatcttaaaatgcttctcaaaatcttattcatatacctttgactatttgcaaaaagactttgaaaagaatttgcaaaaacaaaacaagtggtgcaagcgtggtccaaaatattaaaatgaagaaagcaatccatgcatatcttataaaaatgtaaattggtttaattccaagcaacctttgcacataccttatgcaaactagttcaattctgcacttatatattttctttggtttgtgttggcatcaatcaccaaaaagggggagattgaaagggaaatagggtcaaaccttttcctaaatgattttggtggttgaattacccaacacaaataattggactaactagtttgctcgagataatatgttctacagatgccaaaggttcacaataaaccaatacaaagttaaaagaaagggtccaaaaataaaggagcaaagcaaccgaaggctgccctggtctggcgcaccggactgtctggtgtgccaccgaacagtgtccggtgcaccagggagatcaactccgaacttaccaccttcgggtttttggggagccactccactataattcatcggactgtccggtgtagcaccggactgtccggtgtgccatgcggagcaatggctaacaacgccaacggtcgtctgcaaaagtgaacagtgtgtgaacagtccggtgcgtcgccacatcacccaactgttagggttcggagcttggtcgaccgttggagctttgtcttcttgcggcaccggacagttcggtgccacaccggacagtccggtgcccctctgactttctgctctgacttctgcgttgcactgtaggtgcactgttcaactttgcagagtcgaccattgcgcgagttagccattgctccggtggcacaccagacagtccggtggcacatcggacagtccgatgaattatagcggagcgtgcctgctgaaacccaagagtggctggttcaaccctgtatgggcctggtgcaccggacagtccggtgcgccagaccagagcacacttggtttcttttgctcctttaaattggatccgtaacttgaatatttattggtttgtattgaacctttatgcacctgtagaacatgtattctaaagtaaactagttaattcatatatttatgttggacattcaaccaccaaaattaattgtgagaaaaggttaatcctatttctctttcaatctccccgtttttggtgattgatgccaacacaaaccaaagcaaacatataaagtgcagaaattatctagtttgcataaggtgagtgcataggttactttgaattaaaccaatttataatcttactagatatgaatggattgcttttctttcctttaatattttggaccacatttgcaccacttgttttgtttttgcaaatctttttggaaaatcttttcgatgtcttttgcaaatagtcaaaggcatataaataagattgcaagaagcattttcaagatttgaaatttatccccccttttttcaaatgctttttcctttgactaaacaaaacttcccctaaatgaaattctcctcttagttttcaagagggttttaatagatatcagttttgaaaatttatctttacatgtaccaattgaagaagttgccattacaagataccaattgaaattgaaaacaataccaattgaagaagttgccattacaagataccaattgaaagtttaaaacaataccaattgagattttgctttctcaagataaagatatcaattgatatattgtcatgacatagataacaatgaaaaaaatatcaattaaagcttcattttgattttttaaaaaaattggtggtgcggtccttttgctttgggcttaatattttctccccctttggcattgaacgccaaaaacggagacgttgagagccctacaataatttctcccccattggtacaagtaaatatgagtgaaacattataccaatttgagagtgttgttggaataccgacaaaggggtaaataatacagatggagttgagtggaagcgttgtctttgccgaatactccatttccctttcaatctaagactaaggataaaaatacacttgagagcacattagtcttagccttggtacataaataataagagatatgcatttgtaccaaaatgaaagagatatgatcaaaggtattatgaaggagctatgtgtgcaatgtttcaatcaaagttccgagaatcaagaatatttagctcatttctaagtttgctaaaggttttctcatttaatggcttggtaaagatatcggctaattgattcttggtgtttacataagttatttcgatatcccccctttgttggtgatctctcagaaagtgataccgaatgtctatgtgcttagtgcggctatgttcaacgggattatccgccatgcggattgcactctcattgtcacataggagagggactttgctcaatttgtagccatagtcccttaggatttgcctcatccaaagtaattgcgcacaacaatggcctgcggcaatgtactcggcttcggcagtagaaagagctactgagttttgtttctttgaagcccaagacaccagggatcttcctagaaactgacaagtccctgatgtgctcttcctattaattttacaccctacccaatcggcatcagaataacctattaaatcaaaagtggatcccttggggtaccaaagcccaaacttaggagtgtaaactaaatatctcatgattctcttcacgaccctaaggtaaactttcttaggatcgacttggaatcatgcacacatgcatacataaagcataatatccggtcgagatgcacataaatagagtaatgatcctatcatcgactggtataccttttgatctacggatttacctcccgtgtcgaggtcgagatgcatatttgttcccatgggtgtcttgatgggtttgctatccttcatcccaaatttcttaagtatgtcttgaatgtacttagtttggctgatgaaggtgccatcttggagttgctcgatttgaaatcctaggaaatacttgaactcccccatcatagacatctcgaatttttgaatcatgatcctactaaactcttcacaagttgatttgttagtagacccaaaaataatatcatcaacataaatttggcatacaaacaagtcttttgcaatagttttagtaaagagagttggatcgactttaccgactttgaagccattagtgataagaaagtctcgtagacattcataccatgctcttggggcttgcttgagcccataaagcgcctttgagagtttgtaaacatggttagggtactcactatcttcaaagctgggaggttgctcaacatagacctcttccttgattggtccattgaggaaggcacttttcacgtccatttaatagagcttaaagccattgtgacaccccagtgtcacctagggtttctctcaagtgctaacccaagaaccatcatcttatgtgaaccaaaattgagcatgaacatcaaattgacttaagaataaaggatccactaagcttatacttaaaagtatcatgttcaaaacaaatgggtttttcaaaaaggcaaaatgtgcaaccccaataaaaaccctaattgagccctataaacaaaattcaagagaaagggcaaaagagtgtgaagaacatagaatcatggcttgggccaattataaacattaaagtatactaaataagcaacaacaaatattatggaagcttggccaaaacaatttaaataaaaccctaaacaagcctctcaagtgggatttcattagggaattctgaaatttagaattctaaatttcagaccttgagccaaagatcaagcgtgttcaccttgatccctaactcaaatcctaatggccccattgacaaaaacatgcataactaacctctctgtcctgtgcagaagatggcatcgggacgcatgccttggacacgtcaaaccagagatcttctccctgtgtgcggcagtgagacaaaccagatttctcccctctctatctcctaatccagtcagccaaacctgctagcctccacacacaaacggcaaaggaacctgagaggaagagatctctcaacgggatcatggccataatctcaaagatttggggccaatccgcgcttgaactcgacctctctctgcgctgcctcgtgctcgacgctgtgccagacgccagagcgcgcactggcgttcgccgcgcacgccccgagcgcttgttagagccccgccctcggccgtgctcgcccgcgcctataaagccacctcgggcgcgcctcacttcaccccatgctcaccatctccggctagacacccctcctcagctccagcgagctcctttccgcctgccattgtcgccagagcttcggccaccgtggccagcccactccagtcaccccccaagtcgcgacagcgcttcggttagctccgtcattggcccgtgaagctttccaagccctcggacctggcagaacttcaccggaaggcgaagatcgacctcaccggacttcggccgccgcctgcgcgtgtagactggacactccggtgagccattcttcaattcctcgcgcacacacctttcttgatccctggtgaagctctctgacccgtttgattggtcaattgtgccctggataggccggactcctcgccgccgacgagctcccccgcctgcgcacgcggaccgaccaactccgaccatccctaacggcgacccacacatcgccgtgaccctcagaacctcccctacaccctcggccacctcaccggagcaatctcgccgccggtaagcccctccgacctttcttccgccgcgggtactgtttaatttgggggaaggacctcgggttaggattagaagaatccagggggttttctgagatgtcagtgactcaattgaataatatcccagggactagtctgtaaggaaaacttaaaacacccgccagggaccccgctgcaaagtagttttccatttaatcatttctgtttaatctttttaatgaacagagaacttagaaaattcataacttgatgaatacttaatcaaaagttgtcaaaccaattttgctcaattctaaatattatgaactatcaattaaaaatactgaaccctatgctttctgttctaatttttagagtttaaaattaaatacagaaactgaccaaaccttatttaattaaggaaaattagttatgctcctgtgctgaacctaagaaaatttatagatgttcaaaccccatttaaacactatttaaaaataatgagaacccagtattgaaaattttagtatagatatccattaaaagccatttctgcccaaaccttaggaaaatcagaaaggccttagaaattaatgaccagtggatgaaattatttttcctagtttgcttaagtaacaaagaacctaggaaaataaaggaacctctattccagatcagattcaaagtgaaatgttttaattagcattattccaactagaaatcaattattagaattacaaaaccagacccaaaattgataataaaaatccagtgcacttgtaactactaaaaccccactacaaaaataataaacaccccagcccatcattttaagtagggtaaataaatagaacatgataatgagccatagttcaattaaatcatgagtaacccacaataatgcaataatgggcaaataaaattttgctaggccaataaagagataggccactagagaaaaatataaacccattggaaaaatgcaaaataatacctattgccaatattttataagaaaggccatttaatccaattaatgcataccaccccttcccttaagcaaaacgatgccaaacttcagaatgattgctcttgcacaaataagaagctaggaaaaatcagaaatctgttgtttgatatttttcaaatatagtggtagtagaaagcacccctttggctagaaactttagaaaatcctagtaaaatacctaataagtattaatggctagaaatttgtaccaagtcatgttatagcatctaaatgccagaaaaaataagtcctagagaattacctactattaaatgataagttgtagttcaaatcaccccttctgcccaaaaattttggtaattttgtccagcgaaaactattcactttttgaaccccaaattttgagacagatatttatacaccaataaataagccactgtaatttttgcagaatttttggaaatttattaaggtgactggtagttcaaaacccactccaaaaaaacttaaagagaataaagaaaaagaaaggagaaataaacctcactccaataagtccaacttgagttcttgacaattctcactaaagactttaaaaagaatttagtggaaccccaaaaataaacctaccacttaacttagctaaatccaatttaccaagtataccaccaaaagtctcgtataagcaagacttagctctatctaactcgagtagatcatacacaatcaaaagtttaaattactaaagcacatatcatatcatgcatatatcttacgcattgcattcattagattgtaatctcaccgacggagagtacgtgctcatccccgagcaaggaactgtccaagaggaggaccaggagcaagctcccgaggctgctatcgaggatctccccgcagccccacctattgaaggcaagccccgatttatatgcataactgtattattatatgctacttcactacacttaatgcttgtaggattgtaatgtgcacttaagtgtaggagttgcttgaaacctctagttgcatgaacttaggattcctttttgagatgaatactagtatgctaggtcgagtagctgcttgctaatcaggatctcggtagaagtcgagtgatttttctagtactcgcgcgaggtcatgaattgattgtattcatcttgataacgggatctatgttagtctatggacttggatccagggaggatgccttgtccatgagacgggaaaaaggaattaaggattaatgtttggatacctgagtcaagcttttgaacgtactaagcacatgtcgggaaatatggtaaccggtaaacctagtacctgagtgaagccgggcgcggactttatccctcatgcgacctgagactgggtctcccatgctagctatggtgggtacaagtgcggtcactgcacggcggcagccggggtcagtggagcattgtatgccaaggcggtgaggcctagacgcgaacagggaatcgatggggacggttggcatgtgtggggacggagtaccctgacatgtcgtgtgtttaggtttaccttgcaaggataaaaactcgattcgaatcgtctacttctcgcagctaatgagactgcttgaccccttgtactacatcgagtaagaagtgaaatgaggttacatgagacaatttgttgattgaacaaaatgcttgtcaccatgtatgcttagaaggagcaaacctagctaagataatgatgctagaatttgaaaagttaaaaattgattttagaaacagctagtgcttttggcaaaccaaacccctcagccaaacagctgcatagtctagaggtagaggagtagattcctcacaccggttaagtctagctgagtattagtatactcagccttgcttgtggcacaacttttgcaggtacgatttaggatatggttgatggtgtgacttggcctaccaccctgccaccgggttggacagtcgagtgggatgttgctccggcaggagaggagcacgcggagtagtgggctaggccttgcccatttcctcgataccgacgacatcgattatccgctgcattttatttcgtgaactcttatttgctactcgaaaaattccaatctatgtaataattcagtacttaatttgaggtttcctgttttattatatttcttctgtgactcaccttcgagtgagattgtggaatttgatcctggttaagtggctctgtcagactagatctgagggactgacgggttattccgatttaagtgtgttgcggcccctgaggcgtgacttaggcacttaaagctagaataatttgggtggttctgccacagctagtatcggagcaaattctaccacagaaaaggacaataaaccatgaatcccattttcaaaatttaaaactttgcctagaaactgctacggatcgtcaggactagaccgctagacctaggacaaaaggccttaggcatagagggagaaataggtgtctaattaagtaggccccgtgggccagtacttagacttttaaggatgccttaagagcaccctattatctggagaggagacgttacttctagcatgcatgcattatgaacacaaaagggaattaaaacttgagctgaccaacttcctttaaaaaccatccgggctctttttttccttccaccataatctttacctttgatacccttccgcagatgaattcacccacccccgccagtggaggagacacccgtttcagttctgacttcctttctcacgatggctttccttccatcttgtgggaagtgctcaactccgctggttaccctacgccccctttgtacacggtgcagctgtatgaggagcatcgggtaccttgttgtcgggtctagctgactttggaggctcatccccttcagccgggttggcgttctcttgattccgagacagttggattcaggacagatgacaccattgaagcggcagccatgaagactctgacaactttctgtggctaccatcccctggagatggtgatgcaccccttgggactcttccctgctgagaagaaggatgaccccatgtggtgtaaccgcatgagccatgtgaaggatgtgtgggcaatgtatcctgacttggttgggagggtcaccgttcagtgcatgagtgcgctgtaccgccttcaggcccttcagagcgacgctatggaacaccttgctaacatcgctcaaaccaccaagctcattgtcgatagccgagaagattttgtggtcgatttatcctccgagttggtggagaaggatctacaggtggaaaggctgagccagcgcattaccaccttggagcagcaggtggagatccgagacaacactattgatgtcttggagaaccagcttcacgatgtgcagagggaactcgaagaagcgaatgaccacctggacatgcaccacttggagatggaggccaatgaagccggaagcgagggagaagaggctcccgaggagctaggaccaacccctggtgccaatgggactacctccgcgatgcctccctcacccgtatccagtgtcgcttccaccgctatcagtcactttgacacttttatgcagatagaaacctatgcgagcttagttaatgtcagattttggactaggcttatgggtactttcccctgattgatgtaaccctgtgaacttttgaaatctatgggatgtttgtaaccacgttatcttcatttcgaacctaatattatgattatggcatttttccttccatgtgagataatatcttgtcgttcgaaattgcgagttgggataacaatggcgataatctctgttttcagatggcagctaggcagcgtcgcgggcataacgagcaggttctcctgccacctcctccagctcccacagtgcaggagctgatggcccagcagaatgagattctgcgatagctcttgcagcgccagccccaccctcagcagcatggtggaggccagcatcagcgacctccagcagcggcaacctaccaggagttcctgagcacgcagccacccttgttcaccaaggcagaggatccgttggacgccgacgtgtggctccgcgtcgttgagtccaagtttcccctcctcacgggagactgccctgatgaagccaaggctcgcttcgccgcgcagcagcttcgcggccctgctcggacttggtgggaccacttccgtgctatgctccccgctgatcgtgaagtgtcttgggaggaattcaagactgctttcagagggcaccacatcctagctggcattcttgatcgcaagctgaatgagtttctgacacttaatcaaggaacccgcacggtactgcagtatgcgcaggccttcaacgacctatgccagtatgcaggttaccatgctgattctgatgagaagaagagagaccgctttcgcaggggtcttaacaccaagctgcgggaacgactcaacactgttcgggctgacaggttcaatgagttggtcaacctggccatctcccaggaggattgcattgtagctcaccgggcagagaagaagagaaaggcaccaatggcagcaccatccgctcaggcctagaggttcaggattgtttctcacaatcagagcaggggttttcagcagcaggtaggcagatgggtgatcaggccacctcagcagcagcagccggcacccaaccgctttccagctcccgctccaaggaacaatcagcctccgcagcagcatcagttccgccagggcaatgggaacaaatgtttcacttgtggcaatgtgggccactatgccaagaattgtcccaggaaccagcaaaggcagatgtcagcaccaagtcaagacaatggaagaaaggagaaggtacaagtcaggcaagggaagctcaacttcactactctagaggaagtgcctgagggagctcctatcatgaccggtatcttttcagtttataatcaacttgctttaattctgtttgattctggtgcatctcatagtttcattagccaaaagttcagtgctaaatgtgaactgccattctctcgttcaaaagggtcatttatgatagtcacacctgggggtaaaatttcaactaatcaattaaaccaaagtgtgcctattcaactgggaagccacattgtcaaaatcacccttcttgttttggggttggaaaatgtggacattattctgggagctaattggattaccctacaccaagttgtgcttgatgtagccagccataccgtggaaatcaattctccgctctgtgggaacttcaccttgattctacccagtcagggttctactctgtcatgtgctttctctatgacggagttacctctgaagaaaatcccaatggtctgtgagtatgcagatgtctttcctgatgaattgccagggatgccacccgaccatgatattgaatttgccatcgagttgcaaccaggaatgacaccaatttccaagaggccctactgaatgccacccgctgagttggcagaattgaagaagcaattgtaggagttgctggataagggatttattcgcccaagtacttagccttggggatgtccagcactgtttgtgaagaagaaggatgaaagcttgaggctgtgtatagattaccgccctcttaatgcggtgactatcaagagcaagtattctttgcctcgtattgatgttctttttgaccagttggtcggggccaatgtgttttccaagatagaccttcgctccggctaccatcagatcaagatacgagcaagcgatattctgaagacgacattctcaaccagatatgggttatatgaattcttggtgatgtctttcgggctgactaatgcaccagcatatttcatgtatctgatgaattctgttttcatgcctgaattggataaattcgtagtggtgttcatcgatgatatcttggtgtactctaagaacgaagaagaacatgtcgggcatttgcatgtagtacttcaacgtctgcgagagcaccacctttatgccaagttgtcaaagtgtgatttttggctaaaggaaatcaaattcttgggtcacactatctctcaggcaggaatagctgttgatcctgataaggtgcaagaggtgatgaactggaagccaccaacgactgtccgtcagattcggagttttctgggattagctggttattatcgaatatttattctggatttctctcgaattgcgaagcctataactaagctgctgaagaaagaagccaagtttgtttggagtcagaagtgcgaagatgccttccatgcattaaggaagcatctgaccacagcaccagtattagcgcaacccgacaacagcaagccttttgatgtgtattgtgatgcctctggcactggactaggttgtgtcttaatgcaagacaaccaagttattgcttatgcctcaagagcactcaggcctcatgagcaaaattatcccactcatgaccttgagttggcagcagtgattcatgcattaaaaatgtggagacactatttaatgggaacccactgcaacatcttcactgatcataagagccttaaatacatctttactcaggcggatctcaacatgaggcagagaagatggctagagctgatcaaggattatgacctggaggtacattatcacccagggaaagccaatgtggtagcagatgccttgagtcagaagttgcaatgcaattgtattctgatggattctcgcatcaacaccttgtgtgatgagttgagcaagatgcaaatagaagtgattccttctggtgctttgtctcacatttctgtcgagtcagctttgcaagaccatatcatcatagcccagctcagtgacaagggagtgcatattatcaaggagaatctccatcagaaggttgagaagtataagtgtttctgccaagatgaaaagggtgtattatggttcaaaagtagattggtgattcctaaaaacaaggacctcaagaagaaaatcttggacgaggctcatctctccaaattctctatgcatccgggaagcaccaaaatgtaccatgatctaaagcctttgtattggtggaccagaatgaagagggagatagcccagtatgtatcggaatgtgacacctgtcagagggtaaaggcaagccacttgaaatcagctggagctttgcaacccctatctatacctttgtggaaatgggatgacatcagcatggatttcatcgtgggtctgcccaacacctctcgtcatcatgattcgatttgggttattgtggaccgactgacgaaagtggcacattttctccctgtgcacaccactgataaggctcaaaagtatgcagagttgtacattgaccggatcgtgtgtctgcacggattacctcggaccattgtttctgaccgaggagcccaatttgttgccagattttgggaacaactgcaggagtctttgggaaccaagctaatcagaagtttagcttaccacccatagactgatggtcaaacggaaagggtaaaccaaattctggaggatatgctgagagcttgtgcaatcggttgtggcaagaactgggataagcacctctccttggcagagtttgcttataacaacagttatcaatccagcctaaggatggcacctttcgaagctctctatggaagaaggtgcaggacaccactcaattggtctcagcctggagaaagagaagttttcggacctgacttagtgactgaagccaaatggaaggtcaaactaatcaggaaaaatctagaagctgctcaggccaggcagaagagtaaccatgataaaagaaggaaacctctccagttcaaggtgggagatttcgtgtatctcaaggtatcacccaccaagggagtgcagaggtttggaatcaaagtcaagctagcccctcgttacattggaccttatgagatcataaaagcttgtggacccgtggcattaagctgaagttacgttcaaaaatgtctgccattcacagtgtgttccatgtatctcagctgaagaagtgtgttcgattgccgaccgagatcatagcagagccagaattggagatagagccagatctatcgtaccaagagtacccttccaagattctggattgcaaagaaagatcaactcgggctaaatcgatcaaaatgtacaaggtccagtggagtaatcactcagaggaagaagctacttgggagactgaggaattcttgagatccaactttcccgattgcctacctaaggaaactggtacgtaatcacacccaacccctcctcctgcccttcgaatctaaaattcagaaatatgatcttaaatcaaaatgaagtaatcatggaacaaaatttaaaaaggacttccttctaaagttgcaaagggaatgacattcgaagagcagtttgccctaataataacaataagcacccacttcctataagtctcacccttcgcttcaccccgggaggactctgacccgaatctcaggacgagattcctttaaggggcgaaggctgtgacaccccagtgtcacctagggtttctctcaagtgctaacccaagaaccatcatcttatgtgaaccaaaattgagcatgaacatcaaattgacttaagaataaaggatccactaagcttatacttaaaagtatcatgttcaaaacaaatgggtttttcaaaaaggcaaaatgtgcaaccccaataaaaaccctaatggagccctataaacaaaattcaagagaaagggcaaaagagtgtgaagaacatagaatcatggcttgggccaattataaacattaaagtatactaaataagcaacaacaaagattatggaagcttggccaaaacaatttaaataaaaccctaaacaagcctctcaggtgggatttcattagggaattctgaaatttagaattctgaattttagaccttgagccaaagatcaagcgtgttcaccttgatccctaactcaaatcctaatggtcccattgacaaaaacatgcataactaacctctctgtcttgtgccagaagatggcatcgggacgagtgccttggacacgtcaaaccagagatcttctccctgtgtgcgacaatgagacaaaatagatttctcccctctctatctcctaatccagtcagccaaacctgctagcctccacacataaacgacaaaggaacctgagaggaagagatctctcaatgggatcatggccataatctcaaagatttggggccaatccgcgcttgaactcgacctctctctgcgctgcctcgtgctcgacgctgtgccagacgctagagcacgcactggtgttcgccgcgcacgccccgagcgcttgtcagagccctgccctcggccgtgcttgcccgcgcctataaagcctcctcgggcgcgcctcacttcaccccgtgctcaccatcgccggccagacacccctccttagctccggcgagctcctttccgcccgccattgccgccagagcttcggccaccgtggccagcccattccagtcacccccaagtcgcgccagcgcttcggttagctccgccattggcccgtgaagctttataagccctcggacctggcagaacttcaccggaaggcgaagatcgacctcactggacttcggccgcccgcctgcgcgcgtagactgggcactccggtgagccattcttcaattcctcgtgcacacaccttccttgatccctggtgaagctctctgacccgtttgattggtcaattgtgccctggataggccggactcctcgccaccgacgagctcccccgcctgcgcacgcggaccggccaactccgaccatccctaacggcgaccctcacatcgtcgtgaccctcagaacctcccctacaccctcgaccacctcatcggagcaatctcgccgccggtaagcccctccgacctttcttccgctgcgggtactatttaatttgggggaaggacctcgggttaggattagaagaatccagggggttttctgagatgtcagtgactcaattgaataatatcccagggactagtctgtaaggaaaacttaaaacacccgccagggaccccgctgcaaagtagttttccatttaatcatttctgtttaatctttttaatgaacagagaacttagaaaattcataacttgatgaatacttaaccaaaagttgtcaaaccaattttgctcaattctaaatattatgaactatcaattaaaaatactgaaccctatgctttctgttctaatttttagagtttacaattaaatacagaaactgaccaaaccttatttaattaaggaaaattagttatgctcctgtgctgaacctaagaaaatttatagatgttcaaaccccatttaaacactatttaaaaataatgagaacccagtattgaaaattttagtatagatatccattaaaagccatttctgcccaaaccttaggaaaatcagaaaggccttagaaattaatgaccagtggatgaaattatttttcctagtttgcttaagtaacaaagaacctaggaaaataaaggaacctctattccagatcagattcaaagtgaaatgttttaattagcattattccaactagaaatcaattattagaattacaaaaccagacccaaaattgataataaaaatccaatgcacttgtaaccaccaaaaccccactgcaaaaataataaacaccccagcccatcattttaagtagggtaaataaatagaacatgataatgagccataattcaattaaatcatgagtaacccacaaataatgcaataatgggcaaataaaattttgctaggccaataatgagataggccaccagagaaaaatacaaacccattggaaatatgcaaaataatacctattgccaatattttataagaaaggccatttaattcaattaatgcataccaccccttcccttaagcaaaaagatgccaaacttcagaatgattgctcttgcgcaaagaagaaactaggaaaaatcagaaatttgttgtttgatatttttcaaatatagtggtagtagaaagcacccctttggctagaaactttagaaaatcctagtaaaataactaataagtattaatggctagaaatttgtaccaagtcatgttatagcatctaaatgccagcaaaaataagtcctagagaattacctactattaaatgatagttgtagttcaaatcaccccttctgccccaaaaatttggtaattttgtccagagaaaactattcactttttgaaccccaaatttttagacagataattatacaccagtaataagccactgtaatttttgcagaatttttagaaatttattaaggtgacttgtagttcaaacccactccaaaaacttaaagagaataaagaaaaagaaaggagaaataaacctcactccaataagtccaacttgagttcttgacaattctcactaaagaccttaaaaagaattcagtggaaccccaaaaataaacctaccacttaacttagctaaatccaatttaccaagtataccaccaaaattctcgtataagcaagacttagctctatctaactcgagtagatcatacaccatcaaaagtttaaattactaaagcacatatcatatcatgcatatatcttacgcattgcattcattagattgtaatctcaccgacggagaatacgtgctcatccccgagcaaggaactgtccaagaggaggaccaggagcaagctcccgaggctgctatcgaggatctccccgcagcccgagctattgaaggcaagccccggtttatatgcataaccgtattatattatgctagtttactacacttaatgcttgtaggattgtaatgtgcacttaagtgtaggagttgcttgaaacctctagttgcatgaacttaggattcctttttgagatgaatactagtatgctaggtcgagtagctgcttgctaatcaggatctcggtagaagtcgagtgatttttctagcactcgcgcgagatcaggaattgattgtattcatcttgataacgggatctatgttagtctatggacttgcactacaagaaactgataaatgttcgtgggtaaaattaagaacgtgggtacacacgttcttacttgagttaagttcatgggttacgttaagaacgtgggtacccacgttcttaagttaagttcgtgggtcctgtataaaaccgtcgaacttaacgagttaggaacgtgggtacccacgttcttaagttaagttcgtcgggcgtttggacaccgtcgaacttaattatgaaaacctaaataaaaaatcccacacgctctctctctctcacgccctgtctcttcccgtccacgcgctcctctctatcacccgcgccaggccgcgccgccgccttgccaccgccggcagcccgcgctgccgcggcgccaccgtgagggagccgcgccaccgtgagcgggacgcgccgccgccgcgcccccaagagctgtccgcgtcgccgccgctcccccaagagttgtccgcgccgccgccaagccctagcgagtggtccgggcgccgtctcgccgccgcgccccagcgagcgggccgcacagccgccacgccaccgcgctgtcggcccggctagcaacccccaaccgctcggcctcacctgtcctgccggcgcgcagcttcagcgcactgcaggctctgtagcagctccagctcgggcgctcggctgcgggctgctccgctgttgcctgctcgcttgctgatgctggctgctcccgcctggccgtctccctgctgcttgctctcgtgcttcgctactcagtgctcgctctccagcctccagctcaagtgctcggcggtgagtatttaaattattgaatatagtctagttcattagttcactgcgcagcacaattccaaatccaatttatttgattatgcgtgtgaatagaaacaaatcaacgtgtctaatccattagatttttaatgtgcagattttctaatttctaaaaagcaatattggatagaaacaagacacgctaaggttatgtatggcaagctgaaagagatttcaatcactagcttatcaatgcataattttcttctgtatttatttgcatatctgatattatatggttaccatatggtaataattgcaggacaaactaagaaaagcacttgctgaacctgtgga

SEQ ID NO: 1204 - DNA, 3831 bp, Zea mays
  Intron number 5 from transcript GRMZM5G846875_T01 (locus G RMZM5G846875) derived from phytozome v7.0 (chr-ID 1; pos 2 72738741 to 272742571 reverse strand)
ggcaacttgtgcatcgggctactcttcaccaacaggtaccctcatcctcccccttcttgtggctcttgatttcgtgttttcaactcgtctctgtggtttgttcttgcaaaatctcataacacatggtcacaaatacactgacatcaatctgtcatgacatgcctttatttgctagacaaagatcgttttatcccatgtgtttgcagagcgggcagcctgcctcccgctgacaacagccacagcagtagtgcactgtgcactgtgctttttcactgtcaccgagcttgctcaacgactgagtcatctacaattgagtgaccaaataaaatcagtaaaattgcaaaagggcattacatccatatttttagataaaacatgttaccaaagacattattgtattcaggcgttaaacaacatgtatcttgcagatttaccattatccaggcttaatctttactactctataagagagcaaagtaggcgtccacctgcttcaccgtgcctccgctcccgtgattcgcgtgcccccgcccccgtgatccatcttcgcccgatgcccgcatgtgctccttcgtcctcgcccgtcgtccttccgtcgtcctcccccgtgattcatctttgcccgcatgtgctccttcgtcctcgcccgcgccaccacacctcccccgaaacctcgccgccacccctccacacgctccttatcacccacatcctgcctccctcatctccagttcttctctcgcctcctctgtacacacctcgccgcagggtgcgtcctcaagctcgatccctccccggcctgttcgtcgtgacctctcgcattgccggcaacgacgctggctcccccgcgcaccgcatcctcatcatcccgagcctcgccacagggtccttgtcctaaggctgcatcctctcatcgctctcctcccgcggcgtccacaccgtggctctcgacctccccggccaaggcctctctccatcgccgccctctatgcccggacaagcgcgctccatgtcatcatgaactacgacatcttccacgcatgtgcggtctccttcctcgcccccgctcaagcccaagcccacagcagcaccgctcccgacgcccctccccccgccctcgagccccgagacattgtcctgcccccacccgccacacccgcctcccgagcatcgaggtggtggtcgaatcgacaaaggtcatgtccccgccgctcgcctcctcgccagctccatccgcccctcgcaaccctctggcctcgcccagccgagctccctcctactcgtcgcctcgtctagggccagggtcgttgtctctgccctacgggcactgaagcccctccgtggtgccactcagcgcccccatcgaccaatagtgttcctataaagctaatcagaaagatgtaaattctgaacggaggctgtctttggagatccgggttcacagggagcgctggtacgtgcttagtttatacatttattatgtagtttacctttgagagaatcatgtccctcctttttgctacttaatattaggttcatgttattttggtattgttagatacttagattggcccttaaggcaaaatcgtgtgtttgtgatacatgatgtgtggaagcagttaggcagttcaattaggcacaagttttttacctaaaaaagttagcccttagcgcgatgtgacaagctacgattgtgcatttgtgcttcttccatgttgttctcgataatttagctctcccacaatgaagcactgcaaattattagattcttgtggcagtgtccacaatggggcttgtgatttctgcagtgtgaactgattccacatttctactagcttttgagttgcagaaattacaggtcaactaatacaacaaggtttatatgaagcttaaacagcctcataaaaaatccattgtaggcttgtatacaaattaatgccgcttgtgaactgattccaaaattcttgccacttgtttgctaactgctctggactcaaagttactgctgcagtaatggtcaaactctttacacgacaacaccacttgcatgtatataaataggatcaatctatttttgatacggcactgttattgatttttttgcatgctactctgattgggccctgatggtatccctatcgaggtatggagatgtcttggagacatagcgatagtatggctgactaagcttttcaacaccatctttcgggcaaacagaatgcccgacgagtggcggcggagtacattagtaccaatcttcaagaacaaaggagatgttcaaagttgtactaattaccgtggaattaagctcatgagccatacaatgaagctatgggagagagtcattgaacaccgcctgcgaaagatgacgagcgtgacccaaaatcagtttggtttcatgcccgggagatcaactatggaggccattttcttactaagacaacttatggagagattcagagaacaaaagaaagacctgcatatggtcttcatagacttggagaaggcttatgacaaagtacctaggagtgtaatgtggtgggccttggaaaaacacaaagtagcaacaaagtacattaatcttattaaagatatgtacactaatgttgtgacaagtgtccgaacaagtgatggagacaccgatgactttccaattaacataggactacatcaagggtcggctttgagcccttatcttttcgctttggtgatagatgaggtcacaagggacatacaaggagttttaccgtggtgtatgctttttgccgatgatgtggtacttattgaggagagtaggagtggtgtttctcaaaagttggaattgtggaggcagacgctggaagcaaaaggttttaggcttagtaggtctaaaacagagtatatgaagtgtgatttcagtgccatggggtatgaggatgacgatgttagtcttgatgggcaagtggtacccaagaaagacacttttcgttacttaggatcaatgcttcaaaaggagggagacatcgatgaggatgtcagtcatagaattaaagccggatggttgaagtggcgacaagctgcgggtgtcttatgcgaccaccgggtgccacgcaaactaaaaggcaaattctacaggacagcaatccggccggctatgttgtatggagcagaatgttggcccactaaaagacgacatgtccaacaactaagtgtggcagagatgcgtatgttgcgctggatatgtggccacacaaggagagatcgagtccggaatgatgatatacgagagagagtaggagtggcgccaattgaggagaagcttatgcaacatcgcttgagatggtttggacatatccaacgaagacctgaagaggcaccagtgcatatcggaataattaggcgtcccgaaaatgtgaagagaggtagaggtcgaccaactttgacgtggacagaggctgtgaagagagacctgaaggagtggaatattgacaaagagctcgccgcagataggaaggggtggaagtgtgcaattcacgtgccagaaccctgattgatagtttcgcttttcctccttaatcgtttgaccttttcttgtgtccattttagatcttgctggtcattgtgggttttatctcttttatgtgtttccctgtttcgttgttttcggttctcctttgcctttgtttcccttttctgttctttgggggttgagctctgaggttttcatatggggtttcatctctagcctaccccaacgtgcttgggacaaaaaggctttgttgttgttgttgttgttgttgtactctgatttggtcagaaaaccatcactgagaaagagcagttagcaagtgg

SEQ ID NO: 1205 - DNA, 439 bp, Zea mays
  Intron number 7 from transcript GRMZM2G472171_T02 (locus G RMZM2G472171) derived from phytozome v7.0 (chr-ID 1; pos 2 75775379 to 275775817 reverse strand)
caggtaaacttattttagcagtgcaactaattataggaagacagaactctagttagccccaaccattttttaggatttattgtccgtccaaaaatctcagctggttgctgatacttttgcctttggtgttttatgtaattcttagaaatttcagctctgtagatggtacagaaatttgggatcatatatgccaaatctgtatgaaaatatcctgcacatcattttttatagaaattgccatgtatagcccctttggttgacacctatgctagtctcggtgctgtaaaaatgactaatcttcgtgttatttgtgatcccgcacaatttaagttatgacataaagttggttggcattgggacatgttgttcaatttgttctgtgtgcgtgattgggttattttcttggtatgtaacgcaggagagaattccccaaccacca

SEQ ID NO: 1206 - DNA, 13181 bp, Zea mays
  Intron number 1 from transcript GRMZM2G008558_T01 (locus G RMZM2G008558) derived from phytozome v7.0 (chr-ID 6; pos 1 09600581 to 109613761 reverse strand)
ccatcaaaggcctagggccttagcttgggtacagattttatcattctctgttatctgtgggagagatcgatttatttctgctgtttcaattgcttggactaattaggctgctcttttgcttatcatcagtttacaattggatcagggtgcaaatgctgttaaacttacatcggaaattggcatgcactatggattattaatttgcggatttagttatcgaaaagaatcatgcttgtttgatttacataagtcatgaggtttgattgtgttgacaatttagtatctttcccgtcctctagcctcatggcataatagccaatttttgtctcaaagtgcacaaaattatgaaatttgacatacttttaagaagttaggctatgtcattcgttttttacatttaccatgcaatgtttgtagcatgatttttgtttgaaggaaaattagcggttttcttccagattttttcttttttttggagtcttatggttattgactaaattttcattttcatagttacaccgtgcttatcttgtcttttcttcgcaaggattatctagtcttcttttgattacatagtggaactgtttggttgtttttgttccttccagaatctaaagctctagctttcttagtaaaataggccaggacatattcatatatatggcaagtgtttgtttctgcaactattgaggtcaagtttctgtatcacaatattagtgttcagaatagttgtcaatcttctagagttcagcttgccatgccatggataattgggttgcattttttattcataacgagtttatcgttgaataagccacaaggttatgcttaaattagttggttgccatgctccctcatcttttttattcattcaaaaagtaaacgggttgcatgcctgtctggtttactcttgttgagtagaattgtgtttgtagtttggtttctttctcatcccagttctaccatctactgtaaactagctgttttatttctgagtgcccaataagactagcacattttcataacttttatgtggtagcttatatgcttgaatacctgctacgtttaatgtgtttcattgcatattaacacattgaatattttttatgtgttttttttgaaatgatagcatgcttgttgtgattattctacttaacatgtggaattatctttgcagtttgctttatttcccttcccagttttaccctcgatggcaaaaccaccattcttaaccagaaaagtttattaattactattttggcatggtattggtaggacatgttaggtattggattgatgactcaaaccaatgtttttaacatggtacattattattgtttttactaataaaggcgatacttcttttttttgaacgcaataaaaggtgatacttctagcataatcagttttaaaaaatttgctaggtgccagttaggtgatttggtggtgtgtagtaggtggatgttaggtagtctatatggataagcagaatattgtacttataattggattttcagcaagttagcatgcaatcaatatgaataacaaagaattcaatgagctaaattggcacaagtttcataattaattgaagtcaaagagtgaaactcatctgtgtattttttttccaaccaagcacgaatacttcaagccaacaatctattcttgatctggttgcagtgtttgaaagaactagtcaagtatgcatatctaatatgttgtatacgactatacatgttagtatagaaaggtattggggaatcactacacacccattattggggggggattcttttcatatatatagccatgcataggggtggtacatgagatcatacatgaacaagcacatttgttgaacatcatatgctaagtcaggccgcgttagggtgaggtattggagagcactgacaaggctgtagtactcagaagggttaacaatcagtgagcctgcggtggcaggcaacttggcctgcttgcccataggcctggcaatggggtcatattctgacataccagcacgctgaccgcgacaagaaaaaccttgagttgttgcgcatcacggatatggcgaggaagcggtggagggtgccaagatatgtcatggtgaacttcgagtggagacatgtcgtgatgggttggagtagatcactagaagatgctgtgagaatgatgttattgttattgacaaagagtaggtatgcgacacgatctctgttttttagacaaacaaagctgtgttagacttggaccgttggacgtagtgaagccgatgttgtaaatgtatatgttgaagcgttggttccaagcccaggacacctgcttgagcccatacaaggacttctgcatgagaccgacatagttaggcgtggcaggtcgatgaaatcggacgattgctgtcagtagatggcctccttgaggtggccgtggaggaaggtgttcttcatgtccaggcctccagctaatgaatagggcggtgcgaatctgttagactacccatctaggattctagggttcggggtgttccccatgtaattaccgccttacccctcactgtaatgggtctggcccagttactaagtctgttaatactactccccatccctggttaggggcatgggttcagtttccaacatggtatcaaagcctaggtttaggttttctgtttcctgtcctacagccgccaggggcatcctctcccctgcgcagccgccagggggctcccctcccctgcagccgccggcccccgccgccggcccctctccctcctctcccctgcgacgtccgcgcctctccctcctctcccctgcgtcggccaccggcccccagccaacgtccgcgcctctccctcatctcccctgcgacggccgccggtctccagccgccgaccgtcgcgcgccgagcagccccgtccacgccatctctgcttcccacctctccccggccgcgccctccatctccggcgtgctcacccgccggatccgcgcgtctgtcaagtgccagctgccgcccagcctgcgcgccctgtcaagtgccagccgcgcctctcctccctgcgggtcgcgccccagcctgcgcgccctcctccccctctgcagccctctgctgcccgccgccgcgccctctgcccatggcggacccccccgcacaccgtgggcctgggcgcggcccccgcttccctggccgccggcgtcacctccctgggccttcctgctaccggccagacccaccccatgggccccggccgctccgtggccgatgccgaggctccctacatcgtcggcctacgacccatccgcgacgtctcttccccggcccaccgtcgaggctctccatcggggtttcctgccctcgcggcaccccccggtaccgactccacactcggcgacaccctcgctacgatccaggcggctgtgatggcctcgcgggagcgtgagcgcgccgcctccctcgccctggagcgtgagcgtgccctgggtgccgctctgaccacccagatggccaccacgcagcgcctcctcggccgcccaccggtcgcccctgtggaacccccggaggaccccctcgcctctgacctcgacgccgacctcatcgctgctctccacgctcaagccgcaggtctgcacaacatccgggctctcgtgtccgtggtgttggatccggcgtctccccactacccccgttggcgaggacaagtccttctcacgctgcggaggttcgtcctcgacgaccacgtcctcatcgaccacgacgctccgccgcctcgcccctggtgcctcatggacaacgttgtcctctcgtggctccacggcaccatcaccgttgagctccaggacatcatccgcgaccaggcggacactgcgcgccaggcgtggctcgctctcgaggatcagttcctcgggaatcgggatgcgcgggcgctccacctcgacgcccagttccacctgttctctcagggggacctctccgtgggtgaatattgccgccagatgaagggcctggctgactctctccgtgatctcggcgagccagttgccgatcgtaccctggtgctgaacctcctgcgtggcctcagccctcgctacggccacctgaaggctctcatcaagcgaagcgtgcccttccccaccttccacgccgtgtggaacgagcttctccttgaggagctcaccatggcgaatgaggcacccactcctgcctcggctctctacagcacccctaccagcggtctgccaccttcagggggccaggccacccgtcctccgtcgaccggggctcccacccgccctccacccgccgtcccggcggcccctcgtccgacttccacgaccgacgggggtcgtcgctcccgcaagggcggccgtgggagtggcggctcctctcgtggtggtccctccggccggggtggcggccacgcgtggccgtcattctacaacccctggaccgggaccatcgccatgtggccgggccaggcaccgagtgcctcccgtcctccggcgccggctctcctgactgcacctcactacggcgcgcctccttacggtgtccccgtcgtgccccaggccccgcccgcgctcctgcccccggggacccacacctcgacgccttggtccctgccggccggtgggtgggacaacgcctccctcgctgctgccttcagcaccatggcgatgaccccacccccctccgactgggtgatcgacttcggtgcctcgtaccacaccactcccacaacatgcacgctctctcgctctcatccccctctcccctctcacccatcctcgatcgtcgttggaaacggttccactctgccagtcacctcagtaggtgcctcggttctccctgggccgttttacctcaacgatgttctcgtagctccccacatcactcacaatcttctttctgttcgtcgattcaccactgacaactcctgttcccttgagtttgacccctctggtttttctgtgaaggatctggccaccaggacccttctcgcccgctgtgacagctcggggccgctctacacactccagccctccaccgccggcgtgtctccaccccctgtcctggtctccaccacctcctccaccacatggcatcgtcgtctcggccatcgtggacccgacgtcatgaccaagattaccagtagtctagatccttcatgtagtaggggacattttgagggtctctgtcatgcttgtcagttaggccgacatactcgtctcccatttactacttcttctcgggctgagcaggcttttgacctggttcactgtgatctttggacctctcctgtactcagtctttctggttataaatactatttggtgattttggatgatttttcccattttctctggaccttcccgcttcggttgaagtcggacacattcaccaccctcacacacttcttcacctgggtatccactcagtttcgtcgcccggtccgtgctctgcagtgtgacaatggccgcgagttcgataacaacgcctctcgctctttcttcctcactcatggcgtccagttgcgtctctcgtgcccctacacctctgcacagaacggccgagccgaacacatgatccgcaccaccactaatatgctccgctgcctcctcttccaggcgtctctccctgccagctgctgggcagaggccctgcacactgccacccacctcctcaaccgtcttccctcgaaggcggtgcgccaccctacccctcacttcgccctatacggcacagccccttcctatgaccaccttcgcgtgttcggctgtgcctgctaccctaacacttccgctaccgctccacataagctttctcctcgctccacccgctgtctattccttggctactcccctgaccacaaggggtaccggtgtctggacctcacctcccaccgcatcatcatctctcgtcatgtcatcttcgacgaagatgtgtttccccttgctggctccaccccacccaccgatcttgactccctcctcgagttcgatccgattcctcacccacctccggctccccgtcttgcgtcgttacctgctcctcgtgcagccactacgacctcttccgcgccacacgcggccccgtcgaccccgcctgcgccacgcgcggccccgtcgatcccgcctgcgccacgcgcggccccgtcgaccccgcctgcgccacgctcggccccgtcgactccggctcgcttcgccaaccccgcactcgtctaccatcgccgcggccacgccactacctcggcgcccctcgactcgggcccgtcgacgagcgcggcccggttcgccgaacctgccgtcgtctatctccgccgcgagccggccccaccatccactcccgacgttccggcggttcactccgagtcgtctgtttaccacccggtcgccatccaccgcgaccccgggcacgtccacccgatggtgactcggcgcgctgctggcgttctccgccccgtcgaccggctaatcctggcagctgctacgtctggcactccacccgacgcttccccggtaccctcctccgttcgcaccgccctcgccgacccacattggcgtcgtgctatggaggagtacgcggccctcttggccaaccacacctgggacctggtgccgcgtcctccaggcaccaacgtggtcaccggcaagtggctatttcgccacaagctgacctcggacgactccctcgatcgctacaaggcccgttgggtccttcggggcttcacccagcgccccggagtggactacgacgagaccttcagccctgtcgtcaagttcgccactattcgcgccgtcctctccctctcccgcgactgggcgatccatcagctcgatgtcaagaatgccttcctccatggcactctgacggagactgtctactgcagccagcccaccggcttcgtcgacgctgaccgtccggatctggtctgccggctgaataggtccctgtacggcctcaagcaggcgccacgggcttggtacagtcgcttcgcctcctacctggcctccatcggcttcgtcgaggccaagtcggacacgtccctgttcatctaccggcgcggcgacgacaccgtctacctcctgctctacgtcgacgacattgtgctcacggcatccaccgccgaccttctacaccgcacgatcgtcgcccttcagcgggagtttgcgatgaaggacctggggcccctacaccacttcctcggcatcaccgccgaacgtcggcctcagagtctcttcctccaccagcgccagtacgtcatcgacatcctggagcgggctggcatgtctgactgcaagccctgctccacgcctgtcgacactcaggcgaagctctctgaggacgacgggcctccggtcgccgtctccctcttcttcttttttccgtctatgtataagtataaggctctttcgaagcggaatgtattctgctaatgtgcaccacggcacggagtttagatgaaatcccggtggacctttgggctgctttatctcattccactgcagaattgggggttcacaagaactttgacatctttccgcgagagctggcagatcatccactcttcattgaaaagtgcgtaaattgcctacctagttttaaaattaattagaaaatgagtgtcacagcagtagcttttaagatagatggtagccatgaataaggatataaatgagaggagtgagtgtgaggagaacttcccatttgctgttcttagaccctgtaataaaaactttggaagcttcctaggagcgagtcagcaatttcgctcgttttcctggtatccagactttcatagtaggtctcgtagccaatatccctaccagacaatccaaaatggaaccttagagtgctttacccgtgacctttcttgttgctccctgggcaaatagaaactatatctttttctataaatacttttcaaggaagtcagtatcagaccatatgtagttctcgtctcgagggtcttacttcctttttcccggaccaaagaaaagagataatttattagccttctcacatggacataaagacacgagttaatcattcgcatgcagcctcacataaacaacaaataacaagcgcatgcagcctcacataaacaacaaataacaacgcgcacaagcttaacactcatatattttttagataatatggacataagattcccctcttacccctaactaacgattatgctgctctcgtcctgtttttccatacttcccgcagcgcaagaaaaagaaaaactagaaataggaacaaaccgagaccgagagcgagagcgagagggtgaatgccaaattgatccaaaggactctccgctaaatgacgcgacgtcataccggagcctcaccggcgcgctccagtacctcacgttctccaggcccgacatcgcttacgccgtccagcaggtgtgcctgcatatgcacactccgcgggagccccatctcactgcgctcaagcggattttgcgctacctccgcggctccctcgactacggcctcctactccgcccatccccgacgtcggagctcgtggtctacaccgacgctgactggactggctgtcccgacacgcgccggtccacctccggctacgccgtgttcctgggcgccaacctcgtctcttgggccgccaagaggcagcccgtcgtctctcgctccagcgctgaggccgagtaccgtgtcgtggccaacggtgtggcagaggcctcctggctgcgccagctcctccacgagctccacagtcctcttcagcgcgccaccactcgtctactgcgacaacgtcagtgcggtctacctctccaccaaccccgtgcaacatcagcgcacgaagcacgtagagatcgacctacacttcgtccgcgagcgtgtcgctgccggtgacgttcgggttctcagcgtccccaccacgctgcagttcgccgacatcttcaccaagggactaccgtcgagtgtattcttagactttcgatccagtctcaacatctgtacaggatagagttgtgactgcggggggtgttagactacccatctaggattctagggttcggggtgttccccatgtaattactgcattacccctcactgtaatgggcttggcccaattactaagtctattaatactactccccatccctggttaggggcatgggttcagtttccaacagaatcgttgcctattggacaatcgggttgaacatctcgccagagttgacattggcctgctctgcaggtctgggacttcgtcaacgagcatgaaagggtggtgtcactgatggtgcagatgacacatgtatcctaatagttttatgtgcacaactatagttcaagttgtgtaggtaactgcatcaatcatgtttaggcatttggaggttctacttgtgtgggagaatccttaaggcatcatacctttgtggtttttaaataaaaaaaatggactttgtgcttgtatgttgccttgggttctccctgacggacaatcttggcttagacatttgattttgaaaggttgctaattggttggactctgcaacattgaaaagacaaggcaaactatattatggttgacatgtattctattccgttgacaattatggcgtgccctctgtacggcagtcaaccatctagtttgttttcttgacatgtcatctattccatgggaaattatggatgccctctattgtatggcagtcaaccatccagtttgttttcttaatggattcacaatagacccgctgtctccacattttggcagctcaccttttggtctctaccacttattatctgagttgccaaatgcagggagttccatcctccataatatttagataagtcacatggctgtgatttctccctccttgttgtgtgtgttgtctccttttgtactctttgtttgatgtggggttggctgtggtggagaatgagatcagtgacaattgattccctattttatttatcggataagtgtaaacagtgccttgtgaataatgcgtagattggtttggtttcttagggaagaaataagttaggttgatttggttaggataaggaaagagatatgttagattgattggttaggataaggaatagataacttaaattgatttggttagttaggataagaaaagagataagttgagtaatttggttaggagattttcttagggcttgtttggttaaaacttaagggttgatttggtgacaaggggatcacggagggattggaggggatcgaggggaaatgaacaattttcccctcaatcccctccaatccccccgtgatccctggtcaccaaattagccctaaaaggggactggaggggattgagggggaaattagttcatttctccctcaataccctccaattctcttctaaccaaacaagcccttaggggccaaataagcccctctatataaagagaggagatgcatcaatctaaggaagcaagaattaagaaggaaaacccttccctgttgcgtggtcgtgggtaaggccccggccggccctctcgtgcccctcaaccttagccgcggtctgtttggcctggttatctccatgcaaagccatctcatctgtaatgcccatcccatgagggggcattttgacctacctgcaaatccgcatttccatggttttggtgtagctaagccagttggttgtactcttctttcattttatcatgtattgctactttggcttgccctgttcagcaaattctaactatatgccattggtgaggtctgaactccgaaccaagttcctctttactgcctgggaaatctttagatacttcaacacttccccctttatctagagaatatcatttttacagcatccataatgtgggcagtacttcctctcgagaacatttggatcttagtaactaggttctcggatcgatgggatcgaggaacgggaacgtggtacgtggtacacttctaaaactaggatttaacactatgggaacgagattgttcccacgtttccgaaacgaggaacatggccatgttcccagttctcggtttctaagatttggatttccatgcctgtctagattaagctttgtgtggagttgtgctttgttcacctttctctgatccaaaacaaaacatgaccataaatacaatcgcccttaggccgaaacaatcgcaaacatggaattagaggaatgcaggaatgcactcaaatggaggacaaaccataaatcaaccgattgccgtgggatcacaacttatggctgaaggaatctgatgcactgcatgtcgccacaccagaaaggagtcattgcgtaattgacggcatcaaagaagactagcctctgatatcacctgccacactcatggttgctgttgagatcaatctgacgatgtgagtagccaaaaaaaaaagacatgaaatcagaggctagatgatctagatacacgaggaagaaaccttcctttcctgtctgttctgtttctttaatttctctatattctttctttttgctctcaccgtccagactcttggaacatatacacatgtcttccacctgggtcccatggatggttgtccccttgtcaattaaagcaatgggcaccttgctcttcatcatgggtgttacactggggtattacatgtagagcatctagtatttattgaatgctgaaaaagaaaaaaagtattacatgtagggcaagtagccaaaaggatagatccacttccggaggttcttacatgattggggttgtggtcttgggaagggatacattgaggcaagccttcccgcaaacgtgaagaggctgcttcgaacctgcggtctcggtgagacagctctcaccactgcaccaggcttgaagacgttcaaaataatggattatatgggaactttgggcctgttttgtaccgaccttggccattctgcctgatccatgcagaaaatctaggctttggatttcagacgcctagggctggatttgctgtctgttccaggttgcctggtcagcagagaatcaggtagaatctgataggagatatcaagtactaaaggaaacaatgtttttattataaaaaacagtgataacacaattgtttttcaggaatctttcagtgtaatgttctggtagcttccagttagcagtcatggaattttcctaaatctttgaattgagccttaactagtgcggtactccatctgaaagcatttgcggataattttagcaacatgggtatctttttcctttttggatgggtaaccatggggtttctaaaagcacctgaatttgtctctataccaaatgagctagtattgatttgctacatgaataagtctggaggatatctggtggctaaagcaaggttgcatgacacttgtttttgtggtgcattttgttgtgctttttgctgatcattctttcattggttctgcataaccttgcattgttgcatcatttgttgcttgattttgttgcccctttgattagtaaccattttctagatgaaactttataagacgatcacttcttttagttaaaacttgtgctgctgtgacttctgattgacaaaagctgccattttggcctacttagtttctataaatttctacaaatcatagcaattttgtgtttcagggaaaaaatctgtagtacatttcacatgcttcagtaaaaccgttagcaaaaaagggtggtttttattagagccttttcttggagtaatttttattacccaaaaggcaaaaaccaaattagtgatgatcacatgcttgaataaggctcaatggaaacaaaatttgctgcttccatatgctacaacattcgttgcgagtagtgacaaacacgatacatgcactcttagttatgttatgattttttaagagcctaagggcttgttcgtttaggagtggagaaggggattggaggggaataaatcccttcgtagtcaaaattaaatatgaagggatttaatccacctcaattccctccgatccaaggtctaattaagatcttttattttctgtactcaattcccttcaatactctatactggcattttattttctgttaccaactgtagtgaaaacaactcgttcaaagcctgtattcagataatcctagctatacctttggaatatttgcataattctgattgtatgaaagtaagaaaccgtttacctgctactaaagctaaatttcttttgcag

SEQ ID NO: 1207 - DNA, 17000 bp, Zea mays
  Intron number 3 from transcript AC212332.2_FGT001 (locus A C212332.2_FG001) derived from phytozome v7.0 (chr-ID 4; po s 203838336 to 203855335 reverse strand)
acttgaaggcagaggtaaaccatacaaggagcctaaatgtaaattatcggatcttagtggccaactgtcatactctagacaataggtgccacagagaaatgttgaagaccttctctgctgccggagctttgtcgaaggaaaagaatttttcggattttgacttagaatatttgatgcgatgggtactcagcgagacccgagcgttcaaaggtgtcctttctgctcacgaagactattgcgcttggataggcacccgaagcactgcttcggttctactaaagtgtcacacccggatttaagggataaagacgagtgcgtctcatatgtgcgccaaggaagaacaacacatataataacagagtgtatagagataaatgtcacaatatcataaagtaattataatatcgcggaggtcatataaaataaaagataaatataaagcgaactaatgtccatccattgcgccataaagtcgactggaaagacgccacctagatcaagtcgtactcctcgttgtgcggctcctcctgggccacctattcttctcctgtggggggggttatatattgcaagtgtgagctcacaaaagatcatatctcaacaagttgcggggaataatgagcattaactcaccaaaggtgggagttcatgtgatgtgtaaggctgatcaataataggggttaaagctgagcattgcttttaataagctggtcaaattttattagcagttactaaatgtaagtaaataccaaaccatattaataatagaacaaaaataataataaatcccatacaatgcaaatgagaaattgaatttagttccaaaatttaatcatgtgagagtcccgagctgctcatgaccgctagcatggctagtataccagtttcacactctgcagaggttgtaccctatacccacaagtcatgttacccatcttccacggggttgtacgggccccatacacctctaccaaggaagcgaggcatggtaacactacgaggcctttacaaatttccactagcttcagaaaacccgctacagtttctaggaagagcaatgcagaaatcctccatctgaccgccatcgcagcaaaatcaacccgggaacctccctacatgcctactcccctactgcccttgcccctatcaggtaaggtagtccttcattagctttcctagttagtcaaccaagggcgtcccattccatcattgtggtggcacatgtgtctcaagttaagctccatgttccaattaaaaataatgatcttgacatgaacaataaataaaataacagtataattggaacatgaacataatgtaatactaaacccaaaaccatatagagcaacagcaaaacaacccaaataattcagaggtgaacaaggtaaaaagataaccagactagggtgacctattggtcccatcaaaattaaacctatgtaggaataaatgattataaagaacattattggatactaaaagtggtcaagggcacaacttgccttcagtgagctcctgcttagcaacttctacctgctaaacacccggatcctcggccacttgctcttctactcgctacaatacaaacaagcatagtacaaagaaaaaattaacatcacaccaaacatgtatacacaatacatattaataatctacacatttaaatgagaacataggaaaaagaatcactaaattcggagttacggattttaagttacaaatttccaaaggttttatgtgtttgacacaagattaattaaaagatcaattttaatacaattttcatgttaaaacagtgttactgagttatagacaatattaatacaaaattataggaacctgaatggaccaatttggacttaatatgaattttctagaatttacacaagttctagtaattattttacattaaaaatcatttttaaaaatgaattactcaggttttactactaactggactgcgtgtcaaatactagaaaccgcagggtcaagcatgtaaaattttcctagacctagtccactgttgcaatggacggcgggttgtttctctgaaaactgaggggccttttcagaatgtgagcacagcgaaggggtatggctgaatatgagccgtccaatcagaaccctagggcccagattagatctctattaactcaaaccggtactcgttcgcagtcatcggatacagatccgacggtcccgagacatcagtctcccgatccaaccgcgaccattagatggatactcagtggtcaggatttcactcatcgctacactacgttagttcaaatcgtggccacacatctgcgaattgatgacagacgagctaccaaagccgaaatctaatctgactacacgctcgggatccaacggttctgcacacctctatcgaaccggcatttagcatctaatcgcagtcgttcgtcgatggatcgacgacagggaccatctatccccactggcgacgaaacacggcggcggcggccggcttccacggagaatctcgtcggagatgcccaaaacctgtgagtaagtgccctagtttccaatccgcccgcttctacgagatacagggacgacaacaaacatgatcgagccttcgtaccagagaaatttgtcgcgcagagtgttggtcaccgacgagcggtgaatggcagtgcaacggcgagcaattgccgctgcagcagtgtgacagaacctcccaagttattaggcccacctacagttgtccttgtcctacggaccttagacaacctgtagatgcacataattacttgacaagttcggtatctgtatccttttctcgcccaagagcgtttcacccgtcacgcagatattacgacacatcggaggaacgaataagcgaaagcaattacagtaacttaatttacattcatttaaaatatagaaagagtgtcattattacagaccagaggtatatgagtgcataagtattattattacaaactcgggaggcaaaaacccctcccgcatagaagtataatgtttttcaaaaggaggacaacatcctcccgaggtttcactcttgagattcttcttttggcaccaccttagagcaaaagcaacaaaagtttgctgcttcctcaccttcaacaacatgggttcgaaaaccctgagtacgaagtgtactttcgcaagtcttacccgtcaaaatagaagactgtcaaggatatgctggcttgagggaatcaaggtaaggcttaatcaagaatcaagactctgtttgcaaaaatgcttactaatagtggatccttaaaaatccagttttattagcaagttaagtcattacctgtcactagagttctttctaccctagttcaagtgcttggcctatactagccatcttttatcatccctttaagttcactataatgctacgtgtaggtcagtgaccaagtcttcatgtccgagaagtaacggcgatccgaatcgattaatacccagctggggatctccaatcacacgacatatgtagcacttaacccttgcatatgtcaactcgccaccggggttcttaagaccagatcgggttcacgctaaccgagagcacagatacaccatcgtccagcctcttgccacggagggtacacgctactcttgccatctctccactcccaatgcgtgttgtcctattctggtattagtctgcccgaggcaaagcttacccatgatgaggcatgtgaccagttaaaaggtcctcaatcatcaagcctatgtcgagacggtccttaatcgactcagacggagacactacaccgagactctcttgtcgtgcaagttacccgcctgatctcagttatatcatttaaaacccaaagtttggtacctagcagaggtacatcttttccgatgttgaacccatcatggccatgacggattcaccatcaagtttcatttttgaaaacatcccatccactgtgaagcatcatcttttgttcaaaaacaaaacattttgtttttctaaagcaaggctaagcatcagaaaaacctttttataaaacaggtgatcaaggaaaagtaatcaattttccaaggaaggaaacgcatcaattgtttagacacaactcctatcaccaaatgcatcaaacaagtgagaaagattttaaaatagcaaggaggtggcaaatgcacgggggcttgccttgagttgtaggagagtcgggttctgctccacaataatcaaaataaaagaagttcccggcaggtgggtcttcaggtggtggtggtgtagctctttcttcttcaaccactacttcttcctcgttttctatatataaccatgtacaaccatgaatgctcatgtaatgcttatgaaaatgcagtaatagaaaaggtttatcaagttgtaacttgaatacaattttccttcacgacactccaggaaactaggtttttttggagtgagtattttatttcatagggcaaacactacttagaagattagggttttggggtttaggtatcaaacattgtccaaatcatgtctaacttcactcatgggttctaaataccatattaggcttatccaaaaagtttagtgatttttggagttattaaataatttctaaaattccagaggtataggtttaagcccttttaaatactatataattccttgtttggactaaaaatcctaaaattatttttattaaatactatagaaatttagaagtccaaaaaattggtctcatatttttattatttttcttgaattctttatggatttctaaactttctcagaaaaagaaaaaggaaaagctttcaatagtattgggccatcatcagcccattcggcccagacctatactgaatacaggcgcgtccacgaccgcgtcgttatatttgcgcaaagaccctcgctggtttgaatatctgaaacaaagtcctcatctgaccttaacgtgtaactaacacattacaccttgccccttccaagttctttgtcttttaaaattagatccctgacctcagccagcggcacggatgaatccccccgtcgaactacggcgacagagagcctaagcgcccaataaaccattgccatacttacttctagcctaaatcaagtagttatgggcatggatttggctcataaactcacagagcgacctgaccgcgcccacgatggggtcccggtaccgcggcgctagcccagctgatttaagcacaggatgattcaaattaagggcacaaggagcacgagcatgacacggacgacgcgattcttacaggaattgacatcggacctactgagttttgagtgggtcgacaccagggcagttcatgcggtgttaaacccatgttccgaccaaactaggactgtaaagaccaaacagacttcttggtgagcttcagcaatctatagagacgctagaacattaagtcttagggattgagccataccgtaaccgcctggccacgtgaggttgatgtgttggtgaggtggtcaccagacacgctcggtagcttgatcagtggaactgggcacgtccagggtatggtttggggggagggagagcaatactgctaactgaagctacacactatggttgatggtcgaagcaaggatcactgatttgctcttgcttctttcccccctgggttgctctttaaataggcagtgaaaagatcaagagctagctggattcttgagtttacagggggataactatgtgcatggggtgtagtcgtggctcacccaagaagacccacgatggttcacagagcacagtcatgcagggtgaagtttatccatggcaagggaggaggtaaggataggatgacactgtagtagatatttctactagtgatatttcagtgatgtgcatgattctgaatatttctgccccttcttatctcaaccatctcactatttcaaagtgggacacgacaagggaggaaaagatcaaagtcagatatttctgtatttttggatctacagctctcgactgacccacccaactccagttagccatttctcttaattttgattaagacagatcagtcactgttaatagaacttgttcattagtccaaggtctactaagtctctacagatttcatagacccaaacctcctagattacaaattatagcatccaaaaattggctgcaaaatctggttaccaatttttctgcctgaaccctaaccttcagttttattcagctgaccctcccctttcgatagaggcctttttgggcgcctatatcttccatgtttatataatgtcaagctagggtccctcaataaactttgttcatgaatactacctctccaactttgctttaaaccttctagcacaaagttatacaggatagcctttacaagtcctcaaggtggagcagataggcagaaattcagaaccgggtggtctgattgacagtcagaaatcagcagcctgacagcctgactttgagcagcagtaactttaatacttgtacatgatcaagcctacttgtcttaggaacacttaatcaccttctaatgctctctaatttatctacacaactcacagcctttaaccctctagattggtcacaaaaagactccaaacctagctcgatacactgcatcataggtttcagattactgtgttcagtctgaaaattcagagttctgttagctctgttttggggtatgttttcatgagatttcatagggttttagggttgggtttctcaactgaacttatacccctatagtagctctaccattttgatgtactaatctaggacataatcctcatgaatgaagagatatacagctccaaagatggtcccaaattactggaattcagacttagtcatatggttttcatgggttttttacaaagatgtccaaatcttactattcaacttgcaaatccttgaatatgaaagttagtgggtttgaggtgcccttttactttgatatttgcactttggtccaaaagtgcacaaattttacacttagccccctagggttccaatttagggttttccaggggtcttttcagggtttttaaccctttagggttgggatgccactcaagtccttccaagaggatattttaggattatttctcatatcttttgaagttttctcatacttgggcttctcttgtatccataagcccagatttggggttaagtactttatattagggttaaccacacatcaagtcatatcagtacacatttttgaaatttttacctagtgaatgcactctaggtgtgacaaacacatgatatgctaatgctcatgatgttatgctcaagttttaatgacagtaacactaggggtgttacaagtaccgtcccgattctccaattacgcgcactagagctcccgcgatgacccaccgacggaccagagccacgaatggaggcgaggtgacagccgcggccccaaatacccacgactcccgatctctcgcggtggtgataggctctacgcgtcaaccagtcataggggcgcagcttgggaggtttttataatcgggacgtgtccacggtcgcagcctcgcagggaggaacgaaccaacccacgcagccgagatctgcggaggtgggcgtggcataacgacacgacgaggatgggggacgatgcaactgtgtgggtgacgagtgggccccaatggtcagcggtcccggacttgggctacgtgtgcaaggaaaatccgtgagggtggcaggtaggtccgagtgtcagtgccatcgcgcgaagacaaagactgggccgcgcggagtggaagccaaatgggtcgggttcagagattaggcccgcgcttggttttcttttttattttctttttattttctttttattttctgattttccccttctcattttgaatttaaatttcaaattcaaatcgtatggtaaattatcctcgtattaaaagtacaatttgaacatacccaaaatgtgatgaatttatttatttataaatttattttgtgttgtacaatatttctttctttccttctctattttcatggttttgttttcaaattaggctttagattctatggacccattaatacattgttattgacacttttaatttattatccacaaatgcgcaatcaagtaaaactcagcatgatgcatatatcatttaggtgtcatttgttttaattactcattcttaattatagttattctcttgttataatgaatagatgacacacaagtaaggagatcaactgtattctcattatatacactttgggtatttcaaatcttaccccccttaacaagaatctcgtcctcgagatttaggaagaactagggcaaagatggggaaaatctatttgaagctcttcttctctctcccaagtagcttcatcttctccatggtgattccattgcactttccatatctttatcactttatttcttgtaactcaagtcaaggtatcaagaatcttgataggatactccatgtaagtcagatcagcctaactgttcctcaaggacacgtagacatttcttaagttgagacacgtggaatacatcatgcacatcagataaatgatccgataactcgagttgataggccatctccccaattcgcctaaagattctgaagggtccaataaagcgaggggataatttacctttaactttgaatctcctcattccacgaagtggtgacaccttgaggtacacatgatcaccttcctcaaactccagtggtcttcttcgattatcaacatagttattttgcctggtctgtgctaccctcaagttctctcagattatacggacttgttcttctcctcttgaataagttcacgcccaaagaattgtctttctccagtctgatcccaatatagaggggtcctgcacttcctgccatataaagcttcaaatggtgacatcttcagactgacctaataactattattataagagaactcagcatatggtagattcttgtcccaactaccaccatgctgaagggcacaagctctcaacatatcctctagtacttgattagtcctttcagtctggccatcagtttgaggatgataggccaaactgaagctcaacttcgtatccatattctcatgaaagcttttccaaaatcttgaggtaaactgtgagcctctatcagaaacgatctactttggtacaccatgtaagcacacaatccaagccatgtataactctgccaattgagaacctatataagtagtcttgaccgaaatgaagtgagctactttggtcagtctatccacaatcacccatatcgagtcataacccttcgaggaacgaggtaatctagtaatgaaatccatgctaatttcttcccacttccatttgggtatctttaatgggtgcaataggccagctggtctttggtgttcggccttgactctttgacacacatcacacatagccacgtgtgtagccacatctcttttcagcccataccactagtacttctgcttcaaatcctgatacaccttggtgctaccaggatgaatagaataatcaaagtcatgggcttccttaagtatagtctcacgaaggctatcaatatcaggaacacattgatccgattcttgaaccatattgtgccttgctcatcctccgtgaattctggacctctaccttcagtaatcagatctttgatctcttggattttagcatcaccaatttgacccttacggatttcttgctctaaggtaggttctacttcaatagtgaatccttcaatatgtgcaactattcccatgttgagtctcctaaaatcctcaacaagctcatcgggtagctaggtaacaatagctgcatggatgtgctcatttcgactcaaggcatctgcaaccaaattcgccttgcccggatgataatgaatctccaagtcaaagtccttgataagctccaaccaatggcgttgcctaaggttgagatccttctgagtgaatatgtatttcaaactcttatgatcggtgtacacttggaacttggttcccataatataatgtctccatatcttgagcgcatgcactacggctgccagttctaagtcatgagtgggatagttcaactcatgtttccgcaactgacaagacgcatagacgatcacgtgtccccttgcataagaacacatccaagccttggccgcacgtgtcacaatagatatcaaatcccttctgtagatctggcataaccaacactggagcagccatcaatttaaacctcagttgattgaaactctcttggcattcctaggtccatttaaactccttacccttctctaacagtgaggtcataggcttagcaatcttggagaacccttcaataaatcgtcggtaatagcctgcgagtcccataaaactctggacctccgtgactgaacttggtatcttccaaccaactatcgtcgttactttagacagatccactgatattccacccttggatatgatgtgtccaaggaattaaacttcgtcaatctagaactcgcacttgctgaatttggcatagatttgattatcctgtagctttcgtagcaccaaccgcagttgttcctcatgatcactatcattcttggaataaataagaatatcttcgatgaataccacgacgaatctgtcaatatactccatgaacaccttattcatcagattcataaaataggctggtgcattagttagtccaaacgacatgactatgaattcatataaaccatatcgggtcgcgaaagccgtcttcggaatatcagatggcctaatcttcatttgatgataccctgatctgagatcaatcttcaagaataccctagcacctctcatttgatcaaataaatcttcaatgcggggtaacagatacttattcttcacattaacatcattaagggatctataatccacacacatcctctgtgatccatccttcttctgtacaaacagaaccagtgctccccaaggtgaggaactcggacgaatgtacccagcctcctgtaactcagttagttgcttcttaagttcttttagttcttctactgacatcatgtatgtccgttttgaaataggagcgatcccaggtaagagatcaatgacaaactcaacctccctatctggtggcatcccaggtaactcctctggaaagacattggggaaatctctaaccacgcgaatgttgttgcctacaaacttcccatctactagaaatacagcaggtctggtagaggcagttacggtaatttcaacttaaaatctttctcctttagagctggtgagttctacagttcccctagcacaatgtataactaccttttcttttcttaaccatgacataccaagaatcaggtctatgctgctttcttctaatctataggggtagcccagaattctcttcccataattgtcaaagttaatctgtgtgtcatatagtttgcctcaacatgccctttaggtgtaattactaccattggtgttttcatattttgcagtggtaactcatttgtgttggcatatcgagcagaaataaatgaatgtgtagcactagaatcaaataatattgctgcaggaattgcattaatataaaacataccaatagcgatgtcagctcccttagcagtagtatcaacactgacttgattaaccctggcaatagtgaatcccttgccagatcctggagtctgctgcttgttctgaatgggggtactagcaatcctctacggacaaacattagcataatgcccagtcttaccacacttgtagcatgtggtgcctgcactctgtcctaagaatttcgccgggatgccagtgggggcagcctaacgagttggtggagtcctctatggtgtgtactaagctaggcgctggcctcttccagtgcgaaccggtgtaccatggggtggaacatagcgaggacaaacgctgctgctcccctaaccctaggtgatcgccttcctcttcatatcccccagctgaacacgcttgtgctcaatagccagggccttgtcaagcatcctctagaatgacagaaaggagtgagccactagtgcatactacagaggtccattaagtccttcgatgaagtgttcctgcttcctctcatcttcagccacttcatccggtgcatatctggagagctgaatgaatctgttgtggtactcgctgactgacatgctcccctgcttcagcgatagaaacactttcttctttatcttcattagttcaacaagtatgtgatagttccttaactttgtagtgaactctgtccaggtaatggtatcagcagcatcatggacagtagtgtaggaatcccatcaatcagcagcaggaccagtaggtcaaccagaagcatagagaaccttctcccggtcagagcactgtgcaataatcaacatcttctccattgacttcagccaatcatcagtgtgtagaggacctggagagctagcgaatgtcggtggcttgtggctcatgaactcccgatgcttgtcccggggtggaactggtggtggtggaggcaatggtgcttgcttctgtcgcaccattcgctcttggcgcatctcctccctcatctcctgcctctcttggcgcatctcctgacgctcctgtcgcatctgcgcctacatatcctgcatcgtgttcgccatctgttgcagcatctgcatctgagctgcaaccactagatcagtaccgccggtggaggattcggaggattcatcttggcttgctgttgtctaagcaccctccagttgaatgggttggcaggtagatcaacttcgcctcccttcctggtattggccatctgagttagaaacacatggtaagaaagaattgtagacaagacgagtaattacgagacatgttactttggggggttttattagctaagtagattagtgtgtcacctactaaagctaatacattaccttatgatggtacatgctaagatgcccgactatactatttcaataaattaaagaagcaaattaggcatttatcatcagaacaatcaaccaatatttttaaatagagaaaataattttaatttttgtcttaggtctcctatctcttaaaaaggtcataaatgtaggattccaaggtgtgacatccatcttgtcttagagtggaaaagataagagtaatcagagtagaacaacaaaaggtgagacatgatcaagataagtatagaaagaattagagtaaggtaagtaggtaaggattttatccatttctatctaggtttcgtcctatagtcaacattttctctgataccacttctgtcacacccaaatttaagggataaagccgggtgcgtctcatatgtgcgccaaggaagaacaacacatataataacagagtgtatagagataaatgtcacaatatcataaagtaattattacatcgcagaagtcttacaaaataaaagataaatataaagcgaactaatgtccatccatggcgccataaagtcgactgggagacgccacctagatcaaaccgtactcctcgttgtgcggctcctcctgggccacctgttcttctcctgtggggggggtttatatattgcaagtgtgagctcacaaaagatcatagctcaacaagttgtgcggaataatgtgcatgaagtcactaaaggtgggagttcatgtgatgtgtaaggttgatcaataataggggttaaagctgagcatggcttttaataagttggtcaaattttattagcatttactaaatttaagtaaatatcaaaccatattaataatagaacaaaaataataataaatctcatgcaatgcaaatgacaaattgaatttagttctataatttaatcatgcgagagtcctgagctgctcatgactgcgagcacggctagtataccagttttacactctcataagttgtaccctgtacccacaagtcatgttacccatctgccacggggttgtacgggtcccatacacctctaccaaggaagcgaggcaggttaacagtatgaggcctttacaaagttccactagcttcaaaaaactcgctacagtttctaggaagagcaatgcaggaatcccccgtctggccgccatcgcagcaaaatcaacccgggaacctccctacacacctactcccctactgcccttgcccctatcgggtaaggtattcctccactagctttcctagttagtcagccaaaggcgtcccattccatccttgtggtggcacgtgtttctcaagttaaacttcatgttccaattaaaaataatgaccttgacatgaacaataaataaaataatagtataattggaacatgaacataatgtaatattaaacccaaaaccatatagagtaatagcaaaactatccaaataattcaggagtgaacaaggtaaaaagataactagactagggtgacctattgggtctcatcaaaattaaacctatgcaggaataaatgattataaagaaaattattgggtaataaaagtggtcaacggcacaacttgccttcagtgagctcctgctcagcaacttctacctgctgaacacccggatcctcggccactggctcttctactcgccacaatacaaacaagcatagtacaaagacaaaattaacatcacaccaaagatgtatacaaaatacatattaataatctacacattcaaatgagatcataggaaaaagaatcactaaattcggagttacggattttaagttataaatttccaaaggttttatgtgtttgacacaagattaattaaaagatcatttttaatatagttttcatgttaaaacagtattactgaattatagacaatattaatacaaaattataggaacctaaaatggaccaatttggacttaatataaattttctagcatttacacaagttctagtaattatttttacattaaaaatcattttttaaaatgaattactcaggttttactactgactggactgcgcgtcaaatactggaaagcgcagggtcaagcgtgtaaaattttcctagactgagtccaatgtgcaatggacggcgcgttgtttctctgaaaattgaggggccttttcagaatgtgagcgcagcgaaggggtatggctgaatgtgagccgtccgataagaaccctagggcccatattagatatctattaactcgaactggtaatcgttcgcagtcgtcggatacatatatgacggtcccgagacatcagtctcccgatccaaccgcgaccatcagatggatactcagtggtcaggatttcactcatcgctacactacgttagttcaaatcgtggccacacatctgcgaatcgatggcagacgagctactagagccggaatctaatccgaccgcacgcttgggatccaacagttctgcacacctctgccgaaccggtatttagcgtctaatcacaaccgttcgccgatggatcgacgacagggatcgcccgtccccactggcgacgaaacacggcggcggcggccggcttccacggcgaatctcgccggagaagcccaaaacccgtgagtaagtgccctagtttcaaatctgcctgcttctacgcgatatagggacgacaacggacatgatcgagccttcgtaccagagaaatttgccgcgcagagtgttggtcaccgacgagcggcgaatggcagtgcaacagcgagcaattgacgcggcagtgtcgtcccgattctccaattacgcgcactagagctcccgcgacgacccaccgatggaccaaagccacgaacggaggcgaggtgacggtggcggccccaaataccctagactctcgatctctcgtggtggtgataggctctacgcgtcaatcggtcataggggcgcagcttgggagggttttatacccgggacgtgtccacagtcgtagggaggaacgagccaacccacacagctgagatctgtggaggtgggcgcggcacaacggcacgacgaggataggggacgacgcaactgtgtggctgacgagtgggccccaatggtcagcgatcccaaacgtgggcgacgtgcgcaaggaaaatccatgaggctggcaggtaggtccgggtgtcagtgccactgcgcggagacaaggactgagccacacggaggggaagtcagatgggccgggttcagagattagtcccgcgcttggttttctttttaattttctttttattttctgattttccccttctcattttgaatttcaaattcaaatccggtggtaaattatcctcagattaaaagtacaatttgaacatacccaaaatgtgatcaatttatttatttataaatttattttgtgttgtacaatatttctttctttccttctctattttcatggttttgttttcaaattagggtttagattctatggacccattaatacattgttattgacacttttattttattttccataaatgcgcaatcaagtaaaactcagcatgatgcatacatcatttatgtgtcatttgttttagttactcgttcttaattatagttattctcttgttataatgaatagatgacacacaagtaaggagatcaactatattctcattatatacactttgggtattacataaagtccggttgcaaacacgtgaaaacctgcacagaccccaatttcaaagtctctcctgacgatgtccgatggtcaaatgtcgaggctttggaatggtcaaagaaatttctatttgagatctagaaaagggatggaaaagagctaagcatcgaagaatccatgaagaacaggaaaaatgtacatgcttcgtcacctctattttttccttcgcgtgttatgcttatgctaactacaaaaagttcctgtaggcaaggcaagcagctgaaaaggctatggatatcagaaaaaagcttcaagtcaaaaatccaaaggtttctaactttccattttttctaaattcttacaaacttgtattgaatgattgctttctaacatttgttaaaaagtttccacttcttaggttgtgattgaggtgaaacataccaaagctgaagc

SEQ ID NO: 1208 - DNA, 2788 bp, Zea mays
  Intron number 1 from transcript GRMZM2G331035_T01 (locus G RMZM2G331035) derived from phytozome v7.0 (chr-ID 7; pos 1 4995198 to 14997985 reverse strand)
agttccaggcttccttctcgtttgcactcgcgctcgtacgtggatagtcgttcgatgatcctatgtctcctgctcgtttcgtgacttcggctcgtggagatcgaagacgatgttagttccatgccaaagcctggaattatgaaaaggacgaacatgccgggtggggttcgtggtgggcctggcttagagtgtgcccccggccgatgagtgacaccatcattgatagaggaacatgtgtcgcaaatctgaaacaggttacaatgtagagaattttctcccccaaattgtatatgtgttctttatcaaaaacatttcgaatattaattggcacgtgttaccacctactcagcgatgcttacccgtaagatttatgcatgtttgtaccgctatcgtttttactctctcttaatactagtttgaaaacttaaatagtagagaaataaactaattttccctaagtccgctccggtcacgagtagatttgagttactaaagtagctctcaggtcagagcgtggtgactactggcagctggtctttcacagctctcacgcgttattttttcttttttttcttttttactttgcatcagtccagagttcgggtatgtcacttttccaaaaattccggtggaccggatggaagacggtggggtggaaaaacttatgtaaaaggtgatagaagctgagagagagcatttcattgtcagccaaggatctttctgaaccactcctggccactcgtcagagattcagattgcgtcggacagtgacgtacgctgatcgtgatcgagacatgcatgtgccgcgaaaaaaaaaaacacaggcagttagcactacgcaataactttaactatgttttgcatgctactaatatgaacctggcgacacgtactacactactactgttaccagcttgtatgtagtgtacgcactagcgtggtctcccgggcgcagcaggtgcaggttgctgtgcgatgccgacggcgcggcagcaggtgtcccaacatccatccacatgaccacatgtgtagtatacgacagcatgtggcgtggaaaggcgggtcggttttctttgccggcaacgacgaaccatccgacgttttggccccctagtcctctcccactcgggacaggccaagtggaaaacagaccaacgtggaaagtggcgttaggttggttgggtgggactgtcattcgtgcttctgcgtgtgtgtgtttggacaaacgcgatcaatgcaaaaatcagtgtgtgttctgaggcgagcaaaactgaagtctctatcacatcaaatatctatatggagattagttagaagtattaaatatgatctaattataaaactaattacacagttgaggaccaaacagtaagacgaaactattaaaatctaattagttcatgatttgatcatgcgatgctacagtaaatatttgctacttatgtattaactaggtgagtgcccgtgcgttgcaacggaagtaacaatagaactgaaaacggatggagagtgcaaacatcactataatatacaaaatctggacaagtacatagcttccgttcatagcaagagccatataaagctgatgaacaatattagctcaaagaaatatgataccagtaggaacaagattgctaggaaactcgattacatttacttcaataaagtttcctcagaatactctattcttgcagctggttctgtcataaaggtcattttacatcttacaggttcactataaattaatcactgaaacatgacgtatcagatgaaatagcaccaagatctacaaaaaacctaagttatgatctatcgacgtgagaccaccagtcgacaatcttcgtcccctgttgctggtcaaatacgtgagacaatcaggtgctccagagcaccgcccatggaagaagacctgacaccaccagtcgacaatgatccgcccatggaagaagaccttacaccaattagacaatgatttaataaaaacacaaattggaaacatacaaatgaccatgggatcatccctcaacaagtcatctatggccaaaacacaaagctaatacttagctactaaaattagttgaagccatccaaacaatctatttaatagttcaactattagctatttttagcaaattagctagctactatcactgttctctaatttttgttgctcgttggttcattttttaagtttttttttaattttagctatacgtgggctgtacgtgggaatgagaatgagaatgggttttgcgggggtaagagcaactccaaaagaacgtgtaaactaaccccaaaatagatattagttaagaacagtggtttttcttgctccaacagctccctcattctttcctcaaaaaattggtatcccgcatccacaacctcctctccctcatattttggtgtgtttcatccctcctcaatccattcatcaacgtatcggatcatccacaacctcccgacaactgtacagattgcgccacatgtcacatttagagtaactgttggagtacccatcattattcacttttaaaactttttagactactcttaataatcaatttttggggtaaaaattttaacatcgttttggagttgctctaagtagtagagattattgggatgtgatgcggagtgtatcataattcaacaaatcaacagacaaatttgtagaaattctttcacggttctagatatttttcatctaacatattagctgaaggtgcagtgctgcaaatgccattgattggctttggacatgtgtgttttttttaattttagctat

SEQ ID NO: 1209 - DNA, 5066 bp, Zea mays
  Intron number 1 from transcript GRMZM2G133563_T01 (locus G RMZM2G133563) derived from phytozome v7.0 (chr-ID 4; pos 1 26000621 to 126005686)
cacaattcgtcgtcagcgtcgcgccgtcgtctcaggtaagcgcgctctcacaatctcacatcttacccttcttccctttccgcagctatatttcttcgtttggtggtctacttttggtgccgttatcacttttgcattgccttgttgatgtttaaccgggatttcagtttcgctgcaccagatttaattatagtatgttctttcacgatttaggactgcgcgagataaagtttttttcccgttttagctatggctaatattatacatgtgattggtctaggaatgttctatttttttcgttgattgatgcaaaactcttttttagggccgcatagcactcactaccggaatcacgttcttggccgagtgtttaagacactcgacaaagtctattttacactcggcaaagccttcgccgagtataacactcgacaaatatttcatcggcaaaggttctttgttgagtacttttttttcggacactcggaaagactttatcgagtgtcaaaaagcactcgacaaaaaaacactcggtaaattaagaatcaatatttttttaaaaaaacagtaaaacatttttttaaattctaaaaacaactctctaacccaccctattaccttatccgttgtcttatcatttttcactattattttgaatcaaacttatatgttttgcaaatagtgacattcgactcgcaacctccctctcacgcataccctcctataccaatacactactacaccaattatgtctatattacgttttcattccccatatactataacaaatcgagattaatttgattatttaagacactaaatgagttcatttgaaaatgtaaccaactataaagttgcataactttttgagatctacaagttttattttaatagtttctacatccgagaccgtttacaaaatttgaattttaaatttaaaacttcacacgaatttttcaatgataagatgattttaaataaaaaaaattgttaactacaaagtttcattacatttcaaaacctacaacttttattttggtggtttttccatccgagacagtttgaaaaattcaaatttcaaaattcaaacatagttttgcataacaaaatgatttcaaaccaaaatatttcaactacaaagtttcataactcttcaatacctacaactttcatgttggtggttttttctttcaaagtcgttttcaaaattcaaattttaaattttttaaatttagacgtagttttcgttgacaatatgactttaaatgaaaaagttgtcaactataaacttctataacttctcaagatctataaaatttattttgatttgtttatctcacataatggttctaacaatatgcacaaattctatacgtctctctctcgtagtttcataaactacgagagagatataggttttatgaacaaatttatttttattttgtcatatgaagaaatgttcaatatataaattgtacatcatgatgagttatacaaatttgtagttgaaaactttttcatttgaattaatttactattttaaaatgcgatttttaaattgtctttgcctagtgttggagaaaaaacactcggcaaagagctctttgccgagtgttgtatttgtgacattcgacaaagagccctttaccgagtgtcaaaaaaagacactcggcaaagaaactctttgccgaatgtcaaaaataaaacactcggcaaagagcctcttcgccgagtgttttcttttatcgagggttttttgcgtggcactcggcaaagagcttctttgccgagtgcccgaaataaaacactcggcaaagagccaaattccggtagtgactaatattcttgtgtgataaattgccggagagattatatatgttccttgtagtgtttgaggacgaccctttcttttgggcgaacggtggattgatacctccacggaatatggaagcaaataagttgttgtgtattgtatgatattgtatgtatttatgatgcactatattatgcttgctgggtatacctacattgctgtttgtgatgacaaagatggtatattgatgtttcaaccaactacacttctgataggatttgttaaagaactactgtacttgatgactatatgtattatatacaacaatgggtaagaaagccaacctgatgtagaacacagatttttttgtacggagtaactatttatgtagggttcatatatcaagaatcagcggtatatagtatgtttcatatatttgaatatttctcataattatatgataataaatctgggcacatgagaatttgattgtgtatagtcgttccatggcaccagaaatccagcacatgtaactttggaaggaaaaaagtgtgctatatagtgcatctgtgcatgatacaagcacttcttttattttccaaatgtatatgatatgtgccttggaaccttggagagtggggtgggggcaggcatgttaaattactgatgttctctcaaaacatgtcacatttgatttgaatgataaacataatattaatggcaaagtccattttcaccctcaaacttgcgaataatctgtttttcaatcttaaaccatgaaactgggtaacaaacaccctccaattgtcaaaacaggacaaatttagtcctcgtgttggttttgtatttttgtaaaaataataaaaatctgatttactatctaaaaattcattaataatttcttttaaatcagaaaatcatgacactagtaccaattggtttatttatttacttgcttatatataggtatttagaattggtttatttctgtttctatagctttatttcttgtatttgcactcagtatttatttaaaacaagtaaataacactaaatatatcaccaacaaatagatggcatttttagaacgaaactaaagtagtttcatatttttatggtttaaaataaactaatatttgaatttatttttagtattagaaaatagaaaaccacattgaccaattttgtttggttttgacaattggcgtgggtgtctgtcacccgatttcataggtcaaggttgaaaatcatactagcgcacaagtttgagggtgttcatggaattcttttctctcctcatgccatgctgccatatgtgtttctactaggtagtttgtatggtggctttcactcatatgaccatttgaaactggttacacagtagaccaccctttatatctaaaagaatcaattggtgattttatattatatcagaatatcatgtaatttgatagtggtaacaacatgaagggagaaatttgagaggatagttctctatttctctgcttgcactgtgttactatatgtttcacatgttagttccaatttgccatatatctaacagttgtccataaggtcacccttttgataagcctttggcagttctaagatagcactatttcattgcacacccaccattatggattattttttaagggttactaacgcggcctttcccaagccattaaattttgaagtggttaaatataatttctcagccataaaactaacctaattagtctagcgcggtggaaaaaaccatctgtgggcctaaattagaagctcgtgggatcgaatttttgtgctcttttccccacattttttagatttaaaagggggttcaatataaaaatgggagcaaaattagaccatagaattggtgcctagaaggttgagggattgaattcaagttcgtgatattttcttctaacattttttaagacatacaagtagttcccattaaaaaattggggcaacatcaaacacgcagttggggatcgatcggaattcggaaggattgcagaatgaatgctcctgaatggaccagctgactagatggcaattgaagttgcagtgctactaatgaatttatcaagtcatttttactggagtttggaacaaaaaataccagagctcatatattccggtaattctgtccgggaatgcaaaaaacatgtaaaatggaactagaatccctgagagatatgatgtatgggtcatacattgaaaatcccttgtaattttgagaacaggtaaacagaaattatggggaaaggtagccttggtgttatcagatgtgttgaccttctagggggtgtttgggaacaaagtttttctgtagtattgaagcaatactgtagtattgagcaatactgtggtattatatactttgaggtgtttggaaactcatctgaaatctctgtatactaaactgtagtattgtaaatactgcacttgttttgcagttttggaaactttggtctcagccaaagtttttctctgtaaagagagcgccagcttggtcccgctctggctgattggtctcaaccaaagtttttcccaaacaccttgatgtattggatactgttgtattcgaaaactgaagcattgtaaactgtagtaatatcatgactaaagtatactttagtatttgaaaaactacagtttggaaaaactgtattcccaaacaggaccctaattcatgtgggctccgagttaatagtttcatgtggaattttatgggagaagctatggacagttgtagaattcaggtggttaatatcattgaaatcctagcaaattgtgggaatcacttttcttgaatgctttgtactgaatccctcttttattttctggttgcctgtggcatctgttaaaaccttgaaggtgagatcatgcgatatttatcaggagtagagaatgccaggagaggggtgttcatggttttatttgtagggatctcttagttcgtttggaaacattacactacgtttatgtcaggcacaataacatgaaagaaaaaaaaacatctttctgttttccttgcggcatgtagagatgtttagtttggtgggcggttaattttctatgagaatgtctgtcggtcacatccagtgacctgcattatatgctatggaatcaagcatgaatgttgtcctttttatggtgctgtttatttacctgcagcaaattacttcagatccagtttcaaactggtgctttgagcttagcattttgtttttattgcagattg

SEQ ID NO: 1210 - DNA, 7261 bp, Zea mays
  Intron number 1 from transcript GRMZM2G115105_T01 (locus G RMZM2G115105) derived from phytozome v7.0 (chr-ID 1; pos 1 7384335 to 17391595)
gctcgctcaccaacgtctccggatttagcgtcctcgtaagcgtcgattcctttatttatatttacttaaatttaaaaagttctttcaccgtaaaagctcgatcgggcaggggagaaaacaaggcggggttgattggtgcgtggttcgctcttgactctcctcacttcctcagctagccgcgttcgttcgtcgtggattgggttgggtcgtccccgccgatcaatggatgttgtttgcttttgagcgcgtctctccctctgattggaacgtgtggctcaccaacgcccctacacctggcactgtgcttgtgggaatgcgggtgcttcacattttacgaatgacgatgcccacagatcgggccggatcagattcatatccggtgacgtctaatcacatttgctccagtatccgggggtactcgtacctgggtcaaaaggcacgcggagcgtgatggtcatcaaagttacccggtcccgttgccacgcagatcatctgagggatccgcttggaacacggaccctgagcattggagcttgatcgtaactgtatcacaattcacaaatactgacaaactccgatttttttagacaatgaccatacctgcccctaaactccgattttaaataatgacaaacccttctagccctttaactgcccctgaactccgattttgaagtacaaaaccatacctgctgctgatggaatgaccagtctgaagacctttttttttagataatggaaacacaggttctggcttcatcattcctcagggagcaagaatcagaccaaatattataaaatcacacacacacacaaaatacagggatccactcctaatgtctaagacgaggagaagcaaacagaaatgtggcactgcactctataaaagtctgtatgcttccgcaatgaaaatcttgtgctcatccaagcgttacaaacgagtccagattagagtcaatatatcccccaaaagaagttcttgcaaaaaaaagtttgtttttgacacgagatcattttttatgagccaaatttctcaaccaaagaccgcaatgtcccgtcaaaacaagcaaattgcgtttgccttgcctcattttggaccaacctcaaaacaagtgagacacgtgtgttggaggggtgccaccaaacacccaatgaaccgcacgccagagaaaacgagccataatgacaaccaaagaaaggatgtcggacagtttcaagcttatcgcaaaaagaataaactttgctgccattctaattccatcttactagattatcttttgttaaaataaatccctttttcaggaaccacacgaatattttatttttaaaggtactttcatttgccacgtctctgcgtgactttcataccactgccgacaaggaacttatacatagaattcgcaggaaaagacccattttttgtttaaaccccaaacaatggtatccatcatattgttcaacgtgacatgcatgatactagcaagttagcaactaggctatgccagtctgttaattctgttccaccaatgcctttctgaaggacacatttggaggtgcatattgcaaaacctcaggcctcagctactactgttgcctgctttttgcacaccacattgtagaggtttggataacgggttctaaaactctgatgtcccaatcatttgtgttcctaaaaccttatttgagttctattatttgatctaaactaacctaggtttatgaactgatctttgacacccataaggcttgcctaaaattgggaatctcatgcttccttggttcaatgtattatttttcaactattttattttaatcaaaatcctaccccataccttcttcattacataacttaaatagtcgtctactcggggacacttggttttcaactctaaatatataattcctatttctccttagtcttttggtttgaagaggtgaaagggcctctaacttagttggctagatggtctaagtagcatttcttagttcttgagtttaaattctcgtgggaatgaattttaggataggcttaaaaaagtttcatcatatgtctcacgctaaaacataggtccaagatcccgattctggtcacagtcattctcacatggtccagttttttcgcttgagacaataggacattcagttaacctatatttcctttttctgggtcatattgccaaaaaaatctagatctaaagtatttggggtctgtttggttgtatatctaaggtgtcacagattgacatatattttctgccatatttatctaaggttaggtgttttaattcttcgacacatcttgatatgcctaaggaaaccttgctacacttttataaatcatcgacaagtaggatcaatagaatagaagaaaaatcttgccataattgtagctacaaaccaaacacacacctaaactgttcaaatcagcctaacattaggcgtgacaaattgtagcaaatcaagcaacgaaccaaacatgctctcaatcttttaaaactccgctagggatctaaaaaaggtgttataaacataggtaggctagatagaacaaaattaatcgggactaaataactactggctggcaacaatttaccctccccagctgcttattttttctttattctatcttttatcagtttgcggtctttatttgataatcttctaacatgtattgggatgccttagtacttgaaggggagttatcctcttttgcatctaaagaggtgtgagttgttcctcacactctttggtctgccccaaatagaagatgtcacttcggtgatagttattttttagaccagataattgttcaaagacacaaaataacatttttatattatttgctaagtcgatgctgttagaatacacattagggtttttggtgttccctgtgtaattaccctctcgcctcctcagtaatgggcctgacccaactaccaagtctattaatacaatactccaccctattctagagttagggtttcccacatggtatagagttaggattagttttgtttctctcccaccacctcccccagccgccgccgccagccccctggcttggccgccaccgccccttttccccctccctccgaccgccaccggcctcctaggcccggttgccgccgtccaagccccccaccacctccctccctgcacgcgcacccgctgccgtcccatggaggaccatcgcaacaacgccgccatccaccccgttgccatgggcctaccccttgccggcgcggcccccagcgtcgccggcctcatctcgacccgcgtcgtgcccccaggcaacacgggcgcgtggccccttccctcaaccggcgcggcacccagcgccaccgaggtactccctgatccctgtcgcgttgtccacttggaacattaggagcttcatccccaacccccacaccagctcgcacgtcggccatgaacctcgttcatctccgacctcggacctctgcccaccatcccccagctactcagcatcgctctccatgttccccactgggtttctccacccacaaccctgtgtggaccgacgttgttgcatcaccgtcggcttcttcgcccacgtcttccacgctcgtcgcggccatcgccaccatccaggaagccgtcgccgcctcctagggacgctagcacgtcgcgtccctagcactagagcacgagcgggccatgggcgtcgccctgaccgcctagatggccactgtgcagcgcctcatccttgggcctcccccagcggcactcgaggcaccttcacccacccccgaggccccccacgcctcttgactcgacgtcgaccacatcaccgctctccacgcctaggctgccggactccacaacattcggtccctcgtgtccatcgtgttggaccgggcatcctcccactaccctctttggcgggggcaggtcctcctcactcttcggcactatgctctcgctgaccacgccctcgaggatatcgtcgccccgtcgcctctgtcctggtacctgatggacaccatggttctctggtggatccacaacaccatcatcgtcgagctccaggacatcatccgagactaggcggacaaaggtcgccaggcgtggctcgctctcgaggaacagttcctcgggaactgtgacgcttgggcccttcaccttgatgcccagttccaccagttctctcagagggacctctccgtgggggagtactgctgccagatgaagggcctcacggactccctccgcgatcttggtgagccgatggcagacagtaccttggtgttgaacctcttgagtccttagcccctgctacggccacctgaaggctctgatcaagagaaccatgccctttcccaccttccatgctgtgtggaatgagcttcttctcgaggagctcaccatgacgattgaggccctggccctctacagcgctaccactggtgctcaggcatcttccggggataggcccccacacttcatcgaccggggcccccgctcggcctcctgtcgcggccccaacggttgtcgcccacgcaagggtggacatggggggtggcagctccacccatggaggtttcatcggtcagggtggcggctagggctggtcgtcattctacaacccctggaccggaaccatctccatgtggcctgctcaggctctcagtgcctcatgtcctctggcgccggtgccagctctcctgaccgcccccctatgatgcaccttcaccacctggtgcctgcctatggcatgcctccttacggcgtgcccctgacgaccccagctccgcctcagctcccgcctccgaggacccccaccaagacttcctagtccccattcgctggaggctgggacccagcctctctcgccgccacctataacaccatggcgttggctgccaccctcttctgactgggtcatcaactttggtgccttctaccaaaccaccccaacgcaggcatgctatatcgctctcacccacctcattctttcccaccccacctcgatcgtcgttggaaatggttccaccctgccagtcacctcagtaggtgcctcagctctccctagaccgttctatctcaacggcgttctcatagcccctcaccaatggcgtttagttgtgtctctcgtgccctacacctctgcccagaatggctgggctaagcgcatgattcgcaccaccaccaatatgattcgctgccttctcttccaagcgtctctccctgccagctactgggcagaggccctgcacactaccaccaatctcctcaatcgcctcccatcaaaggcggtgagccaccccaccccccattttgccatgtacggcacaaccccctccacgtgtttggctatgcctactatcccaacacttccgttactgctcctcataagttgtctccctgctccacgcgctgcgtcttctttggctactcccttgaccacaagtggtatcgctgtcttgacctcacctcccatcgcatcatcatctcccgtcacgtcgtcttcgacaaagatgtgttttccctttctggctcctcccctcccatcgatctcgactccctccttgagtctgatccgagtatccatccccctaggcgcctcacctcgcaccgttgcccgtgccacgcgtggcttctacgccctcacgcatggccccgttgaccccgcccatgccacacgtggctccgatgcctccgctcgcacttctacccgtgccacgtgtgaccctgtcgcctgtgcttgggccacgcgcggccccgtcgactccggccccatcgacaagcgtgactcgcttcaccgaccctaccctcttctaccaccgccgtgtgagcgcccctccctcggcgcccacggacctgggcccctcgacgagcgtggcccgattcgctacccccaccgtcgtttaccaccgccacgagtcggctacgcccgtggcccccgccgtcccgctctgagccaccggtgtaccaccctgtcgccattcaccgcgaccctaggcacatccacctgatggtgactcaacgcgccgctggtgtccttcggcccggcgatcagctgattatggtcgctgatacgaccactactccaccgggcgcctctccggtcccctcctccgttcgcaccgccctcgccgatccacattggcgtcgggctatggaggaggagaacgcggtcctgctggccaaccacacctggaacctggtgtcgtgtcctcctagcaccaatgtggtcaccgataagtggctctttcgccacaagctgacttcggatggctccctcgaccgatacaaggctcgttgggtccttcggggcttcacccagtgccccagagtaggctacgacgagaccatcagccccgttgtcaagtttgccaccgtacgcgttgtcctctcccttgccctctcttgggactgggcgatctatcagctcgacgtcaagaatgccttcctccatggtactttgacggagactgtctactgtagccagcccaccggcttcgtcgacgccgctcacctcgacctggtctgctggctaaaccgctccctctacggccttaagcaggcgccgcgagcctggtacatccgcttcgcctcctacctagcctccatcagcttcgtcgaggccaagtcggatatgtcactcttcatctaccggcgtgacgaggacaccacctacctcctcctctacatcgacgacattgtgctcacggtatccaccgtctgtccaaactgcagtcctccacatgcaaggctgttgttcctaagtgcagtcctccacacctacagttctccacaacgcagcaaggctgctgtgtccagcagtcaaaagattgaaaagaaaaccaacaagaactacgactgtccttcccacagaacacgagacttattacaacattttttctaagacctttctttgtatggaagtatggttctaactgatcatttattttaattcctacgttgccccctcgaaccaccatcttaatgcatccgcaccatgttggtcttaaaggcttactataaaagactccaattactttgtcatatgccttattaaaatcaatcttataaatcattctatttttttctggtatggaagttcttgtaatgtctaaaggagaatcattgtcccctccattttatttctaccacaacgaaggttgtctggctgacaaaagtttaatcagacaatgatttgcctctgcactttatcctgtgtataatatttatgtatatttccgtcgattcattctgatacatttatgctttcaatcag

SEQ ID NO: 1211 - DNA, 1085 bp, Zea mays
  Intron number 10 from transcript GRMZM2G009593_T01 (locus GRMZM2G009593) derived from phytozome v7.0 (chr-ID 3; pos 87802594 to 87803678 reverse strand)
gaggtttaaggggaggtaagacacttcagtctcttagttcatctaatttctgatatcaagcatcatacatccccactcccctcttgccacacgtgtcctgttttctcttactgaacctgccctacttttgtttatggaaaaaatattgatttctcttgtttgcatgaaattgattactaaattggtttgcttcaaatttcctggagcatatatattgaagaaacttcttgatatagatttcagcagataaataaatcaagggtagatgctgcccttggattatatttttcaacttcagtggagtgcccattgttgtacaatctacacatacttggtcttttatatgttacttgcctcttgtttgttgcacataccttcattggtagtttttcacttttttggtcagctgaagttattgattactgttatagatcaggcgtctggcattaacagtgccagacatttacttactgatgattttttcttatttattttgatacttagatctaagagaaagaaggttaattttgaactgaattatatgcaatttaatttcatatttgggttgttgaataaccatgtgtcagttgcgtctattgttctactgagttggatccgtggcagtaatagtaattgttaaatgttcgaatcagcccatgtatttggcattggttccactctttacaaacacacacagtttattctgtgattttatttattctgatcacataatcgacgttcttatgcatgacgtttaagaatttgccatgttccagtcagttgactcagttatcaaacacatgtgcttccttttaacgttactcattgagacatttttactggatacacattcttaatatttcttttcatcttggagcatagattagtaattcagggtaccaagtgattagcacaaacatattcagaattttgactgtgctcattactgttcaactcctaagaattttctagatgtgggttttgggactgcatttctgacatttctttgtctcagatccataggttgattatctatgtctattgataccaaatttaaagcaattgcttcacaggtgtgctgctag

SEQ ID NO: 1212 - DNA, 10101 bp, Zea mays
  Intron number 3 from transcript GRMZM2G035338_T01 (locus G RMZM2G035338) derived from phytozome v7.0 (chr-ID 3; pos 1 17683222 to 117693322)
tatcagagacaacaaaccccgcaggtagaagccaggtaagccactcacttcttatgtgtcacggggaaaaggtccattgccacttcattgtttacgtacttgattaccactcctaccattccaaattataaggcgctttgacttctctaagtatatagcttttgctatgcaactagatatacattatgtctagataaatagcaaaagctatgtaactagaaaagccaagccgacttatatttggaacggagggagtattccttttactaacatatctggccctagacttgcaattttcttggtgctctggggcctagggttttgctctatgttttgtgaaaatcattatctcattagtcattagtaattcagttatgacacttgttgggtccatgcttcgtcgccgaaggtcttatagggagaagcgatcctcggatgaagctgtttgtataagatagccgaaggttcctcttcgtaaagcttcggcattgcaaaccgacttaaagatagaatgaccttttagtccataaatgtctgagtcaatgttgtaagtttttataaggggcatacttgtaattcctcacaggctgcgttctgtgcctataaatagtgaacagtattccgttactgttcacgcattctgatttttgcaatcacatctctcggaatacaacctttgtcaaggcatagcatttgagaacaagtccccaacattggcgcccacctccggtgaactcacttccactttttgagctgatggcttcgttcaacgaccaagctggagctgcttcgggcccgaagctggtgctcccgatcacaggtggctcgtcctcagagccagctaacaagaaacaaaagaaggaagcacagagaagggtacagcatgttggggtgcaaggacccttcatcaagtcaagatggtctcacattcctattaccttctcccaagaggaccttcagctcaaagattacccacacaacgatgccatggttatctcttgtgttatcaaaggatttctggtccataatgtcttggttgacacaggcagtgcagctgacatcatatttgctaaagccttcagacaaatgcaagagccagaagataagattcatgatgctacacatcctctctgtggcttcggaggaagacagataatagcattgggcaagatcaccatgtcagtgaccttcggattcatcaacaacactagaactgaacaagttgtgtttgacattgttgacatggaatatccttacaatgcaattattggtcgtggtactctcaatgcctttgaagcaatccttcatcctgcctatctttgcatgaagataccttcggatcagggacccattgctatccatggaagtcaggaagctgcaagaagggccgaaggcaattggactgactcaaaagcaatccataacatagatggagctgaagcttgtgaacagtacaaattcagaagggagaaagcagcttcagcagatcagccgaagcctatgctcttatgtgaggacatagcagagcagaaggtgctgttaggctctcagttatccgaagagcaggaaaaaaccttgataaggtttttgttcaataacaaagatgtttttgcatggtcagccaatgatctatgcggagttaatagggatgttattgagcattcgctcaatgtcgatccatccttcagacccagaaagcaaaggcttcggaaaatgtcagatgataaggccgaaggtgctcgcaacgaagtcaaaagactcctcagtgcaggagttattagagaagtgaagtacccagaatggctggctaacactgttatggtaaaaaaggccaatggcaagtggcgaatgtgcatcgattttacagatcttaacaaggcttgtccgaaggatgaattcccactaccaaggatagactctttagttgatgcagcagcttcgtcagagcttatgagtctgttagactgctattccggctatcaccaaatttggatgaagaaggaagatgagccgaagactagcttcatcactccaagtggcacatattgctatcttcggatgcctgaggggctcaaaaacgctggaggaagtttcagccgaatgactgcgaaggttcttcaatctcaaataggcagaaatgtgttaacttatgttgatgacatcattgtcaaaagcacgaagcaggagaatcatattgctgatctgcaggagaccttcgccagtttcaggcaagctggcttaaagttaaatccagaaaaatgtgtcttcggagtgaagaaggggaaatttcttggatgcttggtttcaacaaagggaattgaagccaatccaagtaaaattgaagctatacttcggatggagccaccaactacaaagaagggggctcaaagattgacaggaaggttggcatctctcaatagattcatatccagatcggcagagagaaatttaccattcttcgaagtgctgaagtcggccgaagtctttcaatggggaccaatccagcagaaggctttcgaagaactgaaacagtatttgatagatctaacaacattgactccaccaatgccaggggctcctttattgttatatgtggcagcttcgcactcagcggtaagtgcagcgcttgttcaggagaagcttgatggtcaagtcaaaaggcaggccccaatatattttgtttccgaggtccttagtttatcaaagaaaaattatacagagttggagaagatactgtatgctgtcttgatggcctccaggaagcttcggcactatttccaagcttacaacataattgttccttcatcacaacctctgaaggatattatgaggaacagagaagctactggaaggattggaaaatgggctgcagagctcaatgaattttgtattgaatatgttcatagatcttcgattcagtcgcaggcactgccccactttattgctgattggacaccaggggctcacgatgaggaaacaaataaagacaacgaagcctggatagtgttttgtgatggatcttggggaaccttcggagcaggagcggctgctgtgttggtttcaccttccaaagtcaaaacctgttatgcggcaaaacttgattttaattgcacaaataacattgctgagtacgaagcattgattttaggtcttcggaagttaaaagcaatgggaatcagaagggccatacttaaaactgattcccaggttgtttcgggtcatattgacaaaagttgtaaggctaaggatccgaagcttgaaaaatatctggatatggttcgaagagtcgaagcttcattcgaagggttttctgtcaagaatatccctcgaggacaaaatgagcatgctgatctgctagctaagtcagcagcacaggggctgcctttaccttcggatgtgttctttgaaacaataaaagcaccttcggtggaactccttgaaagagcagttcttaatatatctcctgtttttagcgaagattggagaactgagatcatctcttaccttcagggtaaatttctttcagatgacgaagcttataacaagagaatagaggcaagagctcgtccatatgtcatgatagaaggggagttgtacaaacatggagtttgtgctccgttgctcaaatgcttatccagaaccgaaggtatagagttaatgaaagaaatacatgcaggcctgtgtggatctcacatcggatctaggccgttacttggaaaaattttccgtcaaggattttattggccgaaggcagcttcggatgcagcaaaattggttcaaaagtgcgaaggttgtcagaaatgtgcaagagatcaaaaacaaccttcgtccttgacacagctcatacaacccacttggccattgcaaaggtggggccttgacttgttaggtccgttaccaccggcccaagggaacctgagatatgttgtggtagctgtggaatatttttctaaatggattgaggcgaagcctttagccacaataacttcggctaccgtccaaaagtttttctggcagaatattgtttgtcgtttcggggtgccaaaggctatcactgtggacaatggaacacagtttgactccgaagctttcagggatttctgtgaccaaattggtacgaagatccattttgcatcagtcaggcacccggagtcaaatggactcgttgaaagagccaacgacattataatgacaggaataatgaagctaatcttcaatcaacctagaggaaaatggccagatcagctaaccaaagtggtgtggagccacaatacgacaacatcaaggtctacaggcttcactccatttaagttgttattcggtgacgaagcaataactccagaggaagctaaagccggatcaataaggatagtagcttcggcagaatcagattccgaagctgcttattctatagaaaaagatgctttagaagggatcagactgcaagccgtggagaatattaataaatatcaagctgaaatagtcaaatgacgggatagaaaggttcggctaaaaaatattgagccggggcacttggtgcttcggagggtggccaacccggaaacagtgggcaaattgcagttgaaatgggacgggcctttcttagtagcatcttcgtcaaggcccggttcatacagattgaaagatatggacggcaatgacattcctagatcttggaatgcggatgagcttcggcgatattatgtataattcgatgtaatttttcatattttttattttttctttcatggcacccttttcctttccaaagggggagaaaggtttttaatggggccagcatatgtaattcccttttctagtcttataagagtaaaatccccctaaagaaagtaaatgtaaaagctgagagcgcaccatcgagtgccaaaaagtaaaaacgaagaagctccaaagacgttcctaagggaatgcagagcttataccgcctaagtaaaaggcgaagaagctccaaagacgttcctaagggaatgcagagcttataccgcctaagtaaaaggcgaagaagctccaaagacgttcctaagggaatgcagagcttataccgcctaagtaaaaggcgaagaagctccaaagacgttcctaagggaatgcagagcttacagcgaaaagtcaacgccgattccgccaaaagtaaaggcgaagaagctccaaagtcgttcctaagggaatgcagagctgaggtgtgaatgtttttaagaaaataatggctatgaatatggcttcggatacgtgtttggccattcatttgcacatcacattacatcatagcatttgcattcataaacattcatctaggcatatgtaggataatcattttcatcgcataaaatggttgcttcggcaagaagagaaaaaagaaagggaaaaatttctatgaaggagagcttcggagaaaaggaaaatgttgttttctacgaaggagagcttcggaaaaaaggaaaatattgttttctatgcttcgttgcgtacgaaaagaagggaaggtgttttttcgccttcggctcaaaaaaggaaatttcgtccacatcgaagcatttatcatacatcagtgaaaggttaaggatatattacaaggtatgaacaacatacattaaaaacaagtttttgtttacatttacaaaagttatctcaaaagtttttcaagtactgtctgcagtctactatctaaatcttcaaggagcttcggcttcggcgttatttttgatcatcagcttcggcttcgtcatcctacatgaataaggtcgttggaagtcagaatcaagtttacaagaaaaggtaagcacaaggtatgatttcttactggatcaaggtggctacgaggttcgtctccagctttctctcgaccacctttcgtccatatcatttttacaaatcgattcgagatgcttcgggcgagatcagggatgtcatccaagattgatggtgacaaagtaaaatttggcctattaacaattttcccatgatcacagccagccttcatgaaggctgcagcagtccctcgagaagccacccaggcacagaagtcaccatgcccagctatgacttcgtcgagctcgtcaatctccccctcaatgtgttcgaaggtttttggtagatcttcagctgatggggtaaatttttcgctgctagccccaaccgagtaaaaaatctttcttagtcgttgaatgcacttgttgctaaattccaggcatttttcttgaagatttgtcagtagttttctcaaatccgaattttgctgagcttcggcttcaagttttgcattgagatcttgtttttcccgttcgaactgctcagactggcggagaagctttgtgtttagttctgatatttttgcttcagcttccgccagtaaaccttcggctgcctggagctcaaagttctttttctcaaaagcatctgattgctcctttattttgttttccaaatttccaattataacttcatgctttttatcttcaagatcttgctacatttgcaaggctttgctcaatagcatgctctacataaacacaaccttcgtcagacgtgtttttattagaagcaataaaagttaagggacaagttatttaccttgaagttggagtaaaataaactaccaacgacatgttgtcgtcggtagcggctgatgtctgtttctagcttcgggaatccaatactcttggacagggtgctgataactttggcccctgtttggtctcgaatacactctaatttctcatcatcaacgcctccgaagaggagtgccccaggtttgtacccacaggattgggcgtattctttaagctcttctatttcagcttttgataggtgtcctccaactaagttttggaacacgaaggcttcgtcttccgaagcttcttcaacaacttcttttcctttctttgacgttgtggtcatggcctcttcggcagcagtggtggcttcttctgcagccatgtctagcagtatttggtcaatatgttcaatcgtgctctccaaattcacatcctcagctgaggcagcttcggcagctgcggcctccgaaggtacaatttcagtatctgctccctctgcagctgcttgtgttttttgggccgaagctctcggcggcgtcttgtcaattacctctgtcacggtaatgattctttgtttctttgccttgattgttttccttgatttctcgggctccttgtccttctgaaaaaactttgtcagttgagaacccagtggacttagcttcgcaggtaaggattcagtcattaccttcagaatttcctcaacaacagcagcagaaggcgatgcgggggtttcttctacttcggatatttgttgcttcggagaagaagctttccttttcttttgaattttcttctttattggctctttttcaccttcatctaaggcttcagttgcccttttccttttttggcccccggcacctttgttcagatcttcgtagtctgggtattcgaagcccaaggcgtccaacactcgattcagccttcgttttggacgggtgccgaaggctgcagtcatcaattgatcttctttcttggaataattgccaagtatctcattgcacatcacttcaatcgtatccagccactcttggcaaggagttttaaagtatttcttaaatttgaagtagtaaggcaaacgtacaagttcaccttttttcttctcccccttcagcttcggcatttcccactctttcacactaggaaaaactttgaaagccaagaattcctggaccaagtcccttgtactgatattctctgcaattattttgaattcatacattgctttttgagtcggaccctctggtaacatgtggcactgggggcgagtttccccgaaggtcagttccagtggactttgcacaagcttttctttatcatcatcaaccttaacatagaaccattctgatttccaccctgctgcccatttgcttcgatagctgatcacaggatacttcgtagttttccggtaagcaaaattatagcaaccaaaattctcatgtaatccatcctttctagcctttgtctgatagtgcagttcgtgaactcggcaaaagctgtcagcaaacggttccaccgcctggcttcggagtgcccaaatataaacactaagcctaacgatagcgttaggggttagctggtgaaaatagattccaaaattcttcaatatctctgcaataatcccatgaagggggaatctcaacccagcctttaagaagcttttaaaaataacaatttcatctttctccggctttggggtagtctcttctcccccgaagcgtagtagcttcttttgattttcagtaaaatagcctgactttaccatcttggacaaatcagccttcgaaacagtagatttcccgaagtccaaatggctgggtttgcttggcgtagcaaggtgataatcatcttcggggtcagtttcctcagcatcttctccttctgcttcagcaattgtttgttctgcatcatcaataggagccctttccgaagtcactaacccggatcgttgcatggcttcggagatagggacagtctccgaagcttccgtttcgtccccctcacgttcaaccctggcggtagagcggactctggccatttagctatgaacttgtgaaactttaatacttttttcctccgaagcaggcttcaagatggagcttcgttcgattatgacaaacaagcttcggcgacggttaaaagttttggcagcaaaacagtgcaaatagcagtaaatgctgtggtaacttcacacctactcgtctgtttatatagtgccgcaggtaagaaggcgaagcgccagaagttttacaccaggcggacacccgctcgcactcgctgtacggtgggccgcaaagactgaacagtaattctgcacggtggggccgccacgcgcagggaaattgaatcgtttctcgacaacgagctcagggaaggtgtttttgagaccttcggcgctccgaagcttaagaaacttttttcacggatcaagctcgttacgaaaaacgatctagcaccgcgaaaggggctactgttgggtccatgcttcgtcgccgaaggtcttatagggagaagcgatcctcggatgaagctgtttgtataagatagccgaaggttcctcttcgtaaagcttcggcattgcaaaccgacttaaagatagaatgaccttttagtccataaatgtctgagtcaatgttgtaagtttttataaggggcatacttgtaattcctcacaggctgcgtcctgtgcttataaatagtgaacagtattccgttactgttcacgcattctgatttttgcaatcacatctctcggaatacaacctttgtcaaggcatagcatttgagaacaagtccccaacaacactagtcatttatgagaaaatattggatctagttaagaatcattggcctttgcaccaggcaggtcagctgggaaaataggttgcaccatgaaataaaacttaggattgttagttttgcattgtcttctgacaactgtacaacctatttgaattttttgccagtcattgagtatcatattagttgacataatagtgtgttaacttccacattgataatgccatatttcaccctgcggccatgttctacctagcaaatttcatcatctttctccgatatacagattcccagaagaacctgctgaacatctgacttttcagaagtgatagttatgaaatgattagaaaattagctgatgccatcaactataaaaataaacaaatcgatagtttttcactttttgcatgagctggtgcacatttattgtttttaagaagaggccattactaccccttttctttttggaccattgattcaaactggatcatatgttgcaatgctttctacatgtctctgtatccatgaccagcttgcatcttgttcctttgtcatggtttctttgcttaggcctgttttgggccaatcagtgtgaaaacagaagggttatatctgtaattgcttgatcttctcaactttgatcatcattagtacttagtagatgtttatactattggatatataattgcatactgataaaaaatgatgttaaaattgaaggtcg

SEQ ID NO: 1213 - DNA, 1444 bp, Zea mays
  Intron number 16 from transcript GRMZM2G148594_T01 (locus GRMZM2G148594) derived from phytozome v7.0 (chr-ID 10; pos 143489941 to 143491384 reverse strand)
gctgtttaaatcctctcacctcactgaaaaggaaggtaaagtgttcgcaactgtgccatttactttgttgtataattcagggaaactgcctgtgtcatgatttaagatgtgataggtatatccaacatcccttgggtatccatgataattctagctacatattttagcatgagctgaccaacttctccacaatatgattatgtttaattcacaaaaccgatgatttcagttcaataaccattttcacttccaccgtccatagattgtctgcacctcagtccaagtgtatttccgtttttaactgaaatatgcttaagtataaataactattactattgaaatagtgtatgaagatgatccaggctcttcacattcgagcttgggtttcggatattgggggagccatcactgtgcagctcttggctgagttccttcagatttgggacttggtggaagaggtggtccttaaagaggggtctggtcagcatggatggaagtttagccaatctgggtgctacaccagcaaatcagcataccttgctttctttgtgggatccattaagttcggtccatggagaagaattggaaaagttgggcattttttggtgcaaattctttctatggcttgctgagaataatcgatgttggacagcggatcgtcttgccaaacgtggtctccctcacccagaggtctgtcccttgtgtgaccaagctgatgagacccacaaacacattctcatcggttgtcttttctaggcagatctgggtcttgattctgcaatctttgaacttggctgacattgccccctcagtgtctgattcacgttttttttcctggtgggcacgctctgtcaagctggtgcccaaaatagtccggaaggggtttaacactctctgtattttagatgtctgggcaatctagaaattcagaaacctgtgtgtttgagggcacccagccaaatgttcaactccttctccataggatatgaagtgagggtctcctttggtgtgccgctggagcttctaagttgcatgagcttcttagtaggttgctgaacccagctgtttaggtgctggaagtcctggtcgtttatgttgctttttacgtaaaccctcttaggctatctccagcagcttgctcatcatcatctctcatttcaaacttcgctctgtaaatagtgcagtctacagtataaatcagtgcaaaaacagtgttttgcatggccatataatgtacctgggttgggtcgcttgaccttttctcgctgttttcctccttaaatgaaatgacacgcagctccactatgtcgttcgagaaaaaaataatttatgaagaaaatgctttatctttattttagatgcagaccaagtttctcaaccttttggtttgctgcatttccattacatcaattatggatttcttttcttttccctgacattacag

SEQ ID NO: 1214 - DNA, 4753 bp, Zea mays
  Intron number 1 from transcript GRMZM2G079805_T01 (locus G RMZM2G079805) derived from phytozome v7.0 (chr-ID 1; pos 2 16153051 to 216157803)
gtcttcaaccgggtgcggaacatcaagcagctgcattttcatttgctcctagaaattagtctgctatctatatatataatatgcgcgaaatgacatgaatgatcaataccgttaatatgcataactgaagagcagtcccgctgaagagtggaacacgcataccattggctgtaaaatggtggaaaaataaaaaaaaatcgaagttgagcattttcccaagaaaggttcttgagcttttcttttgtatatatacccgcagtatagatagagaacatgtatacaatggatgaaaatattagtgttggggtcgtgcttcggtgcgccgaaggtctcacacgaagaagcagcttcggctgaagtcgtctccaagagatggccgaaggtcccttttcatggagcttcggcgttttaaaccgacatagagatagaatgacctttttatacatataggtctgagtcaatgctgtaaactttcgcaaggggcataattgtaatttgtcacaggctgcgacctgtgcctataaatagatgaacagtacctctgtactgttcacgcgaacttatcatttgctttcgcatcacgcttgtacttttgccttccgcaggaccgaaggtacatttgtaattcaaagtcatttatattcattgatacaagtagaaataattctatgacaatatttaaatgtttatttcatattctatgatttatgtgaatgcttcattcttcgttgttatgcttacgaaggtatgaccttcgtaaccttcgtccgagatgctatatatcccgaggggatatattgttatggaggacgaaggaccttaacgcttaacattttttgtgttgccttgttcttaattcttagcatttgagaacaagtccccaacaattagaatataaacaggttctgtagacgtaaaactacgcaatttttatgcatgaactagctaatgactaatgaacaaagaccatgcatttgctttggatatttgtggtgctctctttggaggccatacgaaataaataggctaatgtcatttgtttgcagtcttggggaatgtattattatacgtgccagatagagaccttcatcggaaatttatttcgcaaaaaaaaaacattataaaaccccggtgtttctattggaaaatttattgatgagtcataattgacaatgtttttcttgtgagatatgtgcgcatgaggtacctaggagtcagactcaaagacctcgcatgcatgcgtgcacgaagattactaccacgctagatctcttgtcattaagtatgcaaaactaccattttctatgattatcttcctattagttgctcctaagtggtttgaaatgcgaaaagtgttaactaccaagtttcagatcttgtgcagagcactataacttttgtatacgacatatctcgatactagttgatttaaaaataatgaatataaaatatgagatcttaaacacatttttaagatatgaaattactcaagttgaaaaaggatcatcaactacaaggttgtagatctcttagtagacttatacaagttcaacataaaccattactacaggggaaaaacacgcgggatcttcatattttaccgaagtggtttttgcaaccgtgttaatcgtgacctttaccaaggtggtttgcagcccgccaccgtaaaccgagtaaaaaaaatggaaaacccgtggatatgccctcccaccatgagcccatccatgggcatgccaagcccatccatggatctaccttccctctactggatctcgcctcgccggccctcgatccgtcgctgtagttcgtgcccaccctggatctgctatggagactaaggaggtgtttggtttgatgaatcatttcatccaaaatgaggtgtgtatcatgaatccattcctcaaattttgtaggatgacctcattcctcatgttagtactaactaactatgaggaatgaggtagtgatggatcaactcattccattccacaaaccatataaaaaagtgagaagtgagaagatgatggagtagcttattcctcaaaccaaacactttataagagtgaatgggggagatatagagaattagagtagattgagagagagagaggatctggtacctcatccttccaccgtgtcctcctccagggtcccctcatggcagtgtagtgaagagagaaggggcgcgaggtgggtgttgctcgccatcggacgtggtgctccttcgcgagccaccaggaggggccgtggtggtggtgcacgctaagccctagatctactcactcgttgttggcgtgttgctccccgccgtggggaggagcggggattaactagagaagagctcaaggcgtcttgggcacacaaagatacgcgcatcggggtggaggggtgggtgtggctaaaggtgcgttcagttatagagtcaactagaatggaatgactccattctggtttttgagaatgaagccattttattctgcgtttggcaagcagaacagagccactccattttttatttagttgaaaagttgaatagagtggagcctctccgttctttgtttggttggagagacatatgagtgtagaggggaggagggaaggagagcgctcatgtccgatcattttagtggagcgggagcactccaattatttatagtaaatttccatatggagacttcagaagtcgctccgctcctttttatagaaatagagtcgctctattctccttcactcctcaaccaaacacataataagttagtaaggagggatgagtgaaaccctatgtctcatatatacatggagaggtttattgggctgggctaggtatatatgggtaggggtgggcacttttttaccataaaccgaaaaccgaaccgaaccgtaccgaccgaaccgaaatttcggttttttcggtagttcggttcgatttcggtttttgtatctcagaagttcggttttcggtatcgtaatcggttttcaccgtataccgaaccgaaataccaaaaaaaccgaataccaaactttatcaattctaaaatttgacttttcgattatgtgaactaaatgtgtgaagcaattaaattgttattcacttatttatatgtgatgtatgatgtatctctaaatatttgtacctatataatttttactttttaaaattatgtgtaatctatcatataaacttgttgtatgtgttgttttgagtataagtttggtattcgatttttaccgaaaaaccgaagtaaaaaaccgaaaccgaagttctcggttttcattttctagaaaaccgattggtttctaatgcctagaaaaccgaagttttttaaaaccgaaaaaccgaactgaaatttaaaaaaaaacccgaatgctcagccctacatatgggctatcgaggctccgagatgggcccactattatcctaggccggccttgtagtggttaatacattttgtgaggcggttgtctttaatcgcctcggctaataaaagttgaccacgttaatcgatgcattaaccgagtcagccaccatggttaaaaaatagaaaagcctcctaaaaggatttatgtactacacctagttttataggctggtcaaataaaatgtatataaatatattaaatataaatctggtttaaatcatttatatttttcatttctcttcaactagttcgaattaagaaaaaagtccctaattttaccaccactagtatagagaaactctatacaggcagttctgaatacgtttgcacttgcgtttttcagaaccgccagcattaagggtcagtagaaaaaattatttgtacatgcggatatgagaaccgcgagtggttaagaaatctatcagtgaaaatcaatttttactggcagtcgaggtaataaaaccgacattgaaaatctttttcaggaaacataaaatgtgttttaaaaaattcgtaagtcacggtatttttcgcacaaaatttgtggctacaaattggtgagaatcaaacccacaacatcactctcgcacgaagcctcctctaccactctacctatgacgtgccttgtttctatattacagttttgttgctcacatattagaataatccgagtataaattgattatgtgaggctataaatgaaaaaaatgtcgactacaaaatttcataacttttgaagttctacgacttttattttgatgtttttcccatccgaaatcgtttgcaaaatttgcattttcaatttgacaaattcaaatacaatttttgaaagccgagaagattccaaataaaaagttatcaactacaaagtttcgtaacttttcaagatctacaaattttatgttggtggttttattatttgagatcgtttaaaaaagtcaaaaaattaaggataaaaataatttctagtggcggtttcttatgaaaaccggcactagaaatcatggatttctacagtcaatttttttaatgaaccgtctatagaaatatgatttctaatggcgggtttttaaggaaccgtcattaaaaatagtactagccgttgataaccgaatccgcccataaaaattaaatgccaccacaggttttgagctcttttatacccgtgcacctaccgtacaaccaaaatggactggattcttcacagcaagagacagataaataaatggacagctatggcaacatacacatccaaagcagcaactacaaataaagaaatgtacctcctcttccacaataacaaaataatgaattgcaggtgacgttctcaaac

SEQ ID NO: 1215 - DNA, 6462 bp, Zea mays
  Intron number 1 from transcript GRMZM2G023982_T01 (locus G RMZM2G023982) derived from phytozome v7.0 (chr-ID 5; pos 2 0990989 to 20997450)
caccaccgcccgcccgctcgtcgtcgtcgacaaaggtacgtactcagctcgtcgtcatcggcatcggatgtgggctatgcagtcgaaccaagagaagtaatagcggctaataattagagaaattaatgaatcgatctctacatccacggctacaatttggctctatataagcggtagattttttatatctcatacggttcggatagaaaaccatctaagatgtcccagcctattcggaccatatgtgatgtattctatcacaaacggtccgaaataacaaccgtttgtggtgctcgattcgtttcacaaacggtctataatataaaaaccgtctgtgatgcgcgattcgtatcacatgcgattcttaattagacccgattgtgatttgattaccatatattaataattttaatttttaacaaaaatatgcaaatacaatttaaatgaattttaatagcacatatagataactagagagattttaaattaattggcaaccgcaatacataggcgagcgtacatgctaataaatacaatttgattcatacaatttttcattaactactatttttcgtatgtatggctttaagttcttatcaattttgttttccacacgcttgattctctgtggaccgttaaagacggacatctcttcatacttattgtattccttatctccatctcccacattctcaactccaacattttttttgctttccagaaataactacatgcatcttctcatctgctggattgagtacatagaacacttgtgcaacacattcggcgagaacacgggtcatctttatattctactttctttaagtataccagtgtgagtaccagtgtggtccgtagttattcattatcgcccccacgggatgttgtacccattgacacttaaataaagggtattttcatgcttgggccataatcaagttctcatattttttctatgaatccaaaatatgtggtcttctgtccctgtatgtcaaaagcatcgatacgaacaccgctattttgtgcaacacttttcatgtcttttgatttagtgtagattgtgtacccattgatgtcatatgcttgccatgatgtcacaaaacatgatggcccagaagccaaattcttcattgttttctcttccaaagagtctccgaatgggatgtttttgtccattaaccattcgctgaaacgatgtttgtgcttactcatgatccagtcctctgtgcggttctgatttcctttacgaagctcatccaagtgttcctctatgtaaggctcggctatcgcgagatgttgtagtacactaccatgagcacaatgtactagcttgtaatcctcaacgcgaaaagttttcctgcccattcttcctctcccacatagtttaccctcatgtataggtacagacacacctatcattgttctgtctcttatgtaatctatacagctctcaatcacttcttttgtagtgtatccctccatgattgaacctctatgattgaaccctctgggtgagcgcgatttcgcacataaccttttaatactcctaggtatcgctccaactgaaacatatgatgtaaaatatagtgaccctaatatttttatctgatacacgaaatgtatgattaggtgtacttgcatatcaaaaaatgatggaggaaaacacatttcaagcttgcacatagtctcgatgatgtatgccttcagatagtctaagtcttctaaagctattactttttgtgacaccgcattgaaaaagtaacacaaacgtgtgatgacaactttgacatgctctgtttcgagtgctcttaccgcatttgggaggaacaccgtcatcatcacatggcagtcatgagagttgtagccaaatagagataagtccttcatcctgattagtttgctgatattggatgagaaacctgtgggcactttgaccccacgcaaacatttgcaaatttttgttctctcctcaactgacaagttgtagctagctggtgggaggtaaggcttccctttgccactatccactggatgaagttccgttctgatttgaagatctactaggtcattgcgtgatttaagtctgtcctttgtcttactcggcatgcccagcaaggttccaatgatgctgtcaaaaacattctttgttacatgcatcaaatcaatgctgtggcaaatctccatatccttccagtatgggaggtacttgaaaaaaattaattgcttcttgaaagttgtgtaagttgaaggtcagttctctttctcttttttcctttgttttttcttttccgaatacaacatgaatgttctttacaatttcaaatacaagttttccactataaggctttggtgcaccttcactttctggttcattgttaaattcctctttcatctttcggtacttatgctgcttcatcaagaaccgtttgtgtcccatgaacaccaaattcttggatgatttaaggtacaaggaagcagtttcatcgacgcatactacacaaccattctttcctttagtcttttgccctgatagtgtggcgccaccgggagaatcatggatggtaacaaaagaactcttaagttgaaatactcatggcaatactcatcccatagtcaacataatgtactttcttttgtgacacaaccatgacggaatgttgtacatcgttaaagtcacgggccaggtgctatgtacacttcttttttcactaaatgaattcatttcgtctgtacccaaagcaaattttacatttatggtttctttggcaaactcaggatacataagatcaaaaaagtttcattgtgatgcatcagcagggtgtcgaatctgtttgttattctgattgtgattttcagcatgccaacgcataagctcagcctccctaggatttgagaacaaacgtttcaagcgatcaattactggaagataccacatcatcaaagctgggatctttgacttctttttcccatccatgtcatcaaaagtatcatcgtcactttcaggtccaatagtggatttcttgttttatttttcttcgggaaatttttacatagtcttgattgtacctcttcttgtatcgactgacattgcaaactgagcatcttgttgcgttctcaaaatcgccacgatacagaatacaatggttcggacatgcatgatttttttgcacacccagagctatgggagatataagcttcttcgctttataagtgcttgttcgtagtttgttgggttttggtagtaattgggacagaaaattcaaaagatctgtgaagctaatatcaaaccatccagcgctagccttcaacttaagaagttctataactgtacgcagtgtagtaaactttttgtcacaaccctttgattcatcatataaaggttcttttgaggcactttccagtacctccattttagatagccctttctgtgatcccacagaactcaatatttctggttccatatggcgcaacatctcttcgcaatcaaattcttcaaaatcttgattggcatccacagaatccactttaccttccactttatctaaaattccgacagctctctcgtcattaccaggcacttttcacacggatccaactcaccatgttctgtccatatcgtgtaattgtttttaaaccctcttttcagcagatgtgattggattactcatgtatctctccaagctaccttattatcacaatcgttgcatggacataatatctccttactctttcgcaaattcgggtgcttgttggccgcttaaataaagcttctcaaatttcgaatgtacgacggatgtggtcttggcacattgtacatacaacctcggtccattacctatccctatattcattaacatcaataaaatcattaattaattgaattcatccctaaaacatgaaacaaattgatgtgcatgaaaatgaaacaacattgtagcaataagtaccctgaggtgagacaactctttctaaagaatctttaaattagatcaactacaagtccaaatcttggaattcctaagcttttcttcaaatccggtctatattacaaaattgaggcaaaaatcacataaaaatagaaagaaaacaaacggagatcatatatatgcataaactcttgaaatcaatcaataaactcaaaaataaaaccttctccccgtagatctcaaaaaatacccgccgccgctacaacgctgtgactgttctgggagatagggttctggaacccgtgggctagtccttttatactgtacaaacatcgcaggcggatttttagaaaaattgtttgtgatatataacatcacaagcgcttttttattccgaccgcctgtgaagttaatctatcacatgcagtcggaataaaaaagcgtctgtgatgttatatatcacaggcggtttttataaacatccgcctgtgattgtttacaatataaaacgcttgccggttctggcaggaaccctaacacccggccgagctgacacagttgcgccgctaggctgatcaactgcgtttcctgagctgagcgccggccacgccgtccccgagcctaagcgccaccgtccccgagcccgtgcgtcgaacgccgccgtccccaagcccgagctaagcgacgccccgtccctgtccccgatcgagctgagcgtcgcctccggagctaatttgtaatgtgcctggtttaccatctttccatgattgaccactgttataggccttacattgatttgataggataagctaaaccaatgcgttcctttgttgggattaatctgcatttgcatttattcttgcttaattaatgcttactgcaacatggatagttggatacttcattgctcggtatatgatgctttggtattgaaattttttttgaactactttgtcttggtattgacaaaattgtgagatgatttagagttataagcacttaagtatatattgtttgaaaaaaactgttgatgaattagttactaccttctaatcacagagagattttatgctatcagctctaactatcatggcttgtcaggctattgtttggacaaaattggtttatgcatgagtcatgatgcccaaaaatgttgagtcaatttatgttgtgcctgtcatatttgtcgttagggaatatttagatgcttgtgtttttctattgctgatttgtatgctcatagcttagagctacctgacactacttgattccagctagcaagcatgcttattcaaagcttggttagaaactcttgctctatgcttgtatgtgaatcagaactgttaaaatgaaggattgaacatccactaataagatgttgtgctttattcaaagcttggttagaaactcttgctctatgcttgtattcatgtttgcacgctttgagagcagatgtttactctcatcgacatctgggtttccctgtttagtattgtctctgatgtgttccagtgtactgaatctccagaccttattttcttagcggtataatcactttcaatattggcaaaacatatatttttgtcatgtaaattctcgactactcatttggtttgaatctttgcttctgaactacatctgctggtcaatgagttctttactttctttagtactctcgtggttcttcaacagactgcacttgtattatcctaatttatgtcaaaaaatgtctgaaatcatggacacgtgattgttctaacgcagagaaactgtgtgtccagagtacaagcgagatagcaataaattgtttcttccctatgtgttgtcatcttgcttagtttctccagttcccacttgcctcagttatgtttttttcttccttccttgaggttatcttaggattttttcctctaaattatggacttgcaagattaaaaacatctcctactataggttatcttaggatttttcatggacttcatcctcttttgtgagtggtggactgatgaaaccctaaaccctataccccaagattaaaaacatctcctattatgaattccctctaaattatgaacttgcaaggttatcttaggatttttcatgattctatgatatgggcactttctttcttagatgtaacctttgcttcttggtgaactatgaaagacatctcttactcaaatagtaattgtgttctgataccccctgtgtttctgttgcaagttcttcttttttctgctcctctttggcatatataggagtagtagtagtagtaggagcaatggggcaaatgtgcttatggccctcataccctagaacactaccttaacttagcctatgtacccacccctagaggttttgtattagggcccatggaccaaaaggactcaactattgagacactaaggccccaaaacacttaagttactatcatacatcatggaacccccttatcgagcactgagtaccgaccagcccgactaatcgcgactaatcacgattagtcggacgatctgaaaacaatgctctaggatat

SEQ ID NO: 1216 - DNA, 4187 bp, Zea mays; identical to SEQ ID NO: 487
  Intron number 6 from transcript GRMZM2G134329_T03 (locus G RMZM2G134329) derived from phytozome v7.0 (chr-ID 9; pos 1 56201539 to 156205725)

SEQ ID NO: 1217 - DNA, 11055 bp, Zea mays
  Intron number 7 from transcript GRMZM2G302405_T03 (locus G RMZM2G302405) derived from phytozome v7.0 (chr-ID 8; pos 5 4444148 to 54455202 reverse strand)
atttaaatccagacctctactataattgggccacagtgagtgttctagacaaatccagtggctttggaacaaacaattagaatttgttagtttattttatcatgaaaacgcatgagagctgcatgttagatagacaattgctgctgctataggctcattatttcctcttggtagcggatggataatgtggtcctttcgtgtatcctcgggaccatcactgttgaactgcaggatgtcattcgagagcgtggtggtactgctagtcaagcctaggttgccattgaggagcggttcctcagcaaccgtgaggctcgcgctctccacctcgatgttgcctttcgaacatttgtcaaggggacctctccgccaccgagtactgccaccagatgaagggcatggtggcctctatggcctctgggagcccgtctttgatcgcacgcccctcaaccttctctgcggcttcaacgagcactacaatcccttcgcactaggatggggtggttgtcgccatcagcagaagggtgaccatggtggtgggggtggtcggggacgctctttggccatctatctacaacttgtggaccgaccgcatctccatgtggcatctccatcggccgcaactccatgtggcaaggtcactccatctatcattgtgagcaacaggaacattctctcggtcacctctgttggtgatctggttctttccaggtgctttcatcttcgcaatgttctcgtcgccccacatatcattcaaaaatctattatctgtttgttgatatatcaccgataattcttgttctattgagtttgatccttttgacttgcccatgaaggatctcgctactcgagccttctcgtccgctatgatagctctgggccctttgcaccccacggccacctgcttccatttttccacatcccgcttctgctacatcatcaacttcgtccttgctgtagccgctagcactaactacttccactacatctagtacttagcatcgttggctcggtcattgcaaccttgccgtgttgtccgagctgtgtaatggtccaatcatttcttgtactggggcacccttgagcatttatgtcgtacctgttagctaggtcatcatgtgtgacttactttctttagcatctctcaagatgtgcacaattttgatttcatacaaatacacaatgtgatttagggacctcctgttgccagtgtttcgggttataaatattatcgggtgattcttgatgattgctctcattattcgcggacatttctcttgcgttcgaagtctgatacttttgcgactcttctacacttcttcgcttgggtttccacttagtttttatcattaaggcaccactaacaacgttatgcgctcgctactattttagacatctgttcctgctcgctactaggctgagagcctccacgccgccacctacctccttaattatcttccaactacgacgactcgcgcccccacactctacattgctctctttggcaccacttcttcctacgatccatcttcatatttttaggtatgcgtgctaccccaacctttctgccactgctccccataagctttgttcctcactccgcccgttgtatcttcctcggttactattttgatcacaaaggtcactactcatggtctcttggtctcctgtcatatcatcttcgccgaggcggatttctccttctcgactccctcccattccaccaccgactctttttcgaagttggattttcttcgtaatcctgacttagtggcactctttggtcagacccacaccactcctgcctatggccttgtttgtttccgcttattcgacggtggtgagaatcatataattccaccaaacaccctgtgataaactcgcttctccccattgcaccattgtctagaatcgaaaatttaactagtaattgagaatcggagaattgacaagaatttggcgacgtgaggaatcagcgaccgcaagaatcatgcctaggaaaggtggaaacaaatagggcctatggcaccagtgcctttcgtggcttctacgcccctaggctccctccgagcagccctacctcccagttggaccgtgtgccccaccatcggtctctgttagattgctggcagcaatattgacgtctctttcttccccgacttcttcaaccttgtctgtgccactaggagccctacctgtgccctccccggcatggactcctcgttacaccaaccctgtgcatgtctatcagcgacgtgcacagataggtgcactgcctcgatcccagactgagccgacggtgtatcacccccctcttcgtgacccttgccacatgctcccaatggtgacttgcgaggccactggggttctttggtcgattgatcgtcttgtcctcactccgacctcctccacaccggtctcacctgtgccgtcttctgtgcatagtgccatggccgatcctcactggcgttgcactatggtggaagagtagtagactctctttgccaatcacacctatgattttggtgcctgtcccctaggcagtaatgtggtgactagcaagtgggtctagacgcataagcagaaggttgatggctctcttgatcggtacaaggctcggtgggttcttcgaggtttcactcaacgccctggggttgactatgatgtgacgtttagcctagtggtgaagcctgctactatttgagttgttctaacactgaccctctcttgttcttgaccagtccatcatctggacgccaagaatgccttccgccataagactctaactgagatagtctattgttgccagcttgcctgttttgttgactctactcaccctgacatgtctataagctcaacgaacccctctatgatttgaagcgtgcctttcgtgcttggtatagccagtttggcacctatctgctctccctgggctttactgaggctaagtcggacaccaccgtgttcatctactagcgtgacagtgataccatgtacctcctcctgcatgttgatgacattgtgctcactacgtctttctcgtagcacgagtttgccataaaggatttgggctcccttcattttctagggatcactgttgagcgtcacccagatggcttgtttctttagcaacgtcagtatactctggatatccttgagcacactggcatgctggattgcaagccttgcaaaacatcggtggacacacaagccaaggtctctagcgacgtttccttgtcatcgaccccactgcctgccatagtcttgctggcgctctttagtatctcaccacggcccgacatcgcatgtgttgtccccaacaagtgtgtctctacatgcatgatcctggaagccgcacttgagcgcggtcaagcggctccttctggtacttccatggtactgttcacgacgggctccatcttcggcgctccacatttgagctggtcgtctacagcgatgctaattgggtccggtgcccagacatccgtcggtccacttcccattatgcagtgtttcttggagccaacctcaactcttggtcttccaagtgtcagcccgtggtctctcactctagtgctgcgacggagtaccaggctatcgctaatggcgtggctgtggcgagctggcaacaccagctcctctaggagctccacaactctcatcaggagcacacttgtctactgtgacaacgtcaacgccgtctacctctttgtcaacttcgtccaacaccaacgcatggagcatgtcaagatcgactttcgcttcatccgtgagtgcattgctgtcggggacgtccgtgttcatcacgtcccgacgagctcgcagtttgctgatattttcactaagggtcttcccttgttttcggagtttcggtcgagccttaatgtctgtcatggctagactttcgactatgggtggtagattgtacctgtatgtacctataatgggtctacaagcccaccccatgtaacatgatatatatatatatatatatgagtaccaagcccattcaagtgttaggtttcaataccactcaacaaataccaattgttagatgtgagctacgatagagggtgatggtgagaagaacagagcagggtagcgtagagtggacacattgcttattaggaagagtttgttgggttcatacatgtccatacaggagccttgctctctctctttaacaacacataggccgagaaggcaatcatgtctgtgctagtttttttcgaaccacgcaggagaactgcacgtcatttcattaagaaagaaaaagccccccctgatggattagccaccctcagggggaattacaatacactcttatacactattgggccccggatcgaccccaagtggtccagcgttaagggccaggtcctgtagggccgaagccctagctaggcaccacaaatgcccttcagtaatcacttcagacacaacactttggacatctggactaacaccctgaaaaacaatgccattcctatgcttcttgttaaggcccattaggcctaggtctactgcctatatatattatatagtccttagggactaatcatgaattgtcaatcctgaggttagttacatggtaacaaagcaggttacgattacggtttccctatttttttagccgccgtcgcggcctcccccatcctcagccgccgtcgtggcctcccccatcctctgccgccgtcgcggcctcactcatcctcagctgccgtcgcggccacccccatcctcagttgccgtcgcagccaccctctaccgcccgcaggtagcggcgcggatccgccgcagacgtccatctcctgcgtggatctccgccccgctactctgcgccattcatctgcgccgtcgcggccaccctctgccgccgttcccgcaggcttctacggtgccgccgtccccgtaggcagcggcgcggatccgtcgcggatccatctcctgcgcggatccaccctgcgtcgtctcctgcgtggatctccgccctgccgctccgcgccatccatctgcgccggtcgccggctcctgcaccatcgcggatccatctcctgcgtggatccaccctgcgccgtcgccccgccactctgtgcggttctttgccccgtcatccgttatcgtcagctgcgccgttgctgtcgcagcagtctcctgcgcgccgtccccgcaggctcctgcgcggatccgtcgcggactcctgcgcaccatccgtcgcacaacaggcctgtgcaccgtctgcagcgtcgtctgcccctgcccggtctgcgtgccctctttgcgcactgtgcgtcacgtaccacaggttctacaaccctggccagatctgctgttgcagccccggccagatctgctgctgtacggtgacttcgcacggtctcggactctcggtaccatcaagccagtcttttttcagatctgttaatcttcagtgttttattgctcttcaatatgtcggccaacgctattgttgtcaatattgtgcttgatggacagaattatccagaatgggctttttgtgtccaaactgcattaagaggtcacatgttactatttcatttgactgaagattctccagttttagcagctgatagaagcaatgctgctgcaatcaagacttggcagatcaatgatggcaaggtaatggctgcaatggtcaacaacactaaaccaactatgattatgagtctgtccaaatttaccattgctaaggctatctggtcacatctgaaggatggatttgttcaggatagtggtgctcttctacatacccttatgcagcagactcatgtgattgagcaacatgatatctccattgatgaatattattccgcctttgatcgtcttatgagtgcattgacctccatggtgcccgcttgtacagctgtgccttgtccagcccacaagttcattgagaagttctttacctacaaatttgttatgggagttcaacctgaatttgattcccttcgtgcaaggctgcttcacagttcggatactctcaccatggctcaggcattgtccgaattgcttgctgaagagactcgtctgaagtctatgtcctctattactggtgtgagttctcacagtgtgttggctgctgctcagaggtctaggaacacctcctttcagccttgtgaacactgcaaaagaccactcatcggtctgagaactgctttgctaagtttccagagaagctggctgattttcgtgtccgtcgtgctactcgtggtcgtggtacaggaccatctcctagaggctcagttgcggttgctgctacttcatctgctggtgctttgacatcatcttgggttcttgattctggagcttcctttcatgtgacatctgatcagtcacggctggcgtctactacacctgtcaccgagggtacttctgttcagactgctgatggtacattatgtcatgtcacccacaagggttctctttctgattcaacttttactgtcccaaatatattttttgtacctcagttatccatggatctactattagttggtcaaattaccgatcacaattgtttgttggatttgatgactcatcttgttttgtacatgatcgcaaaacaggggaagagattgggacaagccgtcgccgtaaatcttcgcctcacctctacatcttggacactttgcgtcttctttcatcccctaccactacacctcatgtgctcgctgcttcgggtccccacgacgtcattcgcccagtggcatcatcgtctgggtcacttatgtggatcccgtctgtctactctaataaagtcaggatgtttaggctctactcatgttgagtctagttttcattgtaaaggttgtagtcttggaaaacaaatacaacttccatattttactagtaattctcattctgctaaaccttttgatctaattcactctgatgtttgggtccaactccgtttgtttctaaaggtggtcataaatattatgtcatttttattaatgatcattctcgttatacttggatttacttcatgaaacgccgctcgtaattgccttctatttacaagtccttcactcgcatggttcacatccagttttctgctactattaaaatttttcgttcagattctggtggtgaattcctatctgataattttcgccagatattgaccatagagggtactctagctcaactttcttgtcctggtgctcatgcccaaaatggtgttgctgaacgcaaacaccgtcatattattgacagtgctcgtactcttttgatatcttcttttatgccttcacacttttggagtgaagctgtttccactgccctgtatctcattaatagacaaccttcatctaaactttctggtaaatcaccgggtgaagttctttttgggacttctccacgatatgatcatctttgtgtgtttggatgtatatgctatgtcttgttaccaccacgtgatcggactaaattgactgctcaatctatagagtgtgtattccttggatacagtcctgaacacaaaggctattgttgttatgatccatctactcgtcgtattcggatttctagagatgtgagtttcaatgaaaatctccccttctttcagaaccagtctactcactccacctattatcccacagaatctacttctttcatgtgtcttccttccattcctgcatctgaaccatcatcttctacatccacatctgatgttctcattcccataacaccaccttccacctccatgtcatccatctcttactcttccaaaccacctatcatccaaacctacattcgtcgttcccgctctatccctatggctggtcctgatactgatcttgtacctgattcttgtactaacaactctgagtctaatgatgtttttaatcagggatatcgtcttcgtgatcgtggtactattgaacctccagatcggtatggtttcccacgaactgctgtggcaattgttgaacccactacttatcaggaagcttctgggattcttgagtggcagctagctatgattgatgaattggttgctcttgaacgcactggtacatgggatattgttcctttaccctcacatgttgttcctatgacatgtaaatgggtcttcaaagttaagacaaaatccgatggttccattgaaaggtataaagctcgtcttgtggctcgtggtttccaacagactcaaggacttgattatgatgagacttttgcacctggtgcgcatatgactactgttcgaaccttgattgcagttgtagcctcatcttcttggactatctcccagatggatgtcaagaatgcttttctcaatggtgatctacatgaagaagtttatatgcatcctcctccgggggttgatactccagcagggcacgtttgtcgtctccgtcgcacattgtatgggctgaaacaagctcctcgtgcttggtttgagagattcatctttgtcatcacagttgctggtttttattctagtgaacatgatcctgcattgtttgttcatgtctctccaaaaggccgcactttacttctattatatgtggatgatatgctcattacaggtgataactcagaacatatttctcatgtcaagcagcatcttagtaaagaatttcagatgtctgatttgggtccacttagctatttcttgggcattgaagttcatcagactccaaaaaggtttttacctgtctcagtccaagtatatacaagatcttcttgatcgctctggaattactgatactcgcacagctgccacaccaatggatattcatttaaaacttccgttcgaaggatgggacaccactagcagaccccactcgatatcgtcatattgtgggtagtcttgtttatctgttgctcatgatgttcatatgatgggacaccaggcctgatattgctcatgctgttcatatgttgagccaatttgtatccacaccaacttcagttcattatggtcatttgcttcgtgtgcttcgatatttacgtgggacacgatccagatgtttactctatgcttttggtagcccacttcggctacatgcgtattctgatgccacttgggcaagtgatcctgttgatcgttgttctactacaggttactgtattcttcttggatcctctcctattgcttggaaatccaagaagcacgcggccatatctcgttctagtgctgaagccgaacttcgtgctcttgctactaccactgctgaaattatttggctccgctggctattggctgatcttggtgtatgttgtgacactcctacacctctgttatgttataacttgagtgctatacagatttctcatgatccagtgaggcatgaacttactagacacattggtgtcgatgcatcatttactcggtctcattgtcagcagaagactattgatcttcaatatgtgccctcagaatctcaattgacagatttcttcaccaaggcgcaaacaagagcacaacatcggttccacttgatcaaactcaatgcttcagatcctccatttccacattgagttcgaggaggggtgttaaggcccaggtctactgcctatatatatatatatatatatatatatatatatatatatatatatatatatatatatatatattatatagtccttagggactaatcatcaattgtcaatcctgaggttagttacacttccaaagctctcaaaccattaggatcactagggaattaaaaccttctctccattttgggcaatgatctggctgcacgggtccaccaggaattaaagaagatagtagcagtgggaggcctcacaaccgcaatgagtctatgaagtacaggagtctagatttccctggcaaaaacacaggaaactttatggctgatattttccatatgttgatcacaaagaggacaagcaacctgatgtggaagccctcttttggccaagcgatccgcagtccagcaacgaccatagatggccaaccaactgaaggacttgcacttaggaggagcccaagatttccaaatccttttccagggtgagaacctaatagaaccaataaacattgaatcataggctgatttgttgctgtactgcccggtagaagaaagcttccaacaaaactgatcatgtctctgctagttggtctagtatggccaaaaggctctcacatgctgggctttccggtccttggtccattcatacgacgagcatgcctagcatcaccaacgagatcttggcacacttcttgaactcggttcccatttttgacaccgtaaatgctgctgacgtattataatagggttgagtcatctttaggtttgattgtcaatcaagaaccctttcccaccaatcgttgaaacaatcatcatcaatctgtagtgttagaacctgtaggttgagcttttgcaacaacagtaaccaaaattttcataagatggggcaagcatgaagctagtgattgatccattcctcctcttgattgcataatattattttgaaataaaagtgtaataaactagtgttacctgccggccagattctcttgagaaggggcaaacagcaagcacagagcaagtggtcatgcggagtggatagtgaggagagtggttgacgcaacgagatcctttgccgtaactttctcccactgccgtggggggccggagccggccggacccgcacacagtgacgcggccacgactatgttccgacaagtaacggcagaggatccgctcacggtgttgacctcaccatgatgggttcatcacttgcttttgcgatcaagaggaaggattgatcacaaaccaaaatggagtttatttaaaaagggtaataaactagtgttgccttgttacctaggatattttaaatacctttggccatgctacccgttggcatgtcaaattagtgttgtttgccactgaacatgcgaaaaggattttggaattgaaaacaagatagacacggttatttattagtttttttgaaaaataacattttcttagtcacccaaacctactaagtgcaataattatttgcttgtgatttcaccatgttcctcttaggcagacaaatatttagagaatt

SEQ ID NO: 1218 - DNA, 3153 bp, Zea mays
  Intron number 2 from transcript GRMZM2G156088_T02 (locus G RMZM2G156088) derived from phytozome v7.0 (chr-ID 10; pos 119470043 to 119473195)
tttggggctctccacggttttgataaagacgccaggtctggtcataatttcgactccaatgtctttaatttctttgttaaagtctaccctttcaacttgatatatttccatctgtccaatatatttgcttgctacatgccttttttttttcttgaacacatgttacggtgcctcaagctgtcaacgttatttggttgttgtacggtggtagcctgacccgtaactgaggggttaggatccttatgcatatagactagatctatacatatacttttgtttggctgtattattatattcagaacaaacataacttgtgtttggttatctacaccaaaacatgtattagagaagaataaataaagaaatttttaaatattatataacatgtgtggtctaattttattaaaaatccaagaatacgaatataaaatcggttcgatgattaatttttatttgaaagatataataaaaaacaaatgaaaatgcttctcgttttgagtgcaactacatgcaaccgcatgccactgtacctcacgcgggcgtacacgcggtaggagcatctcgcgttggcgtggctctccgtccatttttgcatgttcagcctgtacgttgaggagagaactaaacaatacttgcttttagtagggctggtaaatcgtaatccaaatgtttctttattaattgttagaggcttaagtaatttttagttaaaaaataaatagaaacagggtccgattttaatctggtcctattcttacattttatagtgtaaaatttagagttcattattacctctagctttgagactcggcgggtgcggctgcaggcccccgcacgtaaacatgtcctgacggtctgggcttgtcgggcggcctgaaacctgacacgggtttgggccggccagaatccggcataacacgtagtgtaccagctcatgccggcccggcccgatcaccgggccgtgtttaggccgaaggcgtggcatcccggcacgacccggttttattttttctattttttcatataaatacatatattatagttgaatatagagtataaaacacaagaaacatgtgtttttgttggttatgttggtgtaaataaatgtttagagctaacaaatatggtttcaaccctcatatatgcatacttttaggatatttttatcatttaaacgccatatgttattatgggcccgttagacccgtcgtgccatgaaccggcccgacacggttgttaacctagcgggtcgtgcctgggcctcgctcggagcccgtgggtcggcacgacccgctagctaattcgagtcgggccagcacggcccgcccatttggacatctatacaggcacatcaaccaaacaagtggaaaaatttttctataacttgtatgttggttccggttggattagatctgagtataaggaattaccaataattggaaaggctatatggtggatcaacatgcttgcattaaccctaaactagaaaattgtcgaggcgccgaccaatttattgtgcacaactatttattgaaataaatctacataactctctaacctttagaggatagtttgcttcacctcctcaccatcaaaactggttgtttaacccataaaaccagacgataatcccgtgagcttagtggttttgatgacgtaacactgatttaagtggtataagttttgtcttttttagttttgtcatcttatttatataattttacataaaaatatgtaactagatattatatttgtcctaatttttctaaaattttaaaaataacatattaattactaaatattgaaaactgcaaaaaaagagtttaatatttttgtttctcattaatttcttatattctaaggctacaaattttagtggagctacataatactattactaaactattagttttttgttaattttattaaacaagttaagtgatccttctaattactgactaaatcaattgtacatttgtttttaataaaaagttaccaaactataataaaatgatctccaatttttatatgaaccttttactagctaaactagcatacacaaatattttcataattttttgagaactttgaatctatacccataatttacataaatattttgcataattttatatgagtctagatttaaatttatcagaaaattataaaagtattcgtatatgttagtttagctaagaaaaaagatctgtgtaaaaattagagatcattttgttactatttgctaggtatttataaaaacatatgtaaaattaatctagttagtaattagaagaaaaggctacttaactttattaataaaattgacaaaaagtagtagtttattaatagtattatttagctctagtaaagaattagtctcagaagataaaaaatgaatcatggacaaaaatattaacctctttctatgtagttttgattttttaataattaattggttgccaatgttattaaaacgatgaaacattgaaacgctcataggtgaaactttgactttaaatgtctaaacaaagtttaaatgtagttttaaacaacaaagaaaaaaataacaatatagcattatttcagacaataacatgaatttaaataccaaaacagagaggttagtggcttaccaaaacttcaccaaaagcgagattggaccccaaaagtaactaacagactcagcccaaaaatagctattcgtataaaatgcatggaacactctattttacagtttaaaacgccaaaacactaaaacacggtttcaaccactaattagagctttgaggtttaaacataattttaataacacggtctgttgctccaaaaatttcagagaaattagggtgaatataatatctaattagcaatttttgtttaaaataatataaattttggacactagtagaacaaggaattgaaaaaaaacataagtggtgtcacttaaactatatcacaccatcaaaactggcaactaaaattgtctatggggttatttgtctcactttgtaaatttgaggtgttaaacaaccggttttgaaggcaagagagtgaagtagaccattcctaaggtcggaggatatgtagacttattccaatatttatttctgaatgtggaatttgcctatgatatttgtagaagggtgcacaagc

SEQ ID NO: 1219 - DNA, 18979 bp, Zea mays
  Intron number 8 from transcript GRMZM2G701441_T01 (locus G RMZM2G701441) derived from phytozome v7.0 (chr-ID 3; pos 3 8612518 to 38631496)
gagatcgaacctcatcttcaatctcctccaaaaaggttaacctctaaacaaatacctcatagacatcagcgataccaactgttctttatgtgttgtagcacaaaacaaatatttatgtgttaatacgtaataatcagtcgatttattaaaactctgaaagtcgcctagagggggggggtgaatagggtgaatctgaaatttaacaacttaagcacaactacaagccgggttagcgttagaaatagaaacgagtccgagagagagggcgcaaaacaaatcgtgagcgaataagaaatgagacacaaggatttgttttaccgaggttcggttctcgcaaacctactccccgttgaggtggtcacacagaccgggtctctttcaaccctttccctctctcaaacgatccctcggaccaagtgagcttctcttctcaatcaaacgggaaccaaacttccccgcaaggaccaacacacaattggtgtctcttgcctcggttacaattgagttgatcgcaaaaaagagtgagagaaagaagcgcaagagctcaaatgaacacaacaaatcactccctctaatcactaaagctttgtgtggagttgggagaggatttgatctctttggtgtgtcttgtattgaatgctagctcttgtaaggtgttgaagagtgaaaaacttggatgacttgaatgtgggggtggttggggtatttatagccccaaccaccaaacttgaccgttggtggaggctgctgtcgacgggcgcaccggacagtccggtgcgccactagacactaactggtgcgccagccacgtcacctggccgttgggttccgaccgttggagctctgacttgtgggcccgcctggctgtccggtggtgcaccggacaggccctgtaggatgtccggtgtgccacccgcgcgtgctctgctcctctgcgcgcgcaggagcgcatttaatgcgttccagtcgaccgttgcgcgcgaagtagccgttgctccgctgtcacaccggacagtccggtgtgcactggacagtccggtgaattatagcggagcgcccttggaaattcccgaaggtgaagagttcagcctcgagtgccctggtgcaccggacactgtccggtggcacaccggacagtccggtgcgccagaccagggtgccttccgggttgtcttttgctcttttgtttgaacccttttcttggtctttttattggcttattgtaaaccttgggcacctgtagaacttatagactagagcaaactagttagtccaattatttgtgttgggcatttcaaccaccaaaatcaattaggaaatatgtgtaagcctaattccctttcaatctccccctttttggtgattggtgccaacacaaaccaaagcaaatatagaagtgcataattgaactagtttgtaagtgcaaaggttacttggaattgagccaatataaattctcataagatatgcatggattgtttctttatttttaacattttggaccatgcttgcaccacatgttttgtttttgcaaattcttttgtaaaattttttcaaagtcctttgcaaatagtcaaaggtaaatgaataagattttgagaagcatttacaagatttgacattttctccccctgtttcaaatgctttttcctttgactaaacaaaactccccctcaataaatttctcctcttagtgttaaagagggttttaagataccaatttttgaaggtgctactttctccccctttttagatatagtaagataccaatttgaaaaactctttttgaaaataaggtggtggtgcggtccttttgctttgggctaatactttatccccctttggcatgaatcgccaaaaacggatactttgagtgaaatataagcccgtggaactactttctccccctttggtaaaagacatatgagtgaagaaagtagtgttggcgaaggatgagttatggagtggagtggaagcctttgtcttcgccgaagactccaattccctttcaatatacctatgacttggtttgaaattcacttgaaaacacattagtcgtagcatatataaagaagacatgatcaacggtatacttatgagctatgtgtgcgagacattaaaagaaattcctagaatcaagaatatttagctcatgcctaagtttgttaaaagtttgttcatctagtggcttggtaaagatatcggctaattgttccttagtgttaatatatgcaatcttgatatctcccttttgttggtgatcccttaagaaatgataccgaatggctatgtgtttagtgcggctatgctcaacgggattatccgccatgcggattgcactctcattatcacatagaagaggaactttggttaatttgtaaccatagtccctaagggtttgcctcatccaaagtaattgcgcgcaacaatggcctgcggcaatatactcggcttcggcggtagaaagagctacgacattttgcttctttgaagcccaagacaccaaggatcttcctaagaactggcaagtccccgatgtactctttctattgattttacaccccgcccaatcggcatccgaataaccaattaaatcaaatgtggatccccgagggtaccgaagcccaaacttaggagtataaactaaatatctcaagattcgttttacggccgtaaggtgagcttccttagggtcggcttggaatcttgcacacatgcatacggaaagcataatgttcggtcgagatgcacataaatagagtaaagagcctatcatcgaccggtataccttttgatcgacggatttacctcccgtgtctaggtcgagatgcccattggttcccatgggtgttgaaagggaaatgtgtccttgggccatttctaagtattttggtgatttaatgtctaacacaagtgcttaaatgaaaaatgatggacaaagtacaaaccaaggataaaggtatgtttctcagacttagtacattgttttatggactaatgtattgtgtctaagtgctggaaacaggaaaaatccaattgaaaatgtcttggctcgagcagccaagaatctgctcagtctgggagcaccggactgtccggtggtgcaccagacagtgtccggtgcgccaggctggttcgagcgaagtggccgctctcgggaattcaccggcgacatacggctataattcaccggactgtccggtgtgcaccggactgtccggtgagccaacggtcggccgggccaacggtcggtcgcgcgatctgtgcgggacacgtggccgagccaacggctagaagggggcaccggactgtctggtgtgcaccggacatgtccggtgcgccaacggctctctagctgccaacggtcggctgcgccagttaaggaaagaaatcgggcaccggacagtgtccggtgtgcaccggactgtccgatgcgccagacgacagaaggcaagaattgccttcccagattgttctcaaacggctcctagctgccttggggctataaaagggacccctaggcgcatggaggagtacaccaagcattcctacaacattcctaagcaccaagacatcgattccgcgcctttgattctttgcgatagcaattagagctctagttgagtagtgaactctttgagttgtgttgtgagctctcattgcgacttgtgtgcgtggtgttgctgtgatttcttgtcttgagtgcgttgctaatctctcccttgctccgtgcttctttgtgaatttcaagtgtaagggcgagaggctccaagttgtggagattcctcgcaaacgggattgagaaaaaggcaggaaaacaacgtggtattcaagtgggtctttggaccgcttgagaggggttgattgcaaccctcgtccgttgggacgccacaacgtggagtaggcaagcgttggtcttggccgaaccacgggataaccactgtgccatctctatgattgatttcttgtggttattgtgttttgactcctctctagccacttggcaattattgtgctaacgattaaccaagttttgtggcttaagttttcaagtttcataggatcacctattcacccccctctaggtgctctcaattggtatcagagtcgttctcttcacaaagggactaaccgcccgaagagatggatcctaaggggaagggtatcgtgatgaacgataaagagaaggaatccttcgtcaatgagccgaaggacgacaagcctaccgactccggctcgggccatagacggaaagaagggaagaagaagaagatgaggcgcatcaaggagatcgtctactacgacgacaacgatgagtctacttcctcccaaaaggacgacgaccacaacgactacgagagaaggaaaccggtcaattcgaacttttcttttgactactctcgtattcctcaaagtgcaaatgctcatttattatctattccacttggtaaacctcctcattttgatggagaggactacggattttggagtcacaaaatgcgtagtcacttgttctctctccatcctagtatatgggagattgtagagagtggaatgcactttgatagttcggatagtcccatgttcattaatgagcaaattcataagaatgcacaagctactactgttcttctagcttcattgtgcagggatgaatatcacaaagtgagtggcttggataacgccaagcagatctgggacaccctcaagatttcacatgaggggaacgacgtcaccttgctcaccaagatggagttggtggagggcgagcttggacgattcgcgatgataagaggcgaggagccaacacaaacatacaaccggctcaagacccttatcaacaaaataaggagctacggaagcacgcgatggacggaccacgacgtcgtccgattgatgctaaggtcctttaccgttcttgatcctcatttggtgaataacattcgtgagaatcccaggtacaccaaaatgtcgcccgaagaaatccttggaaaattcgtaagcggacgaatgatgatcaaggaagcgaggtacgtggacgacgctctaaacggtccaatcaatgagcctcaacccgttgctctcaaggcaacaaggagcaaggaggcgttacccagcaaggtagcacaaattgaggccgccggacttaatgatgaagagatggccctcatcatcaagagattcaaatgctcatcgccggacttaagggtcgcaagggacagccaagcaagaccaaagccaaggggaagcgctcatgcttcaaatgcggtaagattggtcattttattgctaactgtcccgataatgaaagtgaccaggaacacaggagcaagagggaaaagaagaaaaattacaagaaggccaagggcaaggcacatctaggaaaggaatgggactcggattgctcctcctccgactccgacaatgaaggactcgccgccaccgccttcaacaagtcatccctcttccccaacgagcgtcacacatgccttatggcaagggagaagaaggtatgtagtcgaaactctacttatgcttcttcaagtgaggacgaatctagtgatgaggatgaaatagattattcatgtttatttaagggcctagatagaaccaagatagataaaattaatgaattaattgatgccttgaatgataagaataggcttttagaaaaaacaagaagatttgttgtatgaagaacatgacaaatttgtagaagcacaaaaatctcatgctttagaagttaaaagaaatgaaatgctttcctgtgaattatcttcttgccatgagacgatttctagcttaaggagcattaatgatgatttgaatgctaagatagaaatagctagtaaatcaacaacttgtgtagaaaatgttgttatttgcaatagatgtaaaaactttgatattgatgcttgtagtgaacacatagcttctattgcaaagttaaatgatgaaatggctagtcttaatgccaaacttaaggctagcaaaagtgattttgataaactaaaatttgctagggatgcctacacgattggtagacacccctcaattaaggatgggcttggcttcaagagggaagccaagaacttgacaagccataaggctcccatctccgccaaggagaaagggaaggcccctatggcaagtagtactaaaaagaaccatgcttttatgtacaatgatagaagacagtctcataggagttgtaatacttttgattcacatgcctatgactcttatactatgtatgcttccagctcttcctatatgcatggtagagatatgcctggaaaaaatattcatcatgtgcctaggaagaatattgttcatgttcctagaaaagttatgaatggtccctctacaatttatcatgctttaaatgcttcctttgctatttgtagaaaggataggaagatagttgctaggaaattaggggcaaaatgcaagggtgataaagcttgcatttgggtccctaaggaaattgtgactaaccttgtaggacccaacaagagttgggtacctaagacccaagcctaaatttgccttgcaggtttatgcatccgggggctcaagctggattatcgacagcggatgcacaaaccatatgacgggggagaagaagatgttcacctcctacgtcaagaataaggattcccaagattcaatcatattcggtgatgggaaccaaggcaaggtgaaaggtttaggcaagattgcaatatccaatgagcactctatctctaatgtgtttttagttgagtctcttggatataatttactatctgtcagtcaattatgtaatatgggatataattgtctatttacaaatgtagatgtgtctgtctttagaagaagtgatggttcactagcatttaagggtgtactagacgacaaactttatttagttgattttgcaaaagaggaggccggtctagatgcatgcttaatcgctaagactagcatgggctggctgtggcatcgccgcttagcacatgtggggatgaagaaccttcacaagcttctaaagggagaacacgtgataggtttgactaacgtgcaattcgaaaaagatagaccttgtgcagcttgtcaagcaggtaaacaagtgggaggagcacatcacagcaagaatgtgatgaccacttcaagacctctggagctgctgcatatggacctcttcggacccgtcgcctatctgagcataggaggaagtaagtatggtctagttattgttgatgacttttcccgcttcacttgggtgttctttttgcaggataagtctgaaacccaagggaccctcaagcgcttcctcaggagagctcaaaatgagtttgagctcaaggtgaagaagataaggagcgacaacgggtccgaattcaagaatcttcaagtggaggagtttcttgaggaggaggggatcaagcacgagttctccgctccctacacacctcagcaaaatggtgtggtagagaggaagaacaggacgctcattgatatggcgaggactatgcttggagagttcaagacccccgagtgtttttggtcggaagccgtaaacacgacttgccacgccatcaacagggtctatcttcaccgcctcctcaagaagacctcatacgagctgctaactggtaacaaacccaatgtatcgtactttcgtgtatttgggagtaaatgctacattctagtgaagaagggtaggaattccaaatttgctcccaaagctgtagaagggtttttattaggttatgattcaaatacaaaggcgtatagggtcttcaacaaatcattgggtttggttgaagtctctagcgacgttgtatttgatgagactaatggctctccaagagagcaagttgttgatcttgatgatgtagatgaagaagatgttccgacggccgctatacgaaccatggcgattggtgaagtacgaccacaggaacaaaaggagcaagatcaaccttcttcctcaactatggtgcaacccccaactcaagacgatgaaaaggttcatcaacaggaggcgtgtgatcaagggggagcacaagatgatcatgtgatggaggaagaaactcaaccagcacctccaacccaagttcgagcgacgattcaaagggatcatcccgtcgatcaaattcttggtgatattagcaagggagtaactactcgatctcgattagttaatttttgtgagcattactcctttgtctcttctattgagcctttcagggtagaggaggccttgctagatccggactgggtgttggccatgcaagaggaactcaacaacttcaagcgcaatgaagtttggacactagtgcctcgtcccaagcaaaatgttgtgggaaccaagtggtgttccgcaacaaacaggacgagcacggggtggtgacgaggaacaaggctcgacttgtggcaaaaggttatgcccaagtcgcaggtttggactttgaggagacttttgctcctgtggctaggctagagtccattcgtattttgctagcatatgccgctcaccatactttcaggttgttccaaatggatgtaaagagcgctttcctcaacgggccaatcaaggaggaggtgtacgtggagcaaccccctggcttcgaggatgaacggtaccccgaccacgtgtgtaagctctctaaggcgctctatggacttaagcaagccccaagagcatggtatgaatgccttagagatttcttaattgctaatgctttcaaggttgggaaagccgatccaactcttttcactaagacttgtgacggtgatctatttgtgtgccaaatttatgtcgatgacataatatttggttctactaataaaaagtcttgtgaagagtttagcagggtgatgacgcagaaattcgagatgtcgatgatgggcgagttgaactacttccttgggttccaagtgaagcaactcaaggacgacaccttcatctctcaaacgaagtacacgcaagacttgctgaagcggtttgggatgaaggatgccaagcccgcaaagactccgatggggaccgacggacacaccgacctcaacaaaggaggtaagtccgttgatcaaaaggcataccggtcaatgatagggtcattactttacttatgtgctagtagaccggatattatgcttagcgtatgcatgtgtgctagatttcaatccgatcctaaggagtgtcacttagtggcagtgaagcgaatccttagatatttagttgctacgccttgcttcgggatctagtatccaaaggggtctacctttgacttaattggatattcagattccgactatgctggatgtaaggtcgataggaagagtacatcggggacgtgccaattcttaggaaggtccctggtgtcatggaactctaagaaacaaacttccgttgccctatccaccgctgaggccgagtatgttgccgtaggacagtgttgcacacaactactttggatgaggcaaaccctcagggactttggctacaatctgagcaaagtcccactcctatgtgataatgagagtgctatccgaatggcagaaaatcctgttgaacacagccgcacaaagcacatagacatccggcatcactttttgagagaccacgagcaaaagggagatatcgaagtgtttcatgttagcaccgagaaccagctagccgatatctttaccaagcctctagatgagaagaccttttgcaggttgcgtagtgagctaaatgtcctagattcgtggaacttggattgatttgtagcatacatgtgtttatgccttttgatcatgttccttctgcattttgttgctcaataatggtgctcaagttgtataaacactccctggacctcacaagtccgttgcaaagtgatgcacatgtttagggggagatgtgttacaacttgaccctttgagactaaccatgtgcttgagtttgcttgttttagtctcaaaggaggtttgaaagggaaaaggtggacttggaccatgaaagacttccactgcacttcgatgagagggtaacttattccaagttcatctcatgtaatcttattgcctttgtattcttattgaagattttggtgaggcaatgaggttctagggccaagattcatcccgttttggtgcttgatgctaaagggggagaaaataaaggccaaagcgataaatggatcagctaccacttgagagattttgaaaatagtagaatagagcttttggtttgtcaaaactcttttattgtctcttttttcaaaagttggcttcttgtgggggagaaatgttgattatgggaaaaaggggagatttttgaaatcttgaatcaatttctcttggaatgactctctttatgtcttaacatgtgtgtttgacttagaaatagaaatttgagtttgatttgcaaaaacaaaccaagtggtggcaaagagagatccatatatgtcaatttgaatcaaaacgatttgagttcttatttgaagtaagtttgtatttgttccacttgctttatattgtgttggcataaatcaccaaaaagggggagattgaaagggaaatgtgtccttgggccatttctaagtattttggtgatttagtgtctaacacaagtgcttaaatgaaaaatgatggacaaagtacaaaccaaggataaaggtatgtttctcagacttagtacattgttttatggactaatgtattgtgtctaagtgctggaaacaggaaaaatccaattgaaaatgtcttggctcgagcagccaagaatctgttcagtctgggagcaccggactgtccggtggtgcaccggacagtgtccggtgcgccaggctggttcgagcgaagtggccgctctcgggaattcaccggcgacgtacggctataattcaccggactgtccggtgtgcaccggactgtccggtgagccaacggtcggccgggccaacggtcggccgcgcgatctgcgcaggacacgtggccgagccaacgactagaagggggcaccggacatgtccggtgcgccaacggctctctggctgccaacggtcggctgcgccagttaaggaaagaaatcgggcaccggacaatgtccggtgtgcaccggactgtccggtgcgccagacgatagaaggcaagaattgccttcccagattgttctcaaacggctcctagctgccttggggctataaaagggacccctaggcgcatggaggagtacaccaagcattcctacaacattcctaagcaccaagacatcgattccgcgcctttgattctttgcgatagcaattagagctctagttgagtagtgaactctttgagttgtgttgtgagctctcgttgcgacttgtgtgcgtggtgttgctgtgatttcttgtcttgagtgcgttgctaatccctcccttgctccgtgcttctttgtgaatttcaagtgtaagggcgagaggctccaagttgtggagattcctcgcaaacaggattgagaaaaagcaaggaaaacaacgtggtattcaagtgggtctttggaccgcttgagaggggttgattgcaaccctcgtccgttgggacgccacaacgtggagtaggcaagcgttggtcttggccgaaccacgggataaccactgtgccatctctgtgattgatttcttgtggttattgtgttttgactcctctctagccacttggcaattattgtgctaacgattaaccaagttttgtggcttaagttttcaagtttcacaggatcacctattcaccccccctctaggtgctctcaggtgtcttgatgggcttggcatccttcattccaaacttgtttagaatgtcttgaatatacttcgtttggctaatgaaggtgccctcttggagttgcttcacttgaaatcccaagaagtacttcaactcccccatcatagacatctcgaatttttgtgtcatgatcctactaaattcttcacatgtagattcatttgtagacccaaaaataatatcatcgacataaatttggcatacaaacaaatcattgtcaagagttttagtaaataaagtaggatcgacctttccgactttgaagccattagtgataaggaaatctcttaggcattcataccatgctcttggggcttgcttaagcccataaagcgccttagagagtttataaacatagttagggtactcactatcttcaaagccgggaggttgctcacatagacctcttccttgatcggtccattgaggaaggcactcttcacgtccatttggtaaagcttgaagccatggtaagtagcataggctaataatatacgaattgactcaagcctagctacgggtgcataggtttcaccgaagtccaaaccttcgacttaggagtatcccttggccacaagtcgggctttgttccttgtcaccacaccatgctcgtcttgcttgttgcggaagacccacttggttctacaacattttgattaggacgtggaactaaatgccatacctcgttccttgtaaaattgttgagctcctcttgcatcgccaccatccaatccgaatcttgtagtgcttcctctaccttgtgtggctcaatagaggaaacaaaagagtaatgctcacaaaaatgtgcaacacgagatctattggttacccccttatgaatgtcgccgaggatggtgtcgacggggtgatctcgttggattgcttggtggactcttgggtgtggcggtcttggttcttcatcctccttgtcttgatcatttgcatctcccccttgatcattgccatcatcttgaggtggctcatctttttgttcttctccttcatcaacttgagcctcatcctcattttgagttggtggagatgcttatgtggaggaggatggttgatcttgtgcatttggaggctcttcggattccttaggacatacatccccaatggacatgttccttaacacgatgcacggagcctcttcatcacctatctcatcaagatcaacttgctctacttgagagccgttagtttcatcaaacacaatgtcacaagaaacttcaactagtcctgaggacttgttaaagactctatatgcccttgtgtttgaatcatatactagtaaaaagccttctacagtcttaggagcaaatttagattttctacctcttttaacaagaataaagcatttgctaccaaagactctaaaatatgaaatattgggctttttaccggttaggagttcgtatgatgtcttcttgaggattcggtgtagatacaaccggttgatggcgtagcaggcggtgttgaccgcctcggcccaaaaccgatctgaagtcttgtattcatcaagcatggttcttgccatgtccaatagagttctattcttcctctccactacaccattttgttgtggcgtgtagggagaagagaactcatgcttgatgccctcctccttaaggaagccttcaatttgagagttcttgaactccgtcccgttgttgcttcttattttcttgatccttaagccgaactcgttttgagctcgtctcaagaatccctttaaggtctcttgggtatgagatttttcctgcaaaaacaacacccaagtgaagcgagaataatcatccacaataactagacagtacttactctcgccgatgcttatgtaagctatcgggccgaataggtccatgtgtaggagctccagtggcctgtcagttgtcatgatgttcttgtgtggatgatgaacaccaacttgcttccctgcctgacatgcgctacaaatcctgtctttctcaaaatgaacatttgttagtcctaaaatgtgttctccctttagaagtttgtgaagattcttcattccaacatgtgctagtcggcgatgccagagccagcccatgttagtcttagcaattaagcaagtgtcgagttcagctctatcaaaatctactaagtatagctgaccctctaacactctcttaaatgctattgaatcatcactttttctaaagacagtaacacctacatctgtgaaaagacagttgtagcccattttgcacaattgagatacggaaagcaaattgtaatctaaagaatctacaagaaaaacattggaaattgaatggtcaggggatatagcaattttacccaatcctttgaccaaaccttgatttccatccccaaatgtgatagctcgttggggatcttggtttttctcgtaggaggagaacatcgttttctccccagtcatgtggtttgtgcacccgctatcgatgatccaacttgagcccccggatgcataaacctacaaaacaaatttagttcttaattttaggtacccaaatcgttttgggtcctttgacattagacataagaactttaggtacccaaacacaagtctttgaccccttgtgcttgcccccaacatacttggcaactaccttgccggatttgttagttaaaacataagaagcatcaaaggtcttaaatgaaatgttagaatcatttgatgccttaggagttttcttcttaggcaatcttgcatgggttgattgcctagaactagatgtctcacccttatacataaaagcatgattagggctagagtgagacttcctagagtgaattctcctaattttgctctcgggataaccggcagggtataaaatgtaaccctcgttatcctgaggcatgggagtcttgcccttaacaaaattagacaatcttttaggaggggcattaagtttgacattgtcccccttttggaagccaatgccatccttgatgccagggcgtctcccactatagagcatgcttctagcaaatttaaacttttcattttctaagtcatgctcattgatcttggtattaagttgagctatgtgatcattttattttttaattaaagctaggtggtcatggatagcatcaacattaatgtctctacatctagtacaaatggaagtatgctcaatggtagatgtagagggtttgcaagattttaattctacaaccttagcatgtaatatatcattttcacttctaaggttagaaatagtaacattgcaaacatcaaaatctttagccttagcaatcaatttttcattttcatttctaaggctagcaagagagatattcaattcttcaatcttagcaagcaaatcaacattttcatctctaagattgggaattgaaatatcacaaacattagaatcaaccttagcaattaatttagcattttcatttctaaggttggcaatagtgtcatggcaagtgcttagctcactagatagtttttcacatttttctacttctagagcataagcatttttaacctttacatgcttcttgttttctttaataaggaagtcctctcgggtgtccaagagatcatccttctcatgaatagcactaatcaattcatttaatttttctttttgttgcatgtttaggttggcaaaaagaatgcgcaaattatcctcctcatcactagcattaccctcatcactagaggtttcatatttagtggaggatcttgattttaccttcttccttttgccgtcctttgccatgaggcacttgtggccgacgttggggaagagaagacccttggtgacggcgatgtttgcggcgtcctcgtcggaggaggagtcggtggagctctcgtcggagtcccactcctggcaaacatgggcatcgccgcccttcttcttgtagtatctcttcttctcctttcttctccccttcttgtcgtcgcccctgtcactgtcactagataatggacatttagcaataaaatgaccgggcttaccacatttgtagcaaactttcttggagcgggacttgtagtccttccccctcctttgcttgaggatttggtggaagctcttgatgatgagcgccatctcctcattgtcgagctttgaggcgtcgattggttgtctacttgatgtagactcctccttcttctcctccgttgccttgaatgcgaccggttgtgcttcgggcgtggaggggccatctagctcgttaattttctttgagcctttgatcatcaattcaaagctcacaaagtttcctatcacttcctcgggagtcattagtgtatatctaggattaccacgaattaattgaacttgagtagggttaaggaaaacaagtgatctaaggataaccttaaccacttcgtggtcatcccattttttgctcccgaggttgcgcacttggttcaccaaggttttgagccggttgtacatgtcttgtggctcctccccttggcgaagtcggaagcgaccgagctccccctcgatcgtctcccgcttggtgatcttggtcacctcgtctccttcatgcgcagtctttagcacgtcccaaatctcctttgcgctcttcaacccttgcaccttattatactcctctcgacttagagaggcgaggagtatagtggtggcttcggagttgaagtgcacaatttgggctacttcgtcctcatcatagtcttcatcccctacggatggtacctgtacaccaaactcaacatcccatatacttttgtggagtgaggttaggtgatatcgcatcatatcactccacctagcataatcttcaccatcaaacgttgttggtttgcccaatgggacggaaagtaatggcgtatgtttaggaatgcgagggtagcgtagggggatcttactaaacttcttgcgctcatggctcttagaagttacgaacggcgtgtcggagccggaggtggatggcgacgaggagtcggtctcgtagtagaccaccttcctcatcttcttcttcttgtcaccgctccgacgcgacttgtgtgaagaggattccttctccttccccttccctttgttgtaggactctcccgatggagctttcccgtggcttgtaatgggcttctcgccggtccccatctctttcttggcgtgatctcccgacatcacttcgagcggttaagctctaatgaagcaccgactttgataccaattgaaagtcgcctagagggggggtgaatagggcgaatctgaaatttaacaacctaagcacaactacaagccgggttagcgttagaaatagaaacgagtccgagagagagggcgcaaaacaaatcgtgagcgaataagaaatgagacacaaggattttttttaccgaggttcggttctcgcaacctactccccgttgaggtggtcacacagaccgggtctctttcaaccctttccctctctcaaacggtccctcggaccgagtgagcttttcttctcaatcaaacgggaaccaaacttccccgcaaggaccaccacacaattggtgtctcttgcctcgttgcaattgagttgatcgcaaaaaagagtgagagaaagaagcaatccaagcgcaagagctcaaatgaacacaacaaatcactccctctaatcactaaagctttgtgtggagttgagagaggatttgatctctttggtgtgtcttgtattgaatgctagctcttgttaggtgttgaagagtgaaaaacttggatgacttgaatgtggaggtggttgggggtattttatagccccaaccaccaaactttatcgttggtggaggctgctgtcgacgggcacaccggacagtccggtgcgccaccggacactgtccggtgcgtcagccacgtcacctggccgttgggttccgaccgttggagctctgacttgtgggcccgcctggctgtccgatggtgcaccggacaggccctgtaggctgtccggtgtgccacccgcgcgtgctctgctcctctgcgcgcgcaggcgcgcatttaatgcgttgcagtcgaccgttgcgcgcgaagtagtcgttgctccgctgtcacactggacagtccggtgtgcaccggacactgtccggtgactcaccggacagtccggtgaattatagtggagcgcccttgaaaattcccgaaggtgaagagttcagcctcgagtgccctggtgcaccggacactgtccggtggcacaccggacagtccggtgcgccagaccagggtgccttccgggttgtcttttgctcttttgtttgaacccttttcttggtctttttattggcttattgtaaaccttgggcacctgtagaacttatagactagagcaaactagttagtccaattatttgtgttgggcatttcaaccaccaaaatcaattagaaaataggtgtaagcctaattccctttcaaactctaaatttttcattcaacagacacaaacaaggaccgctgacaatcaaagagtagataagaccaaggcaccaccaagaatgatatgtgcaaccacatggaactaattcaaaaatggctactgtctttattctgtgcaagctagctacccttttgcaactttataactgcagtactgacatgccacaaacagttcatatggcctagctcattttccttttgaatgactgcctttttacaaaaaggcataaatactgtataattaatattcggatcactcacactgaatgcttaatgctttaaacattgtatatatatatatatgtcatcaaggtctgcctttctctctgttaaaatttagcttacatacagttttattttagttcatatcatattttccgtatcatatatattatggcgcactgggcgcgcggtagtcactagttacaataattcgggagcccagagaagtcttttcgatggcaagctatttttatccattttacattgcacgtgtgtgttcttatagacatattgcatacacattgatttttttttaccttgctacaaatgtgaggtgttgaacaaacttatagctttctagaataattgatgtctatcgaactaaataaaaccataggaaatgtattctaaacgatcgtctttcatgggagcatctgaaactggtggtcaaaattgatttactgtgtatcacgagttcaaaatttgaaataaatttgtcaaaacaggaaagaagagcaaccatttgagctgcatctgcacc

SEQ ID NO: 1220 - DNA, 53479 bp, Zea mays
  Intron number 1 from transcript GRMZM5G868048_T01 (locus G RMZM5G868048) derived from phytozome v7.0 (chr-ID 1; pos 1 63835002 to 163888480)
ttctagggtggtcgtcccgcgttgttgccgtcgaggtcagctccctccttctccctcccctcctcttctcctcccctgttctctcgcggccagcagcacgacccggatagcccccatacccccctgcgtgcagctggccgagcggccatgggcccccatgcgtggccaattccccacgctagatgctaggcccctgcttgccctacagccaaatcaatttccccatccccttgctgctcgtggatgccaggaggaagaaagagaattgttcattcacacaaaatccctcaagtctgatctgttgtggctgcaaccccatgtgaccctcggtgcgacaacctctagcgagcagaactgtgcctcatcatattaaattcgtaatttattaaatatgtgttaacctttgtattaaacgtctgatttatttcgttccagttgcgttaacttcgtaacaacatcaatttcgtattagtaacgttattttggtatgtcacaggtcttaattaattaattatttgttcattcgtagtggttaaagaacgactttcaaattaaaactaatttatagttctaacttgcgctttataaatacgtgttaatttgactaatgctaactcaaatattttaaattaatgctcgcttagtgtatgtgtgacatctatttaagtatttctcgtatgtagcgcatactgttccgcgtgcgatggcgtgctggatcgtgtgtcgttcgcgtgctgtttttcgctcgtcaccacacatcgtcttcgcgtgtcgcgtgtgcagatcgtgtgcatcactgcacgttgtccgcgcgtcgtcggccattgttcgcgtgttgttgcactgtttgcgcggtgccgcgcacgttgtttcgcgtttcattcacgcgctgtttctgcgtcgtcgtcgttcgttcgcgcgttcgcgccacgcgtctggttcgtctattattgtatactgttcgtgcgccgtttgcgcgtcgtccgtgcgctaagtcgagagtgtccgcgcatcgttcggacgtgctcttcgcacattgtcacgtgccgcgcgttgtccgcgcacgatattaaatcgttcacttataatcactcatgtcagttaattaattattggtttaatctttctctattaaaatagtaatttcgtcaccatgctatgtcgcgcatatctgcgcgtcgtttgcacgctgtcgtgttattttgcgcgtcgtaaattcgcctcgctaagaatctcccgtttaattaaagttttggtttaactgatagctgctagtgtaacaggttaagcgaaactaaatattagatgtaatttatatttgataatgtcgaattaaatgtcctgactattacttgtgtagcgtaaacgttataactcctagaccgtagcttcgactatagcagttcttttcctcgcataaccgtagaggcactctatattttatattgcttgcttttataacattttatcttgtatggtgtaatgttcttatgcatatgtatatgtttgtttgcttgtgcctgttcgttttcgcttcgcgttgcgattagattgcgatctgttcccgagcttcgaggaatcgacggacaagcttcagcgaccaagagatcgaactcttcgagttctacgaggctgaagattctgagcatctgtttggtgaaggcaagtgtcctctgacctattatatcccatttactttataattcatcaacccgcataccatgatcaacctaaggattgactagctttgtatttaccttgtccttgactaccttttgggctattatggttagcttcatgctattgctttactttaatcaatgaacatgatgtgaacacttatgatacgatgttgtctctatgattatgatgttggactggtgatactttagggggctcgagtggtttctcgagtgcctcttcgtaaggacctgttcgttggatgaccgcccgggaaaacagtgcaaccatgagggtagaatgagatgctcttagctgaataattagaggaactggggtgtagttcgctttgccgtcgtgccgttaatggggctcggtgtatgcgactcgctctgccaaggttggttctccccttggggtggagtgcggtgcatttaggaaacctaacgggcggctacagcctcagggaatctttgtaaaggctttgtagtgaatccctggccattcacctcggaagtgaatatgggtcttgcaagcccgggctagagagggaatcacggcttgtgggtaaagtgcgcaacctctgcagagtgttatgaaactgatatatcagccatgctcgcggttatgagcggccaagggagctccattgattagagatacttgatcagagatggttggtttacatgtggtgacgaggatgatggttttgactatggtaatggtaagtggtattctttccgtttggaaaggctactttgggttaataacttgggttaatgctaaaacctggctttctactagtaataataacctgaccaactaaaaacagctgcttgacttaaccccacataaagctagtccacttcagctaaacgggacatttgctgagtacgttgatgtgtactcacacttgctttcacaaaacaccaggttgcctttggtgcaatctatgctcaggtaaggaagaaggtgtcgaggtggatctccaggagttccaagaattcgacgagttcgaggattaggctagcgacctcccccagtcagctgcctgtggtgggttgtttacgttggctacgtttcggttctgtgtactttgatttatattatgtaaatggctctagtctgtaatattattacttactctttattgtaattcgaagcattgtgctatgatgagtcatttatgtaatcgctgtgtacgtgaatttctgatcctggcacatacatggttcgcattcggtttaccttcaaaaaccggttgtgacataagtggtatcaaagccgtgctgactgtaggaccgctgacctagagtagcattggccattttaaggacttattgattattacttcacctcattcttgattctgcttcaaaatattagtcagctcgacgaattctatgttgtgctcctatatgcccccttgccaaaagtatttcattctagtatggtctatacttctctcaatatattagatctgatctcactgttgtgcttgcgacatctttgtagatgccccataaccataaccttcttgtcttttgggatcctttcctctttcatcattaaattgctatcatttggccatctctattcccctggtattgacatgctcgtatccctagattctttaatacccttgtttcaatacctacttctaataaaaactctgatgcctatttaaacattttagtttatatatccatgatcttcgtgtcttttgagaccctttcctattctgttgttaggtcgttatcttttggcaatttccatttccttggtcttgttgtactcatgtccttggagtcttgtcagggaccataattaggggtaccctcaagactcctaatctaagctggtaacccccatcaacacaaagctgcaaggcctgatgggtgcgattaagtcaaggatcggtccactcaagggatacaatctcgcctcgcccgagcccagcctcgggcaagggcagccgaccccggaggatttacgtctcgcccgaggaccccctccagcaacggacacaccttcggctcgcccgaggcctagtcttcgctaagaagcaaccttggccaagtcgccatgccgaccgaccgtatcgcaggagcatttaatgcaaaggtggccttacaccttatcctaacgtgcgcccttcagtcgacagagccgaagtgaccgcagtcacttcgccgctccactgaccggcctgacaagaggacagcgccgcctgtgccgctccaactgctgtgccactcgacagagtgaggctgacaacagccaagtccggcctcaggcgccataggaaactccgcaccgcccgaaggggctcggactcgggctcagccccgaaagacgatgaactccgcatcgcccgaccccagggctcggactcgggctcagccccggaagacgacgaactccgcttcgcccgaccccagggctcggactcgggctcagccccggaagacgacgaactccgcttcgcccgaccccagggctcggactcgggctcagccccggaagacgacgaactccgcttcgcccgaccccagggctcagactcagccctggcctcagccgacggtctccgcctcgcccgacccaggggctcggactcgacctcggcctcggaagacagactcgacctcgacctcggaggagcctccacctcgcccaccccagggctcggaccgaccacgtcacaggaggcgccatcattaccctaccccaagctaactcaggctacggggaataagaccggcgtcccatctggctcgccccggtaaaacaagtaatgatggcgccccgcatgctccatgacgacggcggctctcagcccccttacggaagcaaggagacgtcagcaaggactcgacagccccgacaactgtccttccgccaggctccagcgctcctccgacggccacgacaccacacgaaccgggtgccaaaacctctccggctaccatgatggcatgtacttagggcactagctcttctctgctagacacgttagcacactgctaaacctcccattgtacacctagatcttctccttacacctataaaaggaaggtctagggccctcttacagaaggttggccgcgcggggaaggacgggacggcgctcgcgtaagcctctcgctctcccgcgtggacgcttgtaaccccctactgcaagcgcacccgacctgggcgcgggacaaacacgaaggccgcgggtttccccttttacgcctgtctccctccggctttttccccttcgcgctccgtctcgcgccgacccatctgggctggggcacgcggcgacaatttactcgtcggtccagggaccccccgggttcgaaacaccgacagttggcgcgccaggtaggggcctgctgcgtgttgacgaacagcttcccgtcaagctccagatgggcagtcaccagcaacctttccagcccaggacggtgctccgttttgggagtcttgagttcatgtcccttgacggcagctacgacatgatactccttcctccgccgcgcgacagcgacaatggcggtcgacaacccgcccgccggcggcggaatcgacgacgtcttccccatgtggtggaagaacaacattcaggcttgtcccgtcccctcccccgccgacggaggaggaggcggggcaactaaggccaagcaggaggcggcacctcgtcggctgtcaagcgagtcgatggcgccggcgccccaacgggggggacgtcgggcatcgacctcgcgtctgagacgaagacgagcgctgtctccccgcgacacgccaactccaagcaaacggacgacgccagcacgctcgcaaaggacttgctgggcgtcaccctcgtacctgagacgacggtgccgtcttcccctgatgtgacttcgtcaccgcccgtcgaccaagaggtaccgaccgattctcatctcgtgccttttggattcagcctcgacccaccaagcgacttcgctttggtggacgctctcatagaggcgagtccaaaccctctagggtatcgtatgcggttaccctgggaccggctgacagccgtctcgacctacgggccctcgggttccgaggaagatgacgagcccgactttagttgggatttctctggacttggtaaccccagtgccatgcgggactttatgactgcatgcgattactgcctctccgactgttccgacggtagccgcagcctcggcgacgaggactgcgacccaagtcgtgaatgtttccacgtcgatctagggggtcccgacgaaggcaaccatcttggtataccggagaacggtgatccccctaggcctatgcctcgcgttgacatccttcgggagctagctgtggtccccatcctaacggggggggtcatgacccacagctcgagcaaatccgcgagatgtaggccaggctcgacgagggagcaggaacacttgagccgttccgctgggacatcgggcaggaatgggcgggccaacctccggccggggaagcgcgtcatctaccccagggcacccagcaccgcatcaccgacgatgccagggcaaggccaccaccggcctccagtggggtcggccagaacctggctgcagcggcaatacttcttcgcgcgatgccggagccatcaaccaccgaggggcggcgtatccagggagagctcaagaatctcctggaggatgtcgcggtccgacgggccgaaagctctgcctcatgaaggcaggggtacccctcggaacattgcaccgcgacttcccaattcatgcgggaagcctcggtccacactgggcacacgcgcaacatagcgcctgcggccccgggtcacctcggcaacgagcaccatcactacaaccgtcgaacccacctcgacgagaaggtgcgccgaggctaccaccccaggcgtgggggacgctacgatagcggggaggatcggagtccctcgcccgaaccacccggtccgcaggctttcagctgggccatacgacgggcgccgttcccgacccggttccgaaccccgactactatcacaaagtactcgggggagacgaggctggaactgtggctcgcggactaccggctggcctgccacttgggtggaacggacgatgacaacctcatcatccgcaacctccccctgttcctctccgataccgctcgggcctggctggagcacctgcctccggggcagatctccaactgggatgacctggtccaagccttcgccggcaacttccagggcacgtacgtgcgccctggaaactcctgggatctccgaagctgtcgccagcagccaggggagtctctccaggactacatccggcgattctcgaagcagcgcaccgagctgcccaacgtcaccgactcggatgtcatcggcgcgttcctcgccggcaccacctgccgcgacctggtgagcaagctgggccacaagacccccaccagggccagcgagctgatggacatcgccaccaagttcgcctctggctaggaggcggttgaggccatcttccggaaggataagcagccccagggccacccaccggaagatgtccccgaggcgtcaactcagcgcggcaccaagaagaaaggcaagaagaagtcgcaagcgaaacgcgacgccgccgacgcggaccttgtcgccgtcgccgagtacaagaaccctcggaaacctccaagaggtgccaacctcttcgacaagatgctcaaggagccgtgcccctatcatcaggggcccgtcaagcacacccttgaggagtgcgccatgcttcggcgccactttcacaaggccgggccacctgcggaaggtggcagggcccgcgacgatgataagaaggaggatcacaaggcaggagagttcccgaggtccacaacttcttcatgatctacggtgggcgagtggcaaacgcctcggctcggtaccgcaagcaagagcgtcgggaagtctgctcggtaaaggtggaggcgcaagtctacctagactggtccgacaagcccatcaccttcgaccagggcgaccatcccgaccgtgtgccaagcctgggaaatatccgctcgttgtcgaccctgtcatcggcaacatcaacatcatctatgccgagaccctcatggacggaggcagcagcctcaacatcatctacgccgagaccctcgggctcctgcggatcgatcagtcctcagtccgggcaggcgctgcgccttttcatgggatcatccccgggaaacgcgtccagcccctcggacaactcgatctacccgtctgctttgggacaccctccaacttccgaagggagaccctcacgttcgaggtggtcgggtttcgaggaacctaccacgcagtgctggggaggccatgctacgccaagttcatggccgtccacaactacacctacctcaagctcaagatgtcgggccccaatggggtcatcaccgtcagccccacgtaccgacacgcgtacgaatgcaatgtggagtgtgtggagtacgccgaggccctcgccgaatccgaggccctcatcgccgacctggagagcctctctaaggaggcgccggacgtgaagtgccacgccggcaacttcgagccagcggagacggttaagtccgtccctctcaaccccagcaacgacgccttcaagcagatccggatcggctccgagctcgaccccaaataggaagcagtgctcgtcgacttcctccgcgcaaacgccaacgttttcgcgtggagtcgctcggacatgcccggcataccgagggatgtcgccgagcactcgctggatatcccagctggagcccgacccatgaagcagcctctgcgccgattcaacgaagaaaagcgcagagccataggcgaggagatccacaagctaatggcggcatggttcatcaaagaggtatttcatcccgaatggtttgccaaccctgtgcttgtgagaaagaaaggagggaaatggcggatgtgtgtagactacactggtctaaacaaagcatgtccaaaagttccctaccctctgcctcgcatcgatcaaatcgtggattccactgctgggtgcgaaaccctgtctttccttgatgcctacttagggtatcaccaaatcaggatgaaagagtccgaccagctcgcgacttctttcatcacacccttcggcatgtactgctatgttaccatgtcgttcggtttgaggaatgcgggtgcgacataccaaaggtgcatgaaccacgtgttcggcgaacacattggttgaacggtcgaggcctacgtcgatgacatcgtagtcaagacgaggaaagcctccgacctcctttctgaccttgaaacgacattctggtgtctcaaggcgaaaggtgtaaagctcaatcccgagaagtgtgtcttcggggtcccccgaggcatgctcttggggttcatcgtctccgagcagggcatcgaggccaacccggagaaaatcgcggccatcaccagcatggggcccatcaaggacttgaaaggcgtacagagggtcacgggatgccttgcggctctgagccgtttcatctcgcgcctcggcgaaagaggcctgcctttgtaccgcctcttaagaaaggtcgagtgcttcacttggacccctgaggccgaggaagccctcgggaacctgaaggcgctcctcacgaacgcgcccatcttggtgccccccgctgctggagaagccctcttgatctacgtcgccactaccactcaggtggttagcgccgcgatcgtggttgagagacgagaagaggggcatgcattgcccgtccaaagaccagtctacttcatcagtgaggtactgtccgagaccaagatccgctacccacaaattcagaagatgctgtacgcggtgatcctgacgcggcggaagttgcgacactacttcgagtctcatccggtgactatggtgtcatccttccccctgggggagatcatccagtgccgagaagcctcgggtaggattgcaaagtgggcggtggaaatcatgggcgagacgatctcgttcgcccctcggaaggccatcaagtcccaggtcttggtggactttgtggctgaatgggtcgatacccagctcccgacggttccgatccaaccggaactctagaccatgtttttcgacgggtcgctgatgaagacaggagcatgcgcgggcctgctcttcatctcgcccctcgggaagcacctatgctacgtgctacgtctccatttcccggcgtccaacaatgtggccgagtacgacgctcgcggtgacgcgcagtgttggggaccttcggcatccgaaggtcctcaaaaacaggatttaacagtatttctggagtataatgtgtgaacaggtatcttcggactcaagtcggcaccacagtagaccagaataatacgaaggttgatacagcgccgaaggtgtgaacaggaaagcttcggcgtgacagcagaaagtgaaaccgacttaaagatgaaaaggctatttagacctcgacagattactatagaattattatcaactgtaaagggcatgaatgtaattttgtatgggttgtgtcccgcgcctataaataggtgaacagtactcccatactgtttacgctaacttggcattcgctttttgcgtcacgcttgtactatcatctccttccagttgaaggtacatttgtaattcaatgatattcctgtttatacctaataataatagataattgtttatgttgtcttttatattccttacatttcatccttcgtcactgtatgatgaatttatggaaatacgtcatttataaccttcgtccagaaaccattatatcctaaaggaaataatgcttcgaaggacgaagggctttaacgattaacattttctatgttgccttgttcttaactcatagcatttgagaacaagtccccaacattggcgcccacctccggtgaacccacttccactcttcgagtttttttgaacaccttcggcgatcataaaccttcgttatggcgccgaagaaagcttcagcgactggggctgcagctctgcaaccactggatcacaatcaggagacaatctcccttcgggaggcccgaagccagaaaaggaaggctgtcagcccgacaccaccagaggacgagatagatcaagaaatcagagatatggaaatgcttcatcaacaagtacagaggaagaaagaaaagatggccaggctagctgaactgcagaggcagatagacgaagcctctgaagaagttcgtcatcttgctcaggatgaacaacaccgaaggcctcagcaccaagaccttcatcaggagggttttcccaatgaagatgactggtatgacaatttccatcatgggaattttgtttttgatgatgcttctcctctgtccgctgagctgcaggctacaccttggcctccgtcctacaagccacctcagcttcccgtatttgatggccactcagacccgaagcagtttttgatgagctatgaagcaacagtatcttcgtatggtggcaatgctgcagtcatggccaaatctttcgttatggctgtcaggagtgtggctcaaacctggtattcctcccttcgaccaggaacgatcacttcatggcagaagctgaaggatttgttgttaactagcttccaaggatttcagacgaagccggtcactgctcaggctctgttccagtgcacccaagatcacgaagaataccttcaggcgtatgtccgaaggttcttgcgtttgagggcacaggcaccaacggtgcctaatgaaattgtcattgaggccatgatcaaggggcttcggccaggaccggcagctcagtacttcgctcggaagcctcctcaaactttggagaagctgctccagaagatggacgagtacattcgggccgataatgattttcgccaaagaagggaggaggctttcaggttctctgaaatgaccaggggcttcggagggaggttctacccgaggcacgtgagatcaattcataactctacacaaaatgatgatagaggaagccaacaacaaaggccacaatgttcctcacaggcttcggggcaacagcaaagctccttcagaccaccagctccaagaggcagaggcgccaggggctttggaggaagatttggcgatcaaccgagaagaatcttttgcttattctgcggtgagaacaaaggccatactaccaggatgtgccatgttactattcagaagcaaaaggaaatagctgaagcagcagcacaacaagctcagccgaagcaggtcatgcatacagcttcgtatcattcgccctacattccagaatatgtgggcaaccatcctgcagtttctgttgcttcggcgagccagcctcaagtttcttggcaacagcctccgcctccacctccgttgcaacaaggccagcagccagaagggagccagtatgctccacaccagagggacttcagggagcagtccgaagctcgtacagtcaatagcactgtgccagagtcaaagcacatctattgacaaatatcctaccttaatagcaatctttttcattcagttttattttttgtaataaaggacattgtttaggtttcatgtaattagtttcgttgatttctacaaggaaaatatattttcttcacaggcttatattgattaaagttcaaagacttgtgataacaaagaggaccttcgaactatcgcaaattcttcgaagcaacaaaaagtcgttctaaggaacgcagagtaagtttgccgaagtcacaaaaaagtcgttccaaagggagcgcagtgtaagttttctgctccaaagtcgttccaaagggaatgcagagcatacagcgaaaagtcaacgctgataccgcctaagtaaaaggcgaagcgcgaaaagtcaacgcgaataccgctgaaagtaaaaggcgaagaagctcctaagggaggcttacagcgaaaaataaacgctgattccgctgaagtaaaaggcgaagaagctcctaagggaggcttataaaagattgtgttttattgcagggatgcgtatgtatcttcggaataaacatcatcgcacataacataacatcatcgcatcatttcgcatagcataagcatcatacatcattttgcacatggcacaagaggtggacacattatcaatctacagaagaacgctttcaaaaaagggagaaatcatagtcacaaaaagatacattattgatcttcggaagtgtagcttcggaaaaaattttcacgaagcctggatattattcatcagaacattggatattgttgtgacaaagataaatttttcttcacgaagcatgaaaagaagggaaggtgttttttcgtcaaagactcaaaagcggtacgtgtaaagtttcatgcatcgtaaagaattgactaacaaaaataggtatattacatttggggttacaaaatgttacagtatattacatttcagaagttttcacaaaaatacttaatcttctctcaaaacgacttctgcagcctcgttcaggagccgattgacgacttcgtccataatatcttcagccatctttttaatttcgtcgtctcctttcggctgagggcccgaagacgttttagcaggatctgaagtaagacaggatacggctacattgctattacaaatcgcaaacaaatcttaaagcctaaagattacaacacaataaaaactattagttaatacctaattgaccttcggcctctgcgctcttttcagcagcctcagctacttctctagcatcgtgaatgcccttttcacttcttcgaataatttctccggccatttctcggccaccattatcccagatatcggtaaaaaactttccaccaattatactagcttcggccgaaggatctcttgcatcttcaaaggacaaagcagcttcagactgtgctaaaatttttacatgttcgcagcccttcttctctaagatggtggcaatccctctggcaccagagaaggcacatatgtctcctcggctatttaaaatttcttcgaaggcctcagcttcgtggtcgatccattcgatgggaccttcgggattgcctctcgtaaagttttcttcgcttgagaaggcgccaaccctggcgaagctagcttttaacttcttaacacactctatagatttgttatagcatctctttctggacgaacgaagctcttcaacagttatttctaggtgatcggcccattggtcgctgagttctcgctttgtttcttcaagtatgcgttcttccttggctctggccagttgtttccgaagatcttcaatttcccgcttctgagtttcagcttgacctttgaaagcagcttcgtcctcctttattttatttatcaatgagtgcaaaattttatctttttcgagaccttcgttcctcagttcaataacttcggaacgaaggttgctcagggctatagaacacccttcgtcttcagcatctttctgtgccctgagggcattgctaagtatcaggccctgcaaagagaaatatgtctgcgtcaataggtttaaacaaacgaaaaattttggaatcaacaaaaaatacaaggatttcatttgtcgcacctttaagctattgtaagctaggctgtcggccagatcattcttcgacagcaccgaaagcccatcttctaaagttgggaatccgaagctcctgctcatctcccgacagacagaaatttccttgctgttagggagacaatacaagaagtcttcttctccactgccattgaatattaacgccccctttggatatttcagtttctgggcgtagtgctgcgcctcttgctcttctttttctgataattttttccccgaagcatgacgaacaatataatcacgaactttgggggatgcttcgggggcaatgacaccggtttcttcaacaaaagttggctttgttatattttctgcctcactttccaaggattttatctttgcaggctctgagggcccagcttcggtttcagtctcttgccctggagctttagaatcagaaatttcagttgttgtttcaggaatgacagcagccctcttcggaggtgtgcttgaagatttgatcgtttccagtacatctagcacattagccattctctttctttttggagtcactgctggcactttttgattttttactgtctcaatgtttgctgcaggactcaaaacttctgatgttttggatccctcagttgcttcttttacctcttccattttttctgtggacggcgcttcggccttctctttcgtttctgataataaaatctttgattgttccaattctatctttgttggcacttcggccgtttctgcgacttctggcagcaaggttggctcggctggtttttcagcttcggtggccgaagaagtttctccggtaaactcaggcaccgaagctggttcaatatagcgcggccgatgtgtaaggacctttatcttctttcttttcggttctggctcgctaggagcagttgcagcttcttcttttgcagaggttgtgtttttcttttctgccttcgaatgggatagcaatagtcagggtagacaaaaccgattgcatcaaatacccgattcagcctcttcttctttcggcctccgaaggctgctgacattgcagtgtcttcggccttcgaataagccccaagcagttcatcacttaaattttcaatactttttaaccagtcatcatctggctcaacgaatttatctccaaatttaaaagtgtacttcaacctgataagtccaccttcgtcggcctcttttacggtttcttgtggcatttcccatttctccgcgagcggccataccctgaaggcaatatgctcttgtactaagtctctcgttccaatgaaagagcagactgcgccgaaggccctctggcattcttcggcagcttcattcatttcaaccttcggcctccgaaggccgaagctttgccagatagggcgcataattatacctttgatgtcttctcgtattgtcagatcattcttcacataaaaccattctgtcatccagtcgccgggccatctcttccgaaaggttggcacggggcagcttgacccggaccgagaaacgaaactatagcagccaaaattattgtgatactgttccttaccccaaggttttgtttcgtatgataattcgtgtatattgcagaagctttttgcatcaggcttcagaccttggcttctcacggcccacacaaagatattcagccttatgattgcttcgggggtaagttggtgaagatagactttgaagattttcaacacctccacgacgaagctgctcaagggaaatcgcagtctagctttcaaaaagcttcggtacactacgacttcattctcttcagggtgtgggcacgttttttccccttcgtcggccctcacaatggataaatcccggaaataccttcctctcatgttgacaagatgattctctttgatagttgatttaccataaactgaatggcttggtcgccagggacgatcttcggagtcttcaccaccactgtccacatcatagctatcactgtcaccagtatcttcagacaaaccttccagaatctccttggtgattttttctgtattggtctttgacatcgctataagaaaccccaagtttttctcttcgtccaggctcagcttcatctcagcagcagtcttcttatcctcagacatcttcggagacactaaaaactattttcaaagctgaagcttcaaaactaaaggcttaacaaatcttagtgcacaagagctaaaaattgagtgagcgggagcagttggccagagagcgtgtcaaatgagtttgcggtatgaccgtatttatacgccaagtgcgttgaaaattggaagaccccgcttgtcagtgaatgttgctattctagcaaagggaaggtgttttttcggaccttcggcgtaaagccttcgtccatgtcgcaatctaaatttattattttaaacaaattaatattgcgaggggctactgttggggaccttcggcatccgaaggtcctcaaaaataggatttaacagtatttctggagtataatgtgtgaacaggtatcttcggactcaagtcggcaccgcagtagaccagaataatacgaaggttgatacagcgccgaaggtgtgaacaggaaagcttcggcgtgacagcagaaagtgaaaccgacttaaagatgaaaaggctatttagacctcgacagattactatagaattattatcaactgtaaagggcatgaatgtaattttgtatgggttgtgtcccgcgcctataaataggtgaacagtactcccgtactgttcacgctgacttggcattcgctttttgcgtcacgcttgtactatcatctccttctagttgaaggtacatttgtaattcaatgatattcctgtttatacctaataataatagataattgtttatgttgtcttttatattccttacatttcatccttcgtcactgtatgatgaatttatggaaatacgtcatttataaccttcgtccagaaaccattatatcctaaaggaaataatgcttcgaaggacgaagggctttaacgattaacattttctatgttgccttgttcttaactcatagcatttgagaacaagtccccaacacgcagctcgttatcgaccaagtcatgaagaactcccactgccacgacccgaagatggaagcctactgcgatgaggttcgacgcctggaagacaagttctacgggctcgagctcaaccacatcgcccgacactacaacgagactgcggacgagctggctaaaatagcctcggggcgaacaatggttcccccggacgtcttctctcgagacctgcatcaaccctccgtcaagaccaacgacgcgcccgagcccgagaaggcctcggcccagcccgaggcaccctcggctcggcccgaggcaccctcggcttggcccgaggcaccctcggctcggcccgaggcaccctcggctcggcctgaggtaccctcggcccccgagggtgaggcactgcgtgttaaggaggagcggagcggggtcacgcctaatcaaaactggcagaccccgtacctgcaatatctccaccgaggagagctacccctcgaccgagccgaagctcggcggttggcgcggcgcgccaagtcgttcgtcttgctaggagacgggaaggagctctaccaccgcagcccctcgggcatcctccatcgatgcatttccatcaccgaaggccaggagctcttacaagagatacactcgggggcttgcggccatcacgcagcgcctcaagcccttgttggaaacgccttccgacaaggcttctactggccgaccgcggcgacggacaccactagaattgtccgcacctgccaagggcgtcaattctatgcaaggcagacccacctgtccgctcaggctctgcagaccatacccatcacctgaccgtttgctgtgtggggtctggacctcgtcggccccttgcagaaggcacctgggggctacacgcacctgctggtcgccatcgacaaattctccaagtggatcgaggtccgacccctaaacatcatcaggtccgaacaggcggtggcgttcttcaccaacatcatccatcgctttggggtcccgaactccatcatcaccaacaacggcacccagttcaccggcagaaagttcctggacttctgcgaggatcaccacatccggatggactgggccgtcgtggctcaccccatgatgaatgggcaagtagagcatgccaacggcatgatccagcaagggctcaagccgcggatctacaacgacatcaacaagttcggcaagcgatggatgaaggagctcccctcggtggtctggagtctgaggacaacgtcgagccgagccacgggcttcacaccgttctttctagtctatggggccgatgccatcttgcccacagacttagaatacggttccccgaggacgagggcctacgacggccaaagcaatcaagctaaccgagaagactcgctggaccagctggaagaggctcgggacatggtcttactacactcggcacggtaccagcagtccctgggacgctaccacgcccgaggggttcggtcccgagacctccaggtgggcgacctggtgcttcggctgcgacaagacgcccgagggcggcacaagctcacgcctccctgggaagggccattcgtcatcgccaaagttctgaagcccgggacgtacaagcttgtaggattacggggaggctacgctagcgcaaaacaaaatttttcatccccataataccaagaactactgcggttataggtcatggaattaccactagacgcgcagagcagcggaagacgtctcgatgtagacgaacgcgtcgagcagtgtcgtgcggtcgccggcgtccttcacgtcctcgcacggttcgtccaagtgctccagatgtagcacctccgaggtatccacacgtacagggaggaagcgccgcgtaccgaactgctaggttcgcgacggcggcttggcgagggcgagaggtgggcggcggctgttagttcgctggtggcgaattaggttatcccttaaccgcgcccccgcccctcattatataggcgttatggtgggcttctgacgccgaggcccatcattaaccctaaagcccagtctaatttcggatctaatccgaattaggcttccttccccttaagtgtgtgaccctataggttcacgtacaaatagacataggccgagtactcttacttggcccaataattgacagcggcctctagcaagacatgtcaactcctatgtgtacgtaaagatcatatcagacgaaccattgcgacattacgtacatgttgttccctttgtctcacgatatttggtctggctctaagctgacctctctttctcgatactgtgaattggaatcctttcaatggttaactcttaaccctagcacggccatgcatttcttgatccaatcactcgaggggcccagagatatctctctcacaaagagagggacaaattccatcttgactgaccatgcctcatagcatgcttcctgacaaacccaaaactacctttataactacccagttacgggatagcgtttgatagtccctaagtaagtcaattcacatcttgagaacatgcgacaatctcaggtctaaggatacagtattcatgttgcaagaagagaactatattacaatatctcacgttgggtcggtccagcctcatgtcatacatgcgcccacattattagtttaacatctccatgttcatgacttgtgaaatgtagtcatcaactaatacatgtgctagtcatcgactctgactagggacatcatttagaataaccatataagtaaagaatctcacaaacaattcacataattgctaatcaatacaaggtgccttccatggatattcaattaagcaatatatatatcatggatacaaagaaatatgctcatctctatgattatctctagggcatatttctaacagtctcccacttgcactagagttaatctagaagatatctaatacccatagatctcacgtgtgcctcatgcttaggttgtggaagaggttttgtcaaaggatcaacaacattcaaatctgtatgtattttgcatatctttatctcaccccgcctaatgaattcccgtatgaggtaaaacttccgcagtacgtgtttgtttttctggtggttccttggctccttagcttgcgcaatagccccattgttgtcacagtagaggttcaatgggctagatgcattaggaaacacaccaagctcgatgaggaacttccttatccaaacaccttccttcgcagattcagaagctgcaatgtactcggcttctgttgtagaatcagtcacagtctcctgtttggaactcttccaactaacagcaccaccatttattgtgaacacaaaacctgattgcgattttaactcgtctgggtcagtttggaagctagcatcggtgtaaccagttacaacgagctcctccttacccccatataccaggaacatatctttagtccttcttaagtacttaagaatgccttttaccgctgtccagtgatcctcacctggatcagcctggtatctactcgtagcacttatagcgtatgaaacatctgggcgtgtacttatcatggcatacatgattgatccaatcgctgaggcgtatggtaccttactcatgcgctctcgctcattagccgtcgcaggacattgcatctggctaaggtgtttaccatgtgacataggtatgaaacctttcttggactgttccatgttgaaccgtttcaaaaccttgtcaatgtacgtatcttgacttaatcctataagcctcttcgacctatctctatagatccttatgcccaaaatatatgctgcttcccctaagtccttcatagaaaaactctttttcagtgaagccttgacggactccagcataggaatgtcattcccaatcaataatatgtcatccacatacaagatcagaaatacaacagcgctcccactttccttcttgtaaacacaagcttcttcttcattctgatgaaaaccaagccctttgatcacttcatcaaaacgaatgttccaactccgagatgcttgcttcaacccataaatggatttctgaagtttgcatatctttccagcattgatcggatcgacaaaaccctcgggctgtatcatatacacgtcctcatctaggtttccatttaaggaaagctgttttgacatccatctgccaaatctcataatcgaaatatgcggcaatagctagaatgatccgaatagatttaagcatcgctactggcgagaatgtctcgtcatagtcaactccttgaacttgtcgaaaaccctttgcaacaagtcgagccttatagatgtgaacatttccatccatgtctttcttcttcttatagatccatttgcattctataggtctaacaccatcaggcgggtcaaccaagttccaaacttgattttctcccatggaatctatctcggatctcatggcgacatgccatttctcggaatctgggtccatcatcgcttctgaatatgttgcaggttcgtcgttgtctaacaacaaacttccccattgcccaacaatagcacttctcctcgtgcctcacgaagccttgctgaccttcgtggttgtggtggtgattctcttgccatagacgtctcaacttgttctgctacattagcatcacttgttgaatcttgtcccactggctcatcctgaacttcttcaagatacaccttttgtttacttttctctcttttgagaaactctttctctaagaacacaccgttccgggcgacaaacactttgccctctgaccggtggtaaaagtaatatcctaaagtttcctttggatatcccacgaacatgcacttgtccgattttggagtgagtttatccgactgtagtcgcttgacgtaaacctcacaaccccaaatcttcagaaaagacaagctgggagtcttcccagtccacatctcatatggtgtcttaactacggacttagacggtaccctatttagtgtgaaagctgctgtttctagagcgtatccccaaaacgacaaaggtaggtccgactggctcatcattgatcgaaccatatccaataaagtccgattacgtcgctcagacacgccattcctctgaggcgttccaggcggcgtaagctgtggaacaattccacaactctttagatgattgctaaactcatgactcaaatattcaccaccacgatctgatcgcagtgctttaattttcttgccacgctgattttctacttcattctgaaactctttgaacttttctaaggattcagacttgtgtttcattaagtagacatacccatatctactaaaatcatcagtgaaggttatgaagtattggaatcctcccctagctgtcgtactcattggtccacacacatcagtatgtatgagttccaataaatctaacgtcctctctggtaaacccgtgaagggcgccttggtcatcttaccaagtaagcaagcttcacatgtctcgtatgattcaaaatcaaacgaagttaaaagcccatcagaatgaagcttcttcatgcgattctcacttatatgacccaaacgacagtgccacatgtaggtaggacttaaatcattaggccgaggccttttagcactaatattacagataggtgcatcatcaagatttaaaatgaataacccattcataatggatgcaaaagccacaaacatgccattcttagagatcacacaaccattgttttcactcgcaaatgaataaccatccttcatcaaacatgaaggagacataatgtttcgactcatactaggaactagataacaattatttaactccaaaataaatcctgatgggaggtggagttgcatcgtcccgacggtcaacgcagcaactcttgcattattgcctacccggaaatcaacttctcctcttttcacgcttctacttcttatcattccctgcatcgaattgcaaatatgggcaaccgatccggtatcaaatacccaagaattaatataagaatcagcaagaaaaatttctgtaatgtgaatagcaagtgtacctgttgcggctgtacccttaccgccgcgatccttaatagaggccaagtactgcttgcaattccttttccagtgaccaagttctttgcaataaaagcactctgcatctgcagctggtccagccttgggcttttgattgggcttggatactgtatcctttcccttgcccttcttcttttgagacttacccttcttcttaaagttgggtttgttttggaccgccatcacatggccgctgctgccagcacttttctttatgtccccctctgcagttttcagcatgccacatagttcattgaggcccctctccgccccatgcatatggtagttcgtgatgaagtttccatagctgggcggaagagatgccaaaatgaagtcagtggccaactcttggcttattgggaagcctagcttctccaacctctgactgtaaccaaccattttgattacgtgtggcccaactgctgcgccttctgctagcttgcattccagaaaggctttggacacattgaacctttcagtcctagcctgagtctggaacatatccttgagcgccacgatcatatcgtacacctcatggtttgtctcaaactgcatctggagctcaggctccatgcaaccaagcattaggcaacttacttcaagattagcatccattgctttcttgtaagcggttttagctgcggcagttgcattttcaccaggatcctctggcagtggggagtctagaacgtcttccttttttcagccctgagaacaattctcaggttacggatccaatccgtatagtttgttccatttaacttatccttttcaagaatcgatcgcaaagtaaatgttggtgtgctaggtgccattttatctacaacaaaataatgcaaaatactaagacaaaaatatccatgacagagtaaatcatattaaacatttaatagtctactcccactaaaatcaatatccctcgattgatacttagtgattcagaacccacaactaacaagtctactagtgagctttagcatcaccgctagaagacaaggtagatcggtaagcaactccttgctaatcatatcatatatatgactcctgttgttgggtgacatctctatgtctcggctcccaatcttatgcctcaaagtccttaaccattaagctgactttgtttaagttaaccaaccctttctgcagttcgtatccgatacaaacctatctagtcaaggaaaactggtggcaccctaatttcatagacccaccaccaattgtacaagacttatgatagtgcaaggtttggagaggcattaaagcttaaacatttatgagggatcgtcctacttataacatcgcacgcaaggacatatatgcaatataaacaagtagaacaataagaatggcattcacacaacagttgtgattcggtatggcttgtttttcacatggtgatctccatctccaataatctgtccatcacgatgatctccatctccatgatataggtatgccatcctccaggtgatgagtccttcaagacctatctaacgtatgctggtaaaacaaattacatatacgctttggatcatcacatgttgacacgcaggtcattacattaaatttggacaatacatgtggctccagccgtattgccctggtcacgacacgcaggtcatgaataatttgttaacatgcatcacatacacataatagccataccgatcacaggattccatgcatcgtatgtatggaaattccactggaaatctcatgcggttgatcaaatcaacccaaatccgagactttcgacccgaagaagattacactcatgacgtcgatctgttgcgtcaatctgctggttgtgtatgcagttagccccgatggtgattccagccggtaggggcaagtcgcgcatacaacagagaaggacgaactgatctctccagtcatatccgatgtaatctacttcaaccctttattaccaattgatctaatcaaaccgtgcatcaagtagatccatcacatgaacctagatccagacctaaaacttacgcagaacctgcctctgataccactgtaggattacggggaggctacgctagcgcaaaacaaaatttttcatccccataataccaagaactactgcggttataggtcatggaattaccactagacgcgcagagcagcggaagacgtctcgatgtagacgaacgcgtcgagcagtgtcgtgtagtcgccggcgtccttcacgtcctcgcacggttcgtccaagtgctccagatgtagcacctccgaggtatccacacgtacagggaggaagcaccgcgtaccgaactgctaggttcgcgacggcggcttggcgagggcgagaggtgggcggcggctgttagttcgctggtggcgaattaggttatcccttaaccgcgcccccgcccctcattatataggcgttatggtgggcttctgacgccgaggcccatcattaaccctaaagcccagtctaatttcggatctaatccgaattaggcttccttccccttaagtgtgtgaccctataggttcacgtacaaatagacataggctgtgggagatagatatcccccgggtccactaaaagagtaaaggacctcacgaaaggcccaagggcccaataaatcgtaaggtcattctttcgtgggcctggggagaaacaaccggcaaagtagaacgacatgaggctggattggtgcaaacccggacggcccacagtgtcgagcgaatggctgcaacagagatccgactttcctgcactggagtctccatgcaacgaagccatgcgaggataagtcggcgagggttacgtagggataatctcaagaggttcactatcttttagctacttgttgttatcttacccacgtgaactgccccacggtcgagtatataaggcctagggggcaccccttcagaacgatcgaccctatcatacttagccacccacgtaaactctctgtgccttcaacccagagagccctcttgtaaccacagccgaattctcatcaggacgtagggtgttacgcatctctaagcggcccgaacctgtaaatcttgttcactgtctctcgtgcgatcggcacgaaccattttgctacagtcgttgacaccgtcctactcctagaaaacaccttgaggggcaaccccgggtgtgcggtcggacccaaaacaccgacagctggcgcgccaggtagggggtgtgtcgacgatccaagctagctcaatggccgtcaccttccacagcaaagtcgccgtgcgtcccggatctgtattctgcttcgggacaatctcgtccgtagcagatgaagaaggaattctacaccgcctcgcagatctgccggaacagaagtctcctccaacaaactccgaaaatgctggaaagacgctacttccgactcttcggaaaaagatcgtctccggggaagctggagctagaagctcgctgacctggaagagtccgctatctacttctccgacgaaagaatggacacgggtcgtgagaaagaaggagaccagtgagaggcaaatcgttcttcccgttcctccgatctcaaaggagaacggaaagaaagtcgccgcggcagcaatgccgttctaccccgacgtcctcttcatcgggagagcagagtcgctcgtcgtctccgacgatgaaccgaccgcgcctggagaagaatcgcctcagcgagaatcccgccgacgaaggaaccgacgcaggaacgttcgacgacatcacgcggccggagagcgggatccggagcagcctgtctcgcgagacgaggtctcggaggtaggagaaactccggaagaacgcgtcttcagggaacgaaggaactcccgacgacgtgatcgccgacggattcaggagcaagccgagcaagaggcaaggcaacgccgggagaatccgctcttcgggcgcaacttgaaccccgacttcgctcgagctatgaacacgccgagcgaagtcggaggcgttctagctcggatagctgacggacttcctcggactcccgacgccgaaggataccgacgcctgtttactcaggcggccaaccatcttctaccgctcgctcacccgccgaacgatttgcgacacaccatcaacagtcgtcgagacgcgcgaagctccatcaatgcttcgcgcgaacggcggcatgagaacgaaattcgccgtcgggaggagtatgaccgagatcatggcttcccgactcaaagccaggccaccaggactgagtcggcaacagcttcaactggcggtaccacccggggacggtcaagggaccgccaccaccactcccctccccgggacagacgtcatccccaacgacaggaggacacgtgcggagtatctgcacttactccgcgccttagggccatccaatggcctcccaacttcaaggtatccaatgttgacaaatatgaacctaagcaggatccagggggttggttagccgtctacaccactgccgctcgagctgctagagcatccgaagacgtcatgaccgcgtatctgcccatcgtccttgggcaagatgcgctgcagtggctacgacatctaccccgacactgcatcgacgactggggagacttcagtcgacgtttcatcgccaacttccagtccctctctgacaagccggcgcaaccatgggacctcaaatccatcaagcgccggggggacgagactctccgatcataccttaaaaggttccagaccatgagaaaccgcatccccgaggtcacggaggcagccgtgatcgaggacttctacagaggatccaatgactcggttttcgtccgagccatactacaaaaggcgccgactacctccgaggagctgttccgggaagccgacctctacatcaccgccgacgagcgggcccaggatctcatcggaggagcaaaacctgcaccagcagcgccacgacgtgacgcgaaccagccatctgacaaacgctgggagaagaggcctcgagaagaagtacacgccgccggaccacccgcctctcgcgcccgaggaggacctcgtggaggcgagcgcacgctggacgacatccttgacgcccagtgcccgtaccacaaggacatgcgccacacccttcgaaactgccgggatttcaagcactccgtcgggcacggccgacccttccaacctctaccgcctcctccaccgaggggaggacctgatgaaccacaacagccccgtcggcaggaggaggggggaggaggagctttcccgcgcgttgacagggaggtcaacgtcatcttcggcggacatgggtcgcaggagaacaaaagacaacaaaagctcaacgaccgccagatactggtggcaaccaccggacctcccgccccgtaccggtggtcggagcacccgatcactttcactcgggaggatcagtggctcaacttcgaccatccaggcaaatacccgctcctcgtcgatccggtgatccgagagagccgggtaaagaaggtgctagtggacggggggagcagcatcaacgtcaccttcccccgtacactccaaggcttgggagttcacctcaaagagctccacgagtcggacactcctttcttcggcatcgtgccgacggaaggggaatacccgctgggtcacatctacatgccggtcaccttcggaactccggagaactacagaaccgagttcctgaggttcgaggtggcgaacttcgactgcgggtacaacgccatcatcgggaggccgggactggccaaattcatggccattccgcactatacatacatgatactgaagatgccaggaccacgaggaatcataactgtgcgcgccgacttccaaggcgccgcatagtgtttcagagtggccattcaggcagccctcaccaccaagccgtcggcggttccttctacatcggcgaactctaagcctgaggaaggcctcacggtaccagcgaatgaaactcaggccacgacctctatgcggccgactgaagaaaccaaaagaattaacctggggttcgctgacgagcgcaagacggctgtcattagctccagttcgaacgacaaataggaaagcgcgctcgtccagttcctgcaagataaccgagacgtattcgcatggcaacctgcggatatgccgggagtcccaagagaactggccgagcacaaactgaaagtctacccccaggcgaggccgattcgacaaaagctacgtcgtttcacgcccgacaagagagaggccattcgtgccaagttagctcgcttagtcgcggctggattcattagagaagtattacaccccgagtggttagccaaccctgttcttgtactcaaaaagaataaagtggattggcgcatgtgcgtcgactataccgatctcaacaaacactgtccgaaggatcccttcgggctcccgaggatagatcaggtggtggattccaccgctggatgttctgtgttgtctttcttagattgctattccgggtatcatcagattagtttggcaaaataagacgaggaaaaaacggcgttcatcactccgtttggtgccttctgttatacctccatgccgttcggcctcaaaaacgctggagcgacttatcagagggccattcaaacatgcctagccgatcactggggcaagcgtgtggaggcttacgttgatgacgtggtgatcaaaactgagaatccagaaaacttcatcgaagatttacagctggttttcaacagcctgagaagatatagatggaagctcaatcctgaaaaatgcgttttcggggtaccagcaggaaagttgctcggatttatcgtcagccaccggggaattgaggctaatccagataagattgaagctatcatgaagatggaagctcctcggtcacaaaagaaggttcagcgactcacaggatgtatggcagctctaagcagatttatatccagactgggagagaaaggtctaccgttttacaaactactcaagaaggtggacaagtttcagtggacttcagaggcacaagaagctttagatgcactgaagaaatttttgacaacaccaccagtattgaaaccgccccggcgagctacgccgactcaaccggctgaagatttgctgttgtatatctcttgcacgactcacgtggtaagcactgcgttgatagtcgagcgagtggaagaagggcatgcctacccagtacaacatcctgtttacttcatcagtgaagttctaggtccctcgaagaaaaaatatcctcaggttcagaagctattatatgcagtacttctaactgcccgcaagctgcgtcactattttgacgaccacaaagtcatagtagtcactggttttccaataggagatattcttcacaacaaggaagccattggccgaatagccaagtgggcatgcgagttgggatcccatgatatcgagttccgacctcgcacagccgtcaaaactcaagcactggttgatttcgtatcagagtggacagaacagcaagtaccggataatccagaaaccgcagaagtatggcgaatgtattttgatggctcgctgaaactgcaaggagcaggagcaggaattctcttcactgcacctggaggcgagcacctcaagtatgctctccagctgctattcccggcctctaacaacgcagccgagtatgaagccttgatacacggattaaacatcgccatatcactgggcgtcaagagattgatggtatacggagactctctggtagtcattagccagataaacaaagaatgggattgttcaagtgattcaatgggaaaatattgcgctgccgttcgaaagctggaagataagttcgagggtctagaatttcatcatgtggaaagggatcgtaacacagcagcagatacactatccaagctcggatccggtcgaactcaggtcccacccggagttttcgtgcaagaaattacacggccgagtatctcaatagaccaaacagaagagtgcaacatcgtagatcaacccgagtcagactctgatgactggaggaggccgatcattaagtacataaagaacgaagaagagccagacgacaagaactcagcagagcgcattgccagacagtcagctcactacacactcattggggagatattatacagaaggggtgcatcaggggttctcatgaagtgtattctcccgtccactgggaagcaacttctggaggaagtccatgcagggcaatgtggaatacatgcagcctccagaacactagtcgggaaggtcttcaggtcagggttctattggccgacggcgaagaacgacgcagccgagttagttcagagatgcgaagcttgtcaatacctgtcaaagcaacagcacatgccagcacaacagctacagaccataccaataacttggcctttcgcatgctggggattggatatgattggacctttcaagaaagctcaaggaggttatacccacgtattggtggcaattgacaaattcactaaatggatagagttcaagcccattgcttctttaacctctgctaaggccgtggaattcatacaggatataatattcagattcgggataccaaacagcatcatcactgacttaggatccaacttcaccagctcagaattctttgacttctgcgagcaaaagagcattcagatcaaatacgcatctgtggcgcatccaagagccaacgggcaggttgagcgagccaacggaatgatattggaggcactcaggaaaagggtcttcgataagaatgaaaaattcgcaggaaaatggataagagaactaccttatgttgtttggagcctgagaacccaacctagccgagccctgcatggaaacactcctttcttcatggtctatgggtcggaggcagtgatacctgctgacctcaagtttggggcaccaagattgatcttcgaaagcatagcggaagctgaggccaccaggctggaggatattgatatacttgaggaagaacgactgaatgcagtaatccaatcagcacggtaccagcagactctaaggcgctatcacgataaggctgtgcggcaaaggttcttttcagtaggagacctcgtcctccgccgaattctaacgggggagggacggcacaagctatcacccttatgggaaggacccttcatagtagcagaggtcactcggcccggatcgtatcgcctcacccagacggatggtacagaagtcgggaactcttggaacatagagcacctcagaaagttttacccctagctgtatttcaaaacagccggggcgactatgtactctgtaaagtggaaatatgtcatcaataaagatagatttcaaagatactcggttcgtttatgattgacttgcattcttacttaactcggggtgaccactatgccctacaaacggagcaatcgacttgagtcggcaacgacttaaggcggtgcaacatgctcacgcttacttaactcggggtgaccactatgccctacaaacggagcaatcgacttaagtcggcaacgacttaaggcggtgcaacatgctcacgcttacttaactcggggtgaccactatgccctacaaacagagcaatcgacttaagtcggcaatgacttaaggcggtgcaacatgctcatgcttacttaactcagggtgaccactatgccctacaaacagagcaatcgacttaagtcggcaacgacttaaggcggtgcaacatgctcacgcttacttaactcagggtgaccactatgccctacaaacgaagcaattgacttaagtcggcaacgacttaagacggcgcaacatgctcacgcttactttacctagggggaccactataccctactaacggggttatcggctaaaagtcatttacggcttaaaccggtatagcatactcgcgcttatgcagttcaggggatgatttccatatcccacaaacaaacttcataatcatcatgtagcgttaccacaaattcgaaattcggatacaataagaaaatgatgatgtcatttgaatgataagccgataacctctagcgagtacttgatcatactaactgcgcgctcagagcacgcgaactgtttctctattttccaatgtctttctcaggaacgactgatgaagaggggtgattcgaagaatcgggggcggcatgcacatcagcttttatatcttcaggaactaccactccgggtcttctcatcaagattcgccccgctcgaatagccttgtccatggctttatcgcgctgggctttgagagtagcagcagtctcgtcagcggttttagcggccagctgagcagtttctaactcctgggcaatggttttcttggaagctcggagttccttgatggtggcatccttcgctgatatcaattgcttaaggcgggtcatttcgtccacaaattcttgtagcctacaacgctgattgtccagttcctccattgtaaagcggtggctcctctccaagatggttagcgagttgctagaatctcgatacaatctgtccagattgtcgcaagaagcggcaaggacgcgtttttcttcctacaagcaaaaaatcaactcattcagaatccaagagcatgataaggcgaagcatggtttcgtaagttaccttttcggagtcaagccgagcatgaagagaagaactcagagcgttggcgtcatccaaagaagcagaaacctgattcagttcagtctggctctgaagatacttatcctcgaagtcagcacaccgttgagccatttcagcttgatctcgagaatgtttttcctcaagaactgcgatctgccgagtcattcctatcaagagataatcaaatgaagtgaggtcagaaggtaaaacaatccacgagcaagggtaaggaagaagaagaaagggcactaaccagcatttgttgcctccaactcggatacacgacgatgaagcaacactggattccaacgctcgagagatgaagccacttctggggtggaagcaccctgtgatttcagttgactggccaatccattcaccaaagcctgacgagaagaacagatgagcataatgacagcaattcatgcaacataaagatcaaactaaagcacagcacagcacctggaggttggaaaagaacgaagggatccccaagtcaggagaaatcagctgatagtcaggcgtcagaccaccacccgaagcagtttgcagtagaccagcaggaacgagctcagtacattcagcagagcctaacgccagactagtggggatgctgccctctaaagcgaccccctgatctggagtttgagccaccaccatgccgccagagtgtggaggtgaacccacgtgaacgtccatagaagtgcaggaaggagaccctgctcgggcaccctcgggggctgggtcacagtcggcgctgcccacctgagccggatcatccccggcaacaccctcgggggctgggcagtggcctacactcttcacccaagctaagtcactcccgacgacatcctcgggggctgggcatatatcagcgccattcttgggacccaagctctctgccgtgaccacctctaaggttgacgggccttcagctacttccatggggtcagaacaatccaggtcagcatcccgaccctcgagaccatgctctaaggtcgatgaggcacgggatgaccttaacccagcatctggcacggctgcacaagtttctgtcgcatcagcatctgcaggctccgatagcaagtcttctgggaccatatcctctagagttttatcaaagtcggccatggacagctcttgcaagccaataagggcagacaaagcaggagaaggaactccactacttccaccgctagcaatgaattgctgactgtttttccgagttaaaggaatttcatcttcttcctcttcatcctctacagtggcaacacaagcagcacacccattgggatcaacgacagtttgggcacacccattgggttcaacgacagtttgggcacacccattggtttcagtatcagtaagaccgataacaggcacttcttcagcagcaggagctaaaatgccggcatcctcatcgaaactggatactcgccggaggcgtcttctctttttcttttgctcatcagcagaaggctcgggacgactagctcggctagggcgcctcggacgagtgctgacagtttttgagacatccaaagttgtatcaacctctggaaggggcaccactgccaaggtaccaacaggagcagcatcggacgaatcctcagctaatagatcaagcatatcatttatgtcagcatcactgggattcagaggcacttcaaaataaacctgccgttcatcatcagaaatcgccccgagcgaagcaactaaagaattgacttcctccgcagagggtcgcactctaaggcccaaattgctgtcagtcacaggcggatttgacacaaaaagggtgaaatctttgggaggaggcaggttccaagccgagtatgccactggagcaccaacattcgaaactttacctctgaggatcatttcaagccggcttaccaaatcaacagaaggaattctcctattggtaactcgggttgagtcggccagccctcggtaaagatatgccgggataggccctgtctttcagcggttgaatgtttttgaaaacgaaatctgtgaccacagcttcggcagtcagacctctctctttcagtaatccgacctcagtaagcaacacgcttgcctcggccacttcttgatccgtgggagactcagtccaactcagagtacgaacgtctggctgtcttcctgagcggggagggagagaatttccataattatcaattataaaccactccagacgccaacctttaatgctgtccttgaagggtatctcgagatactcggtcttccgtccacggcgcatttccaaactagcacctccaaccagctgatgttgccccccggccatcccagggcgacaatggtacagatacttccacaaaccaaaatgcggcagcacaccgaggtaggcttcgcataggtggacgaagatggagatttggagaatagaattagggttcaaatgggtcaagttgatatgataaaagtcaagaaggccacggaaaaaaggagagattggaaggccgaggccgcggagaaggaaaggagcgtaaactactaattcgtgggtatcttcggttgggacagtagtcccgtggcaaactcgccaagagcagagttcccgcggagggagaaccccgatggagacaagacggagaagctcatcttcggaaattacagacatgtggttacctgcgaaaggtaactgactgttggggtcgattggggggatcaccgcagcagacgagctcgcagttttcctcttgggcgccatcttgcttctcactggcgaaacagagtaggaggcgagtagcaaagaagattcagatgcggaaatgcaagaactagggcacggaaagcaaaggcggctaaaagcgcgactcttaagggatattcttgagccagatacccttttaaaagtgcccagtcatcacccggcggtcatctccgaaattccagcatgccacgtagatatctgacagttattcccaagagagccgacgtgccacctcatcactcgggttattttcctcaaaataacttgtaaagctggctatcattcggcgttacctctaaaacgccgacaacgtgttcaatcgctcggcattacttctaagatgccgatgccgaccttcaatcgctcggcattacttctaaaatgccgatgccgaccttcaatcactcggcgttacctctaaaacgccgaccacgtgttcaatcgctcggcattacttctaaaatgccgatgccgaccttcaatcactcggcgttgcctctaaaacgccgaccacgtgttcaatcgctcgacattacttctaaaatgccgatgccgaccttcaatcactcggcgttacctctaaaacgccgaccacgtgttcaatcgctcggcattacttctgaaatgccgatgccaaccttctatcattcggcattgcctctaaaacgcggatcttgtgtccgattgcttggtgttacttctaaaacgctgatgacaacctacacatcgctcggcattgtttctactacattaaaagaattggttcaacattcagggaaagcaacgacaagtcatcaaaaaggggggatcaatgatagttcttcattaaagggaagttaacgagtttacaaaccaactcttcatgagttggtacccccctacttctactctacattattactactactaaactacactaattactactacattattctaactatactaaactatactaacatctaagaagaccagtggcgactagccactggccctgcccctgccgccgccgcccttggtgctgcccttgctgctgccacccttggtgctatccctgctgccgtcaccgccgcccctgccactgccgctgccgtcaccgtcgccgtcgtcgtcgtcgtcgtcatcgtcgtcgtcgccttcaccctcgtcgccgccgtccgagtcctcctcatccgaggagtactccgactcatccgagccttcgagcccggagcgctcgacggcccggatgtacgtccagacctccgcggctatcccctgggagtcgtccgagtcgtcggacgacgccgggggagagacgggggctggggatccctcggactcagaggagaactcctcctctgagtattccgagtcaccgaactcgttcgacggaggagtcggctcgcgcttgcgcttggtgcccttgcccatggtggaagcagacagaagggaggagaagaaggcagtaagtaacagcgaagagatgtgaaaaaaccagagaagcaaaaggcgttatttatagaggggaaagcaaccgctcacttccaaccgcggtcactgaacagtcacaaagcattcaataagcactcccacccatctgaagacacgtcagacagcggacgccgtttcatgcatcactacacccattgggactccagtcaacagcgcaaaggatatgattacactagccgtcccatcgcattactactcagaggcaatcggctaaaacactcagcgtaccaagccgtcccttgcccacacccattggggggggacgcccaggaattatcagtatatttttcaaaacggtcacatccgtgcagggcacgcagtgaatacctcgagacaaaaatgagatatcaacaagagttagagggaagccaaatatagccagtagagtgcaaaatatggtcgacagaaatgacttgaagactagacagagaacgtccatcaaatgtccaatcagtcacagagcaaataaattacactacctagcgagatatggatggattgcgaactcggctgcaaaagacaaaatacatgctgacctctgaagcataatactgatgacatagcgcggatgacatcatgccaattttttacaagcagaaaggataattttcagcaaaaaggacacagaaggaagaccttcgagtggattatcctcaaaaatccacttgaaggtcgggggctacacccattgggtgcaccttcgccgcaccccatggattatcattctaaatcaatatagtgccgacctctaaggcgtggaacaagattggaaagatcaatcctcaactgagatgcaggaacgcgaatggagataatctttggagaagacctctgagtagattatcttctaaaatctactcaaaggtcgggggctacacccattgggtgcacctccggtgcacccaatgaagtccagaatcttacaatccaaaatgctgatttctaaggcacaggcacaaaactaaactttggtcgaacaagtgatcagagcgagagaaaacagcagggagtcatttttggaccttggatctttgagttgattacctccaaatcaacccaaagatcgggggcttgtgggagatagatatcccccgggtccactaaaagagtaaaggacctcacgaaaggcccaagggcccaataaatcgtaaggtcattctttcgtgggcctggggagaaacaaccggcaaagcagaacgacatgaggctggattggtgcaaacccggacggcccacagcgtcgagcgaatggctgcaacagagatccgactttcctgcactggagtctccatgcaacgaagccatgcgaggataagtcggcgagggttacgtagggataatctcaagaggttcactatcttttagctacttgttgttatcttacccacgtgaactgccccacggtcgagtatataaggcctagggggcaccccttcagaacgatcgaccctatcatacttagccacccacgtaaactctctgtgccttcaacccagagagccctcttgtaaccacagccgaattctcatcaggacgtagggtgttacgcatctctaagcggcccgaacctgtaaatcttgttcactgtctctcgtgcgatcggcacgaaccattttgctacagtcgttgacaccgtcctactcctagaaaacaccttgaggggcaaccccgggtgtgcggtcggacccaaaacaccgacataggccgagtactcttacttggcccaataattgacagcggcctctagcaagacatgtcaactcctatgtgtacgtaaagatcatatcagacgaaccattgcgacattacgtacatgctgttccctttgtctcacgatatttggtctggctctaagctgacctctctttctcgatactgtgaattggaatcctttcaatggttaactcttaaccctagcacggccatgcatttcttgatccaatcactcgaggggcctagagatatctctctcacaaagagagggacaaattccatcttgactgaccatgcctcatagcatgcttcctgacaaacccaaaactacctttataactacccagttacgggatagcgtttgatagtccctaagtaagtcaattcacatcttgagaacatgcgacaatctcaggtctaaggatacagtattcatgttgcaagaagagaactatattacaatatctcacgttgggtcggtccagcctcatgtcatacatgcgcccacattattagtttaacatctccatgttcatgacttgtgaaatgtagtcatcaactaatacatgtgctagtcatcgactctgactagggacatcatttagaataaccatataagtaaagaatctcacaaacaattcacataattgctaatcaatacaaggtgccttccatggatattcaattaagcaatatatatatcatggatacaaagaaatatgctcatctctatgattatctctagggcatatttctaacaaagctggccaacagtcaaggcgaggtctacagcaatgcttggaacatccgacaactacgtcgcttctacccttaagatgctttcaagttattcgtacacattgctcacacacgaagtctagtcatcaaggaagggtaacccttgcctcggcaaagcccgaccctccctcgggggctaaaaggggggaaccccctctgcgtcaaaattttcctcggaaaaagatcttttctgccagaatgtctttcgtgcttctcgactacttcgaaagtgggatcctgaaaacgacggagtacacgtaagcagccaaggatgaccgagccgagggactcctacgcctccgggatacggatacctcactcatcacattctgcgataagtaactcacgctcggatagatgattccgcggaccgaacaagtcttcacgctcgaaaactcttctaccgaagcgatctttcgggccttctcgactatatcgatggcagaaccctacggacgagtaagagtacacgtaagcggcaaggccgaccgagccgagggactcctacgcctccgggatacggatacctcactcatcaccttccgtgaaaagtaactctcgctcggacaaacaattctgttaccgacaaataagttcagatactcgaaacaagaggaaaagaaacgcagctttataacacgacgatagtgtgtttgggcctcggcggccgcataaaacatacacacactacaagataacccgatcctgcaggctcggaccctgacagttgaagggagcagcggtaccctcggcgtcaactacaccttcggcgaaatccgacctagcctcggacggcgacgcggtcggaggatctccacccagaaggacgacatcagcaccacgcccagaccatcaccggcggggtcttctccaggaatccggctcgagcagacacctcggccggccaccccgaagcctcagccagctgtcccccgaggacatcagccaggctcgtggcctcgacaactcgactccggcgtcggtcccgacagtggacggcccggccaggcttcggctgatgaagtcttcttttcgagccaactctgcctctgtccgtactgacaccgctacctccggcttcggctcatcgaagagtggccgagggttcctttaactaagcaagagtagcctcggacagcaagaccgaccgagctgagggactcccacgcctccgggatacggatacctcactcgtcaccctcgcatgaggcaactcacacttggtgaggcggttcagatagccgacatacgagtcttagtgctcgaaatgaggaaaaaacacggctccgcgccgaagatacatacatgttcaggccccgacagccacaatgaacaaaacaccggcactcaaggtgccattacaaacggaactccggttccacctccgcgggtacgaacaaccccacacgattggagggcctgcggagcaacaaaaggccgacgggtggctcaccgccgcccgctccaaaagcgacgacgacgacttctgctccgaggggccgaatagcagcagcgatgacctcagggcggatgctgctgccataaggccctcgcccacgccctcactcaagaggcaaggacgagcagaaggccatagagttggaggtcagtccgcgggcggcaccgactatctcgtcggcggagaaacctcttccggctgccgcggcggaaggtggcaccggaagcggcgccgaagccacccggaccggagagccggacacgcggcagctgccagcaccacgaatggcgaacgcccttccctccgatcgctgagggaaggagcgggccgctgcccgtgcggagaccgaccccaactcggtgcactcccctccccagcactgatgatgaacatccttgaagctgagggaggggcagaggccgcagcccgggcttgcttctccccacctaggagctggtggtcaccgtcttgggtgaccaccggcgaggggatgcggccaggctgcctgatgaaaatccttgaagccgaacgatggctgaaaggtaccaacttccgcgaagttgcgttcctccaacgacaaggcggaaggattgcgggtgttccccatccgggggctcggaaggtggaaagacgcgatgcataagggagcgcgaagacatggttgcctttcaagggggtcaccctccttttaaaggcaactctccccacttgcgtcctcagccatcgcaggctgagtcttctccaacacgctccaaggtcctccccctacgacccgggggctgggtcccatgcgtcatgcaagctggcccagggcagaagaagccaaaccgccgcgcgcgactacccagcggttacaagcattcctcctctttcgcccagaccagcgggtgaaagggcggacagccatgcaggcagcatgcaaccgcgccaagtgggcgcaccccttcgactccaacgcgcccagcatggaggcccatgcccacacgtcatgcaaccggcgcgccggttgctacgtgcgagcaactgcaccgccactcgcgccactaccgcgcctcctcgactgcggaaccagtaccgcgacttgaggcaaccctgcgtatgacccaacagcgccagccagacacatcggtcacgggtcagtcagctgcaggagaaggcgcggcggtcaatacggccaaaaatgggccgacagtaatggcggtggcaggcgggcggaagcagcggtcacgtcgtcagccgagctcacgtcccatccagggacagcaagggaaccctctctcacggcgtgaagacggcgtgccgtgttccgttcctcgaacggctcgcacgcgcgcaacggctgccctgtgaaccactcgtcctgtcgcactaactctgcggcaggacaggcggcacctttggcaggagaagcgggcgacgcttcaccttcgccataatgaccgcatcaaaaaaggtgcgccacgtcattcgattttgtatccttttccttttcttctttctctctcttacaacagggaccgggaaagggggataccccgaaagggatccttctccgcgaaggaaacgggccccgagcccccctactgatcagaggttcgaaggctggcccctcggaggggttcaacagtcgcctcagagcgctcgggctccgcgcccactactggtcagaggttcaaaggtcggcccctcggaagggttcaacgaccgcctcaggccactcgggccttgcgcccactactgatcaggggttcgtaggctagccctcgaagggttcacagccgcctcagacgcagagcgagggatgaccctgggtacgttcgatacataaccaaggctcgggctacgctcccgaggtaccctaggacatttctgaggccagcgggaacgatcttgtaatggaatcccatcagagggaggcatcgagcccccggaccccgtcaaaaggggacagggtccagcaagtcacccgcaggtacttttgaagcacgcctccgggaatctagccgacccctaacaaatggagcacgggcgtccactcggattacccgttagcagctcactggagacaccatgttcggcgccctccaagggcaacatggcgcttttcccccctcctccttgcggaaaggcgacgcaggggcgtatgtaaaaaagtcgagtctgtccttgaccgtcctctcgccctgtgtggaggctcgggggctgctctcgcaaacccggcccctgccaaaccgttgacagcgtcaacataccagcccgagaacttgggacccgaccgtgcacccgggctatggccagctcgcatgagggaacaactagactggccgaagcattgcgaaacgcattaagacctcgaaggagtcaaaccactcctccgaggcctcgggggctacacccggctggtgcgctcgcgcgcacccatcggaacaaaatgcaaccgagaaaggccggtccccttgcaaaaaagtgcgacaaaagcctccaagcgagtattaacactcccttcgaggctcgggggctactatcggggaccataattaggggtaccctcaagactcctaatctcagctggtaacccccatcagcacaaagctgcaaaggcctgatggatgcgattaagtcaaggatcggtccactcaagggatacgatctcgcctcgcccgagcccagcctcaggcaagggcagccgaccccggaggatttacgtctcgctcgaggaccccctccagcaacggacacaccttcggctcgcccgaggcccagtcttcgccaagaagcaaccttggccaagtcgccacgccgaccgaccgtatcgctggaacatttaatgcaaaggtggcctgacaccttatcctgacgcgcgcccttcagtcgacagagccgaagtgaccgcagtcacttcgccgctccactgaccggcctgacaagaggacagcgccgcctgtgccgcttcgactgctgtgccactcgacagagtgaggctgacagcagccaagtccggcctcaggcgccataggaaactctgcaccgcccgaagggctcggactcgggctcagccccggaagacgacgaactccgcatcgcccgaccccagggctcggactcgggctcagccccggaagacgacgaactccgcttcgcccgaccccagggctcgtactcaggctcagccccggaagacgacgaactccgcatcgcccgaccccagggctcggactcgggctcagccccggaagatgacaatctccgcttcgctcgaccccagggctcggactggggctcagccccggaagacgacgaactccgcatcgcccgaccccaaggctcggactcagccctggccttagccgacggtctccgcctcgcccgacccaggggctcggactcgacctcggaggagcctccaccttgcccaccccagggctcggaccgaccacgtcacaggaggcgccatcattaccctaccccaagctaactcaggctacggggaacaagaccggcgtcccatctggctcaccccggtaaaacaagtaatgatggcgccccgcatgctccatgacgacggcggctctcagcccccttacggaagcaaggagacatcagcaaggactcgacagcctcgacagctgtccttccgccaggctccagcgctcctccgacggccacgacaccacacgaaccgggtgccaaaacctctccggctgccacgatggcatgtacttagggcactagctcttctctgctagacacgttagcacactgctacacctcccattgtacacctggattctctccttacacctataaaaggaaggtctagggccctcttacagatggttggccacgcggggaaggacgggacgacgctcgcatacgcctctcgcttcctcccgcgtggacgcttgtaaccccctactgcaagcgcacccgacctgggcgcgggacaaacacgaaggccgcgggtttccccttttacgcctgtctccctccggtttttccccccttcgcgctccgtctcgcgccgacccatctgggctggggcacgcggcgacaatttactcatcggtccagggaccccccgggttcgaaacgccgacaagtcttgcctcatattttttatggatgcttatcttcataccccaatgcctatttaagacatttcagttaacctgcccttgaccacccttgtttcttaatgatccatgagcggcaattttattttgcacatccttggtgatcttgttaattccttgtaacttccttcggtaatgaatttttttacttcaactcttctgtcggaacctcacttatctgatccttgattgttttctccacttcgccactttgcgagtcttgccttaactctgtctagggttatgcttttcataattatcacccttacccttatcacctctatatcttaccttgatgtttatcttataccggccctttaaaatctcctcttttcatctcaatactagcattgtactttacctatttttcccttggtcgtatcctcttccttgtcgcttgctagtttttaactccatcctttgttgtgctccggttgggtactacctttacctttctcatctctcgatcttaccttggtaattacactatgtatgttctctaaaatctccaatatcctatcatagtttaggagcgttgttttacttaccccaccgttggcaatatcctcttctttacggcgggtaagcctgggcgcaactccattctttgttgtactcataccactggctcttcaatgccttcatcttttctctcataccttatctcttgtcgcctttgacccttgcgatattgaggtcttctacctaaatgctcaccttgaacttatcctttaaaagcctcccttttctttcaacccagtttgagagttgcgaggtacctatctctcccttcatttcttttcacttcttgtcgccttacaggttttgtgttaattccatcccttgctgtgtttttatttgctatcaccctcaccttgtcgtccatcgatcttgccttgatactcatctttattcctactctttaaaaatcccctctcttccacctcaatttgagagcggcaacttacctatctggcccttggacataacccctccttttccacttgcaggccccatcttaactccttcctttatggtacttatatccttggttcttatgcgcatttacctcctctcttacattcttgtccggtatcacctttaacccttgtaatattcataccattaccttcatgcttactttgaacctcccatttaaagccttctcttttccatccttgttcgaggataatgtctcacctatttcactattgactgctcccccttctttgacgccttgcaagttttgtctaaaatacattctttgttgtgtgtttgtccattatcaccttaacccttgtcatccctcgatctttactttgatgcttatcatgtacctgcattttaaagccgcctcccccatttcatttcaagagtgatgtcttacccatcccgctcttgttcgttccctttttcctctgtcgcgttgcaagtcttatcctaactctatcttttggtgtgcttttgcctttcacctcccttacctttgtaatctccaaatctttccatgatgctatcttatgcctaccttttgaaatatcatcttttccatctcaaattgagaatggtgttttacctatcctgaccttggttgcattctctcccttgccggttacaatcctggctttagcttcatcctttactattttcatgcccctatcatgcatgtcttatcattccccttgccgtttgatggccttagagtagtttccccttggtaaggaaagaccaccatctagttgatattaatgtgtagcaatgagatgcttgttgttgtgtgctcgtgccgtttgtctttgtgttatgactgatttgcttctttgtgatgagtgttggtgtgttgtggcctttggtccacaatggcaccagtttactacctgagtgcaatagagttagttagttgggtgctctcccttttctcttttaatccatctaggcttaccttttctatctatactcttccctcttgcacctgtccggttggcatcctccaacctctcttaatcagtcaagatcagagccgacaacattgtcaccaagtgcgtatcaacgctcctgttaagagggttagccactaaccccaatgaagataatgtgatcaacatcagccaacaagatcaaggtggcacaacgaaagcatctgtgggcccataacccacaggtccaagggatcctcaagaattgcatcaattggtctcaagtatctgaaggtccaagcaaccagtccacaagttgaagtttctagagtcaaagttgaatagaaaaagctaggaaaaaccaatgaaccaatctcattatcttgctagcctcttcttgaatctcgagggcgagattctgttaagggggttagatttgtaacaccctgaatttgggggtataatatttcttttctgatatccaccaaattcaggtgttaccctctcctttacttgattttcttcttttttccgaataatggagaggtaatttgttatatataagcgtaagcctagtaaagtgaaactctagagaaactttgaatattgcattcatgacgctgtatagtgtttctatgttcaaaacgtgttggagcatgttaatatacctcgtagaagttttggtaattttttcatattttctttccgagtataattctctccttttaaaaaaatcaaactgtacatattagaggcgcttaacaatctttttataggtttcaaaatttttattttaattttatttctttggtgtcaaatcatgtctaggaccattgctagaaattttgttttccgggtattaaataagaatttgagtcttttctataattgttctaaaattataaaattcaagatttagacatatctaatcccaatttagctccaccgaaacccttttcaaataccacatccatctgcctttttctatctagtagccaagcacgaattccaacctccaaactactcccgtgagaacaggacctccatgatcgctactgccagaactcgtttcgacatctccttcatccttgtcgctgccgctcgcctgcccagcgggcccaggcgccaggccgcaccatgtctcacgcgcgtgcgcgtcgcgcggacgcagcagcccatcagtcgctccaagttccctcttctccaaaactgcttctctcgcgcagcagagcaaccgcgcgccaggcttcttctccaggtccgcgcgtgagaatcgcagcctctgttcatctcccaaatttcaaaccatctcctaccaatgtcgcgaagacctgggatccatggcgcccttgcagcagaccagtcgatcttggcaccctgttggacaccaaaatgagcggacggtctggcccatgggcccgaacggtccgcgtgtcccgagattagattgactcggatgtttatccttatctcgtgcgtggttatccatctaatcacgtgggagtttgttggctatctcttaggaaaaggtccagacctcctcccctataaatataaaggggtacggccgattgagaacccccgaacacattccaatcgaaccaattaccttacttacttttcctgccctaggagtagatgtagcatagttctagttgtagccttccgcatatccacctccacccctagtcgactctacgtcgtctagatccgtcttgggtggcttgccgatcccaagacgaccctaggatctcacccctcctggggggcaagatctaattgtccatccaagacctcttcctcgatttgatctcttaattcctaggcgactccacgtcgtctggggatgccccgggtgacctgtcgacccggagcaccttaagatctttccccctaggggacgagatctagattccagcaaggaggaggaagacgaccctgttgccaggtcgcggaccgtccggcccagagctgcggtccgtccggtgtgacgcagggaagacaccactcctacgcccaggtcgcggaccgtccggctcaaggccgcggaccgtccgcgccgtcgcagagggcactaccaggcgatccggcgacctgtcgcaggccgccactactgttcacgttgcggagccgaacccaaggtgccaagtaccgccaagcggttcattatagtgtttggcgcctccaaaaaggtgtcaacatactttttggcgactccgctgggaagaggttgcaggtctacaaaatcaggcttacatggccaattctaaagatctcaacagtgcttctccaaacagcaacacaaggctgactaatttatcggccgctaagcgtgaaagattaaaagatgacatgaagaaaatagacgaggaggtccagcgacaagcagatcaggtgctcaaggtggcggataagtggttcctctcgcacttcagggtagattgccaccagaaggccgtccaagagagggagataaacgccgagtacatgtcagccgtgctgcaacagctccccacgataggtgatgccaggtcagccgatgatattccatttattaaaatttcttttgataatcggattaaaagtatcacggaggatatagaaaggatggcgcatgcattaggaaaaactcacatgcctaattttttatcacataaattaggcgccaaaacaattgcgccaaatacatcggcaacaaatgggtttccccagccatattctggtatgccgatggactcatatccaggacgaacgtcaccaccatcttcgctaaatggtgagtcaattctgagcacggccggaccgtccgcacgtaattgcggaccgttcggccctccgtcagaccgtccggcaccctacgccggacagtccggagttacacagagcccaccacaagggtcgcaggtgttgcctgacgtgaacggacagtccgaggatagtaccggaccgtccgatccacccgcagaccgtccgactgcgcaggtcggaccgtccggagcaccagaagtcacctatgatccgcctagtgcggaaggccggcataaatataaccggccacccaagccccaagaaccaaaaaagtcacacgtccctgagcttgtttggcccgctaaggacaaaccttctgttcgctctcacccgcactcgacacaaaaggaaaaggttaagttcacatttaatattactaaatgcgataaaatatttgatgagttgcttaaacatggtaatattaaattgtcacatgcaattcctccggttgaacaattaaaagggcgtgtttattgcaaatggcatggctcctttctccataacaccaatgattgtgccgtcttccgtcggcaaatacaatcggctataaacgaaggcctgttgaggtttcaaaaagaggtgaaaattgacaggccacctgttcctgtcaccacattagagccaacgagcaaaaaggccataattcggccttgtgcggccgataaaagtaaaaataaaaatatcgtcattggtgatcctcgcacaccaaatatgtcacgcagaatggttactctgaaggctccggacaaaagaaagaccggaggcaccggagggcaagcacgatcggacacccgatcacggtcatttgtcctgcgtacgccggacgatccgggtactaaggctgaacagtccgagacaggtgcggacagtccggctatgatggccggacggtccgcagatggtcagaagcagcaacctcagaccatcggaccacaatgtttcaacacaagtgttaggaaacaaaacactactaagacgtctggacgactcagtagagtcggccctacgtttggtcagttgcttgccaaatatatgaagaaggtcattccacacaaccggccaataaaacaaacgaagtcaaaagggcgacctgtgcgaaagcaaaagacgactaaacggacccaaagggtagcacaaccaagatcgccttgtcatcctcctccagggatagcatggtgcatcccattctatccatcgtcgatgtgttgtcctgctcatgtgtggggtggtacggcgatgaattcgtattactggcccaatccgtttgcttatttgggctggggggcaccacaagtttttgcctattgacaggttgatcaggtagacatggccgaagaggatgcgatccgaaacggcctctgtgcattaaagtcccatcaagtatttatattatctgatcgcaagagccgatgacttgcatcgagctgagtccttacttcgggaacaaaacctcatgaggtcaattgtttccgaagttttcgctaatgcttttggttcgtcaagctccaccaaaaggcaggggggcatatgttggacaccaaaatgagcggacggtccggcccatgggcccggacagtccgcgtgtcccgagattagactgaatcggatgttcatccttatctcgtgcgtggttatccatctaatcacgtgggagtttgttggctatctcttaggaaaaggtccagacctcctcccctataaatataaaggggtacggccgattgagaacccccaaacacattccaatcgaaccaattaccttacttacttttcctgccctaggagtagatgtagcatagttctagttgtagccttccgcatatccacctccacccctagtcgactctacgtcgtctagatccgtcttgggtggcctgccgatcccaagacaaccctaggatctcacccctcccggggggcaagatctaattgtccatccaagacctcttcctcgatttgatctcttaattcctaggcgactccacgtcgtctggggatgccccgggtgacccgtcgacccggagcaccttaagatctttgccccccaggggacgagatctagattccagctaggaggaggaagacgaccctgtcgccaggtcgcggaccgtccggcccagagctgcggaccgtccggtgtgacgcagggaagacaccgctcctgcgcccaggtcgcggaccgtccggcccaaggccgcggaccgtccgcaccgtcgcagagggcactaccaggcgatccggcgacctgtcgcaggccgccactattgttcacgttgcggagccgaacccaaggtgccaagtaccgccaagcggttaattatagtgtttggcgcctccaaaaaggtgtcaacacaccccaacccctgtggctcccctgccatccgtccctgcgttccagggtggtcgtcctgcgtcgttgccgttgaggtgagctccctccttctccctcccctcctcttctc

SEQ ID NO: 1221 - DNA, 2891 bp, Zea mays
  Intron number 3 from transcript GRMZM2G360698_T01 (locus G RMZM2G360698) derived from phytozome v7.0 (chr-ID 3; pos 1 42425792 to 142428682 reverse strand)
cttgggtctgaggttgttttgaaagcaaagacaaggtaccccctccccctcctgttgcctttagattctaactcatgccttttagctacctgttctaattttcaagaagaggtgtgacttagatctggaattcaaacttctccaaatttgatgctagactcatggtgaatggaatacaactttttttaattcctttttacgctagtggtaatgaatagatgtagtaattttcaagtgatgagaagaaataactcccaactctggtgcatttttgctagtaatggcaatggtccaaatcattatatagattgctttgtagaggttttgtagacagatactcactccatcccacaataagtacacatttcacttatcgtcaaactttttaaagcttttttctataatggaagctttattgaatttcaagccaatacatcgaggtcatacaaattacaaagttttgaaatacacctctgacctctccatatcgtgatgaaaatcaattttaagactagactgctacccatgtgtctgcataaaaaaagtgcggggctaccttcgccaatatttgtgatgctactacaaccaaatcctgtgaattcggtcgctgcaaaatagcccatgtacgaagccaatatatgattgagaaaataacctgcaatggacgataaacatgttttctttcaaatactaaattattcctgcatagccatagagaccaacatgtatcagccgctcctagcataacctaaagtttttattctttctagaggccctatacccaagttccaaacatgtgtttatgcggcctagaaagtcctgatgcagcatgtataacaaaccacacagcacgagtgaaacgacatttaaagataaatgtttgattgtttcgcctttatgacaaaaacaacattctttactaccttgccaattttgttttgctaagttatctttggttaaaaccactagactaaatatataaaaatactaatatgtatgatgtattgatgtgtaatcaatatagttagattgatcgtagaatatacttttataataaacttatttggagatacaaacattaatatttctatatttgcatatattttgggatggagatgaagtacacacatcaacaacaacaacaattaaaggcctgtttggttctatacttatgttgacaaaaattgccacacattttatgccgcacttgtctaaggtgcaggcgcatggttattaaagcggtaaggcgagccaaggcgttggaccaccgcctggacgcctaggcggcgcctaggcgaggtaggcgggcaaggcgcctaggcgttggacctctgcctggacgcctaggcgacgccttaagaacaggggttaggcgctcaaattctgcgctacagtttgccacgcctaagggaatcttgccacacttttaccagtcattgacaagtggaacctacataataggagaaaaatcctgccataactgtggctctcaaccaaacgcatgcctaacttaatcaaacttgtcttaccttaggcgtggcaaattgtggcaagtgaggcaacaaaccaaacaacccctaaatcttttaatcccaagcaagttggggtaggatagagttgaaacccaacataagtcataagtcaaggtttagggtgtgtttggtttggcttttgactttggcttttaccccctaaaagccaaaagccaaaccaaagggctggatctaggaagcagctttttctaaaagccgactttcttgcagtgtaaaactgaaagcacctctggacctgcttttagcggcttttggatggaactgtgaaaatatatatggaaaaacttttagcgacttttagtggtttccaccaaacactttttagatttttaacagctcacagcccacatcagcttttctcacagctcacagcccacaacagcttttttcatagccacagcccaaccaaacagaccctaggcacatggataactattttgtatgtactcttatataatgctaaatctttgtgtatatttcaccatttgaagtcttatttactgcctttttccatgtcaactttggctttctactacatctcttcctattactaccacaccttaggattccattacacacgggtttctttggaggtctctattggacatgtacaaactatctcaaccggtgttggacaaacttttcttcaattggtgctatctctagcctatcacacatattgtcgtttcagactcgataccttgtatggtcacaaatccagtgcaacatatgcattttcacaacacttagctgctgaatatgttgattgtcaactttttgtagaccaatattctgcactatgcaacataacaggtctaatcacaacacaaggcacaattttgcaatttttcttcaattgtgttgttgtatttgtagttttctagagcatgttactaggctgatggaaccactcataaccttgtctattacttatgctgggcatgtcatgtccataactgatatcagagcagaagtcatgtccagaactgatatcagagcaaaccaaatcctctgttgcagttatctctttcaatagtagttattttgttgcatatgatatattttaaatctgcaggaagagaagaatacaaatgaggtccatatattgatttcattatgtgttgtgtagtaaactcagcatcgcctcacattttgaaaattatgatcaaccattgcttgcttgagcatccataatataataattcttctatatgtttccttctgcaagtaaaaaggatttatgagaaatgcaaaatcatgttttggatagagcagttattatatgattggttttcttggccaggcaggaattggcacacagattgcagaagttaaatt

SEQ ID NO: 1222 - DNA, 1729 bp, Zea mays
  Intron number 1 from transcript GRMZM5G804270_T01 (locus G RMZM5G804270) derived from phytozome v7.0 (chr-ID 2; pos 6 017988 to 6019716)
ctgtcgccttcagtgaatacccctaaagaaacctggagatagtttaaacaacttcaaaaaaataatatcaccacataaaatgaataaatctttatgagcttatgtttcagtacatatgaactcctgcacattcttagcactataatcttccttgaagaacacataatatatagtaaacaatccccaactactaatgaacagccagaagaatattgaacaatgcaaggaatcaatctattagttccaaacacaagcttatggtttcccaatctatgataatcataggaggcagctgaagcttatggtttagggtttaggaatcaatctatagtaaacaatccccaatctattaggaatcaacctaaaggcaattatggtactatggtaaaaactaatggtttgatttgaaatcaacaccgaaaataggcctttgaattcttgtcttacattcttttaaagacctgatgctcctcaattagttatgcaaattgagaatcataggaggcagctgaagcagtcagtaacaaaatacaaaaccaaaaaaaatccagaacacaatgattcatccaagacatcataatcatcgttctcacatgcataagtataattgtatgatcaatgccttcaacggtctcgagaagagggtcacttttttgttgctggatggccaggttcaacacatgcccattttcggggttctgggacggggatggaggcggcggctaggtttttgggacgagtgggatcctaggaggagacaggagcagtggcggaggacaggccaaaatttagctgttgataacgcaacaatgaaaaaaatttacaacacagtctaaacatagctacaaaacaagtgaaggaaattaaaaaaaatcttattcataatagcgaataaaatctaagaaagagaaaatgagttaataatcacaaaataaagtaaaaagtttgttaaacaagtgaaataaaaaagagtctagtgaaataaagacttgctcaaaatccagacacacacgcatcaattagatttttattcagcttttccctccccctctctatctctgtgtatgtgtgtgtctcagacaattttttgcttggcttttgtatattacagaagcagcactcacgctcatctctctcgggtatgactcagcagtaagcaccacatcccttaatgcgatgtgaagccgcatcccctatctctctctcctccgtcggacacagagccataacctccaattcaccatacgagttagccattgcctcatctgtttcggtactcggtaggggcggaacgtggcagggcttgggcgctcgacctaggcaggggacagggcacatctcagcgtggcagagccggccgctcggcagacctcgggacgtggcgtcggggaggagctcaatggtgttgtgcggcgcgaaagcagaacagacggagctcagctaacttgggcagcgctggtgactcgggaggctagagatggatgtgacgacaccacaacggtgctgagtcttggcgtctcaacggaggcattttaacaattaaacatgatagaaaaaacttgttctagctcacaatcacggcaccacatagagaccatcatcaccaaatgtaactcatgaattcactccccactaacagacaaatgggaagaggaggtgtgcgaaaagggatcagcaggaggaggccttaccacgtggcagttggtctcaaacttgtcgaggagatctg

SEQ ID NO: 1223 - DNA, 3142 bp, Zea mays
  Intron number 1 from transcript GRMZM2G053898_T02 (locus G RMZM2G053898) derived from phytozome v7.0 (chr-ID 8; pos 1 62019983 to 162023124)
gcggcgcccacatcaaccttaaggtcaagggacaggtcagcacgccggcggttcctctcttcctcattttcttctttcttgtcaactcgccggtggccccccttcctcaccatcttccccgtagcgaggtagattagcgctgttaaacccgcacctcgtagcgatcgatcgtcgttgcggtgttgattctcggattgctaggttgctgtcgaattgggattggtaggtagcgatgtgtcggtgctgatagatggttctttgcgagcgaatgttttgtcgattgcgcctggtgtgtgctataggtagcccttgcagactgcagtacggattttctgaagagggcatcgattgttgaccttacagtctttactagtttaaatggtcgaatgttcatcctttatttctctagatgtttggtaacaggattgttgatcacacaaatctgaactgggttcaatgccagaattttcaacatgttttatttctctggatgtttgttaatatcacaagttggatactgatatgccttgcccctcgcatgtaatttatcaaattgtggaaaattaactttagggccatttggaacaaaggaaatatgaaggatttttttaggattcattctctataggatattttcctacatgaccctttggaacacaggatttaatcccaactttcctatggcttttatctctctactcaaatttctgcatagcatccaaaggcaaagtgagaaatttttctgcgttctcaattcctataggattgcaattcatagccaactctaatcctatgtttttctatttctatgttttcatattccttccaaagggggccttaatattagttaaatgtctgacactgtaactgttgaagcatcgtgcttgaatgtttttcgtttgctttgttctctggaatccctttttttgtcccacgtgattctgaatagaggtttgcccataattctgttctactataggtctaatgaatatagaggtttacccataattctgttctaccgtgggtctaatgaatagaggtttatatcctataaatttgaaggatcatcatttttgtttatactgttatttttttgttggaggatatctcatgtgcatgaaactgatataggctagtaatttttgtcgtgtctgattttattcttttgtgccaggagctcagattgctcataattgttagtagcttttctagtattaattactgaaagaatcgttaaagttgcttgacaaagcactttattctgagtttggtaagcaacttcttttgaaggcactacacgttatgacttattataatcggatttaaaagagaattctcactaatactaattggttggtgtatttgagtacggcgcttgacaatcctcttaaaatgcttgtcagacattgacatgtttgatagggttctaggggccgtgtgcaaactgatataggctaacccctcgctgtacgaatgcatgccacgagacaggctcgaccaaggcctcgggaggaacctccgtctcgcctgagcctggcctcggtcttagataacatcgacaaaaggacgccaccaactcttctgtgaaggatgctgacaacgggtttgctacaggaccgacgtcaagtctgctttacgccatacaggaagaattaccatgcacttttcaccatacttatcacatttttctcaactacgactcggacaacacctccatcagacagactcgggtacgcgtccgagccctagatcctggcctcggcactttgctcggtcaagatgcaaacacagggaccgaatgtcctcctcctggttcaagtcaacagaaaggccattccgttggccataccggctacggtggctcagactcgcctactctccatatacgacaaatcgtggcactcctaggatccctccttgaggctataaaaggaggtctctaggtcttcatattggagagaggaaaacacttgtgggttttcacatctccctctcctggccatcttataccctctactacaagcacttaggtgcaagataatataagtctcatcccccccaatgctggaagtatggccttatctcgcccgaactaggataaaagcttgtgtcttcttgcatcacccatctggatctagtcacgccaaactaatttactagttggtaggacccttgggtcaaaacatcgttaataggattgcaaatcatagccaactctaatcctatgtttttcctatttctgtgttttcatattcatgtgttccaaagggggccttaagattagtttaatgtctggcactgtatctgttgaagcaccgtgcttggatgttttttgtttgatttgttctctggaatcttttttttatcccatgtaattctgaatagacgtttgcccataatgctgctctactgtaggtctaatgaatagagaggtttacccataattctgttctaccatgggtctaatgaatagatgtttatattctataaatttgcaggatcatcatatttgtttatactgttatttttttgttggaggatctcatgtgcatgaaactgatataggctagtaatttttgtcgtgtctgattttattcttttgtgccaggagctcatattgctcataattgtcagtagcttttctagtattaattactgaaagaattgttaaagttgcttgacaaagcactttattctgagtttggtaaacaacttgttttaaaggcactacacgttatgacttattataatcagatttaaaagagaattctcgctaatactaattggttggtgtatttgagatatgatggttggcaatgctcttaaaatgctttgagtttttcataggtccattttttttgataaagtcgaatgtttgactatcaatgcttgatgttacttgagtcatgctttaatcgcttatctgaataatttttttataaggttgaaacttaaattttaccatttggattatcttgggatatcaatattgcttaatttactgattgagctgctctgtgtattgctcgaacattgtggaattttacatgtcatattgttaaggttacactcttttgatatcacattctcaagtgttatctgtcacttgactcttccatctttataataatatttatatagg

SEQ ID NO: 1224 - DNA, 2366 bp, Zea mays
  Intron number 3 from transcript GRMZM2G021483_T02 (locus G RMZM2G021483) derived from phytozome v7.0 (chr-ID 9; pos 1 28309512 to 128311877)
cagacacccggacgtctgaattgtaagatcgaagatcttatttttatgctgatgttaccattaaattttttgtttaacatgaatgcatgatgtattttgtacctacatatctatgtctgctattctgtgattttagtacatgtgccatttctatttttgacatgcatcttttcccaagtcgtgttatgatgggacttctcatttttctggatgacctgagatgattatttttgtcaaagatgtctgcttttgaaatcgcatatgcaaaactgggtctatgtgatgacttaagacctagaagaatacatgcaacatctttctgctggcatgtgagtagggcattgactctaaaaactagaatttaattctccatgttttctacaaattataggcaaagtgcttgggttatgataattttggtgatgtatatgtggactattcacttatgctgcacaattctctcttaaaaatatgaaatagctgggcgctgttttcaacttctgtgtgcacgtgatgctctatctggacactgttaattgattggttttttgagctggtcgagattaattctgcagaacataaatttgttgttattattgggacatgcttgaaccatgataatatccattgtttagggctttaggctccctttggaacaaaggttttacaaaacacaggaatatccgagtatgaaaaaggtacgactgaaatgccttaacacttcaaatcctacaagatttcagaaaaaaggaaagtttagccagatgcctttggaatagacctgttcaaacatcgggttgggtcgggttcgggtcgggtcgtgggtcatttagcacggcccgtacctgacctgtgcctagtgtcgggttgggtcgggttggcccgtgcgtgttaggttgggttttttttcgggttgggtcgggttttttcgggttggatcgggttttgggtcaaaatcatgatctgtacccgacccatgaattattgcagattaaaaattacagcccatatttgcccgttgcattggtcgggtcgggttgggttttttttcgggcgggtcggatcgggttggtggggtcgtgtggctcatgatcaggtctacttgggaagcattataggaaaaaataggaaacaaaacaattaggttgggcccttggagctcatgttttttttttctcgaacacgtaggagagctgcacatctttatattaagaagaagataaagaggtccaaaatagaccggtacaaaaatccctatggcttaacccataggaatttaaaaggaattgttgggaagcattcctttcttccaaaggccttcattggaatttttctataggaactgattccttcaaaactccaatgtttttggagctcttgtgggtgctgctattaagcatgatgcttattctgcgtgagtggaaagtacagtattaacgtttatattcacttatggtttcctaagatcgtgattcttctgtcctacatattagattgccatccacttactaaaatctaaattttattatcctaaaggtgtacttccatattttttatctgaacccaacatgtgcacaaagaaaacactaaatctaaggggaaaataatagaaaatgactacacattatcctatttgatatgttttttcttaaagggaaaataccaacctgaatactttttttacagggatgtggagtggagttattgcagtcattgcacttcatttttttctttaaaaatatacaaacatttttgtgatggacaaacattttgagacactgcttcctgaagatttgagttttgacaaaattgtaaaacgcatggagggtacagagtagattttgtagttcatttcaatcaaactgtgaacttgtgaagcataagctaaagttatttttctaagtaaatctgaatgaaatatcacagttctatgaagtacttattgcttcactttgttttgctatttttgcacatggcttcaggtgaaataatgtttgtctttgaaggatatgacttatgggagtttagttattgcaatacttccactcccttcccctaactaaatgatttaatagaagagaaatgattgtatcataacatttactatgggcacagatagtcgtttcacatttttttcttggatctgttacttatttagtgcatctggtctgctgtggataaatatagtgaaacagaggtcatattgtagattaggttcctgaacatgctgctgtcttggtgttgtgatcttctgttgcaccttccaacttggcgcttaaatttacaaagcagccttctgagacggcgtgactgtacttatttgtcttgcaggcatacattctcatctttggcattgaaagaactga

SEQ ID NO: 1225 - DNA, 3184 bp, Zea mays
  Intron number 2 from transcript GRMZM2G125175_T01 (locus G RMZM2G125175) derived from phytozome v7.0 (chr-ID 7; pos 4 4362651 to 44365834)
tcagcaccgcgtacctcgctgctgcgcgactcaacgtgagtttccctatcctcaacaagctgaatgcctgatagtgcaaatccagttcattttcccctatagttttgatcggcgatcgccatatacaccactcactgtgtaggatgagtcgaatcgatcgccacaaaattctatgtggtttgaagcaattttgttgcattagttgaggaggtcaaactctttgctgatgcggggaattgtgtgggcagcagatttgcagtatttggttgatccaggatcagataaacacgtttgagagaagagctatactggtacaacgtgtggttgataatcactgaataatgactctgcaagaaatgagattgtaccactcaccaagcatctggcatctcaggttgtgtctagaatatagcttgggaaatagatatcaggaattcaagattgcacgaggggaggggaagggataatatctatcagataaaaaaaattcaaattagtgtcaatacctctcaaatgcaagaaagtggttgagggacatttctttgctgtttttaagcttttttggaactttttacagttcaaaattacacaactcatgctttatcgagcatgccactactaaagtagaccattattaccttaaaaacataactaataagtagacgactgctagatatgaaaattatgaaaacttaatatatatagtccctctaatactctttatcctgttactgaaactttaaattctccatgaaaatttgtgctggattcaaattcactggaatttcaggaattaacctaaatagaaattttattttaattaaaaagcctggcccatcctcccagctgaggcgcgatcgccgcgcgtgcaagcacaggcacagcgcagcgctcgccctggtagttgtcgcgcattactccccgccccaaccccatcccgaactcactcacggtgccgcggaacagcgaagcaaacgaccagacgtaggaggagatggcggacggagagccagggcataagctgtcgccggcggactcccgggcggtgacgctggcattcttccgcgccctaggcgccgacgcgcgcctcccggcctcggccgaccagcccgacgcctactccgctctcgtccgcgcaatcctctcctctgttgccgtctccgcctccccgaccccgcggatctcttgcaccatcaccgtctcgcacgccgtgactgtgagcgcctactgctactgaacttcccgttgaaatttctctgctgcttacctacctagtttccttgcatggacttttcctgcagaacacgtacaacacgctccacggcggcgcggtggcggccgtagccgaggccgtcgggatggcgtgcgcgcgggcagccgccggggatcgagagatgttcctcggcgagcttagcatcgcgtacctcgctgcagcgcgatgcgatgtgatcttctaattaaattctctgcacctcgcttttccagcatccatttgttggtcgaatcccacattgctatgtactcttggggcaactttgtgcagcaattcaacacgtcaggataatttgggggattggggagtctagctactgcttttgaactggttattattattatgtagttacaccacagttctatgatgttttagaagtaaatagctgattgtaaataagagttgttgggcaagcattgcagctttgccagaaagggtgtgtatttgattgacatatagtagaacctctagcaatgttggaggtgaacattctagtagaatgataaatgtgaaatatatcaggcctgccaatatctggtttaccgggagaaaacttaaatagttttaaacctggtgattaatattgcgatgctaataggtcttgcaaagttttggtccatttgtttcaagtttcaactttgaagaatggtaagtcgttcaatacaagcataccatacaagtgatatataataattaatctacctagccgctgaatgtttcatacatgggcacttaaaaagcgaaagtatgggagcttaaaaatgctataccgcaaagcattagatacagagcgcatgacattctggagaccccaaatggtagtagaatatgattgatgtgaaaagttattctggagatcctaaatggtatattgccagtttgaaaaaaaaatctacaaatgatatcagagcgaaaagtttttgtagtttgattgcatcgattgtactggtgtcataagtttggaacagaggttctaatatggatttttggcctatataaatgaccatacgagggatttcatcctcaagagatcgaagggtttaatagttttggtttgaaattgcacaaactaaacggttttagcttctctgtgattcacaaactagaagcttgagactgtcactggtaattttttggtcattcactagtaatgtatgttgtaatgttgtgttcttgttgggaaattggattatgataaaatgacccttaagagtggcatgtcatatacctctatttatgattttgatttggaataatctaatggataccagttttataattccatgctcttccacatgatacttgctgcgatgccccatgtcagtgcgatatcagtagcttacatttaactcacataatcaattaatttcagttgagtccatttactgatgccccattgacattgctgctgtcatagtacttctgtcattatttgccaattcagtaaacttaggaagggcgctatagaacccatttcttcacttgtgccatattttatttcctgcaccctcttctttgcacttatatcgctatgtttttgtcactgaatttgggcatgacatactccctccgttcttttttatttgtcgtgttttagtttaaaaatgagctagccggcgacaaatatttgagaacggaggtagtattttcttttgaggcattagaaattaacttctgaggaatcatggttctgctgctctttgctgatgccaaatctctaacatatagtactgctaattggaacacaaactagcgaaccataggaatagtgagacatatagacatccgggttcttccatctcactgtcaaagattttatcatggcagatttgaagcatgtgttctgtcctaatgcgcattatttatctccatgcagtctgaagtggacgttgaagcgcagatactgaggaa

SEQ ID NO: 1226 - DNA, 5568 bp, Zea mays
  Intron number 2 from transcript GRMZM2G140175_T02 (locus G RMZM2G140175) derived from phytozome v7.0 (chr-ID 9; pos 8 3789582 to 83795149)
cgacattgtcgcaacgacagatcttctaacaccaggtacatgatagttcacttgtaaagtataggaaaaaatggtacattttaattactttaaacctagacatgccttattccaggcagtgttcatgaatctattggtgtcattggggaaccgggtatacgcgtgagagagtctagtcttaaatgccttaggttgtataatcatacaccaaggcggaaagaggcaaagatagagtatctaagaaaacttagagcactacaggctaacactttgaatcacacatccatcaccatggaggacccaacatatacccctaaggttgtacaccctaaagcagatgcaacaaaacctgctggatcctcagttagtgtcgacaactgggttgtccctaaattcatcaggacacctttcttgccagcttcaacacaaaccgaggatgtcggttcattcgatttgtctactaaagtagtaagacataaacatcatgtgacgcatggggaaagacaagctatcttagcccgtcaaaaccagcaatttgaagcatccattgcaaagaacatggctactttgattggggatactatcagtgatgctgatatcaacaacaatggtaattactatccaatcttaaatggatcttgcacgacgatgatagcatatagtcatactaaacatgtgtttccatcagcacaatgtagggttacatgccaaggcgctaccttgcccactaatgggagtgcagacataaccgaacaagaaagtggggtggagcatttaagagcgaagccaagggtcatttacaatggtaattgttaaaaatctttatttagatgaggaggctaccttgccaactgattgcctttgtcttttatgtggcttcgcttatcaccatctaggtgatgatgatgatgaggttgtcatattcggagaagatgacgatgatgatgagggatacatatttgatggccaatgtacttatgtcaattttattatgataccaaggcttatataaataaacatgtcttagtcgttgttttccataaaatatcagatgaggagactgacgaggacaatgatatcgatggtactcaagatgaatctattgccactgatgtgcctgacccgtacaataacctccctgaagaagcacatatgctaaagcctattgctgactacggttattgcactgcgcagaagtttgagtatgagccacctaggtgttgttgtcatggtgggaaggttgagctagcaccactggatacccctccccaacttaggaggttgtgggatagtgtagtctctaatgctaagcactttcgtgataacattaggttttttaatagccatttctctttcacttccctgtattgttgcatcgatagtatgacaactaatgagagagattctggtatatacacgttccgggcacaaggcatgatgtaccataatatcaaatcattcggtaaggaaggtgggtcggagcataaacatctagagctttatttttatgatggtgatcccagtctcgagcatcggtatcgtaagtgtcgtgaagagcagcttcagaaagacaaagaggttattaaacagatagttgacatactccatggaaacccgtactccgagcaccttaggagcatgggccatgttgagaaccttgatgactatcatatcacattgaaccttgactagacgttgaaccagaagacatataagacgcctctcacttcagaggtggccgctgtatggatcgaggggagcgaacgacaatgccagtttagcaagagtgttatgctacatgggaaggataggtcaagccacgtcatccgctcataccacggatgctacgatgcactatcgtatccactgttcttccctagaggtgaacttggatggcatgcaaatatcccaaaggttggtgtatccacggatgaagtggatgcatatcgtgcgacacatagggcaagtaatgcaaatgatgaagatgcgggttagttgcttctttgtaatttgagatttttgcatattattaactatgctttcgacatcactcacttttaaatccttgcgtatgcagaatctcctagccatttatgtgtgtccatacatgactactactgctacaaattccagattcgtctcagggtattcaatccaatacttcatggaaagcggcttttccaacagtttgttgtcgatacatacatcaagattgagagctcttgtttagatttcatacgtaagaatccggatcgattaagggcagacctataccagggcttagcggatagcatgttagatggagatattagagcaaaaaaggttgggaagcgaactgtgttgttgacgtcgtttattggcggtcctcgtgaccatgaaacgttggtatatggatgctatggctctggtgcggaagtttggtaaaccggacatctttcttaccatgacatgtaaccccaactgggatgagataaggagggagcttctccctgggcaaacatcgtaagatcgtcctaatcttgtagtgtgtgtatttcatgcgaagctacaagagttaaagcataggctgactaaacaggatattctcggtaaggtctgggcctacgtctatgtcgtggagtttcaaaagcggggtttgccacatgcccatcttctactcatcatgcagaggaagtacaagctcacgtgccctaagcagtatgaccttttgatctcagccgagatcccacacaacaagtaccctgaactacgaaagatggtgatcaagcatatgatgcatggcccatgtgggtcgctaaaccctaactgtccatgcactaagggccatgcatcgtgcaataatcattacctccagccttttagtgacacaaccttgcaagggaaggactcatacccgatttatagatgtcgtgatgatgggcataaggaaaaggctcgagggtgcgaattggacaatagatgggttgtcccttacaacccttacatccttcgcctcttcaactgtcacatcaatgttgaggcatgcaggagcatcaaggctattaaatacctgttcaagtacatatacaaaggtcatgatcatgcttctattgttatgagagatgcgagcaaggcagatgatgatgcagatgagatcaagtagtacagagatgcaaggtgggtgactcctccagaagcgttagggaggatatacgactttgagcttagtcagaactctccacatgtgatgcaactgcaactccatcttccaaacctgcatatggtggcatttcacgaatgacaaatggtcgagcgagtcgtcaaccgtccaggtgctgataggtcaatgctcacggcatattttgaagcgaataggctacatgagggggctcgtggcatcctttattgtgacttctctgagtggtacacttggacacttggtagagtggtaagggaaaagtatggcaatggaggaagcgtgatacgggtggacaagtcggtagaatagtctctactcttcctgctaagggggagcgctactatctccatgttctcctaaaccacgtgacttgcgccacctcctatgtggatctaaggacagtagatggtgtcatgctaccgacttttcgtgaggcagaagagagaaggggactgcttgagtcggacaacacactagatgagtgtctcactgaacgtgctcttttccagatgccatcggcgctgcaacgactttttgccataatactagtgtactgtgagccaagcgacgtggcagtactttggcagaaacaccgagatgttatgtcaaaggattatcaatgcatgagtcagagtaaaactcatgttttgcatatggtattgattgacattaggaacatgctgcagtcaatgggaaaggacgtaaagacattccctcttcctcctatcattgacgtgtatgatgatgctattggtactgctagggaggtttacgaggaggaaagtatcgaacagacagcgagagatgtggctctaaaagactctcttaacgagaatcagagggctgcctatgatagtattatgtctgccattgacactgatcagggtggattgttctttgtggatggacctggtggcaccgggaagacttacctatataaagtgctactcacgacgctacgcatctagggcaagattgttgtggcaactactacatctggcgttgcggcttccataatgcctggaggaagaaccgcccattcatgcttcaagatacctctcactattgatgatggcattgtatgtagcttcacgaagcaaagtggaacctcagagtagctacggaaagcatctctcataatctgggacgaggcttctatgactaagagacaagtcgtggaggcactcgacaatagcatgtgcgatataatgggtcggcccgaactgccattcggtggtaagaccattgtcttcggtggggatttcagacaggtcttgccttttgttcgtaaagggtcaagggctcaagtggtcgcgtcttcgctacagatatcttacctatgggagtccatgtcccatttaaagcttgttagcaatatgagggcaaaaaacgacccttggtttgcagagtatttgctgcgcgtaggcggtggaactgaggacacaaatagtgacgacgacatccgtcttcctgacgaggtttgtgtgtcttatagtgggagtgatagcaatcttgacaacctaatagactttgttttcacaaatcctcaacgaaattatgtctgattcgacctacatcacttcaagggtgatattgtcaacacgaaacgagtgggtggatatgataaatgtcaagatgattgatcgttttcaaggggagcatatggtgtaccatagtttcaatagcgccatggatgatccccataactactacccatttgagttcctaaacacacagacgctaatgggctgccaccacatgttttgaagctcaagattagatgccatgttatattgcttcggaatatagaccttatcaatggactttgcaatggcaccaggctggtcgttcgtggtttccaaagaaatagcattgacgcggaaattgtactaggtcagcacgctggaaaacagattttcctgctgcgtatacctctatgtccctccgatgaagagatgttccctttccagttcaaaagaaagcagttttctgtatgacttatctttgcaatgacggttaacaaagcacagggccagactattctcaatgttggtgtatacttgcccgaacctgtgttctctcatggccaactatatgttgctctatctagagcgacaacccgatcgaacataaagattcttgccatcccagccgtcgatgggaagaaaaagtcgaggaagggggcaagaaagaaacccgcagtagattgtgggacatgcaccaagaacatcgtctacaaggaggtcctaacaaactagacccacattaatggcattcaaaagcattctaactattttatatggtttttgaacaattgaatatttggattgcgttctaatgttgatcttgttttgtttttgttttgccaggctgacgtttcggggaaagaa

SEQ ID NO: 1227 - DNA, 7035 bp, Zea mays
  Intron number 4 from transcript GRMZM2G176175_T02 (locus G RMZM2G176175) derived from phytozome v7.0 (chr-ID 7; pos 2 2005558 to 22012592)
acttgaagcaggtaatctttttttttgaaaaggcaggaggtctgccaagatatattgataagaagaataacaagaggtttaagtcaatacagtgaccgaagtactaggcaaagatccaacctgaagagaagtaaacaaaaataaaaaacagaccccactaaatagttgttaaggggtaactaggtgcttggcccctgccaaaatccaggctgctgtctcactcttgattttggcaatgatttgttggcagctcgagaatctgcgatcaaagattctcgcatttcgttctcgccaaatctcccagtttacaaggatcaaaagtgatctgatgccttttctattgcatcccggcaaaaaagccagcttttcccaccaatgccccagctcggggggtcgcccccagttagacggcttcaggccctgaacagctacccagacagcaacttcctcccaaattcttttgatgaaacgacattccacaaaaagatgaagccccgattcctgggcagcacgacacaagacgcaagttggttcatggggccaattcctggcggctaatcgatctgctgtccaaatgcgattttgaattgctaaccagctgaaaaacttgcattttggaggcgcccagttcttccagatgatgaggtcataatttgtgtgaacagagcccaaaaattgtgcctgatatgccgatttgactgtgtagcggtgatccacagtgaaattccaggtgatggcatcatcacgctctgggtgaaactggatcttttggacttcagaccaaagaatgcagaactcatgaatgtggtggggagtaatcggtctgtcgaacagcgcaagatccatgatccaggcattgtttgtgaccgcctccgctaaagatttcctcttatttcttgatatagaaaagagacgaggcgccaagtcctttggcctttgccccctcacccaagcgttgccccagaaggagattttagaaccatcaccaatatcaatggtcgtcgatgccgcaaaaagcagtctatcaacatcagagcaaggaatctctaagttgtcccaaatattctgtgatgaggtgcaattatgccagagccatcgcgcgcgcaaggcacgcgcaaaagcgcccaagtcaagaactcccaagcccccaagggattttggcctcgccacccgtttccagttgactttgcactttccgcccgtcagtcgttcagaaccagcccaaaggaattgtcttcttttggagtctagaaggctaatcgttgccttgggagcattaagggcggttaatagataaattggttgtgaggtaagcactgttttcaccagatttaagcgccctgccactgagaaatttctcccattccagctgctcagtttgttcaatactttgtccaccaaaaactggaagtgctccttcctgagtctagttgtggagagagggaggcccaggtaccggatcgggaaggttgctcttctggctgggaagcaactaaggatgtcatcaaggggtagcccctggcaacggattgggacgatcatggacttctgaaaattggtcatcagaccagaggcctcgccaaatgaggtgagcaacttgacaattgtctcaatatcctcttttttcggcttaacaaacaaagctgcatcatcagcatatagcgagatcctaatgctgggcgagctgtttcccaacttgctcaatgctccactgtccgcggcgatctttagaattttttgcaaagggtctatcgccaagacgaacagaagaggggagagaggatcgccttgcctgagacctctctcatgatgaataggagggttagggaccccgttaacgagcactcttgatgttgaggtggagaggatagaagcgatccagtcagtccacctcacagggaatcccaaattgcggagtaaggcaatcaagtaatcccagcggacggagtcaaaagctttttcaatgtctagcttgaggaatagcgtgggcgaattaatacgctggaagcgcctaacagcgcttctaactgcaaggaagttttcatgaatgctccttttttgaatgaaggcactttggcaaggtgaaactaactcattcattctcggcgccagacgaagagccagggttttggtgataatcttaatgaaagaatggatgaggcttataggtctgaagtccccagctacctccgcgccttcctttttggggattagaatgatgtttgctgaattgattaattggaggttgaggcatcgattattatagaaagcattcactgcagccatgagatcatgtcttataatggtccaacaagatttaaggaaaacaccagtgaagccgtccggccctggagccttatctcctggtaaaagatcaatacttctcttaatttcctcctcggagaacggcgcgtcgaggcttgatagatcaaactgctggtcagagataatgtcccagttaaggtcgatagatctaggggttggccgctttaaagcattatggaagaaattttgtagctcttgcgctttttcattgtgcgagaagacccacccattaccgctccgcaaccgttgaatgaaattttttcgcctcctggagccagctttccggtggaaaaatttagtgttggcatctccgaatttaagccaaagcatgcgtgagttttgcctgtttcgtgccctttcaattaccgcatagccaaggatgcgcatcttcaatctatttcggaggttcacttccatgtcggacagtcccctattttcttgtgccatgtccagtcttagaataacttctagggccatatacataaagagtctagcatcaggtattaacttggagctccattccttaagcgccttggccgtgaactgcagtttgtagtacagcctatgaaaaggctcacgatgttgggtcggtgccagccaggcttgctcaactgtatgctggtaacctggtaatttggtccagaaattctcaaatctaaaggaacgtggacgcctcggcatagtagtattggataggagcaacgggcagtggtcagagaccgaggatgatagtgcatgcagaccaaatattccgaacatctcctcccattcagagttgcagaagaatctgtctagtcttacgagagtgggatgtcgtctctcattgctccaagtgaacttcctgttttgcaaaggaatttctttcaagtcgcaaatgtcaagagcttgcctgaacagaagcattaggcgagggttgactctagaattgtttttgtcgcttgctttgtatgtgcagttgaaatccccaaggaccaaccagggggaaggtgaaggaggcctctgtgcactcatctctcttagaaaatcaggcttgcggcctctacaagatggtccatagacgactgtcaggtagaaggaagcacaacgatccttaagagagacatttgcagatatgtggaattctccgatagtaaaattggacaattcgagtaggtcgctatcccaaagcaaaagaataccaccccgtgttccactaattccttccgcaggtttaaaactgaatttattaagctttggtcctccaagcgccatcacaatggacctgtcgaccgttgataatttagtctcttgcaaacaggcaagatggcaagtggtggtggagatcatcgcgcgcactgcatctcggcgcgcttgcaaatttaaacccctaacattccagcacaggatgctaaagtcagacatggaggagaaaagcaccccgattaattgccgacagctggatgaaattgcagcactgcacaataatgacagtgaaacataaaggggccaccagggccaacacaagcatggctgttataggtctgaagcaaaacagcaacccaatacagtccagggtgctcacaaaagtagtagaaactgagctgagactcattgacataacaaaagcagaccctcatcatctaacatggagctaaaacagccatcaatcaagccgcagtaactgctctggcctctgcatgcatggcgtccacctcctcttggatctcagctatagcatctccagcaattcccagcaaggccttgtcgaggcgaactgtgtctggcgtatccagattgaacagagcatctagggccgtccccatctccacagtcagtggcttcttgaaccaatcctgaaattcctgcaaagcagtattaaaatcagcagcgtcatcttttgccaagagaccaagcttgcggcagaggacgcgctgggcccgttgcatgacattcgttcgagggccgttggcaagtctggcgctacgacgtaccgtcgaaaggttgaagccgtgtcgctgcttgattcttctagcaggtgctgcaggaatagtagacagagtggtcgctggtgttgttaccccctccgaaggatgtagcactggtcgctcgagtatggcaggcgagggcttggtgaatatggtgttgagtagatggctttgcgcggtggttgacaccgcagcaacatctgttgaaggttcatgcaccgcagctatcatccgagaggaagcgtcgacattggagtcctttacagcttcggcgttgtagcccgcagcaaccgtgctgcagggagagcctaacagcacatggtcctcctcagactgcaccaaaggcagtagctgcatagcagggcatgttggaagggaatcaagaatagttgtgaatgctcgctgcactgggatgagacttacgttgtctgcgaacttcatcctgctgccatcccagacagcaaggttgctgtcgccagcagcagccccagggaccggatcgacttggcccttaggcaccaagcgcggtcgccttcggtacacgcagccaacgcggtaacgacctttaggaagagctgcagccttcacagcagggcgcggagaaccgtcgttgccaccaccgcgtgagctgcggatgccgggactgcaggcgcttggtggaaatctggggcgagcaggatgccgtgggggggtcgctgaacggccacgccggacagcaacacgggtggaacggcgcacacggctgcgtccacgtatcgccgggtcacgaccaatcgccgggtcacggccaacatgtggcgtaaccaacgacgtgcctccggcatgacgaggctgctgatcgccatgaaggtggtgacgaagttgctgatcgccgtcgaggtggtgacgccgcctgggtgagtcatggcgctggccatggcgcgaccccgagcgctcccgctcgcggtccctgggagcccgcgagatgctacgaaagagccgggagctccaactgtcgtcgcgtcctgggcggcgaccacgacggtcactatcaccatcctcatccctgcgacggttgctgcgaggtggtggagggtcgtgacggtcacgtggttcgcactcgccgtcaacaacaccaagcctccaatcatacgcacgtgaatgcccatggccatccctggtaggggggtcttccaccatatcaaggtggacgatgaccctgaaggttaagccgctacgccccgccggtgtcgcgtcgtgggcagtgctgctcctgtcaacaatggtcagccacgttaccttaggtatgtcagacgggtttcgcgcccacgcccacagattgagcgtcgtagcatcctccattcgcagcgactgggcttcaacgtagtccagcacacaggacttagccaccgcacgcttggcgatgccatcgttccatgcgtgcagagggatgccttccaggcacaggcgcacgtgggagccgaagacgctgtggtcgccgtggacggggagctgccacggcctgacgcggatgtcgatgttgttgtaggtgaagtcgcgctgcgccacagccgtgtcccggtgatgctggtgttcaaaggtgacgaggaagtcctctggatagtgtctcaccaccttgatgtcttcttcgcgcatcctgaacctagagcagaaagcccttcttactgtgttggtgcttgtcgccggtcgaacgccgccgagccaggcccatgccgcgtgggtgctcaaccgcgccagctcgctgtccatgtcccgagaggacgcggcaacagcgaaagtctcctgcgggcgctccatggggttgccaggcttcaccatgttgacttggcgcagaggagggaagttgacgttgtcgaagcagggaggtggtgggaaggcagagggggtagaagcagcagcactaatcttcttgggacattgccaggctctgtgtccagggccgccgcagttgaagcatttcaacggatccctgcaatcaatggcgtagtgccctctggccagacatcggaagcatttacctctcaggcttaccttaagatttttgttgtccagatggcggaaccttgaatgctcggttgttggcttcaatgaagtcgcaggcgaattgaatctcttgcggagtcgccgatggaccgttgtccagccaggcaaatcttcagcgccggattccgcggatttgctgcgttgaggagtgatgggacgcaggcctgggtattgaagtcggtgggtagcagtcccatcccggccgtgcggagtgattttcgttggagcagcagacgcgtcaaagcaggaacgatgagattggtcggcggacagagctgattcggcgaacctaactctcctggtgcaggcggccttagctgtcgacgaaccggcggcaggcttgaggcaggaccgcgtcgaagaagaagtcccggagtcagatctgggaatgcgggcgtccgcgtcgaatgctggaatctccaccgaggcagggtggctctggaggatggaggcctgatcaatggggtgatggaggggttggggttggttttccggcgagcaggcggggggagcggcagcggcggcaggtgcggtgctagccgccgcgaggacggggagagcgtccattccctttttgaagcaggtaatctgtctgtgtaagatgtgtgatgctgtttttttttcagtgttttgtgcttagctgttcttcacgcggcgcatgtgtgattgatcgaccctgattggttagcttgtgtgctcctag

SEQ ID NO: 1228 - DNA, 2038 bp, Zea mays
  Intron number 3 from transcript GRMZM2G174570_T03 (locus G RMZM2G174570) derived from phytozome v7.0 (chr-ID 8; pos 2 1445429 to 21447466 reverse strand)
gtctacgtaagtatgctttactactgcagtcttcatatcaacttcaattcacaatcgctcattgagcatactgtggttgcagttttcttttaggtttcttgtgtcctttgatttggtactttgcagccatactttactgctgcaagtactacaacaaggatcctcgagagcgccctggtctagctgcatcagctgttgcggttcgtccaaaccctgaacatgtttattcccagtaggccagtatgaatgaaatagatgtccaatgtgtttccctgtgaaagtgcaactattcatgtctataaaacatcatgtgtcctggtagttgatatagcgatatgatttcacttgtgttgatttgtagttttgtttgatagcgcgtgggcgattttttctctaataaattgaattccaaaacattttgtatagaatttggggcctgggcgagtgtcagcgtttggggaagtcatacccctagatgctggtaaaacactctctagaacttcatcagtagaaggtagacctacaatggggctttggtgccagtctggcatccattgggccctgtgtcccgaggccatgccctacaagctgagggctttatgcaggaggccgtgacactccccaagatgcccctagggcaggacaaccttgatatcatatgcgcccctgaactaggtcgattgcgtagatcctggtggtcgagataaggttcttcatatttattgcgacattgtgatcaaaaggcattgccgtggccacgtctgagaccgcaggcgtacctgcaagcactatgtaccgtgtgagtctactgtggctaccaattacgccgtaggcgacaacgtgggctctcataactgcatatgtggtatgccatgctcgccactatggcacaccggagatgtgcaatgcgtagtagttggacctttgttgggtggggcccaccgtgtagatagggttgtaactctctcctcccttgtgctataaaaggggattatggagcaacatagtaacggtttcccactagtaggctatgtcaggttgaggaccatcggacaactagtgttcaagggctgctgccatcgacattcaggggctgccggcaccatcgagtttaaaatctcttggttctcagttccgctccttatctcaatcatcatctgagtatgtaagctcaacccactcttgcatctttacatccaccacaaactcacaaagagaacgtgggttattgcattcagacagctcgaacctttctacaccgtgtgtgtgcatataagcatattaatatgtcatctctctattgcacggtattagatctacgttcccctctctgattctttttgatacccttggtaccatggtgttgcattctaacaacaacgagtaatccaatttccccttaaaaactatactcaggtatctgatatctgttagaaggtccatatgttgtggatatccgtagtttttgtttggctatttggatatcaaatattattgcttatatgatgcaatacaacttaggatatgtctggatcactacctgacgtgccatgtcttctttcctcgaacacgcaggagaactgcatgtcatttcattaataaattgaaaacagtttgattacgtgccgattccatgcctctagttgcgcccttgaacctatagagacacagccatgccttttcggcaaacaatgttctaagatatggccaacaatttcttcaccacaccttagttaatgttttggcaagaaaatgggtctctgacaggtgataaccatacacccagctaagaaagtaggcggtgcggtgcctaacatctggtgtcacaatgttaaaagcaaaatcacttaacttgatacagttctttgcattctgtattttttattctgatgaacttgcacttgcttgaaatatgtgggcacttgcttgaaatatcttgcttgcttgaacctgataacagctggagtccagtctaacagccacactttgatcgttccttgcaggctctcatcttcacagttctggcaattatcgctct

SEQ ID NO: 1229 - DNA, 812 bp, Zea mays
  Intron number 8 from transcript GRMZM2G019945_T01 (locus G RMZM2G019945) derived from phytozome v7.0 (chr-ID 5; pos 8 825855 to 8826666 reverse strand)
agaataggtaatatgttggcatgctgctatatgctatcctctttttaatacagaattgaaaccttgatcatatgacacgttctttaggatgttatatttagtttccaagaaagaagatacaactgtctatagaaacaataaacaaattttcttctcggactgctcaatctggtatgcaaggcactcatctctataattagttctcaaactacttaatccagtaagcacaccactcctatctctgaaagtacatctacttgattactaaattgtactttaaggaatctagaatgtggatagttatatttttttttcatgattctatgctatggactttaaaattagtgaacctgtttagagacccatctagaatgcctagcacttagttggaggacttgagaaaataaggctctcattgcgcaatgaaacacaggtctggtacgacatacaattggtccatgtgtgatgactaatgctagaatgttttttgtgttcctactttgtattcttggaggtaatggtcctaccattaatatgtgaaatttcataactcggatctctccacttttatatatttgttttctatccaggacaattgttgtctagaaggacagcaaagtaatgcatggcttttctatgatcttgtactctttgcttgcaagacaattgaatcctagcgtcttcgaagtcccatctcgattcgctctaatctatgcacttattctgcttctttatggctatgagtgcatgatgtgcctgacgctacacaacaatgaggggaactacctgggaagcggtgccagaccaacctc

SEQ ID NO: 1230 - DNA, 2059 bp, Zea mays
  Intron number 2 from transcript GRMZM2G342607_T01 (locus G RMZM2G342607) derived from phytozome v7.0 (chr-ID 2; pos 4 196238 to 4198296)
ctaggttccaggtaacaaatagatctctaaacttcttattttttacacagatttgcttattttcttcatatctgaccgggagagcttgctatcctacacttgaactgcttctgcattcctacccaacaagcagggcccttcttttggtggagaagtaatgaactcttactggcttgagaataggcaagtccttggctttttgaagaacagtagcctgcagaacttctggtaggcaaacagcatatcctgtttccttatgtaacaccttcgctaaccgacgattaaatttctgcgacactatccaagttgtatggtaaactctctgtgatatcatcttaatatgtagagaatcaactcttcccatctctctagcagctgaagggtctagatttcccgaaggaaatcaacagatactgcaagtattcatgttattaatgaagcagctacatcttctctactactcatacctgagtatgtacctgttactactcatacctgttagtatcgactactcagtcagtttgtgcacacatccataatttcaatcgcagccgggtactttcctacttacaatacaattgctatgtctgggtaatcagttttattctttaattttgattttgattttggctagatgtttagcatagcttcagtgacttattttcttccaatctatcccttttttatagtgtaatgcccagacccatgttcattttaccagtccgcaaaacatttgttgggaggcatgtatttttttcaaagtaatcatcctcagtccgcaatttagactaaatcaaaacagtcgctgggatgcattttcattttgcaaagtaatcatccccagtccgcaatttagactaaatcaaaatagttgctcacttcagctctattagacagtagttagaagttaattttttttacatgcctcaacatagatgacgtcccattactactgaagcaaaaaaacattgcaaggttaaacactcgggttaattgctatgtctgggtaatcagttttttgtttaagtttgatttagtctatatgttttggtaaccatacatagcacccttagttgaatcagttttttgtttaatttcatgaaacttgacagatgatctacgaaaccatgaccaatatctttcatgttaattgaattacaaatattgcatttaaccctttcacaaaacataagtagtgttcttccgacctttcgtactgtcgctcatgaaccccgttctgtcatgaatttgcatgcagtagctagaactagaatgcctgcgaattagtctgccttctgtttttattcatcggagccaggttacgatatggtggtagtagctgtgatgagcactgctttcttctgacacctcttgtatgagcagggacttcgttccctccgttgagcagattcagcaactccttgagttcttgcagtcgcccgcgtctgcgcttctgcggtccgccaagagaagcgcaaacgctcctgcgccgccgtccaccgaatccccaaccgcgcccgacgcccttcgacctctgttctccatgtcggcgtgaaggctagctcctgctaggcgctgggtagcgggttaggcggtgctgtgcagatccacctgcgtcccgccttgttctgtgctgccgcttgtcgctgcgtcattgaccaagtgctcctgtgccagccggcctacggtcagcaccacagttcgcagggacgctggtgttctctcttggctggccccagtcccctactcgtcctgcatagtgagtcagtgtgattgtttgatttctattttttgttgcatcttattccggtactgctttgtttccttcgtcagttgcacatgttcttaatttattctccttattaagtgcgaagtcaggaatccgtttgtcactccttaaatttgtagtgaacttgtaacttgtttaagagcatctcctacatatcctaaaattaagtgcgaagtcaggaatccgtttgacacctcttgtatgatgcaggttaaggggtgagtatctgttgtttcagctgagttaattgggggctggttgtaggcggag

SEQ ID NO: 1231 - DNA, 10340 bp, Zea mays
  Intron number 5 from transcript GRMZM2G418037_T01 (locus G RMZM2G418037) derived from phytozome v7.0 (chr-ID 1; pos 1 0364184 to 10374523)
atccagacttggtataccttttctcgacgttaccccttttgttcgtggagatacccattaaataaatttatgatttaatatcatgtaatatgatgcatgtttacctaagagcacacatcacaatggtaatatgctcaataacaactgaagggattttgttactaacttgtggaaaagtagttgctgataacaacaacacaaccttttagccccaagcaagatgaggtaggttagagttaagacccaacaaaagccacaaatcaaggttcaaacacatggataggcagatagctgttttccatttgctcctattcaaggctaaatctttgggtatattccatccttttaagtctccttttactgtctcttcccacgttaactttagctttcccctgcctctcttcgcattactatcgcgtcttaggatcccactacgcattggtgcctctagagatctttgttggaaatgtttaaaccatttgaatcggtgttggataagcttttcttccattggtgctacccgtagcctatacacatatcattgttccaaactcgatctattattgtatgaccataaatataacgcaggcaatatacacattttcgcaacacttatctattgaaacatgtcgtgtttttataggacaatattatgcaccatacaatatagcaggtctaatcaccgtcctgtaaaacttgccttgtagcttctacgggacccccttgttgaggtgagccaggtccacaaaatcgaccggctaagtgcaatacactatctccgtcaaagtgccatggaggaaggcattcttcacatcgagctggtgcactggtcgggcccgtgagagagccagagggcgaggagagaagcctagaagaggaggcaacacaggcccgtgttgggataacaggcacacgcgaagacacgaaggtgctcataggagggggtagtgccgaagagggcgaagaacggagtgggatgggggaccgccttggagggaagacggttgaggatgtaggtggatgtgttcaacgcctgtgccctgtagcgggtgaggagagaagcctagaagaggaggcaacacatcatattggtggtggtgtgaatcatgcgctcggctcggccattcttaggggaggtgtgagggcacgacatccgcaactgcacgccatgggagagaaagaaggtgcgagacgtggagttatcaatctctcgaccattatcgcgctgaatagcctggatggtgcgaccgaactgagtcaacacccacacaaagaagtgagaaagactgttgaaggtatcaggcttacgtcggagaagaaaggtccacaagtagtgagagaagtcatccaggatgaccagatagtacaaaaaccggagttgcttggaataggggatgtccaaaggtgacggtggatgcggttgaaggggcgagtagcgtggaacatggaagaagaaaatggtaagtccgtgtgaggtccatgctggcaggcgtagcaaagcgaggtagcattgccacaagggcaagggattgccgaggtggatgagagtctggagaggacttcgtggtcaagatgacggtgccaagtggaggtagaggcagtggaggcgagggcatagggtatggaaatgtgggcggaggaaggaggggcgaggaagcgaatgggatataaggggtcggagttgtcgcatcgaacaaccacaacacgagtggtaaggtcccgtatggtgacctcccagggatcgaactccttaggataacaattgtcagttgtgaagcgacagattgagagaatgttctgtatgatgttgggggcaacaaggatgttgaggtacaaaggttcgggaaggaccgtgtcacctactgaggtgacagtcagagtcgacctattactgacaatgatgaagggaaggtggggctatgaggatggggtaaagagacaactctagggttaagagtggtgttgaacgatgcaccggagtcagcaacccagtcggtgggagggggagagggcagcgaagtcatggggtacgggaagagagtcaagggaggcacccctagagagccacctggagggggtctgggctaggagtgacgagcatgctgatggcgagcatgggtggaggagacgataaggcctccatcgccatggagacaagcgcgacattgggtaatactaatggtccagtagcgtggtggccctcctgagggtggagctcgacgcagtcacggagaacagggttcatgacctgatcaaacgccatgaaagtgccctggagaagatggccgtcgtgaagggtgatgcgcacacagtagggtgggtcatgaactgtgatggagcgaaggaggggcgtcaagggagaggtgtaaggtgccgcgccagagtagggggagctggtggtggatagtgcggctgcgttgcgcacgctgtgtgtgaaagcagcggcgggcgtaggtgggatgaccgcggagccagatctgatcggtgtggtgtccactggcgacgagggcgcactcgctgtgcaggcaagcgggagagccgcgagtgctgtgggcgagagaaggctcatgggagggggcatcgcagaggtggcgccgacggcacagggcctgcatgtggtgtagagggccggtgcaacgacgacaaggaagatagagtgggggctgcgggccgtcaaggagacaccaacaactgggaagaggccgggaacgttgctggcattgctgcgaacgctgggactcgcgctggcggagcagggaccggagctgggaacgacgtggacgatgagaagggaactctagaggctgtgggcactagggcgaccggaatcgcgctggcgtcgacgatggagagtcaggaccacgtgtcctggtagccgaagacatcgccaatggggggggggacgcaatcgtgtgtgccgaggtggctgggggccgtcggcgccggcgagggagaactaggcgacgggggagagggcgccagtgagggaggcaacacactcgccgacgcgcacgcccttgtgggccgcgtctgtgcctgggcggacgatggtggctagagagagggcgtcagtgagggaggcacacactcgtcattgtgggccacatattgaagatcaatggtcttctgatgacaatgagatctagtgaatgatacatcaacatcaatgtgttttgtgagttcacgcttgactggatcatgataaatttatatagctccagtgttgtcgcaatgaagaagtgtaggcgagtcacaagaaacgcctagatcagccaagagccaacgaatccagataatctcagcagtagtagtagccagagctcgaagttctgcttcagtactagatctagatacaacaacttgcttcttggatttccaagcaataggggatgatccaagaagaatacagtaaccagtaatggagcgacgatctgtaggatcactggcctaggtagcatcagagtaagcatgaagctgaagtggggaagttgagtcataaaataaacattgtgtttttgtcccccgtaaatatcgaagcacacgaagtaagtgcccataatgaactgatgtaggagcagagacaaacttactcaagatgtgaaccgcatgagcaatatctggcctagtaacagtaagataaactaggctgccaacaagatgtctatatcgagatggatcctctaaaggtgtcccatcagtcggacgaagagttaagtgaagatcaataggcgtggcaacagtccgagtatcactaagaccagaacgatcaagaaggtcttgtatgtacttggcctgagaaagataaataccattttgagtctgcaaaacctcaatgcccaagaaataactgagtgcccccaagtcagacatttgaaattccttactcagatacgccttcacatgagcaatatggtctggatcatcgcctgtaatcaacatgtcatcaacatataataatagcaacgtgcgtcctcgtgaagtgacatgaatgaacaatgcaggatcatgatcactagaatagaaaccacaagccttgatgacagaaacaaatctctcaaaccaagcacgaggagcttgtttaagaccatacaaggctcgacggagacgacatacatgccctgagggaacctctatcccaggaggtggatgcatatagacttcctcatgtagatcaccatgaagaaaaacatttttgacatccatatgagagatagtccaagaagatgaagctgcaacaacaagtaaagctcggacagtagtcagatgggccacaggtgctaaagtctcatcatagtaataccctgggtctgttgaaagcctctggccacaagacgagctttatatcgctcaatagacccatcagatttggttttaaccttgaagacccatttgcacgtgatagatacaacaccagcaggtaatggaaccacatcccatgtacatgtgctatgaagggcatttaattcatcagtcatggcaagctggcactcaggtataccagaagcctctttataagatgatggttcaaacaatgactgcaccagcacgaggaaacccataacgttctggagctgcaatagtgccacagtcacgaagatgatacccccgagtaaaaacaacatgagagtcatcattgttagtacaagtatcagcaacaggattatcattagggctagccgtggtagtagagcgaggacgacgaatgtaagtctgagtgataggtggtttggaagagtaagactgaggtggtgtggaagtgggaggtggtgtgatggaaataagaacatctggggtagaaacagtagatgatggtggtactgatgaagtttcaaaaatgggaggaaggctcatgaaggaggtagactctgtggaataaaaagaagaatgagtggaagagttgtaaaagaagggtcggttttcattaaagctcacatctcgagatatacacatgcgacaagaagatggatcataacaccgataacctttatgttcagggctgtatccaagaaaaacacactcaacagattgagcagtcaatttagttctttcacggggagataacaatacataacacgtacatccaaaaactcgaaggtggtcatatcgtggaggagttccaaaaagaacttcaccaggtgttttgccagagagtttggatgacagttgtctattgataagataaaccgcagtagaaactgcttcaccccaaaaatgtgaagggacaaaagaagatatcaacaaagtgcgagcagtttcgataatgtgacggtgtttgcgttcagccacaccgttctgtgcatgagcaccagggcaagaaagctgagcaagagtaccctctgaagtcaaaaaccggcggaaattatcagataaatattcaccactagaatcagaatgaaagattttaatatgagtagaaaattgagtgtgaatcatgcgagcaaaggatttataaattgaaatcatctcagagcggcgtttcatgaaataaatccaagtgtagctagaatgatcatcaataaaaatgatatagtatctatatccaccttttgacacaaaaggtgcaggacccccaaacatcagagtgaaccaaatcaatgggtttaacagaatgagaatcactagtaaaatatggaagttgtatttgttttccaagatgacaacccttacaatgaaaatcagactcaacggaagtatgacttaagcaacctgactttattagagtagacaatctagatccacacaaatgacctagacgatgatgtcactgggcaaaagacgcaacataagcaagggtagttgaaagcacatgtgctggagatgtagacaaggaaggaagccacaaggagtccaagatgtagaggcgaggagcagctctacgacgacgaccagtcccaatcacttcccctgtgcgaaggtcctgtacaaaacaagatgagtcatcaaagccgacaaagcaattatgatccgtaatttgacctactgaaagaaggtccatagatagctcaggaacaaaagaaaatattaggtactgtaaagtgtgaatcacaaagagaacccttatgagtaatgtggcatacagtaccatcagctgtctgcactgaagcaccatctgtgacaggtgtagtagaagccaactttgactgatcagatgtgacatgaaaggaggctcctgaatcaagtaccaggccgactctaaagtacaagcggacgaagtggcagcaacaataactgagcatctagaaggtggtcctgtagcacgaccacgagcagcacgtcgtgcacggaaatcagtcaacttctcagggaacttgacaaagcaaagctcagatcgatgattggtcttgccacaatgatcacaaggcttaaaaacactcttaggcttctgggcagcagccaacacactgtgaggattaccaccagtagaggacagagaattaagacgagtctcttcagcaagtaaatcagacaacgccttagccattgtgagagtgtcagaaccctgaagtaaacgagcacgaagagaatcaaactcggaccgaacgcccataacaaatctgtaagtgaagaacttctcaataaacttatgagccggacacggatcagcagtacaagcaggcaccatagatgtcaaagcactcatcagacgatcgaaggctgaatagtattcatcaatactcatatcattttgctcaataacatgtgtctgctgcatgagagtgtgtaatagagcaccactgtcctgaacaaaacgctccttcaaatgagaccagatggctttagcagttttaaatttaaacaaactcataatcatagacggtttgacgctgttcaccatagcagccatcacgttaccatcattaagctgccatgttttgatatcagcagcattgcgacgatcatcagcaagaatgggtgccacatcagtcaaatggaagagtaatccatgtccccggagtgcagtcccaacacagaaagaccactccggataattttgaccatcaagagtgatattgaccacaatagcatttgtcgccatattgaatgcaataaaaaatcaggtagaacaggaggcctgaaaccaaacaaaccagagcagcccgacttggacgagttgacggaggtcctgagcgcggaagccgagttgagcagcggttaccggcgatggcgcagatccgcagcaggcgcagatttccagcgggagcagcggatccgtgaccctgcccgcaaaggcggctggcgcataatccagcaggatggcgcaggcagagatccggcggaccttgtccctgctaggggatggcacaggtaggaagaaggcggtggccgagatccgcccctggcggcggacggtgcaggcacaggccgagatccgttccctggcagaggacgacgcaggtagaaagaaggcggcagtcgagatcccctggcggcggattgcgcaggccgagatcctgccctcgcggcggacggagcaggcgcaggccgagatctggtccctggcagaggacgacgcaggtagtgttagaactcactagcgctcaagaacaatgggcgttgggaggaggaagacgaaagaacagcaactcagagacaaggcaatggcacccgaacgcctgttgcccaaacaccaccttttctataccttgccgtaacacgaactgagcagtacatgagaatataaagacctcaggatgcacggtggagcactcactccacgtctgctgatctaacgacctcgatccgtatgatacggccatgcgcacgacgcgcctaggcacgcaagacgcggccaacagtaggaccaagtcaccagtgctcctaacaacagcatgcagcctcgcgacgtacgaggcaagctatggactacacgctgcatgcaccttgactcattagacgctcacacgcacacacgtgcaacacaacgcacacccatgcactaactgctcctatgatcgctgcacgattcagacacaacacacgcacgcacacgcatctactcggcaaccacgcaccaatacgcggtgccgggtttattcctaacaatctccccctaaattcgacactgcttcctgcactcacaggagtgtcgcctcctcgtcggcgtcggcgagcagcgcctcctccttcggcttggggcagtcccgtgcgaagtggccgcggttgccgcagttgaagcacttcccgatcgacgactttttcttctgtcgagccttccactcggcctccgtgagtaggagctgatcatcgcgtcgttcgccgccagcacgagtacgccgtctggaacactcgtcgaacgccttcagcctgccgagtgcctcctcgaacgccatcgtctcgacgtcgcagaacttctcgatgcccgcgacggcggggaagagccgatccgggacggtgtcgaggagctttttcaccatggcagcgtcgttgagcttcgcgccaagcccggcgtaacgcgccgccataccgctgattttgccggcgtagtcgtccaatgcctccccgtcctccatgtacagcttgtcgaactcccccttgagcgtggcgaggcgtgccgtcttgacccgatccgccccgacgaaacgagtcttgaggctcgcccacacctccgtcgccgttttcttggtggagacctgcatcaagatgtcatcgggcagagcttggagaagctgtgcccgcgccgtcttgttcttcaccgcgttcacctcgccatcatctggtggagacatggcctcctagagaccttgcgagtcgaggatcgactccacctagatcgcccacgccgtgtagctcgccggcgacagcaccgggtatgacatggagaccgaactccccccggcgtcgtgcggaaccatcgccatagcttcggactcgaggtagtagtgcaggatcttgggcataaaatggctctgataccaattgttagaactcactagcgctcaagaacaatggacgttgggaggaggaagacgaaagaacaacaactcagagacaaggcaatggcgcccgaacgcctggtgcccaatcaccagcttttctataccttgccgtaacacgaactgagcagtacatgagaatataaagacctcaggatgcacggtggagcactcactccacgtctgctgatctaacggcctcgatccgtatgatacggccatgcgcacgacgcgcctaggcacgcaagacgcggccagcagtaggaccaagtcaccagtgctcctaacaacagcatgcagcctcgcgacgtacgaggcaagctatggactacacgctgcatgcaccttgactcattagacgctcacacgtgcaacacagcgcacacccatgcactaactgctcctatgatcgctgcacgattcagacacaacacacgcacgcacacacatctactcggcaaccacgcaccaatacgcggtgccgggtttattcctaacaggtaggaagaaggcggcggccgagatcccctggcggcgggatgggggaaggggaagaccgcgcgacggagagacggcgcgacggcggccaggaggtgcgacgagagggctggccgtgatggcagcgcaacgacggcaccaaaaaaatggatcagggcgggatttagacgtaaaccctaaccctaacctgctctgttaccatgtaactaaccttgattaggcgagatagataccccctcgggtactgtagcatatatataggcatgcgagcatatatgggctttatgggccttaacaaacattagacttattttcattgttatgtagacccgaagcttcgccaaataaatgaagaatatccatagtgatctcaatgtcggatgtagagggatgcaggaacaaagacacatcatccgtgtacatggaaatccgatggagcctggttgttcttgacagatgctgcagcagccctgcttcttccgcttgtgaaaataagatacccagaatatctatgacaaggataaaaagcatgggagaaagaggatctccctgacgaaggcctcttctatgcttaatacaattccctggaaaaccattcagcaacacttgggttgaagaagaggacagcagcccacaaataatatccctctaaatttggccaaaaccaaaatatttcatgacatcaataaggaaaggccacgaaaccgaatcaaagactttattgatatccaacttaagaagaagactagcctttctttgttggtgaagtagccttgaggtttgctgcactagcatgaaggctttattgatatccactgttcttttgttcttgtgtgctagttactctttattagtagagtagtagttcagcatttcactgatatcaatctgttgccctaacgtttttag

SEQ ID NO: 1232 - DNA, 24914 bp, Zea mays
  Intron number 2 from transcript GRMZM2G702716_T01 (locus G RMZM2G702716) derived from phytozome v7.0 (chr-ID 4; pos 1 76050136 to 176075049 reverse strand)
attagagtttaccaagcaaccctacttagaagaaggtaagtgccattgaccatgttgatccgatttttataaatgttgtgattgcaaaattgcatgcttgggtcaatgaatacgaacctaattgtaggttttactagaatttccacaaaatttcttgtaaccgttgttattcttatgatatgggtagaaatgcttagccctgcttgttcgagtaaactttaatttgactagttaattgcttcatatagtcaagtaatcaactatgtccaaggttattgatagtgttcttggctttgtttatcatctaaatcctatgagtcttaagcatggagcaacaacccacaaaaaccttacaaccataagccaagtataggtgcgaactaacataataaatggaggaggagccatttatgatacagccaaacgattgtatagttttgatggggtatgtcaaatctatcggtgaagtgatgcgtggaagataagaggggtacttttgattccatttggcaaaataggggttactaaatccctataataaagagatcatagactgttaagcacacatatgaattcatcagttcatgagcatgtggtgttgttcatctctattagcacctggcttaatatttttacatgctagttaattcctttgtctgccaattattttgctttgtgatttaatccggtgctctaacacttttttcatagctaaaacccagctcccatatcatttttgaacaaacgcagaagagttgcgcattattatattaagaagaaaaaacataggagagataagacttgttagcccctaatacaaaggcccataagccaagacccacctcactctaacacaatgtgccactcacatagagaaacaccatgatcaaaacgacaaacagcacccaaactgctagggacccctagggagctagcgcaggagtaggtcttgcagagctgatgcaccagccaaacaccaagcactacactcttcaatcacagcacacataacttgctgagcgcaggggacaacacactcaaagacactagcattttggtgcttccaaatctcctaggcaaccaaaataattagggagtccatccgggaaaacacgcaagagacaagaaaatgcttctggacctctggttgcttgtgaatagaaaatagattctacatttttcacataacaaaagcaactatgaaatctgaatttaaagtctacgaaaaccatcattccctccaagactgtctctagcaatttccctatctcatcttctatttcaagctccactctgtaaacaatgcagtctatcgtacataatagtgttttgcacatccgtatacacggtctgttggaggaagcctgagctctgcatgggcgtaaccgcagaagcactagcttcgtatgggcgtaaatgcagtctcatcggcgaagaacacgggtcatcatccttcatcttaggagaaaagtttaggaattcaactttcaaaatccagacaattaatggactgtcacaacttaaagctgattcttttcatagtcattcttcattcattaatgcctcgcgtgggttgaagtggaggcccattttatggtcgggtcaatttgagcttggtgtttgtgtttgttgtccaaatccagcgcattctaaatctttctgcaaaaatcaagttatgtgtttgctttgtaaacaattggttcactataaatatttttgaaagtattctgttgctgagattgatttcctcacaaacacggattttactgataacttatcaactaaatttaagggtatatcttgggtctcttctcccagtacttggtttatatttgaattcgctcctatggcatgtgggccctaggatgtgccccgatttgggaagctatcagacctcaccaaattgattagcttgaggtgtgcccttcctccttccacggagttgtcactattcaccaaaccctcttcgggttcaccggcaccctctccgaccttggcttcgcctccttcctcgtgctcgccgcaatagctcacgccggcatcatccaaggaagcttctgaaatggcataccaccgtgtagaccccgctccattcctccatcagggtttcgccacggcccacatccagcatagggagataatggcatgtgcaatcacccgtgctcaaccaccacttcatgatgattgggcgatcgttcttattcagcctctcccagtgcttgagcttaactttcaaggcattattggtgttgtgcgagaatatttggtggatcagtggaacttggaaatttgtgctatctaaacacccaccttggtcaggccctggtcagatttcactttgttttttatcaggacaacttggttactttgggtctaaagcaagcgctagggtttatgtcacacccagttttggaaggtaaaccgaatgcgaaccatgtacgtgtcaggatcagaaactcacgtacacagcgattacataattggacatcatcacacaatgctcgaaataaatagcggaaaggtacttgattacatcaagatgtctgagacatccacaaagtctattacataaccattgttcaacataattatcaaagtgcggaaatacgaaacgtagatgctaagcctacacaggcagctgactggaggtttgccactaagaaaggactagaactcgtcatattcctggaactcctcgaagtcatccatgttgctagcatcacctcctgagcattgagtacactggggacaacctagggtggggtggtgtgtaaagcaagggtgagtacacatcaactctgtttggctaaagtggactagttgtatatggagtttgaggtcaagcagttgcttttagttggtcaagtatttattattagtagtagagccaagttttagtaataaacccagttattacccagaagtacctcctcaaaagaggaaataccagatatcagattttatatcatcattgttaaccatcatcataaaagtatccaaagttcttctaatcaaagaggatcccaagcctgctcttaactgtgagctcggctgatataccagtttataacactctgcagaggttgtacactttatccacaagtcgtgatccctttccagcctgggttgtacaaacccgatcttcactaccaaggtgaatggtcagggatacactacgtagcctttacaaagactcccctggtgcatagctgctcgttaggtttcgttagtcgtacaaacgcagtacacctccccaaggtgggtgactaacaaaaccaaatcgaaagaacctctacaccccaaccttggcagagcgagcactacaccctagcccccattgacggccctccggcaaagccaactacacccctaagttcatctaattaatcagctaagggcatcccattccaccctcatggttgcactgttatcccgggtggtcactccacgaacaggtccttacggagaggtactcaggaaaaaggcctgagccccctttcacaatatcatccacataatcaggataacagtatcgtatcataaatgttcacatcatgttcattgattaagttaaggcaatagcaacatgctaaccatgataacccaacaaggtaaacaaggataagtgaatacagactagtcaatctttaggtttcataaagtaatgcgggacagtgaatcataaagtatgtaggacataataggtcagaggacacttgccttcaccaggttgttgctcagggaggtctccaacaacacactcaggaacctcggactgctcgttgtctaaataaagcgagcatgcattcaatatatttggaaagtacaaatgaacatcacaccaaacatgtacaaacattggaacacatcttaaaaggacacaatactacgtaagggataatgaattcaaagtataatcataaactataacatacattaactttatttagaaatagaatattatttccctaagtgttacttacaagtacataaacatagattaatttattttattgtgacctaaaatttagaacagaggtgaactcatgtagtacacattattaatctcacaagcttacacatgtttaaatctctaaggttctccttttatttattttattaaataaataaaaatacatctacattagttcatattcaatcctaaaacttagagtgtgtagacagtaagtgaaaccattttatttaaacagagaataattctatgaatattttgcaatttgaatcactaaatttggagttcatatgcaaaagttatgaaataaacaagtttggaaattcaaaatatgaaattagggctaattctgtgattatttaaaagtccagggctaaatctgcaagattacacgggcctgcacgcgaaaatcagggatggcgggttgatttccaataaaccaagggtctctttaagaaaactaccgcacgaaggggtatcgggtgaatctaaccgtcagatctaaaaccaacggctgagattagatctgcgaccgagggcgcgcgcgtgcgggtgggcgagcgctgacaggcgggccagggagtgttagcgacagagggggagagcgtgctgaccgagcgggcccgacgccagagggtttgggcgctgacaggcgggccagtgcgttagggcgtgcgtgcgcaaagcgttatccgtgatctgagtcgttcaataagaatcggacgaaggggatcagactaggggaaacagacgactgcagacggcgccgctcctctccacggctgtgaggtcgccggagtaaaggctggcgcgagctagggtggctccggggtcgctggagttgggcaaagagggagagggcgccacggcaaactcaatggcggggaagaggccatgaatccatgggcggagaggggagaacggcggtgagaaaacctcgggcgggcccggagtaactccggtgagccattctggccacggggagaggacttaagacgtgctaaggccctgggctagcttcaacagaggcaggggtgacacaaggtcctactccagggaactagactaggctaaatcagccggccaccgcgcgagcacggcggaccaccgcggccgagcaccggcgaacgtgaaattggtcgaacatagggtgcaataggggaaattgggcacggggacgggtgtctcacctcggggcggagctcggggaggcttggagcggtctccagcgagctggatggccgagaacgcgggcgcgggtctccgacggtggctggcgatgtgggcagagcgtgagagagggtgaagttgtgcgaaatgaggcgaggggtgtgcgcgggcactggcggggctctaagaagggagctgagcgcgtgggcgagcgtcgtggccaagaaatccggcgacgtgcgcgagtgcgcacgcgccggtccacggcgagcgcggagggggcggaactgacagggcaggccccacgacgcagagagagaagaaaggggcgcgcggggcaacggctcggcgactggcgatccgggcccgcgagacagagaaagaggtagcgcgcggggaagaaaagctgacgccgacagatcggccccactgggtagcgagcgagggaaggagggcgcgcgcgagggagaactgccgctgacaggcggggtccgcctgtcagacggcaggcgcgcccgcgcggccgcctggctgggctgacttgggctggctgggctgctttatccttttctttttctctggattttctaattcttttttcatttctttttctatagagttttcaaatccaaattcaaactaggtttcaaattcaaataaattcaaacttgtgcaacacttcaaagaatattttaagctcagcatgatgcaacatgtcatgactcataaggttttggcaaaaataaataattaacctccactagtttaagctatttctaatcaaaaaggaaaaagggagaaagaatctagagagagaaagcctagagtgagaaaaaaagagtaacatatgattttgggtgataattaggaagaaattttataccccaaaatcagggtgttacagtttaccattacggtaatctgccatgatgaaggttggaatcaatggaccttgaacttcaatagggagtgttggtcaatgttgctcggtttcccgctaaatttttggacccatgagctattatatgggatccagatcgttcaaatatcactaggatgatggtgagagcaagagttacttccttagaaaaggtgtcgcatttatagtcttttcagtggcaaagggttttcagggggtttcttggactctccagcgtgaggtagtgcaacatgttatgttgggagggaactgaaagggaaatatgcccttgggcaatttctataagtattttggtgattagatgcccaacacatattctttaagacctaatgtgccaacggttaaaaagtgcaaatcaaggcatgaggtatgtttctagacttagtacatttgtttttgaatactaatgaggttatctaagtgctagaaatagtgcagagaagaagagaatcgaattgcaaaagacttggctgtgtgcagcaaaattccagtttggcctggcacaccggactgtccgggggtgcaccggacagtgtccggtgcgttaggctggtccacgtgaactcgccgttctcgggattcgacggcggcgtatggctaaaaatcactggaccgtccagtggtgcaccggactgtccggtgagtcatccgcggcgaactcgtcgctctcgggaattgcaatggggcaacgtggctataattcaccggactgtccggtggtgcaccggactgtccggtgagccaacggtcggccgcgtaatcttcgcgcgacacgtggtcgcgccaacggtcggttgggcacaccggactgtccggtgtgcaccggacagtgtccggtgcgccaaccgattccgaggaccaacggttggctgctctccgtatggaaagaaatcaagcaccggacaagaaatgtaattgtccagtggtgcaccagactgtccggtgcgccacccgacagaaggcaagattggccttccaagttggtcttcaatggcttctagctgccttggggctataaaagggatccctaggcgcatggaggagaaaaccaagtattctttaagtattctaaagcatccagactttgctcccgcgcattcgcttcattgtgttagtgatttgtgagagcacctagagggggggtgaataggtgatcctgtaaaagttcaaaacttaagccacaaaaacttgtcaagggttagcacaagtatggccaagtggctaaaacacgataaccacaagaaagcaatcacagagttgacacggtggttatcccgtggttcggccaagtacaaaacttgcctactccacgttgcggcgtcccaacggacgagagttgcactcaactcctctcaagtgatccaatgatcaacttgaataccacggtgtttttctttcctttgatcttttcccgcttgcgaggaatctccacaacttggagtctctcgcccttacaattgagttcacaaagaaatacggagtaaggtgggaatgaggaacgcacacaagactcgaaaatcagagcaacaccacgcacacaagtcgcaacaagagctcgcaacgcaacacaaagagttcacaactccacaagagctctatatgctatcacaatgaaacgaatgcgtgagattgatgtcttggtgcttagaagagttgtagaaatgcttggtgtactcctccatgcgcctaggggtcccttttatagccccaaggcagctaggagccgttgagaacacatctggaaggctatccttgccttctgtcgtcgggcgcaccggacagtccggtgcccgatttgtttccttaaatggcgaagccgaccgttgccgaccgttgcggatctggcgcaccggacagtccggtgcacaccggacagtccggtgcacaccggacagtccggtgcacaccggacagtccggtgcttccttccgaccgttggctcggccacgtgttgcgcgccgatcgcgcggccgaccgttggcccggccgaccgttggctcaccggacagtccggtgcacaccggacagtccggtgaattttagccgaagtcgccggagaaaaacccgagagcggcctcttcggccgaggcagcctggcgcaccggacactgtccggtgcaccaccggacactgtccggtgcaccaccggacagtccggtgccccaaaccgaagcagccccttggctgcacacagccaagtcttctcttcttcttcttctttctgtttctaacacttagacaaatatattagtacacaaaaccaatgtactaaggcttagaaacataccttaacttgtgatttgcaacttgtccatccatgggcatattttcacatttaagcacttgtgtttgcactcaatcaccaaaatacttagaaatggcccaagggcacatttccctttcaatctccccctttttggtgatttatgccaacacaacataaagcaactagaacaagtgcaaaatcacttcaaataaaaactcaagttggttttgattcaattttggcatatatggatcatcctttgccaccacttggtttgtttttgcaaatcaaactcaaatctctatctctaagtcaaacacacatgttgaagcataaagagagtcattccaaaagagattgatcaaagatttcaaaaactccccctatttcccataatcaatacttctccccacaagaagccaacttttgacaatagagacaataaaagacaataaaagcttttgacacaacaaaaactctattctactattttcaaaatctctcaagtggtagctgatccatttatcgctttggcctttattttctccccctttggcatcaagcaccaaaacgggatcaatcttggccttttaaccccattgcctcaccaaagtcttcaattaagagcaaatggcaataagatttcatgagatgaacttggaattagttaccctctcatcggagtgcagtggaagtctttcatggtccaagtccaccttttccctttcaatcctccttcgagactaaatcatcaaactcaagcacatggttagtctcaaaagggtcaagttgtaacacatctccccctaaacatgtgcatcactttgcaacggacttgtgaggtccagggagtgttggtacaacttgagcaccacaataagcaacaaaatgcaaaaaaggaacatgatcaaaagcataagtacatgtatgctacaattcaatccaagttccgcgaatctaagacatttagctcactacgcaacctgcaaaaggtcttctcatctagaggcttggtgaagatatcggctagctggttctcggtgctaacatgaaacacttcgatatctcccttttgctggtggtctctcaaaaagtgatgccggatgtctatgtgctttgtgcggctgtgttcaacaggattttccgccatgcggatagcactctcattatcacataggagtgggactttgctcagattgtagccaaagtcccggagggtttgcctcatccaaagtagttgcgcgcaacactgtcctgcggcaacatactcggcctcagcggtggatagggcaacggatgtttgtttcttagagttccatgacaccagggaccttcctaagaattggcacgtccccgatgtactcttcctatcgaccttacatccagcatagtcggagtctgagtatccaactaagtcaaaggtagacccctttggataccagagcccgaagcaaggcgtagcaactaaatatctaagaattcgcttcaccgccactaagtgacactccttaggatcggattgaaatctagcacacatgcatacgctaagcataatatccggtctactagcacataagtaaagcaaagaacctatcattgaccggtatgctttttgatcaacggacttacctcctttgttgaggtcggtgtgtccgtcggtccccatcggagtctttgcgggcttggcgtccttcatcccaaaccgctttagcagatcttgcgtgtacttcgtttgagagatgaaggtgccgtctttgagttgcttcacttggaacccaaggaagtagttcaactcgcccatcatcgacatctcgaatttctgcgtcatcaccctgctaaactcttcacaagacttttggttagtagaaccaaatattatgtcatcgacataaatttggcacacaaacaaatcaccatcacatgtctttgtaaaaagagttggatcggctttcccaaccttgaaagcattagcaattaaaaagtctctaaggcattcataccatgctcttggggcttgcttaagtccatagagcgccttagagagcttacacacatggtcggggtaccgttcatcctcgaagccagggggttgctccacgtacacctcctccttgattggcccgttgaggaaagcgctcttcacatccatttggtacaacctgaaagaatggtgagcggcatatgctagcaagattcgaattgactctagcctagccacaggagcgaaagtctcctcaaagtccaaacctgcgacttgggcataaccttttgccacaagtcgagccttgttcctcgtcaccaccccgtgctcgtcctgtttgttgcggaacacccacttggttcccacaacattttgcttcggacgaggcaccagcgtccaaacttcattgcgcttgaagttgttgagctcctcttgcatggccaacacccagtccggatctagcaaggcctcttctacccctgaaaggctcaatagaagagacaaaggagtaatgctcacaaaaattaactaatcgagaccgagtagtcactcccttgctaatatcacccagaatttggtcgacgggatgatccctttgaatcatcgctcgaacttgggttggaggtgccggttgcgcttcttcctccatcacgttatcatcttgtgctcccccttgatcacacgcctccttatgatgaacctgttcatcgtcttgagtcgggggatgcaccataattgaggaagagggttgatcttgctcatcttgttcctgtggccgcacttctccaatcgccatggttcgtatagcggctgtcggaacatcttcttcatctacatcatcacaatcaacaacttgctctcttgaagagccattagtctcatcaaatacaacgtcgctagagacttcaaccaaacccgatgatttgttgaagactctatacgcctttgtatttgagtcataacctaataaaaacccttctacagctttgggtgcaaacttagaatttctacccttcttcactagaatgtagcatttactcccaaatacacgaaagtacgatacattgggtttgttaccggttagtagctcatacgacgtcttcttgaggaggcgatgaaggtagaccctgttgatggcgtggcacgccgtgttcacggcttccgtccaaaagcactcgggggtcttgaactctcctagcatcgtcctcgccatgtcgatgagcgtcctgttcttcctctctaccacaccattttgctgtggtgtgtagggagcggagaactcgtgcttgatcccttcctcttcaaggaactcctccacttgaaggttcttgaactcggatccgttgtcgctccttatcttcttcactttgagctcaaactcattttgagctctcctgaggaagcgcttgagggtcccttgggtttcagacttatcctgcaagaagaacacccaagtgaagcgggaaaaatcatcaacaataactaaaccatacttactccctcctatgctcagataggcgacaggtccaaaaaggtccatatgcagcatctccaagggtcttgatgtcgtcatcacatttttggtgtgatgagagcctcccacctgtttccctgcttgacaagctgcacaaggtctatctttttcgaattgaacattagttagacctatcacgtgttctccctttagaagcttgtgaaggttcttcatccccacatgtgctaagcggcgatgccacagccagcccatgctagtcttagctattaagcatgcatctagaccggcctcttcttttgcaaaatcaactaaataaagtttgccgtctaatacacccttaaaagctagtgaaccatcacttcttctaaagacagacacatctatatttgtaaacagacagttatatcccatattgcacaattgactaacagatagtaaattatatcctagtgactctactaaaaacacattagagatagagtgctcattagaaattgcaattttacctaacccttttaccttgccttgattcccatcaccgaatatgattgaatcttgggaatccttgttcttgacgtaggaggtgaacatcttcttctcccccgtcatatggtttgtgcatccgctatcaataatccagcttgaacccccggatgcataaacctgcaaggcaaatttaggcttgggacttaggtacccaactcttgttgggtcctacaaggttagtcacaatttccttagggacccaaatgcaagttttatcacctttgcattttgcccctaacttcctagcaattacttttctatcctttctacaaattgcaaatgaagcattcaaagcacaataaattgtagaaggttcattcactactttcctaggagcatgaataacattccttctaggcacatgatgaatagcatttcttttaggaacaacatttctcctagtaacatttctatcatacacataagaggaactaggagcaaacatggcatgagaatcataaacatatgaatcaaaagcatcatgacttacatttctagtttgtcttctatcatgatacaaaaatgcatggttccttttagcactagtagccataggggccttccctttctccttggcgggaatgggagccttatggcttgttaagttcttggcttccctcttgaagccaagtccatccttaattgaggggtgtctaccaaccgtgtaggcatccctagcaaattttagtttttcaaaatcacttttgctagtcttaagttgagcattaagactagccacttcatcactcaattttgaaatggaaactaagtgttcactacaggcattaatatcaacatccttacacctagtgcaaatttcaacatgttcaacacaagagttggatttatttgcttctactagtttagcatttaaatcatcgtttatgctctttaagttagaaatggaatcatggcatgttgacacttcacaagcaagcatttcatttctcttaatttctaatgcaagggatttttgagcctctacaaacttatcatgttcttcatacaacaaatcctcttgcttttctaaaagtatattcttttcattcaaggcatcaattaattcattaattttgtctatcttagatctatctaagcccttgaacaaacatgaataatctacttcatcctcatcactagattcgtcctcacttgaagaagcataggtagagttgcgagtacataccttcttctcccttgccataaggcatgtgtgacgctcgttggggaagagggttgatttgttgaaggcggtggcggcgagtccttcattgtcggagtcggacgaggagcaatccgagtcccactccttgcctagatgcgcctcaccctttgccttcttataatgcttcttcttttccctcttgtttcccttttcctgatcactttcattatcaggacagttagcaataaaatgaccaagcttaccgcatttgaagcatgatcgcttccccttggtcttagtcttgctcggctgtccattgcgaccctttagcaccgtcttgaatctcttgataatgagggccatttcttcttcattaagaccggccgcctcaatttgcgccaccttgctaggtagcgactccttgctccttgttgcctttagagcaatgggttgagactcgtggagtggaccgttcaacgcgtcgtcgacgtatcttgcctccttgatcatcatccgcccgctcacgaattttccaagtacttcttcgggcgtcatcatcgtgtacctgggattctcacgaatattgttcacgagatgaggatcaagaacggtaaatgacctgagcattaggcggacgacgtcgtgatccgtccaacgcgtgcttccgtagctccttatcttgttgataagggtcttgagccggttgtaagtttgagttggctcttctccccttatcatggtgaatcgtccaagctcgccctccaccaactccatcttggtgagcatggtgatgtcgttcccctcgtgagagatcttgagggtgtcccatatctgcttggcattgtccaagccgctcaccttattgtactcttccctgcacaaagatgctaagagaacagtagtagcttgtgcatttttatgaatttgttcattgataaacatagggctatccgagctatcaaatttcattccattctctacaatctcccatatgcttggatggagagagaataaatgactacgcattttgtgactccaaaatccgtagtcctccccatcaaaatgtggaggtttaccaagaggaatggaaagcaaatgcgaattcgaactatgtggaatacgagaataatcaaatgaaaagttcgaattaaccggtttcctttgtttgtcgtggtcgtcgtccttttgggaagaggaggactcatcgctgtcgtagtagacgatctccttgatgcgtcttgtcttcttcttcttcccatctcttcgcttgtggcccgagcccgagtcattggacttgtcatcccttggctcgttgacgaagaactccttctccttgtcgttgatcacaattcccttccccttaggatccatctcttcgggcggttagtccctttcttgaagagaacggctctgataccaattgagagcacctagagggggggtgaataggtgatcctgtaaaagttcaaaacttaagccacaaaaacttgtcaagggttagcacaagtatggccaagtggctaaaacacgataaccacaagaaagcaatcacagagttgacacggtggttatcccgtggttcggccaagtacaaaacttgcctactccacgttgtggcgtcccaacggacgagagttgcactcaactcctctcaagtgatccaatgatcaacttgaataccacggtgtttttctttcctttgatcttttcccgcttgcgaggaatctccacaacttggagtctctcgcccttacaattgagttcacaaagaaatacggagtaaggtgggaatgaggaacgcacacaagactcgaaaatcagagcaacaccacgcacacaagtcgtaacaagagctcgcaacgcaacacaaagagttcacaactccacaagagctctatatgctatcacaatgaaacgaatgcgtgagattgatgtcttggtgcttagaagagttgtagaaatgcttggtgtactcctccatgcgcctaggggtcccttttatagccccaaggcagctaggagccgttgagaacacatctggaaggctatccttgccttctgtcgtcgggcgcaccggacagtccggtgcacaccggacactgtccggtgcccgatttgtttccttaaatggcgaagccgaccgttgccgaccgttgcggatctggcgcaccggacagtccggtgcacaccggacagtccggtgcttccttccgaccgttggctcggccacgtgtcgcgcgccgatcgcgcggccgaccgttggctcaccggacagtccggtgcacaccggacagtccggtgaattttagccgaagtcgccggagaaaaacccgagagcggcctcttcggccgaggcagcctggcgcaccggacactgtccggtgcaccaccggacagtccggtgccccaaaccgaagcagccccttggctgcacacagccaagtcttctcttcttcttcttctttctgtttctaacacttagacaaatatattagtacacaaaaccaatgtactaaggcttagaaacataccttaacttgtgatttgcaacttgtccatccatgggcatattttcacatttaagcacttgtgtttgcactcaatcaccaaaatacttagaaatggcccaagggcacatttccctttcaatttgagctccatttgagttgcaaactccgtgtgttgtgtttcgagctcaagtcgtgaattgtgtgcgtggttgtgctgcggattttgtgtgtgttgctcttcccaaccttactctgtgccttctttgtgatctctattataagggcgagagactccaagttgtggagattcctcgcaaacgagaaaatactctaaagaaaaagactgtggtattcaagttgatcatcagatcacttgaaaggggttgagtgcaacccttgtccattgggacgccataacgtggaagtaggcaagtgttatttggccgaaccacgggataaaatcgcgtgtctcttgtgattgctttctctgcgattgttttgtccacaagaactcgcctcaaaactacttagtcgcactaacacttctataactaagttttgtggctatttagtgtttaattttacaggatcacctattcacgccctttaggtgctctcaattagcatcggagtcgtactcttcatctaagggactaaccgcccgaagagatggatcctaagggaaaggggatggtggtcaatgacaaggagaaggagtccctcttcaacgagccaagggacgacaagcccacggactcaggatcgagtcacaagaagagggacgggaagaagaagaggcgcatcaagaagatcatctactacgacagcgatgcctcctcttcttcaccaagagacgacgacgacaacgactcttcgtcgaaaaagagaatggttaattagaactactcttttgactattctcgtaggtcgtacaattcaaatgcacatctactttcaattccccttggaaaacctccacagtttgatggagaggactattcgttttggagtcataaaatgcgtagtcatttattctctctccgtcctagcatttgggaaattgtagagaatggatgcacttcgatagtacggataaccctgtgataattaatgaacaaattcataaaaatgtccaagctactactatcttgctagcttcactttgcaggggtgaatataataaggtgagcggcttggacaacgccaagcaaatctgggacaccctcaagatatctcatgagggaaacgatgccaccatgatcaccaaaatggagctggtggaaggcgagctagggagattcatgatgatcaggggagaggagccaactcagacttataacaggatcaagaccctggtcaataagatccgaagctatggaagcacaagatggacggatcatgatgtcgtctgactcatgctaaggtcatttactgtaattgaccccccatcttgtcaatcttattcgtgagaatcccaggtacaccaagatgacgcctaaggagattcttggaaaatttgtgagcgggcgcatgatggtgaagaaggctcgatatgtggacgatgctctaaatggtccactacccatctacgagcctcaacctgttgctcttaaggcaaccagtagcagagaggcgcttccaagcaaggttgcacaagtggaagctgttggcctcaacgaggatgagatggcgcttatcatcaagcgcttcaagaccgcgcttaaaggacgcaaggagtaccccaacaagaacaaaacaaggggaaagcgctcctactttaaatgcggtaagactggtcactttattgcaaattgtcccgataataatagtgaccagggacaagaaaagagcgggaagaaggagaaaaagaagaactacaggaaggcaaagggcgaggcgcaccttggaaaggaatgggactcggactgctcctcttctgactctgacgacgaaggacttgctgcctcagccttcaacaaatccacactcttcctcaacaaacgccatacatgtcttatggccaaggagaaaaaggtacgtgttcgggacacacccaagtacacttcatctagtgatgaagaatcttccgatgatgaagtagattactctagtttatttaaaggtttagatagagccaaagtagagaaaattaatgaattaattgatgctctaaatgaaaaagatagactactagaaaagcaagaggacatattgtatgaggaacatgacaaatttgttcgtgtgcaaaaatcccttgctttagaaactaagagaaatgaaatgttatcttctgagttatctgcttgtcatgaatctatctctagtttaaagagtttaaatgatgaattaaatgctaagctagagaaagcaaatgaaactagttcatgtgtagagcatgttgttatttgtaatagatgcaagaattttgatgttgatgtctgtaatgaacatattattgctattactaaattgaatgatgaggtggcaagtcttaatgctcaacttaagacttgcaaaagtgattttgataaattaaagtttgctagggatgcctacactattggtagacacccctcaattaaggatgaacttggttttcgaaaggaaaccaagaacttaacaattcaaaaggctcctattctcaacaaggagaaagggaagactcatatggctagaagtcatcaaaggaaccatgcttttatttatgataggaaaattgctagtcgtttcaattataataagagttatgttcatgctgcttattatgattcaaatgctatgtttgcctctagctccactcatgattatggtagaagtaggcctatgaaaaatcatgctatgtctcatgctcctagaaaaatgtgcaataaaccctctaccatttatcatgctttcaatacttcttttgtacttacatgcaaaaatacaaaagtagtagctagaaaattgggatccaaatgcaagggagacaagacttgtatttgggttccaaaagttattgtgactaaccttgcaggacccaacaagagttgggtacctaaaacccaagcttaaattccttgcaggtttatgcatctgggggctcaagctggattatcgacagcggatgcacaaaccacatgacgggagagaagaagatgttcacctcctacgtcaagaacaaggattcccaggatacgatcatctttggagatgggaaccaaggtaaggtcaaaggcttgggcaagatagccatcaccaacgagcactccatatcgaatgtatttctagtagagtcgcttggttacaaccttctgtctgtaagtcaattatgtcacatggattacaattgtctttttacaaacgttgatgtatttgtctttagaaggagtgatggttcattagcttttaagggtgtattagacgacaaactctatttagttaatttttcgaaagaggaggccaatctagatgcatgcttaatagctaagactagtatgggctggctgtggcatcaccgtctagcacatgttgggatgaagaaccttcataaacttctaaagggagaacatgtgttaggactaaccaatgtttgtttcgagaaagataggtctggtgcagcatgtcaggcggggaaacaggtgggaagcactcattatagcaagaatgtgatgacaacatcaagaccactggagcttcttcacatggacctcttcggacccgttgcctaccttagcattgggggaagtaagtatggtcttgtaattgttgatgatttttcccgcttcacttgggtgttctttttgcaggataaatcagaaacccaagggaccctaaagcgctttctaaggagggctcaaaacgaatttgagctaaaggtgaaaagataaggagcgacaacgggtccaagttcaagaatctgcaagttgaggagtatcttgaggaggaaggtgtcaagcacgagttctccgctccctacacaccatagcaaaacggtgtggtagagaggaagaacaggacgcttatcgacatgcgagaacgatgcttggaaagttcaagacgcccgagcagttttggtcggaagctgtgaacacagcttgccacgccataaaccggctatatctgcatcgccttctcaagaagacctcctacgaactccttaccggtaacaaacccaacgtctcctactttcgtgtatttgggagcaaatgttacattctggtgaagaaaggtagacattctaaatttgctcccaaggcagtagaagggtttttactagggtatgactcaaatacaaaggcgtatagagtcttcaacaaatcatcgggtttggttgaagtctctagcgacgttgtatttgatgagactaatggctctccaagagagcaagttgatcttgatgacatagatgaagatgatattccaacgaccgcaatgcgcatgatggcgattgatgatgtgcgaccacaggaacaacaggagcaagattagccatcttcatccacaatggtgcatcctccaactcaagacggtaaacaggtacctcaagaagagggacaggatcaagggggagcacaggaagaacaagtgatggaggaagaagcaccacgtgcccctccaactcaagtccgagcaacgatccaaccacatcaccccgttgaccagattctgggtgacataagcaagggagtaactactcgctcaagattagctaacttttgtgagcattactcgtttgtctcttctattgagcctttcagggtagaagaggccttgcaagatccggattgggtgttggccatgcaggaagagctcaacaacttcaaaagaaatgaagtttggagcctggtgccacgtccaaagcaaaatgttgtgggaaccaagtggatgttccacaacaagcaagacgagcatggggtggtgacaagaaacaaggctcgacttatggcaaaaggttatgcccaagtcgcaggtttggattttggggagacttttgctcctgtagctaggctagagtcaattcgaatattgttagtctatgctgctcaccactcttttaggttgtttcaaatggacgtcaagagcgctttccttaatgggccaataaaggaggaggtatacttggaacaaccctctggctttgaggatgacaggtatcccgaccacgtgtataagctctctaaggcgctctatggacttaagaaagccccaagagcatggtatgaatgccttatagatttcttaattgctaatgctttcaaggttgggaaagtcgatcccactctttttaccaagacttatgatggtgatctatttgtgtgccaaatttatgtggatgacataatatttggttctactaaccaaaagtcttatgaggagtttagcagggtgatgatgcagaaatttgaaatgtcgatgatgggcgagttgacctacttccttgggttccaagtgaagcaactcaaggatggcaccttcatctcccaaacaaagtacacacaagatcttctcaagcgttttgggatgaaggacaccaagcccgcaaagacactgatgggaaccgacgggcatgttgagctcaacaaaggaggtaagttcgttgatcaaaaggcataccggtccatgataggttcattgctttatttatgtgctagtagaccggatattatgctaagagtatgcatgtgtgctagatatcaatccgaccccaaggaatgtcaccttgtggccgttaagcgaactcttagatatttagtttctacgccttgcttcgggatctggtatccaaaggggtctacctttgacttgattggatactcagactccaattatgtcgggtgcaaagttgataggaatagcacatcaggaacgtaccaatttctaggaaggtccctggtgtcctagagttcaaagaaacaaacatctgttgccctatccaccgctgaggtcgagtatgttgccgcaggacagtgttgcgcacaactactttggatgaggcaaaccctcccgggactttggctataatctaagcaaagtcccactcctatgtgacaatgagagtgctatccgcatggcggataatcctgttgaacacagccgcactaagcacatagacatccggcatcacttcctgagagaccaccagcaaaagagagatatcgaggtgtaccatattagcaccgagaaccagctagccgatatctttaccaagccgttggatgagaaaactttttgcaggttgcgtagtgagctaaatgtcttagattcgcgtaacttggattgatctatagcatacatatgctctatgcctttgatcatgttactttgaagcatttacattaactcggtgtatatttgtggtgctcaagttgtacacgacctccccggacctcacaagtccatatgcaaatggtgcacatatttagggggagatatgctacaacttgaccctttgagactaacctttgtgtttgagtatacttgatgtagtctcaaaagtgcattgaaagggaaagttgaacttggacgatgcaaagacttccactgcactccggtattagtgtactcacttccaagttcatacttatgctctcattgcctttttgctcttaattgacatttttggtgaggcaatggggttaaagggcaaaaaatgatcctgttttggtgcttaatgccaaagggggagaaattaaggccaaagcaaatggatcagctaccacttgtaaattttgaaaacaatagagttagaacttttgatttgtccaaaatactcttattgcaaaatttggtctcttgtggtagagaattttgattatgggaaaaagggggagtttttggcacttgatcaatttttctcttggaatatctctcattttgcccaaacaagtgtgtttgacctagagataggaaaaagaatttgatttgcaaaaacaaaccaagtggtggcaaagagtgaacaaaatatgccaaattatagtaaaaaacaattggatcttcaaattgaattgatgttgcacgttttttgttgctttttgatgtgttggcataaatcaccaaaaagggggagattgaaagggcaatatgcccttgggcaatttctataagtattttggtgattagatgcccaacacatattctttaagacctaatgtgccaaaggttgaaaagtgcaaatcaaggcatgaggtatgtttctagacttattatatttgtttttgaatactaatgaggttatctaagtgctagaaacagtgctgagaagaagagaatcgaattgcaaaagacttggatgtgtgcagcaaaattccagttcggtctggcacaccggactgtccggtggtgcaccggacaatgtccggtgcgccaagctggtccgcgtgaactcgccgctcccgggattcgatggcggcgtacggctaaaaatcacatgaccgtccggtggtgcaccggaccatctggtggtgcaccggactgtccggtgagtcatccgcgacgaactcgtcgctctcaggaattgcaatggggtgatgtggctataattcaccggactgtccggtggtgcaccggactgtccggtgagccaacggtcggccacgcaatcttcgcgcgacatgtggccgcgccaacggtcggttgggcacaccggactgtccggtgcgccaaccgattccggggaccaacggtcggctgctcaccgtatggaaagaaatcaagcaccggacatgaacagtagttgttcggtggtgcaccggactgtccggtgtaccacccgacagaaggcaagattggccttccaagttggtcttcaacggctcctagctaccttggggctataaaagggacccctaggcgcatggaggagaaaaccgagtattctctaagtattctcaagcatccagactttgctcccgcgcattcgcttcattgtgttagtgatttgagctccatttgagttgcgaactccgtgtgttgcgtttcgagctcaagtcgtgaattgtgtgcgtagttgtgctgcggattttgtgtgtgttgctcttcccaaccttactctgtgccttctttgtgatctctattgtaagggcgagagactccaagttgtggagattcctcgcaaacgggaaaatacactaaaggaaaagaccatggtattcaagttgatcatcggatcacttgaaaggggttgagtgcaaccctcgtccattgggacgccacaacgtggaagtaggcaagtgttacttggccgaaccacgggataaaatcacgtgtctcttgtgattgctttctctgtgattgttttgtccacaagaactcgcctcaaaactacttagtcgcactaacacttctataactaagttttgtggctatttagtgtttaattttacaggatcacctattcacccccctctaggtgctctcaagaacccagaagatgaagatcaagtacctccatatccaaacaatggtcaagagctcccgtttgatttttttttggtttaggacagcccgctaacagtattaaccttgacttgaacaatcctccagctcaagagggagtgcctgaaaatgttaatgagatgaacgaggataatgcagcttgggaggaatggctagctccagctctagctcaggctcagaataatttagagaatgaagatcaattcagctttcaactttcagtgcttgaagaactaaattcctcagatagctcaattggcatgccaaatggattcttaccactattgcctaatcagcatcttaaccaaaactaggctaatggtaatgaggattttcatcctgagcatgtgcaagaataggttgaggcaatattagctcttccgatttgccttgaacctgtagttgcaccagcactagagcagtttcaaaata

SEQ ID NO: 1233 - DNA, 1246 bp, Zea mays
  Intron number 3 from transcript GRMZM2G155002_T01 (locus G RMZM2G155002) derived from phytozome v7.0 (chr-ID 4; pos 2 1821409 to 21822654 reverse strand)
ctctgccacgagcccagggttagtgtttcaaattcagctggttactaatggcacaagctgacacctgacagtggaatcgttaaacgtaataagtacgtagtagggtttagggttctagccaagcacacgcgcgctccctccgtcctgaaataattaatcatgtttgggttatgacttgtttataggttttagggtttgtagtgactaatctttttactcccttcgttttattctattttagttcataaattgctaaatacgaaaactagaatatagttttagtttccatatctagcaattcagggggtgtttggtttgcccctgctaaaatttagcctctatcacatcgaatgtttgaacctccgttcggggtattaaatgtagtcggattataaaactaatttctcagccgaagattaaaaagtgagacgaatctagtacagttggttgggcctatatttcatactcctatttgaaagtcaaacgcttgatgtgacccggactaaactttagtccacagaaccaaacaccccgtaaaatagaataatagtgcctagaaactaagcacccccttaatctacaatagcatattcacaacatatgtattcagtgtcataaacgttaattacctatacatatctggtttaaattgtactgtccccgccttaccaacacaaagggcacatctctcacttagaagagccaaacactattatcatgaaagtactaatgttacggcatcaaaatagctagataccattgtattattaatgtcatatatttttatatatactaacccaccatctaagagatttagatgttactattattgtccacaaatttaggccgattgactcaaagaacgagatgggcgttcattcttaggcattgttcctatcgcatgtggattggatgagattaaaaaaaatatcaaagattttgacttatttgggattgaaatccactcaatctcatcgaatttacatggattgagagcaaaacgaacaagcccttagatgatggagatttagagaagcaagtgtgattaacattttttagtagtagttagttagttacgcggttattttgccacgcatcatcacttatcgctcagtgtgtggagccagtgtatagttttcttttatatcggaatctagtagtaccactgactactgttaatagaagttggctgtgccttcttttttttgcagaaacgtctgacaaggaggaagagcctgtggacggg

SEQ ID NO: 1234 - DNA, 51028 bp, Zea mays
  Intron number 10 from transcript GRMZM2G400352_T02 (locus GRMZM2G400352) derived from phytozome v7.0 (chr-ID 1; pos 59309465 to 59360492 reverse strand)
tgccaggcgggtgggcagagggtgcagtgcgcccagcagtaggcagcttgcggcaaatttgctgtttcgctttgggcgactattgagtttactcgcttgtattggtctgatgatacttcggttacaagagtgcaatattactaaggattagttcctatataatggcacattggcactaacattgttatgcattttaatgcacccgtagcaacgcacgggcatagacctagtaaatataataagcatataaacatggaacatgtattattatggaacaactgaaaataaacagatagcaacataaacaacatgactgtaaaattaagacaaacagatttatcatattactagtatgatcaggcatcagacatgtcatgatataatacgacaaaacaaattgaataaatttatggctatatataaaacaacaggtattaacatatataatttgcagaatgtaaaacagtaaggagatgaattgatcataccctcccatgcgctccgaggatctagatccttgtccaacttcacttgtcatgtcgtactagatgaagatgccaggaaccagcgatgaagacaacgacagacgttgggcagtcgcgtaaacgctccccaaaaacctaattgccgatcccccgagcagggtctcgaacggcaagggctccggaggcacctgccctctcgcctctctgtgcgcgcagagctacgagatggaaacaccctcacttgcggctggactttgtgactctgaaatggttatgttcgtgtgtaccgagtgacaggggtgctcctctatttaaagtctcgccgagtcacgccaagagtcggtcagctgaaggagaagggtctcgccgagtcacgccatgagtcggccagctgaaggagaggagtctcgccgagtcacgccatgagacggctcgccgacgcatgcggcagacgaagagacgggcaactgaaaggttaacccggagtgaaaactcccgcggttaatgagtgctaaaaattaacacaaacccgcccgtccgccacgccacgctgacggcggcgcgcgcgcgtggcacgtccttgtccatttcttgacttctcaagttaggtagaataaatcccaccatataagtcaagccaaaagaccattagacttccaatgtggtactattgatattcttcaccattacacaccatataatttattcaataaataggtcaaatccataaaagatccaacagccgtacaccgatcgatctgacgaccttttcgtccccggtgcccgccgcccgcgcgccgttgaaagtagtactaccgttgaacgtagttaggcagctagcacgactcggccggccgccgcagtcgaaatctcagccgctgaccaccacgtatcacaccactgcaccagcgctgcggctggctggacggtatggcagaaacagaaacaccgtaccaggcaccagccgccaccgccaggcaaaagcaacaaaagcacggccgggcagaggtcgcgcgccggccgtcacgacagatagcaagcaatgcaaagatgacgaccatatcagcactggtacacctcctccggtggtcatcgactcgaccgcgtcgatcgtcgtttttctaagtctagttgaaaagaccaactggtccccgaagaaaaaaggtagcaagatggacgcacgcggcacgcagaacgttccagaactagagacgattaggatgaccacctccacgatcgcttacattacattgctcagtatacataatactagtttgcagttcggtacacggatagctgcacgcacagcactacatgccgcaggcatcaaacgagcgagcggcatgtggtgtgtagtagcttgtagcttcctcctggccacacaataggtactcctactatactatcctcggtattatttgctccgcgactcagctcgactttcggaaaaggtttgcgtccatcatgccgtttccgtcgcagagcgttcaaacagggtgttgattggagtagtcgtctcaaagtttcaaatatacaattcctactagtcggttgcccgtgcgttgcaacagcttacaacaatacccatataaactattcacaaaaaaattcaagattttttattgattgtctccactctccgtataatattttttgatttagctaactgatgttattgtctagtccatccaatatgtcttaatacaacacggccaatgaagtgagcggttagaagagaattcacaacgactggctgaacgaacagagattataaaatgacataattccaccatacagagaccaaataagagaaagtctgtgagctcaagtttctaaaataagtcatatgaactcaaacttataaaaaagatagataaaaatacggagtgattgctaaagtcagacatcaataaaaactggatgcgctctatataaattatgctacttcgtagcaatttctaacgtttaaaaccaataaataagctttcattttactgttagtgtgacaaattattgttgctccatctaattcaacaacatcaaacaccattgagtccattgcgttaatgtggtctcagaaacgacctaatgcttgtaagagccaagaacgtcgtgccgtgcttgggctgtagcctcggcatatagtgctggcccggcccgacacgattataatttttttattttacaaaaaaacatatatacatatatacaatttatattcaatattaaaaacatttgagcatgatgttctactggttagacagcttcacccaatatcttctgtccttctgctatcagagctttttttaacattttacgctgatttaatcaaatgggccgacgggctaacgggctggcccggcacagtcagcagtgtgcatgggccagagttgtggcccgcgggcgtctggcccgtgccgggccgccgtttgaccatctaaaggtgtgcatcgggtttgaaatagatgtcaggagttatttgtaaaaaaatgatgttggccgaccgttaaaactggtgctttaagtatactatagatttgtaatctatacagattatatacagattatataaaactaatatttagtttaaaataagttatattatataatccggattgtttataattctaaataaatatacccttagaatataggataggaaaaatataggaatacacaagcgtaccaaagaccgtagccaacaacgcgcacatgagaattcagaaatttccgaagagatcatacctctgactatagatgtccaaatgggcgggtcgggctggcatggcccgatcacggctaggctcggcatggattaggactgtgccgccctggcctagattgactagcgtgccgtaccgtggcgggcctaacgagcccgctaggttaataaccgggtcaggctggcccacggatgacgggcctaacgagcccataagagcatttgaggtttaaatgataaaaatattctacaagtatttatatgaaaaggtagaaaaataaagtaaaatcgagctatgcgaggcctagcccgccatgccacgcctagccggcccgggcccggtgagagcacctagagggtgtgaataggtgatcccgcaataatcaactctaaacaacacaatcttggtttataaatgttagtgtaatgaaaaccaagttgctgtgaatagagggagagaactcttcacttgattgttcctttagaaattgtattggacttaggaacaataacacaagtgaatatatgagaactctatggaacaaaataatcacagcaaagcaaaatgttgtaggaacaaagtgggtgttttgcaacaagcaagatgagcacggggtggtgacaagaaacaaggctcgacttatggcaaaaggttatgcccaagtcgcatgtttggatttcgaggagactttttctcctgtagctaggctcaagtcaatacgtatattattgacctatgctgctcgccactcgtttaagttgtttcaaacggacgtgaatagcgtcttcctaaatggaccaatcaagaggaagtatatgtggaacaacctcaggcttcgaggatgacaggtatcccgaccatgtctacaagctctctaaggcgctctacggacttaagcaagctccaagagcatggtatgaatgccttagaggttttcttatttctaatgctttcaaggttgggaaagttgatcctactctctttattaagacttgtaatggtgatttgtttgtatgccaaatatatgttgatgatataatatttgtgtcggggaccataattaggggtacccccaagactcctaatctcagctggtaacccccatcagcacaaagctgcaaaggcctgatgggtgcgattaaggtcaagactcggtccacccaagggacacgatctcacctcgcccgagcccagcctcgggcaagggcagccgaccccagaggattcacgtctcgcccgagggccccctcaagcaacggacacaccttcagctcgcccgaggcctagtcttcgccgagaagcaaccttggccagatcgccacgccgaccaaccgtatcgcaggagcatttaatgcaaggatggcctgacaccttatcctgacgcgcgctcttcagtcgacagagccgaagtgatcgcagtcacttcgtcgcttcactgaccgacctgacaagaagacaacaccgcctgcatcgctccgactgccgcgccacttgacagagtgaggctgacagcagccaagtccggcctcgggcgccataggaagctctgcctcgcccgaccccagggctcggcccccgtctcggccgcggacgacgaactccgcctcgcccgaccccagggctcggactcagcctcggctccggaagacgacgaactccgcctcgcccgaccctagggcccggactcagcctcggctctggaagacgacaaactctgcctcgcccgacccggggctcggactcgacctcgacctcggaagacagactcgacatcaacctcggaggagcctccgcctcgcccgacctagggctcagaccgaccacgtcacaggaggagccatcattaccctacccctagctagctcaggctacggggaacaagaacggcgtcccatctggcttgccccggtaaacaaataatgatggcgccccgcgtgctccatgacgacggcggctctcaagccccttacggaagcaaggagacgtcagcaaggactcgacagccccgacagctgtccttccgcaaggctccagcgctcctccgatggccacaacatcacatgaacagggtgccaaaacctctccggctgccacgacggcatgtacttagggctctagctcctctctgctagacacgttagcacactgctacatcccccattgtacacctaggccctctccttacgcctataaaaggaaggtccagggctctcgtacgagaaggttggccgcgcgggagaacgggccgacgcgcaagtccctcgctctctcccacgcagacgcttgtaaccccctactgcaagcgcacccgacctgggcgcaggacaacacgaaggccgcgggtttccccttttttgcctgtctcctttccccccttcgcgctccgtcttgcgccgacccatctgggctgggacacgcggcgacaatttactcgtcggtccagggaccccccgggtcgaaacgccgacagttggcgcgccaggtaggggcctgctgcgtgttgacgaacagcttcccgtcaagctccagatgggtagtctccagcaacctttccaacccaggacgattctccgtttcaggagtcttgagttcatgtccctcgacggcggctacgacatgatactccttcctccgccgcgcgatagcgacaatggcggccgacagcccgcccgccggcggcggaatcaacgacgtcttccccacgtggcggaagaacaacattcgggtttgtcccgtcacctctcccgccgacggaggaggaggcagggcaaccacgaccaagcaggaggcggcacctcgtcggctgtcgagcgagtcgacggcgccggcgccccaacgggggacacgtcgggcgacgacctcgcgtctgagacgaagacgagcgtcgtttccctgcaacacgccaactccaagcggacggacgatgccagcacgctcgcgaaggacttgctgggcgtcaccctcgtacctgagacgacggtgcagtccgcccctgacgcgacttcgtcaccgcctgtcgaccaagaggtaccgaccggctcccatctcgtgccttttagatccagctgcgacccaccgagtggccccgctttggtggacgcttttataaaggcatgttcaagccctccggggtatcatatgcggtcaccctgggaccggctgacgaccgtatcgacctacggaccctcgggttccgaggaagatgacgagcccgacttttgttgggatttctccggactcggtaaccccagtgccatgcgggacttcatgaccgcatgcgactactgcctctccgattgttccgatggtagccgtagcttcggcgacgaggactgcggcccaagtcgtgaatgtttccacgtcgatctagggggtctcggcgaaagcaaccatcttggtatgccggaaaacggcgatccccctaggcctgtgcctcgcgttgacatccttcgggagctagctgtggtcccagtccctgcggggggtcaggacgcacagctcgagcaaatccgcgaggtgcaggccaggctcgacgagggagcaggaacacttgagcagttccggtggaacatcgggcaggaatgggcagaccgagctccggccggagaagcgcgtcatctgccccagagcatccagctccacattgccgacgacgtcagggcaaggccgccaccggcttccagtggggtcggccagaacctggctgcagcagcaacacttcttcgcgtgatgccggaaccatcgaccaccgaagggcggcgtatccagggatagctcaagaatctcctggaggatgccgcggtctgacgggccgaaagctctgcctcccgaaggcaggggtaccccttggagcatcgcgccgtgacttcccgattcatgcgggaagcctcggtccacaccgggcgcacgcgcaacacagcgcctgcggccccgggtcgcctcggcaacgagcaccaccaccgcaatcatcgagcccacctcgacgagagggtgcgccgaggctaccaccccaggcgtgggggacgctacgacagcggggaggatcggagtccttcgcccgaaccacccggtccgcaggcttttagccgggccatacgacgagcgccgttcccgacccagttccgaaccccgactaccatcacaaagtactcgggggagacaaggccggaactgtggctcgcggactaccgactggcctgctagctgggtggaacggacgatgacaacctcatcatccgcaacctccccctgttcctctccgacaccgctcgagcctggctggagcatcttcctccggggcagatctccaactgggacgacctggtccaagccttcgccggcaacttccagggcacgtacgtgcgccctgggaactcctgggatctccgaagctgccgccagcagccgggagagtctctccgggactacatccagcgattctcgaagcagcgcaccgagctgccccacgtcaccgactcggatgtcatcgacgcgttcctcaccggcaccacctgccgcgacctagtgagcaagctgggtcgcaagacccccaccagggcgagcgagctgatggacatcgccaccaagttcgcctctggccaggaggcggttgaggccatcttccggaaggacaagcagccccagggccgccagccggaagatgtccctaaggcgtccactcagcgcgacaccaagaagaaaggcaagaagaagtcgcaagcgaaacgcgacgccgccgacgtggaccttgtcgccgccgctgagtacaagaaccctcggaaacctcccggaggcgccaatctctttgacaagatgctcaaggagccgtgcccctatcatcagggacccgtcaagcacacccttgaggagtgcgtcatgcttcggcgccacttttacaaggccgggccacctgcggagggtggccgggcccacaatgatgacaagaaggaggatcacaaggcagaggagttccccgaggtccgcgactgcttcatgatctacggtgggcaagtggcgaacgcctcagctcagcaccgcaagcaagagcgtcgggaggtctgctcggtaaaggtggcggtgccagtctacctagactggtccgacaagcccatcaccttcgaccagggcgatcaccccgaccacgtgccgagcctggggaaatatccgctcattgtcaaccccgtcatcggcaacgtcaggctcaccaaggtcctcatggacggaggcagcagcctcaacatcatctacgccgagacccttgggctcctgcagatcgatctgtcctcgatccgggccggcgcggcgccttttcacgggatcatccccgggaagtgcgtccagcccctcggacaactcgatctatccgtctgcttcgggactccctccaacttccaaagggaaaccctcacgttcgaggtggtcgggttccaagggacctaccacgcagtgctggggaggccatgctaggccaagttcatggccgtccccaactacacctacctcaagctcaagatgtcgggccccaacagggtcatcaccatcggccccacgtaccgacacacgtacgaatgcgacgtggagtgtgtggagtacgccgaggccctcgccgaatccgaggccctcatctccgacctggagagcctctccaaggaggtgccagacgtgaagcgccatgccggcaactttgagccagcggagacggttaagtccgtccctctcgaccccagcaacgacgcctctaagcagatccggatcggctccgagctcgaccccaaataggaagcagtgctcgtcgactttctccgtgcaaacgccgaagttttcgcatggagtccctcggacatgcctggcataccgagggatgtcgccgagcactcactggatatccgagctggagcccgacccgtgaagcagcctctgcgccgattcgacgaagaaaagcgcagagccataggcgaggagatccacaagctgatggccgcagggttcatcaaagaggtattccatcccgaatggcttgccaaccctgtgcttgtgagaaagaaaggagggaaatggcggatgtgtgtagactacactggtctaaacaaagcatgtccgaaggttccctaccctctgcctcgcatcgatcaaatcgtggattccactgctgggtgcgaaaccctgtctttcctcgatgcctactcagggtatcaccaaatcaggatgaaagagtccgaccagctcgcgacttcttccatcacaccttttggcatgtactgctacgttactatgccatttggtttgaggaatgcgggtgcgacataccaaaggtgcatgaaccacgtgttcggcgaacacattggtcgaatggttgaggcttacgtcgatgacatcgtagtcaagacaaggaaagcctccgacctcctttccgaccttgaaacgacattccggtgtctcaaggcgaaaggcataaaactcaatcccgagaagtgtgtcttcggagtcccccgaggcatgctcttgggtttcattgtctccgagcggggcatcgaggccaacccggagaaaatcgcggccatcaccaacatggggcccattaaggacttgaaaggcgtacagagggtcatgggatgccttgcggctctgagccgcttcatctcgcgcctcagcgaaagaggcctacctctgtaccgcctcttaagaaagtccgagtgcttcacttagacccccgaggccgaggaagccctcgggaacctgaaggcgctccttacgaacgcgcccatcctggtgccccccgctgccggagaagccctgttgatctacgtcgccgctaccactcaggtggtcagcgccgcgatcgtggttaagagacgagaagaagggcatgcattgcccgtccagaggccggtctacttcatcagtgaggtactgtccgagaccaagatccgctgcccacaaatttagaagctgctgtacgcggtgattctgacgcggcggaagttgcgacactacttcgagtctcatccggtgactgtggtgtcatccttccccctgggggagatcatccagtgccaagaggcctcgggtaggattgcaaagtgggcggtggaaatcatgggcgagacaatctcattcgcccctcggaaggccatcaagtcccaagtcttggcggactttgtggctgaatgggtcgacacccagctcccaacggctccgatccaaccggaactctggaccatgtttttcgatgggtcgctgatgaaaacaggggcaggcgcgggcctgctcttcatctcgcccctcgggaagcacctccgctacgtgctgcgcctccatttcccggcgtccaacaacgtggccgagtacgaggctctggtcaacgggttgcgcatcgccttcgagctatgggtccgacgcctcgacgctcgcggcgactcgcagctcgtcatcgaccaagtcatgaagaactcccactgccgcgacccaaagatggaagcctactgcgatgaggttcggcgcctggaggacaagttctacgggctcgaactcaaccacatcgcccgacaatataacgagactgcggacgagctggctaagatagcctcagggcggacaatggttcccccggacgtcttctcccgagacctacatcaaccctcattcaagaccgacgacacgctcgagcccgagaaggcctcggccctgcccgaggcaccctcggctcagcccgaggcgccctcggctcagcccgaggcaccctcgggcctcggatcagcccgaggcatcctcggcccccgagggtgaggcattgcgcgtcgaggaggagcggaatggggtcccacctaatcgagactggcaaaccccgtacctgcaatatctccaccgaggagagttgcccctcgaccaagccgaggctcggcggctggcgcggcacgccaagacgttcgtcttgttgggggacgggaaggagctctaccaccgcagcccctcaggcatcctccagcgatgcatatccatcgccgaaggccaggagctctttcaagaaatacactcgggggcttgcggtcatcacgcagcgcctcgagccttgttggaaacgccttccgacaaggtttctactggccgacctcggtggccgacgccactagaattgtccgcacctgccaagggtgtcaattctacgcaaggcagacccacctgcccgctcaggctctgcagacaatacccatcacctggccgtttgctgtgtggggtctggacctcgtcggtcccttgcagaaggcacccgggggctacacgcacctgctggtcgccatcgacaaattctccaagtggatcgaggtctgacccctaaacagcatcaggtccgaacaggcggtggcattcttcaccaacatcatccatcgctttggggttccgaactccatcatcaccgacaacggcacccagttcaccgacagaaagttcctggacttctgcgaggatcaccacatccgggtggactgggccgtcgtggctcaccccatgacgaatgggcaagtagaacgtgccaacgacattattctgcaaggactgaagccgaggatccacaacgacctcaacaagttcggcaggcgatggatgaaggaactcccctcggtggtctggagtctgaggacaacgccgagccgagccacgggcttcacactgttttttctagtctatggggccgaggccatcttgcccacagacttagaataggattccccgaggacgagggcacacgacgaccaaagcaactagaccaatcgagaagactcactggaccagctcgaagaggctcgggacatggccttactacactcggcgcggtaccagcagtccctgcgacgctaccacgcccgaggggttcagtcccgagacctccaggtgggcgacttggtgctttggctgcgacaagacgctcgagggcggcacaagctcacgcctccctgggaagggcagttcgtcatcgctaaggttctgaagcccgagacatacaagctggccaacagccaaggcgaggtctacaacaacgcttggaacatccgacagctacgtcgcttctacccttaagatgttttcaagttgttcgtacacctcgttcacatgcaaagtctaaccatcaaggaagggtcagccttgcctcggcaaagcccgaccctccctcgggggctagaaggggggaaccccctctgcgttaaaattttcctcgaaaaaagtcttccatcaaaaagactttcgcgtctcccggctatatcagtaacaggaccccaagaaacgaataagggtgcatgtaagtggcaaggccggccgagctgagggattcctacgcctctgggatacgaatacctcactcgtcgcctaccacgaaaaataactcttacttgagtaagcaatcctgctactgacgaacgagtccggatacacaaaacaggaggaaaagagacaccaccttatattacaatgataaagtgttcgggcctcggtggccgcaaaagacacacatgcattcaaaataaactgctccggcagaatcaggcgtcgcccggagaaggagccgcgccctcggcttcgtctccaccctcggcgagatccgccccggcctcggacgacggcgcaagcgggaggatctctgcctcaaaggtggtcgccagcaccgcacttgggctcgcggtggccgcatcaagcctctggacttcggccagggcagcttcatcttcgtcaggaaggcaatacccctcgctgacccgctctagatccacgtcatagtgggaagcgagcacggcgaaggctcgcctgacgccgtgatgcagcgcctcgcggagtttgccgcgcgcatggtcacccaaggcatgcaggcgactttgaggggagcttcccgaggggacgtcgtcgaagccaaagacccggcagaaggccgagatggcctcggacatggccgcgtggtcggcctccctctgctcggccgcctgagcaagcgccttggcgaacttatcaagggcagactcgagctcagtgaacagccaaagcagaagacttcaaacacgagttgaggaacgaagccaaatcgaaatcttaaaacagccaagacataccttcagctcgggcgcgttgctccgaggatgcggcttgggccacggccaggtctgccgcaaaggccccggcccgagcagacgcctcggctaactggaccccaagagcctcagcccaactttcagcctcggcggcccggccccgagattggtcccgctcgccgatgacctggccaagctccaactgttgccgctgcgcctctgcgcgtgccgctgctgcctctactcccagatcgacacagagcaaccgaaggtccgccacctcggcactctgttgggagaggcactcggtagccctggcaagcgtggtcctcagggaccacagcgaaccgcagacatcgacctcgcggcggatgaacgacgacttggcggcgctcagatccgtcagatcctgagggaaggaagcggggcgtcacaaagaacgccttaatcacgtgaaaggtatgcttgaaatcattacctggaggatcttgggaacgtccctgcaaaggacctccaaggtcgaccgaagcgaccccaccgttgcctcggcacactcacgaagcccgtcccaagactgctcctctcgctcattgtcaagaacgaagaggggatccgaggccccacgggtccggaaccgaagcaactggcgccgcccgtcagaactgcgccgcgcggggacaaggttgccgctccctaggacgggtcccggttccgcgccccctcctccaaggcaccaagtagcgacgcctcggccatctcagcatcagcggcgacgggtggctccacggccagaacggcaacggcctcggcagcagccggcgccagcgccagcaacatgtctggtgggcccgaggccacagccgcgccagcagcctcccccagtgcgacgaccgcttcgacaaaggagtcagcctcgggagctcgccccatggcaactggtgccgcctgagccccccgctgtggggcatcttgcgagggggtcagctggccagcgaggcccgtcgcggcactagctgcagaagccgacgccgtcttgaggaccttccggggagccagaccggtcgaaccgtgcctccgcttgctaagaagaaagggaaaatcaggatcaggacatacgaaggaggagccaggacgaagatatcctaagatacttacccactccgggccatgatcaatcgtgcctgtggggaggtctctcgaacctcgatccccgaaggtaccaccgagatctgccccgctgccggcttcggtaccatccttgccttgggcgcccgaggcacccgagggacggactgcctaggctcagccacgacgacccgaggatcgccctcctgcgcagtcggcacgggcaatggttctcggggaacatgcagctcggcttgactccctggggttgcctcaactacctcggccgaggggtcaagtaccccctcggtctgcccccgttcttcggaccgggaccccgacgtcctggccctggataccgacggcgccagcccgctcgggggctggcttgacgacccctggcccagccttaaatccgggctgaggccgaggcgggcagccatgtcgtcgtcttcttcattgtcttcatcgtcgtcgtcgtcatcaggcgtctccggcgacggctccctagggagcccatccctctcctgccgacgacgaagcctttccaaggcgtctcgtgcccgcgtccactcgcgggcccgagccttcttcgcgtccttcttctccttcctcttctccgcggcgaccctccgcgcagctcggtccaccgcatccttcgggaccggtggcagggaaggcttgtgagcccctacctcctggagacggatgaagagtctcgactgtgagaaccaagggcaatccgacacaagaagaaagaaggggcggacactcaccagggacacacatccgcgatcgggacgcatagagggctgggaaaaggcgccggcctctaacgtccccaccgtgccggctacccgcctgtggaggtcatcggtggaaagggggtccgaggacatctgcgaaccctccaagtcaaccccgacgtcatctcccaaagcggcagccgccgctccgtcaaggggagcaccctccggcgatgaatggcagcaaccacccccgcggcggtgagccctccttctcgcagctcctccagggccttcaaaaggggttggagattcttctgtctgtcgcgcggggttccgtagcgccagttatcggcggcggcggtcaccactcgctgagaaaacgacgggagcctcccatcgtcatttcggagataaaaccatcggcgctgccaccctttgttcgaagacgcgaggatggcagggatgtactgcagcgcccgcgcctgcctcagctagaggatgcagccaccggcccgcaccaccgtcggcgaggcaaaaagctccgcgaagaagagatgggtccacaggtcctagtgggcggcaatccccaagtatccttcacaaaccgccgcgaagatggcggcttgcgagatggagttgggactgaggttgtgcagctccaccccgtagacgtgcagaatcgcccgcataaaacggcttgccggcactccgaacccccgctcgtgaaaggagacgaagctcaccacataccccggcggcggggacggggcggctccgctcggaggggccatccactccggctgcgagtcaccggagagagggcgaagcaaaccatcagcaacaagggcctccaggtcatccgccgtgacggtggagaaaggccatgggtcgcgcggcgaaataatggtcacccggtcggccatcaccaagcagaagaggtggcggcggagaggactgggtgcgcggtttcctttctctagctattccctcgggttgcgaaaacctaagtgggaggcgagcggcacagtaaagaaccatcaccagtctctctcccgaatatataaaggcccaggcgagacccgttcaacacttcgcccgaacccgccgcaagattcaaaactcaaagcgagacgaccgttcctcgaacggctcgcgcacgcacaacggccgccccgcgaaccactcgtcccgtcacattaactctgcggcaggacaggcgacacctttggcgggcgaagcaggcaacgcttcacctccgccatgatgaccgcgtcaaaaaaggtgcgccacgtcattcgatttcgtatccttttccacttcctctttctctctcttgccacagggaccgggaaaggggataccccaaaagggatccttctccgcgaaggaagcgggccccgaacccccctactgataagaggttcgaaggctggcccctcgaaagggttcaacagccacctcagagcactcgggctccgtgcccactactggtcagaggttcgaaggccggcccctcggaagggttcaacggccgcctcatgccactcgggctccgcgcccactactgatcaggggttcgtaggctggcccccgaagggttctgacagccgcctcagagcacgcggagcgagggatgaccctgggtacgttcgatacataaccaaggctcgggctacgctcccgaggtaccctaggacatttccgagaccaacgggaacgattttgtaacggaatcccaccagagggaggcgtcgagccctcggaccccgtcaaaaggggaccgggtccggcaaatcacccgcaggtacttttggagcgcgcctccgggccactagccgacccctaacgaatggggcacgggcgtccactcggattacccgttagcaactcactggagacaccatgttcggcgccctccgaggccaacatggcgctttcccccctcctccttgcggaaaggcgacgcaggggcgtctgtaaaaagccgagtctgtccctgaccgtcctctcgccctgtgcggaggctcgggggctgctctcgcaaacccggctccggccaaaccgttgacagcgtcaacatactagcccgagaacttgggactcgactgtgcacccgggctacagccagttcgcatgagggaacaaccagatcggccgaagcattacgaaacgcaataagacctcgaaggagtcaaaccactcctccgaggcctcgggggctacacccggcgggtgcgctcgcgcgcacccaccggaacgaaacacaaccgagaaaggccggtccccttgcaaaaaaagtgcgacaaaagcctcgaagcgagtattaacactcccttcgaggctcgggagctactgtcggggaccataattaggagtacccccaagactcctaatctcagctggtaacccccatcagcacaaagctgcaaaggcctgatgggtgcgattaaggtcaagactcggtccacccatgggacacgatcttgcctcgcccgagcccagcctcgggcaagggcagccgaccccagaggattcacgtctcgcccgagggccccctcaagcaacggacacaccttcggctcgcccgaggcccaatcttcgccgagaagcaaccttggccagatcgccacgccgaccgaccgtattgcaggagcattcaatacaaggatggcctgacaccttatcctgacgcgcgctcttcagtcgacagagccgaagtgaccgcagtcacttcgccgcttcactgaccgacctaacaagaagacagcgccacctgcatcgctccgactgccgcgccactcgacagagtgaggctgacagcagccaagtccggcctcgggcgccataggaagctctgcctcgcccgaccccagggctcggcccccgtctcggccgcggacgacgaactccgcctcgcccgaccccagggctcggactcagcctcggctccggaagacgacgaactccgcctcgcccgaccctagggcccagactcagcctcgactctggaagacgacgaactctgcctcgcccgaccccagggcttggactcagccttggctcctggagacgacgaacttcgcctcgcccgaccccagggctcggactcagcctcggcctcggaagacgacgaactctgcctcgcccgagcccagggctcggtctcagccttggcctcgaacgacggtcttcgcctcgcccgacccggggctcggactcgacctcggaagacagactcgacctcgacctcggaggagcctccgcctcgcccgacctagggctcggaccgaccacgtcacaggaggagccatcattaccctacccctagctagctcaggctacggggaacaagaccggcgtcccatctggcttgccccggtaaacaaataatgatggcgctccgcgtgctccatgacgacggcgactctcaagccccttacggaagcaaggagacgtcagcaaggactcgacagccccgacagctgtccttccgcaaggctccagcgctcctccgacggccacgacatcacatgaacagggtgccaaaacctctccggctgccacgacggcatgcacttagggctctagctcctctctgctagacacgttagcacactgctacatcccccattgtacacctgggccctctccttacgcctataaaaggaaggtccagggctctcgtacgagaaggttggccgcgcgagagaatgggccgacgcgcaagtccctcgctctctcccacgcggacgcttgtaaccccctactacaagcgcacccgacctgggcgcaggacaacacgaaggccgcgagtttccccttttttgcctgtctcctttccccccttcgtgctccgtctcgcgccgacccatctgggctaggacacgcggcgacaatttactcgtcggtccagggaccccccggggtcgaaacgccgacaatttggttctactaatcaaaagtattgtgaggagtttagcagggtaatgatgtaaaaattcgagatgtctatgatggacgagttgaactacttccttggattccaagtaaagcaactcatggaaggaaccttcatctcccaaacgaagtacactcaagacttactcaagaggtttgggatgaaggatgcaaagcttgctaagacgccgatgggaacggacgaacacttggacctcgacaaaggaggtaaggaagatggttgagattgatcttgttgctcctgcggttgcctatcacctattgccatagtttgcattgcagtcgttggaagctcatcctcatctacatcatcaagatcaatttgctctcttggagagctattagtctcatcaaatacaacatcactagagacttcaactagacccgatgatttgttgaagaccctatatgcctttgtatttgaatcataacctagtaaaaacccttcagcagctttgggagcaaatttcgaatgtctacctttctttaccaagatgtagcatttgctcccaaatacacgaaagtacaaaaacattgggtttgttaccggttagaagctcataagacgttttcttgaggaggcgatgaagatagagctggtttatggcgtggcaagctgtattgacagcttccgaccaaaatcgcgcaggtgtcttgtattctccaaacattgtcctcgctatgtcaataagcgtcctgttcttcctctctactacatcattttgctgtggcatgtagggagcggagaactcatgcttgatgccttcttcctcaagaaactcttatacttgaagatttttgaattctaaaccattgtcgcttcttatcttcttcaccttgagctcaaattcattttgagctcttcttaggaagcactttaaagtaccttgggtttctgatttatcctgcaaaaagaataccaagtgaagcaggaaaacccatcaacaataacaagaccatatttacttcccccaatgctaagataagcaacgagtccgaaaagatccatatggaggagttccagtggtcttgacgttgtcatcacatttttacctcaatgattagttcctagttgcttccctgtctggcacgctgcacaaggtttgtcttctcaaaacagacatcggttagtcctaacacatgttctccctttagaagcttatgaatattcttcattccaacatgtgctagactgtggtgccagagctagcccatattagtcttagctattaaacatgcatctagatcgacattctctttagagaaatcaactaaatagagcttgtcgtacaatacacctttaaaagctaatgaaccatcacttcttctaaagacagatacatcaacatttgtaaatagacaattatacccatatgacataattgacttatagaaagtaaattgtaaccgagcgattctaaggacacattagagattgaatgctcggtagtgttggctatctttcccaaacctttaaccttgtcatgattcccatctccaaagatgatcgtgtcttgggaatctttgtttttgacgtaggaggtgaacattttcttcttcctcgtcatgtggtttgtgcatccgctatcaataatctagcttgtgcccccggatgcataaacctgcaagatgatttaagcttgggttttaggtacccaactcttgttgggtcctacaaggttagtcacataatactttggaacccagatgcaagttttatctctcttgcacttaggccccaaatttctagcaactactgtatcatttttgcacataagaacaaatgaagcatcgtaagtttgataaaagcatggttggtctatttgatgcattcctaggagcatgagaagcaacatgatgaacatggcgcctaggtttattcctaccatgagcatacgaagagctagatgatgcaaacatggcatgtgaatcaaaaacaacatcatgacgtacaggtaaaacatcaggactataacaaccatcatgatgagcaatgttagaggcattcttaacatgggaatacaaataagcatgattctttctaccatgagaagaatgagagctactagccataggagccttccctttctccttgacgagattggaagtcctttggcttgttaagttcttgattcccttttggaaaccaagtccattcttaatggagggatgtataccaatggtataagcatccctagcaaattttaacttttcataatcattcttgcaaatgttaagttgaccattaagatttgcaacctcatcattcaacttaagaatagtgacaacatgagtattgcaagcatcaataacgacatctttacatctattgcaaatagaaacatgatccactgttgaactagcaacatttactttttcaagcttagcatttaaatcaacatttaagctcttaagactagaaacaaaatcattacaagaagacaattcagaagaaaggagttcatttctcttaacttctaaagcaagagattttcagcaataacaagtttgtcatgttcttcataaagaagctcttcttgtttttctagcaacctatctttctcattaaggacatcaattaattcattgactttatctactttagttctatctaaacccttaaatagatcactatagtctacatcgtcattatctgattcctcatcactagaagaagtgtacttgggggtatctcgtgtacgtaccttcttctccttggccatgaggcatgtgtgatgatcattggggaagagcaagtccctcatcatcggagtcggatgaagagtagtctgagtcccactccttgccaatgtttgcctcgcctttcgccttcctgtagtttttcttcttctccttccatttcttttcttgtccttggtcattttcattattgggacattgtgcaattgaaagggaaatagggtttaaaccttttcctaaatgattttggtggttgaatgtccaacacaaataattggactaactagtttgctctagattatacattccacaggtgccaaaggttcaacagaaaccaataaaaagaacaagtcagggttcaaaagaaaggagcaaaaaggaaaacgaagtgttccctggtctggcgcaccggacactgtccggtggcgcactggactgtccggtgcgcccatcgccagcagccttctccaacggctacaatttggttggtggctataaataccacctcaaccggccacttcaaggtgtgggagtccaagcaacattccaagtcatatagttgacatatccaagccctcccaaccacctctattcattgatccatcctatacacaagatttagaccactacaaccaacacaagtgccacaaaagagagagcaagcaaaagaaagcttctcgtgtgagtttagcaatagtgccttgtgagaatcatagagaaaaagtgtgtgctacatcttgtgatcattcgcgcgtggagttttgactcccattgaacttcctccaaagtttggaggcttgtaaagctagcaagagacacctaatagtgtggtgatccttgcggggtcttaagtgatccttgagaacaagaagagctcaccgatcttggtgatcggtggagagagggaaagggttgaaaaagacccatccttagtggactcctcaacggggactaggctttcgagggccgaacctcggtaaaacaaatcacacgtgtcttttgtgtttattgcttgtaatttgtttgttctctctctttctaagttctcttgcgctactctttgctaatattattttgtgttgcttcaagttaaattcacatttagagaagcaactccttggaagaaagaacttgtgttactcctcttcttatctaagccctcttgcattattctccactaacatttctagtagtattgctattgattaaattccgcactctttgaaaacaatactcgttgcaagcaaaggacttagtttttatactccgataattgtgaatcttgttctaaccattaatcaagggatctagtttggatttagaattataattttcaggtttcacctacccacccccctctaggcgactttcaattggtatcaaagctaggcacttcatattgagtctaacaactcgaagtgatggctcaaagaagatcccaaaagaacaagaagacaaccccaaagcaggtaactcttgagatattactttcagattattctaattatgtttcatggtctactagtgtgataaatgcttttagaaccgtagattcacaattagaacaaattttagacaatagtattataccttctagctatgataggaaaaatgcttccgaggaagatcaaagatgtatacgcttaaactatctagcttatgacatcttaagtaattctcttagcaaagaagattatcgtgccttcataatgagatatgatgaatctattcatgatgcgcatgatatttggactagaattaaaaacaaatttgatgagtccaaacatgatagttcatttgatgcttctacttcctttagttcttgtgaaactaaccctttgaaggaagaagaagaaaatgaacgatggagaccaaacgatgaatccacctctccaaaaggtttgtcttccaatttcgattcccacatatgttgtgtggctaatgaaaatgatagtggaagcacaaatgaggatgaggaggatgaaagaagatttatgcaactctacgctcatctaagcctagaagataaggcggtcatgctcaaacttctaaaaagagcgagagagcaaagcaaagctcatcaaatgctagaagatattctctccataaaaatgctaagctttgatgagttgactaaagaacatgaggagctaaagtgctctcatgttaatttggtccaaaggtatgaatctattacaattgagcaagataattctttattttgtatcgctcaattagtaaataggaatgccttgcttaaggaccaagtagaaaagctaaaagttgaaaatctagcttttcaagaaaaatatgatatgcttctatgttctcatgaaaatcttatggatgatcatatcatgttaaacattgctcatgatgttgagaaagaaaacttaaaatcccaacaacctcactcatgcacatgtaatcaaattgaaactatattaccatgtgctaatgcttgttgctcatcaataagcaaatcctcctttgagctagaatttacaggaacaaaagatgatacatatcaagagctcaaagaagaaaatgagaggctaaagatgagcttgacaaaactaaaaaggaagtgcactgctcaaccttctcaagataaccgtgatcacatggtgaagaagcttgagacgggatcaaccgtggcatgcaccaaatcccttgaagaaaatgtcaaggacttgaggattgccaagaggaatgaacaaaagaagaaaatcaatacctctgccaaaagcctcaaccatgcatccatgcaaggtaacatccaaggtaataatcaagccacacttcacactaaaagaagtaagaagtgtagcggatgctttgaaaagggacacttgattatatcatgtccctatattaaaaatagcttgattattaacaaggatgataaactttgttttagatgctcaaagaagggacacttaattaggtcttgtccccatttaaaacaaaaggcatagtgttagaaaagaaaatattcactaaccatgtagcaagcaagaaacaaggaaagaagaaatcgtcaagacttgaagatcgcctttgctacatatgccgaaagaagggacatcaatgcaaggattgtcccattggtaactatcccactcctagcttgtcaattaattctcatgtaactaggcaacccaaaattgtaacttgttctagaaaggtaatgagtttacctagtgctaacacaaaggacatttgggttcctagatctttgttgactaaccttgatggacccatcaagcgatgggtaccaaaatatgcttgacaagctttgcaggagaaggagatgatatgaagctttggggtgcttgagagagtcaattcaattcttattaactcaagctatcaatcttcaatgatctatatgttggggacttgtccttaaatgctatgaattaagaacaaggcaacacagaaattgttaaacgttaaagtccttcgtccttcgaagcattatctcccttgggatataatgagtttcggacgaaggttatgaaggacataccttcataagcacaacaaataatgaagaaggattcttataaagtatgaacactaaatattattattaattcatttctattttattattatggaaaaaatagaaatgataacgaattacaaatgtaccttcggcttgaaagaagacaaaagtacaagcgtgacacaaaagcaaatgccaagtcagcgtgaacagtacgggagcactgttcatctatttataggcacgggacgcagcccaaagtaaaattacacccatgccctttacatttgctaataactctatagtaatccatcgaggtctaaatagccttttcatctttaagtcggtttccttttctgctatcatgccgaaactcccctgcgcatagcgtcggctctgctccatccttcgtatcccttgtgcttcttcacactgtggttttgacccaagtccgaaggatctaagtccgaagttacctgctcatgtattatactccagaaacattgttaaatcatgtttttgaggaccttcggaagccgaaggcccccaacagtagcccctcgcaatattaatttgttagaatgataaattcagattgcgatacggacgaaggccctaagccgaaggtccgaaaaaacaccttccctttgctagaatagcaacattcaattacaagcggggctgtaacacctactttgtaaatagagtctaagcagagaaattgtattccgtatacatctatgagttatctatgtttctcatttcatgtgaacaccataattaaacaaataaataattaacaaaagacactcaaataaatcatgcatcatgctggatattgtttttgtgtgtgcatttcgtgataaggaatatagtaacaagtcaaaagtggaattcaaaacttaaaagagattctaaaatttaagaagagaagcaaacaaatattatgtgatataaaagtataaataatatatatctccaaatggaaacttatcatgacacaatataaaataagagtgaattggccacaaggttgaaattaatttggaaatttgaatttgaattggaaaaagaaggaaagaaaaataaaaaaggaaaaagagaaagaagtaaaaccctaattgggccaccgggtgccaattcggcccaaaacgcctctccaaccacgcggcccatcacctcacacgcgcgctggggtctggctcggtggctccatctcacagcgccacttacacgtggggtccattcgtcagtcctctcccaccttcaaccgatcgcgtgtcgctcgcctacccgcgcgagaagctcgccgctgggaccgggcctgctctgagcgacagactcgttcgccgcgcgatcttctcggacgcccggatataaacgcggccgccgttttcccagtccatgcgatccgaagatcggcactgctctgccgcgaacacagttaggagagagagaggaagcagcttccccgccggtggaatccgccagcgccgggagtctgcactcgtggtatggttgtgggtgttcgcgggcctctgttgagatcgtccgtgccctcgttgtgctcgattgtggacttgggcgcttcgaattgctcaccggacgtcgagcgccctcaccaaatcactgagcgccgcgagcagccgcgttctcgccttatctctcggtatggccctctccactagcctcgcgttgtctctagcatcgtgtatcgcggttcagatcataacttcaggggcgggagcgcgtagtcgatttttccggccatggtgtccgccgcgggctcgagcgcgctgccgcgctctcccgtcggggttagggcgaagtcctctgcaccgtcggatccgtgggcgacagttcggattagatgtaagccaaatccctagcgccctgaatcttggacagttagatcgtgatctcacacgttagattagatcacgtcacgttaaactcggagccatcgtatctagatcgggcggtccagattaaagaatacccgtttgcgcaggcagttttgttaaagagccccctggtaaatagaaaatcaatccgcagtccctgcgcagggcggattgtctcttagaaaatcttatcccgagcaccctaggtttctctgttatagtgcgcccagtccagagctgttttaatttgattaaatgaattggaaatttgatttttaagatgaaaaaaaaccctataacttgtgaaattcatagaaaactcatatgaactccaaattaacccattacagtttataaaattttgtaattttattatctaccacttagagcctctgttttgtcatgaaaacaatattaaaatttatttcccacttaatcctattttaagcacataaatcctttgaaaattcataacttaaaatctataaccccaaaaattatgattcctattcctaggattttattttaatatgtagaatattattatgtatgttgtttacatgtttggtgtgatgttaattttttcctatatattgtgcttgtttgtattgtagcgagtagaagagcccgttgctgaggatcctggtgagcagcagattgaagtagctgagcaggagctcattgaaggcaagttgtgcccttgaccactttttacccaataatgttctttaatatcacttattcatgcataggttaattttgatgggacccgataggtcaccctagattgtttatctcattaccttgtttacccccgaatcacttgggtagtttgctattgctttacatggttttgggataatcatttattatatctatgttccaattatttttgttattctatttatgttcatgtcaagttcattaatgttaattggaacatagagcttaacttgagaaacatgtgccaccataagggattaatgggacgcccttggctgactaattaggaaagctagtggaagactaccttacccgaaaggggcaaggacagtaggggagttgcatgcaaggaggttctcgggttgatttagctgcgatggcagtcagacgggggattcttgcaagtgctcttcccataaactgtagcgggttttcggaagctagtggaactttgtaaaggcctcgtagtgttgccctgcctcgcctcctaggtataggtgtatgggagtcacgaccccttggcagatgggtaacatgacttgtgggtaaagggtacaacctctgcagagtgtaaaactggtatactagccgagctcacggtcatgagcagctcaggactctctgatgattaaattatggaacttaaattcaattttgtcatttgcatatgcatgggtttattattaattttgttcaattactttacttaaggtttggtatttacttacacttagtaactgctaataaaattttgaccaactacttaaaagcaatgctcagctctaacctctatcattgattagccttacacatcacatgaactcccacctttgtgagttcatgtccactggttccccataacttgttgagctatgatcatgtgtgagctcacccttgctgtctcacaccccccccacaggagaagaacaggtggttcaggaggagccataaggcaaggagtttgatctgatctaggtggcgtttctcagttgacattggcgtcgacgatccttagttcgttttatgtttatccttttattttgtaataagtcttccgctatgtaataagtactttgatgttttatgacatttatctctatacactctgttattatatatgttgtcttcttggcgcatgtatgagatgcacctagctttgttccttaaagccgggtgtgacagaagtggtatcagaggaaatgttgactgtaggatgaaacctagatagaaatggacaacccttacctacttaccttactctaattcattctatgcttatcttatcttgatcctgtctcaccttttgctatcatactctgattactcttaccttatctactctaagacaagatggatttcacaccttggaatcctacaactatgaactttttaagagataggagacctaagacaaaattaaaactattttctctatttaaaaatgttggttgattgttctgatgataaatgcttgatttgcttctttgattgattgaaacattatagttgggcatattagcatgtaccaccataaggtaatgaattagctttagtaggcaacacacttagctaatgaatcccccaaagtaacataattcgtaatcacctgccttgtctacaattcttcctttcttaccctgtgtttctaacccagatgtactacccctatagtgttagaagagagcactatagacgtgatccttggtatgtcatagttaagaaagacaaaggcagtatatacactgtgctaagggaaccgtagaactcaccagttccaaagaagaaagatttgaagttgaaattgcggtaactaccaccatcagattagcggcattcttagtagatgggaagtttgttggtgtcaacatccgtgtggttagagatttttcggatgtattcccaggaatgccaccagatagggaagttgagtttgtcattaatctcttacctaagactgcacctaattctaaacggccatacatgatgtccgtagaagaactaaaggaacttaagaagcaattaatggaattacaagaggctaggtacatttgtctgaattcttcaccttgtggagcgccgattctaattgtacagaagaaagatggatcacaagggatgtgcgtggattataggacccttaacgatgtcactgtgaagaacaagtgtccattaccccgcattgaggatttatttaatcagatgagaggtgcaagggtattctcgaaaattgatctccgatcggattactatcaaatgaagattaggccatcggatattcccaagacggatttttcgacccgatatggtttatatgagttcatcgttatgtcatttggactaactaatgcaccagctactttatggatcagaagaataaggtgttcatgatcgagacagattcgtcgtggttttcatcgacgatatttttattttattccaagagtgatagtgatcatgaggaacatctgaaattggtgctacagaagctacgagataaccagctatatgccaagttcagcaagtgcgaattttggattggcgaggtgccatttcttggtcatattatttctaatggaggaatatcagtggatcctgctaaggttaaggagataatggagtggagagtacccactacagttactgagattcgaagtttcttgggactagcaggatattatcggagatttattgaaggattttctaagattgctaaacctatgacttcgcttttggagaaaggaagagcatttaagtgggacgagaagtgccaagacagctttgatcaattgaagaaaagattgatgtcgccaccagtattggttatgccagacctacagaaaggatttgatatctattgtgatgcatgtggccaaggcttgggatgtgtgctcatgcaagaaggacatgtgatcgcctatgcttctcgtcagttacggagacatgaattgaactaccccactcatgacttggaattggcagccgttgtgcatgcgcttaagatttggagacattacattatgggaaccaagtgccaagtatatacggatcataagagtttgaagtatatattcactcagaaggatctcaaccttaggcaacgccgttagttggagcttattaaggattatgatttggagattcactatcacctgggcaaggcaaatttggttgcagatgccttgagttgcaaggagcatgttcattcagctattgttgcccagctacctgatgagattgttgaggatttcaggagacttaacctggggatagttgctcacactgaaggagttactattgatgtggaacctaccttggagcaagaaatccgcaaaggtcaaattggtgatgccaaaatacaagagattaaggatctaattactgaaggtcgaggtccggaattcatggaagatgagcaaggcactgtatggttcaaggacaggatgtgtgttcctgatattgaaagccttcgagagactatattgaaggaggcccatgactcggattattctattcatcctggtagtaccaagatgtatcaggatttgaagcggaaatattggtggtatggattgaagagagatgtagctgcacatgtggctatgcgcgatgtgtgtcaaagagttaaggctgaacaccagaggccagctggactattgcacccactgaagatacccgagtggaagtgggaagagattggtatggatttcattactgggttgcctcgcacccataaaggatatgatgctatatgggtgattgtggatagattgactaaagtctcatctagcagagttatatatggctcggattgtgtgtttacatggagtaccaaagaagatcgtgtatgatcgaggttcacagtttacctcaagattttggagaagctttcatgagaacatgagcacgaagttgaatttcagtacagcttatcaccctcagactgatggacagactgaaaggactaatcaagttctggaggatatgttgagagcttgtgcccttcagcatggaggaagttgggatatgttggggacttgttctcaaatgctatgagttaagaacaaggcaacacagaaaatgttaatcggtaaagtccttcgtccttcgaagcattatttccattaggatataataattttcggacgaaggttatgaaggacgtaccttcataaatatagcatacgatgacaaagaataaatcataaggaatatgaaggataacatagacaattatatattattatcaacttatttttttgcattattattatgaagaaacagaaatgacatcgaattacaaatgtacttacagcttggaagaagatgaaagtacaggtgtgacacaaaagaagatgccaaatcagcgtgaacagtacggggatactgttcacctatttataggcacgggacacagcccatacaaaattacattcatgccctttacatttggtaataattctatagtaatccaccgaggtctgaatggccttttcatctttaagtcggtttcattttctgctaccacgccgaagctttcccgctcacatcttcggcgctgtatcaaccttcgtattattttgggcttctcctactgtgataccgactcgagtccgaagatacctgttcacacattatactccagaaatactgttaaatcatgtttttgaggaccttcgtaagccaaaggcccccaacagtagcccctcgcaatattaatttgttaaaataataaatttagattgcgacatggacgaaggctttaagccgaaggtccgaaaaaacaccttccctttgctagaatagcaacattcactgacaggcggggtctttcaattttcaacgcactaggcgtataaataagagcataccgcaagctcatttggcacgctctcttgccatctgctctcgctcactcaatttttagctcttgcgcaccaagatttgcttagctttttaagttttgaagcttcggcatttgaaaacagttttttagtgtttccgaagatgtctgaagataagaaggctgctgccgagatgaagctgagtctctctgaagagaagaatctggggtttcttatagcaatgtcgaagaccaatacagaaaaaatcaccaaagagattttagaaggtttgtctgaagatactgatgacagcgacagttatgatgtggatagtggtggtgaagactccgaagatcgcccttggcgaccaagccatgcggttttcggcaaatcaagtatcaaagaaaatcatcttgtcaacatgagaggaaggtatttccgggacttgtccgttgtgagggccgacgaaggagaaaagacttttccgagccctgaagaaaatgaagtcgtagtgtaccgaagctttttgaaagctggacttagatttcccctgagcaactttgtcgtagaggtgctgaaaatattcgaagtctatcttcaccaacttacccccgaagcaatcataaggctgaatatcttcgtgtgggtcgtgagaagccaaggtctgggacctgatgcgaaaagtttctgcaatatacacgaattatcatacgagacaaaaccttggggtaaggaacagtatcacaataattttggctgctacagtttcgtttctcggtctgggtcaagttgtcccgtgccaacctttcggaagagatggcccggcgactggatgacagaatggttttatgtgaagaatgacctgaaagtacaagaagatatcaaaggtataattatgcgccccatttggcaaagcttcggcctacggaggccgaaggttgaaatgaatgaagccgccgaagaatgccagagagccttcggtgttatttgttcttttattggaacgagagatttagtacaagagcatattgccttcagagtatggccgcttgcggaaaaatgggaaatgccgcaagaaaccataaaggaggctgacgaaggtggacttatcaggctgaagtatactttcaagttcggagataaattcgttgagccagatgatgactggctaaaaagcattgaaaatttaagtgatgaactgcttggggcttactcaaaggccgaagatactgcattgtcagcagccttcggaggccgaaaaaagaaaagactgaaccgggtgtttgacgcaatcgggttcgtctaccctgactatcgttatcccattcgagggcagaaaagaaaaaacacaacctctgcgaaagaagaagctgcaacttctcctagtgagccagcaccgaaaagaaaaaggataaaagtcctcacacatcggccacgctatattgaaccagcctcggtgcctgagttcgccggagagacctcttcggccaccgaagctgaaaagccaatcaagccaaccttgctgccagaagtcgcagaaatggctgaagcgccaacaaaaacagaattagaagaaccaaagattttgttatcagaaaccaaagagatggccgaagcgccaacgtcagaaaaaatggaagaagcaaaaggatcagctgaaggatcaaaaatatcagaagttttaagtccttcagcaaatgttgagacaacaaaaatccaaaaggggccagcggtgactccgaaaagaaagagaatggtcaatgtgttagatgttctggaaacaattaagtcttcaagcacaactccgaagaagactattgcaacttccgaagcgaaaactgaaatttctgatactaaggctctagagcaagaaactgaagctgaagctgagccctcagagcccacgaaagtaaaatccttggaaaccgaggaagaaagaataacggagccaattcttgttgaagaaatcagtgctattgcccccgaagcatcccccaaagtccttgattatattgttcgtcatgcttcgggaaaaaattatcagaaaaagaaaagcaagaggcccaactttatgcccaaaaactgaagtatccaaagggggcattaatattcaacggcagtggagaagaagactttttgtattgtctccctgacagcaaggagatttctgtctgtcgggagatgagcaagagcttcggattcccaacactagaagacgggctctcggtgctgtcgaaaaacgaactggccgacagcctggcatacaatagcttaaaggtgcaagaaatgatatctttgtattttttcttgagaccaaaatttttcgtttgcttaaatctattgatgcacacacatttttctttgcagggccttatacttagcaatgccctcagggcccaaaaagatgccgaagacgaagggtgcgctttagccctgagcaaccttcgttccgaagtaattgaactgaggaacgaaggtctcgaaaaagataaaatattacattcattgataaatagaataaaagaagacgaagctacttttaaaggtcaagctgaggctcagaagcgtgaaattgaagatcttcgaaaacaactggccagagccaaagaggaacgcatacttgaagaaacgaagcgagaacttagcgaccaatgggcaaatcatttagagggaactgttgaagagcttcgttcgtccaagaaaagatgttataacaaatctatggagtgtgttaagaagttgaaagctagcttcgccagcgtcggcgcattctcgagcgaagaaaactttacaagaggcaaccccgaaggtcccatcgaatggattactcacgaagctgaggccttcgaggaaattttaaatagccgcggagacatatgtgctttctcgggtgccaggggaattgccaccattttggagaaaaagggctgcgagcatgtaaagattttagcgcaatccgaagctaccttgtccttcgaagatgcaagagatccttcagccgaagctagcatggttggtggaaaatttttcaccgatgtctgggataatggtggccgagaaatggcccgagaaattatccaaaaaagcgaaaagggtattcacgatgctagagaagtagctgaggctgctgaaaaaagcgcagagcccgaaaggcaaataggtattaactaatggtttttattgtgttgtaatttttggttttaaactttgttcacaatttgtaatagcaatgtagccgtatcctatcctccttcagatcctactaaagcgtctccgggccctcacccgaaaggagatgacgaaattaaaaagatggctgaagctatcatggatgaagttgttgatcggcttctgaacgaagctgcggaagttgttctgagagaagattaagtactattgtaaaaacttctgaaatataacatgtgtaacatcttgtagccctaaatataatatacctgtttttattgttcaattctttacgatgcatgaaattttacatacgtaccgtttttgagtcgttgacgaaaaaacaccttcccttcttttcatgcttcgtgaagaagaatttttatttatcacaacaatatccgtagtgctctgatgaataatatccaagcttcgtgaagatattttccgaagctacacttccgaagatcaatagtgtatctgcttacgacttaacatgattttctcctttttaaaaacattcttctgaagatcaatattgtgtccccttcttgtgccatatgcagcatgatgtatgatgcttatgctatgcgaaatgatgtaatgatgttatgctatgtaagatggtatttatcccgaagacacacgcacatccctgcgataaaacacataatttttttgaatcagcgttaactttttgctataagcctcccttaggagcttcttcgccttttacttcagcggaatcagcgtttatttttcgctgtaagcctcccttaggagcttcttcgccttttactttcagcggtattcgcgttgacttttcgcgcttcgccttttactttaggcggtatcagcgttgacttttcgctgtaagctctgcattccctttggaacgactttggagcagaaaacttacactgcgctccctttggaacggctttttatgacttcagcaaacttactctgcgttccttagaacgactttttgttgcttcgaagaatttttgataattcgaaggtcctccttgttatcgcaaatctttaagctttaacaacttaagcctgtgaagaaaatatattttccttgtggcaaacaacgaaactattacatgaaatttgaaaaatgtcctttattacacagaaaataaaactgaatgaaaaagactaatatcaaggtaggatatttgtcaatagatgtgcttcgactctggcacagtgctgttgactgtgcgagcttcggactgttctctgaagtccctttggtgtggagcatattggctcccttctggctgttagccttgttgcagcggaggtggaggcggaggctgttgccaggaagcttgaggttgactcgccgaagcaacagaaactgcagggtggttgcctacatattctgggatgtaaggcgaatgatatgaagcagtgtgcatgacctgcttcggctgagcctgttgtgccgcagcttcggctatttccttttgcttctggatggtaacatggcacatcctggtggtatggcccttgttctcaccacagaacaagcaaaaaattcttcttggttgatctccaaatcttccaccgaagcccctggcgcctctgcctcttggagctggtggtcggaaggagccttgctgttgccccgaagcttgtgaggagcactgtggcctttgctgctggctccccttatcatcattttgagcagagttatggattgacctaacgtgcctcggatagaatcttcctccgaagcccctggtcatttcagaaaacctgaaagcctcctcccttctttgacgaaaatcattatcggcccgaatatactcgtccatcttctggagcagcttctccaaagtttgaggaggcttcctagcaaagtactgagctgaaggtcctggccgaagccccttgatcatggcctcaatgacaatttcgttgggcactgttggtgcctgtgccctcaaacgcaagaatctccggacgtacgcctgaaggtattcttcgtgatcctgggtgcactggaatagagcttgagcagtgaccggcttcgtctgaaacccttggaagctggttaacaacaagtccttcagcttttgccatgaagtgatcgttcctggtcgaagggaggaataccaggtttgagcaacactcctgacagccataacaaaagatttggccatgactgcagcattgccaccatacgaagatactgttgcttcgtagctcatcaaaaactgcttcgggtctgagtggccatcaaatatgggaagctgaggcggcttgtaggacggaggccaaggtgtagcctgcagctcagcggacagaggagaagcatcatcaaaaacaaaattcccatgatggaaattgtcataccagtcatcttcgttgaggaaaccctcctgatgaaggtcttggtgctgaggccttcggtgttgctcatcctgagtgagatgacgaacttcttcagaggcttcatctatctgcctttgcagttcagctagcctggccatcttttccttcttcctctgcacctgttgatgaagcatctccatgtctctgatttcttggtctatctcatcctctggcggtgtcgggctaacagccttccttttctggcttcgggcctcccgaagggagacagtctcctgattatggtccagcggttgcagagctgcagccctagttgctgaagctttcttcggcgccatagcgaaggtttatgatcgccgaaggtgttcaaaaactcaaagagtggaagtgagttcaccggaggtgggcgccaatgttggggacttgttctcaaatgctatgagttaagaacaaggcaacacaaaaaatgttaatcggtaaagtccttcgtccttcgaagcattatttccattaggatataataattttcggacgaaggttatgaaggacgtaccttcataaatatagcatacgatgacgaagaataaatcataaggaatatgaaggataacatagacaattatatattattatcaacttatttttttacattattattatgaagaaacagaaatgacatcgaattacaaatgtacttacagtttggaaggagatgaaagtacaggtgcgacacaaaagcagatgccaaatcagcgtgaacagtacggggatactgttcacctatttataggcatgggacacagcccatacaaaattacattcatgccctttacatttggtaataattctatagtaatccaccgaggtctgaatggccttttcatctttaagtcggtttcattttctgctaccacgccgaagctttcccgctcacatcttcggcgttgtatcaaccttcgtattattttgggcttctcctactgtgataccgactcgagtccgaagatacctgttcacacattatactccagaaatactgttaaatcatgtttttgaggaccttcgtaagccgaaggcccccaacaggataaaagtctaccttatgctgagttctcatataataatagctatcaggccagtctgaatatgtcaccatttgaagctctatatggcaggaaatgcatgactcctttgtattgggatcaaactggagaaagacagttctttgggcctgaactgattcaagaagcagaagaacaagtccgtataattcgagagaatttgagggtagctcaaaccaggcaaaagagctatgctgataatagaaggaggccactggaatttgaggaaggagattatgtgtacctcaaggtgtcaccacttcgtggaatgaggagatttaaagtcaagggcaaattgtccacacgctatattggaccattcttgatctttaggcgagttggggagatggcataccaactcgagttacctgctaatctatctgatgtgcacaatgtatttcatgtgtctcaacttaagaagtgtctccgtatccctgaggatcagttaccaatggaagagctcagtgttcagggtgatttgacttatacggagtatccgatcaagattcttgacacattgactcgagttacaaggaataaggtgataaagatgtgtaaagtgcaatagagtcaccatggcgaagatgaagcaacatgggaaagagaagaagagcttcgcatagattttccccatcttttccctcgttcttcctaaatctcgaggacgagattatttttaagggggtaggatttgtaacacctactttgtaaatagagtctaagcagagaaattgtattccgtatacatctatgagttatctatgtttctcatttcatgtgaacaccacaattaaacaaataaataattaacaaaagacactcaaataaatcatgcatcatgctggatattgtttttgtgtgtgcatttcgtgataaggaatatagtaacaagtcaaaagtggaattcaaaacttaaaagagattctaaaatttaagaagagaagcaaacaaatattatgtgatataaaagtataaataatatatatctccaaatggaaacttatcatgacacaatataaaataagagtgaattggccacaaggttgaaattaatttggaaatttgaatttgaattggaaaaagaaggaaagaaaaataaaaaaggaaaaagagaaagaagtaaaaccctaattgggccaccgggtgccaattcggcccaaaacgcctctccaaccgcgcggcccatcacctcacacgcacgctggggtctggctcggtggctccatctcacagcgccacttacacgtggggtccattcgtcagtcctctcccaccttcaaccgatcgcgcgtcgctcgcctacccgcgcgagaagctcgccgctgggaccaggcctgctctgagcgacggactcgttcgtcgcgcgatcttctcggacgcccggatataaacgcggccgccgttttcccaatccatgcgatccgaagatcggcaccgctctgccgcgaacacagttaggagagagagaggaagcagcttcgccgccggtggaatccgccagcgccgggaatctgcactcgtggtatggttgtgggtttttgcgggcctctgttgagatcgtccgtgccctcattgtgctcgattgtggacttgggcgcttcgaattgctcaccggacgtcgagcgccctcaccaaatcactgagcgccgcgagcagccgcgttctcgccttatctctcggtatggccctctccactagcctcgcgttgtctctagcatcgtgtatcgcggttcagatcataacttcaggggcgggagcgcgtagtcgatttttctggccatggcgtccgccgcgggctcgagcgcgccgccgcgctctcccgtcggggttggcgcgaagtcctctgcaccgtcggatccgtgggcgacggttcggattagatgtaagccaaatccctagcgcccagaatcttggaccgttagatcgtgatctcacgcgttagattagatcacgtcacgttaaactcggagccatcggatctagatcgggcggtccagattaaaggatacccgttcgcgcaggcagttttgttaaagagccccctggtaaacagaaaatcaatccgcagtccctgcgcagggtggattgtctcttagaaaatcttatcccgagcaccctaggtttctctgttatagtgcgcccagtccagagctgttttaatttgattaaatgaattggaaatttgatttttaagatgaaaataaaccctataacttgtgaaattcatagaaaactcatatgaactccaaattaacccaatacagtttataaaattttgtaattttattatctaccacttagagcctctgttttgtcatgaaaacaatattaaaatttatttcccacttaatcctattttaagcacataaaacctttgaaaattcgtaacttataatctataaccccaaaaattatgattcatgttcctaggattttattttaatatgtagattattactgtgtatgttgtttacatgtttggtgtgatgttaattttttcctatatattgtgcttgtttgtattgtggcgagtagaagagctcgttgctgaggatcctggtgagcagcagattgaagtagctgagcaggagctcattgaaggcaagttgtgcccttaaccacgttttacccaataatgttctttaatatcacttattcatgcataggttaattttgatgggacccgataggtcaccctagattatttatctcattaccttgtttacccccgaatcacttgggtagtttgctattgctttacatggttttgggataatcatttattatatctatgttccaattatttttgttattctatttatgttcatttcaagttcatcaatgttaattggaacatagagcttaacttgagaaacacgtgccaccacaagggattaatgggacgcccttggctgactaattaggaaagctagtggaagactaccttacttgaaaggggcaagggcagtaggggagttgcatgcaaggaggttctcgggttgatttagctgcgatggcggtcagacgggggattcttgcaagtgctctttccataaactgtagcgggttttcggaagctaatggaactttgtaaaggcctcgtagtgttgccctgcctcgcctcctaggtagaggtgtatgggagtcgtgaccccttggcagatgggtaacatgacttgtgggtaaagggtacaacctctgcagagtataaaactggtatactagccaagctcatggtcatgagcagctcaggactctctaatgattaaattatggaacttaaattcaattttgtcatttgcatatgcatgagtttattattaattttgttcaattactttacttaaggtttggtatttacttacacttagtaactactaataaaattttgaccaactacttaaaagcaatgctcagctctaacccttatcattgattagccttacacatcacatgaactcccacctttgtgagttcatgtccactagttccccacaacttgttgagctatgatcatgtgtgagctcacccttgctgtctcacacccccacaggagaagaacaggtggttcaggaggagccacaaggcgaggagtttgatctgatctagatggcgtttctcagttgacattggcgccgacgatccttagttcgttttatgtttatccttttattttgtaataagtcttccgctatgtaataagtactctgatgttttatgacatttatctctatacactttgttattatatatgttgtcttcttggcgcatgtatgagatgcacctagctttgttccttaaagccgggtgtgacaggggccctcccacttgcaacgcactaggcgtataaataagagcacaccacgagctcatttggcacgctttttgccatctgctctgcctgctcaatttttagctcttgcctacaaacgctttgcctggctttttagattttttagcttcggccttaagagcacattttcaacattttcgaagagatgtctcaggataagaaagttgttgttgaaacgaagctgagcctttctgaggagaagaatcttggcttccttgaatcaatagcaaagacaaatacagagaagatcactatagagattttagaaggtttatctgaagacaccggtgatagtgacagttatgatgtggaaagcggtggcgaagactccgaagatcgaccctagcgaccaagtcatacagttttcggaaaatcaactattaaacagagtcatctcgacaatatgaggggaagatattttcgagatgtgtctatcgtgtgggctgacaacagagacaggacttctcctgctcccgaagagaatgaagtcgtgatcttccgaagcttcttcaaggctgggcttcggttccccctaagcaattttgtggttgaagttttaaaatatatcaggtttaccttcatcaaattactcccgaagcaatcattagaatgggaatcttcgtctgggccgtgagaagccagggcttagagccaaatgcaaaaagtttctgcagtatgcacaaactgttatatgagacgaaaccctggggcaaagagcaataccataacaattttggctgctatagcttcgtcgcccgctctggctcaagctgccccgtgccaaccttccggaaaagatggcctggggactagatgaaggaatggttttacgtgaaaaacgatttaaaggcacgagaagacattaaagatattatcatgcgtcctatctggcaacgcttcggccttcggaaaccgaaggtggaaattgatgaagcagccgaagaatgccaaaaagcctttggcatagtttgctctttcatcgggacaagagatttagtacaggagcacatagccttcaaagtgtggccacttgtagagaaatgggaaatgccaaaggaaactatcagcaagtctgacgaaggtgggctggtttggttgaaatacaccttcagatatgaaggtaagtttgttgagccagatgatgattggctgaaatgtatcgaagctacaagcgatgaactgcttgggccatattcaatggcagaagataacgcattatctgcggccttcgaaggccggaagaagaagaggctgaatagagttttcgatgctattgggtttatgtaccctgattaccgctacccgtcgcgggggcagaagagaaagagtgccgtttccaggaaggatgctgctccagctgctccaagcgagcctgcgccgaagaggaaaaaggtgaaggtccttactcaccggccgcgatatattgaaccggctgaagtgcccgactttggcggcgagacctcttcggctactacagctgaagaatctgccctcacacagaggaatgaagaaccggctacaatgccgaaggcatcaacagccaaatcaggtgagccaaaggccattagtattgaagaggcagaggtcgaaaagacaaaaatattagaagttataagcccttcggcagaggtgacagtgccaaaggtgcaaatggatcttacaacgacccccaagaggaaaagaatggtcaacgtactagatgtattagaaaaaataaagacttcaagctctactccagggaaaacagccgaagcttcaaaaacgcgaattgaaacaaaacagactgaagctgaagctacacaaagtcatgccgagaccgaagctgggccttcagagcccgccaaggagaaatccttggaaatcggagaagaaaaagcggaaaaggaatctgcagaacaaattctgtctgaaaactgccattcctattcccgaagcatcttccgaagctcttgattatattgtacgacatgcttcgggaaaaaggttatctccagaagaaaagcgagaaactcaatattatgcccagagactgaaatatccaaaaggggcattgatattcaacggcagcagagaagaagacttcttgtattgtctcccagacagcaaggagatctctgtctatcgggagatgggcagaagcttcggattcccgatgctagaagacgggctctcagtgctatcaaaagatgaattggccgacagcttagcatacaacagcttaaaggtgagggaataagatttttgtacttaaaaacaaaatttttttccatttgcttatacttaataccgcactccttttggagggccttattcttaacactgaccataaaggattaacacgggcggactgtccacccaagcaggttgaacggtccaccacctagaagttagtattgtccaagctcaaccctcggatagtccgtagtacaaacctaaaaaaacaaacaaaatccataaatatcgcaagtaattcagcagaccctcgcatgcaaacaaacaatatccataaataccgcagatctcaaaatcccttcaaaacaacccattaattatgtgcatgcatatccgagaatagaaattgtggatgtgcccacgtgcgtaacgcgccagcctacgtgtgctcgagctgtagatgcctgaccgcgtgggagatgctcgactcgggtctcctgcgttttattagaagccctaagctcacaatatcccatatatatatatactgtttttatatattacacctgagtgcatttaatatagagaatgcacccaggccgaacctacgtgcctgtaaagcccaaaatttggtaggaaaaaaatatatcatgaaataataaaaaaagagataaaaaaaatatatacaataagtgtggtaagaatttttttaagacctttgaaatctattaggattattcctcctcatattcaaataataatattaaattagtaagtaactgataaattgataaagtgaagggattcttatataaattatcccttgttgaagctgataaatattatataaggataaatattagagcatcaattaatcgaggttatgcaattgaaaatatttttttctcaaaataattatatggagcaacatatccaaaagtatttacttatgtaggataataaacaaataaataaataataaataaatatatactttgcattatgttggatttttgtgctgtgcatttaactgtaaagttgaatttccaaaaccatggttgaatttgaacttgaaatcaaatttgaaaaaaaactagagaacaaaactgaaatttaaaagaaaagaaatggaaaaaactcacctgtagccggtacatgggccgaaaccatacctggcggcccaagtatttcccactgcgcagctcatgcaccaacgcttatggcgttactgcctccgccatgtgggcccgctcggccagggatcggaacgtccgtgtgatctgaagctgagactgatgtgtgggccacctccgtcagcttcatcttctcaaccggatcgcgcgacaatcgcggctgagaccaccgctccgcgcggactccccatctggcacgcttcctccacggatttcgccaacggaaaaaaaaccgaagccgctttgaccaccatggccaaacgatagctggcggatggggcccactaccaaccccttcccccacgttcatcagcttcgcccgccatgccgaggaacgcggccagcgcgattcctccgccacgaattcgcgggcgtggattgactcggcctcccgcccggactgagtataagtagctcgcgcaggtgctcccttccctctcccttctctatcaccaatttcttgtcaccaccagacaccgccgcgatgcgtaggtcgccgccgccgtggacccgcaccttcagcgacgctctggagttcgcaagggtccggatctactcgttggggttcgtgggtcgcgtatgaggaaggaattgggcaaacgtgcccaggggctctagtgaattcctcgccgtcgaagcacttccgccgtgcgccgcgggcaggacggaacttcgttcaatctccggtaagacccccccagcgtactcgccatcaatttcttatcgcgtagatcgtctcagattaggggattggtgctcttctgcgcggattctgtacctcgccggcgggagccgccgcgcgggctacgggcgccgccgtgctcagccagcagggtaggagaagacctcctggccgttggatcggttaggggcgtctaggattagatcgggatggcggtaggatattgaccgcagatccgagaagcaacggtttagattagattatgtataccccttcgtccacatagaatctcggtcgtggatcacgtgatcgacggttctggatgagcactgtttcattgaatcgacgaagttgatcgtggcccttgatttctaatcctgcggcgggggatccaccgtaacccttcgtcgtggcactttcgcaaaagagaccccgtagttttatagattgaacccgccgtccacccgtgacattggattgggtctcagatttcttgcgcaaaagtccctgtggtttcctgttttagtgcgcccagtccaaggagttaagaaatcagataaaagattttagaaaatgattttaaatgcaaaaataaaggctagaatttgtttaattcataagaaattcatatgatgtccaaatcaatccattccaattcccataattttgtaataatattttctatcaactagtgtctctgatttaacatgaaacccatattagaatagatcactcaattaattttgtatcaaatacataaaatcttcatagatccgtaacgcctttgttttaattccgaattgactcgttctagttgcgctagcttcgtataaatatctactacacaatagcagcatttattatatgatattccatccttttattatcgggttaatccatgtctattggattaacttatttaatattaatatataatattttaattttatggttataatttaactagataatctttaaataatgacttagattaaagttgagttaattatttatataataaattctcaaatgatttatactaaccaatttataatatagttaatgtcttaatcacataaatcttctataaaatcataactccttaatcgtagttccgatcttagtggttcttgtttctacaatctgcgtagaataatattatacaatttattcttatgtttggtgtgatgttaattttgcctatacactgtttgtctgtattgctacgtttagcagtgaggttacgagtcacctgaagagcaagttggtacctggaatctcaagtcccaggcaagttgtgcccttgatcacttatttttacccactcatgttctaattaatcataatgatctgcataggttaattttgatgggacccaataggttaccctagtttgattatctttataccttgtttaccactgaactttttgggtagtacttgctagtgctttatgtggttttgggtatgaagatacattattcatgatcacacttttattatctgtttattatcattgttcatgataagatcattatgttaattggaacatggagcgaccacccgggaaaatagtgctaccacaagggtataatgggacgcccttggctgattaattaggaaagctagtggaggactaccttacccgaaaggggcaagggcagtaggggagtggttagtgtagggaggccctcgggaggattttgctgcgatggcggtcctgcaagggattcctgcattggagcttcctataaactgtagcgggttttctgaagctagtggaactttgtaaaggcctcgtagtgttaccctgcctcgcctcctcggtagaggtgtatgggaagtcgcgatcccttggcagatgggtaacatgacttgtgggtaaagatgcgcaacctctgcagagtgtaaaactggtatactagccgtgctcacggtcaagagcagctcggaccctcacatgattaaattatggaacttaaactcaatttgtcatatgcattgcatcgcaggtgatgttgttacttttgttctactacttaattgggttggtatttacttatacttagtaattgctaataaaattttgaccaactttaaaagcaatgctcagcttcaaccatcctctttggtaagccttacacttcacgtgagctcccgcctttggcgagttcatgcacattattccccacaacttattgagcgatgaacgtatgtgagctcactcttgctgtctcacacccccccccacaggtcaagaacaggtaccacaggatgaggcgcttggaggatgctgtgatgtgttcgtgagtggtctaggccgtcgtctcccagtcaactttgggttgctggaccgttgtctctttatgatgtaattacttatttattttgtatagaactcctattatatagtaaagatgtgacattcgatcctgtgccatgattcatcatatgtgtgagacttggtcccagcacacctggtgattatgttcgcgcccgggctttggacccctaaaacctgggtgtgacagcgcccaggtgcatatggtctgagccaaccgctccacccagccgaaccgacgactgccccctccactactgcgccttttcacttccccgccccgattgcgccttttcacttccccggccctccgcgaacggctcaacttcttctcttccctggcgacgtagccctcgtcgtagccgttgtgcgctcgcccgctctcgtcttcgtccatcccgcacgctcccgcccccgccccctccacacttctccgcgaacggatcctccgcgaacggctcccgttagaatcgtttgcgcgccggagtcgtagaccgcgaacggcgacgtagcccgcgccggagtcgtctgcgcgtgcgcccgccgtgtaagcgcatccgctccttctcccgtttctctgtccccaatttttggatttgttttgttatcttcggtaatagactggtaaaccccatttttttccccaagtgttgcaactagtattattcgtttattggaattattaattgttgtattttatgcggatacatttcattttgaataagcagtttgtgttctagattatcaactcagatgtttccaatttttttgcatatgcagtgtaccttttgttgcaactggtccatcacataagttgcaaatgtataatttttactttcaacccacatacatcattcccgtcttttataactgtgctcgtatacaactagttatttgtttaaattcactattgcaactgtcccaatagtaattattttagcagtcttgttgcaactggcttatggcgcatgtgacaattctgtcccagtactaatgtgtgtgtgcaacattagtgtgtattgcaactattttttgttcctatttgtactgtgtgttttagtttgttgattagcaatttttggttatgagatatgtaccatgtgtttgtgccctcatgtttttttcattcccatttttcagtgttttttataatatatggatcaagaacagaatgtcacaggccagcaaggcgctcatactgtccgccgctctcctcgtgtacaaaacaagagaaaacaattagataaaaatgaattgaaggaaaggaggaagaggttaaggttgaaagtccctcc

SEQ ID NO: 1235 - DNA, 14139 bp, Zea mays
  Intron number 4 from transcript GRMZM2G386125_T01 (locus G RMZM2G386125) derived from phytozome v7.0 (chr-ID 8; pos 2 6566566 to 26580704)
caggctacaccttgatagcaaaaagtttgataaaggtaatttatttgtttttttgcttctttttatgatttacatattacaatacaatgacaaagttaatgtccgtctgtgaggctggactgtggtaatagattaatggaaattaaaactaatgttttcatggttcagtttaccttgcttatcgtttagtatggtttagtatgatttcaccatttcgatgttcatggttctgttagctatgtgatacctagaatagaaacccactcatgtcccatccttgtttgtttctccctgtaactgacttgattacagtcacgtgccctactatggggatttttttctgactattcttgtttttgctaccatcaagttctgaacgtccagcacattcaaaagctagataatacaactgtaccaagggatgtcgactgaccaccatggtctgatgagtgtggatgacattgcctcgaggtacacagtagaagcctctgctgtccaacacatttggatgactggagattggtcaataatttttcctcttttttgaatttattctgctgcaataattttgttgtttactgatatatatatatatatatatatatatatatatattgatgatttgataagttggtgtattagatgtttaacttatcagctttacaatatgtttctactgattggttgagattaaagagccaccttttcccttctatctaccatgtaggtttctccaatctccaacactgctggccgcggcagtctgcaatctcctatacacacccaacgactcaggtctctttccccaataaggtgaggacccttgtagtttaggtgtttgatgaaatgcctgttcaaggtaaaattctagttaacgtgtccacgctgctttgtttttttggcaattatgttgtgatgttctagcttcatgttcgtgtaattagatgatgtgggtatgagaagcgaaaaacaagattagtatgggaattagtgttgatttggagaaaactgtatgattacttactgaaattacatagataatttgcaatttcgatgccttgctttcatcaattttgtccggccaagccagtagcgcctcccttgtaaattaagagacctttgatgttttgtgatcagacttggtggcatgccgtggatgttatttattgtgatcagactaaatttctgttatgaaagctttctctttatttttttaggaatgctattgcagttctctgttatcatttcatactctagatattggcgccaacttattaaatctgttatcatttcatccacaatgcccttttgaatacaatcacgaatataatggtagtgagtgtcaatgtgtttgctcctgtcgtggtaaactgggtttttgctcaactctatggttgacttgttgtcaatcaacagacagaatttctttacttcctccttcattatatcagcaagcaaggtactcaaccacactccctgacaaacacccagagctgctgcaatatattcagcttcacaggatgacctgtttagaagatatacaactatagtgactgcttcaccccagaatctaggtggcacactcctgccttttagtagacatctagccatctcgacaactgactgatttcttcgttcaataaccccattttgttgaggagtatagggtgttgtggtgaagtgtattatgccttgttcagtacaaaatgtagtgaacatccttgaattgaactctcctcctctatctgtcctcaaggctttcaacttgctttctagctctacttctgctctctgcttgatcttgatcagacatgacaaagcttcaccttttgtcttcaggagttcaatccacataaacctgctgaaatcatcaactactaataggaaatagtggtttccacctactgtctgtggtctaatctggccacatagatcagcatgaaacaattctagacccctctttgccctgtaaagcgatgtctttggaaaaggtgctctgtgctgctttcccaaagtacatgcatcacaaacttgctcaagtctgtccacaactggcatcccttctaccattcctttcactcccaaatttcttagagctttaaaattcaggtgaacaaatcttgaatgccatagccaagctgcatcatctagctttgacagcaaacaaactggaggtatcacactcaactgtactgtgtacagtctgttcccagtgcgaggtgcactgaccaacaggttatactctagatcaaatactttcagtctaccagcaaatagtctgatgtcacagcctgcttcctctagttgtccaagactaattatgttgcttttcaattgtggaatgtagtacacactagtgagtaccttgtggtctccttgtatggttttcatcaccaccaaacctagtccacagattttgacagtagacccatcaccaaacttcactgacccactgacagtgtcatcaagttgagtaagtgtagacttggtgcctgtcatgtggttactagctccagtgtccaatacccagacttcatctgaacagactgcaggcactactttttcttcagacaggtgtatttcctgagaagttcaacctaatgagtcttgcacctcagcgaagagtagtgctgcattctccacatctccaactgcaacatttgcctcctgctgtttgtgatccttcttatctctgtttggtcttttacagtcttctgcccaatgaccatagatgccacagtttctacatctcccttttcttctgggtgttccttgtgatgtcaatttgaccttgtgaggagtactggagctagcaccttcagatttgttagaaacctttgccttccactggtttgtccctccactattattgttcttatgtgaattggactgaaacctttgcttgtgtttctccaaccattcctcttcagctagtagcagtcttcctgctttgtctgtgacttgctctagtttgtcttcaaatcgatctttagctgcccgaagccttccaactacgtcttcaactgaaagtgtcttaacatcacagaacatctcgattgagacagcaacttgattgaactggggtggcacaactcttagaaacttcttgacaacacgagtatcttctaagggttcaccaagtgatttgatagaaattttgacacttaacaggaaatataatttaaaaagttaggtggtgtactcatctgtattttttactattctttgttttcttccattctatgagatgcatgctttgtaaggaatatgatttgtttcgtgacaacaaaattggtagaatatgtactttaaagtctaaattgatgactatgatgcactaggtgacactccactggacagtcaactctagacagggctagacatgtaacgatctcagaaagaaggttggatattttctttttaattgaactgttgttttacctttttccttgcttgcttttgcttttgcagagctgatgaaagggaaatgtgcccttgggccatttctaagtattttggtgattgagtgccaacacaagtgcttaaatgtgaattcatgcttatggatggacaaagtgcaaaacaagagcaaaggtatgtttctaagtcttagtacattggttttgtgtactaatatacttgtctaagtgttagaaacagaaagaaaaagaaaagagaagagttggctgtgtacagccaaaaggctgtttcggtctggggcaccggactgtccggtggtgcaccggacagtgtccggtgcgccaggctgcctcgggcgaagtggccgctctcgggaattcgccgacggcgtacggctaaaattcaccggactgtccggtgtgcaccggactgtccggtgagccaacggtcggccaggccaacggtcggccgcggaatccgcgcgcgacacgtggccgagccaacggtcggaagggggcaccggactgtccggtgtgcaccggacatgtccggtgtgccaacggctccctgatctgcaacggtcgactgcgccatttttggaaggaaatcgggcaccggacagtgtctggtgtgcaccggactgtccggtgcgcccgatgacagaaggcaagaatggccttccagatttgctctcaacggctcctagctgccttggggctataaaagggacccctaggcgcatggagaagaacaccaagcaaccttagagcattcttgatcatccacactcagcctttgcgcattcgtttgtcattctcagtgattcgagctccgttctagtgagaactttgagatagtcttttgagctcgattcttggccgtgtgtgtgcgcattttgctgtggttttgtgtgtgttgcttcccttccttactccgtatttctttgtgaatctcaagtgtaagggcgagagactccaagttgtggagattcctcgcaaacgggatattgaaaggaaaagcaaaacactgtggtattcaagttggtctttggactgcttgagaagggttgattgcaaccctcgtccgttgggacgccacaacgtggagtaggcaagcgttggtcttggccgaaccacgggataaaccactgtgtcacctctgtgtttgatctcttgtggtattgtgttttgttgagactcctctctagccacttggcgattattgtgctaacacttaacaagtttttgtggctataagtttaagtttcccaggatcacctattcacccccccctctaggtgctctcaattggtatcagagccgttctcttcacaaagggactaaccgcccgaagagatggatcctaaagggaagggaattgtgatcaacgacaaggagaaggagtccttcgtcaacgagccaagggatgacaagtccaatgactcgggctcgagtcacagacgcaaagatgggaagaagaagaagacaagacgcatcaaggagatcgtctactacgacagcgatgagtctacttcctcccaaaaggacgacgaccacaacgactacgagaaaaagaaaccggtcaattcgaacttttcttttgactactctcgtattccgcatagttcaagttcacttttgctctccattccactcggcaagcccccacactttgatggagaggactacggattttggagccacaaaatgcgtagtcacctattctctctccatcctagtatatgggagattgtagaaagtggaatgcactttgatagttccgatagtcccatgttcattaatgagcaaatacataagaatgcacaagctactactgttcttctagcttccttgtgcagggatgaatacaacaaagtgagcggcttggataacgccaagcaaatatgggacaccctcaagatctctcatgaagggaatgacgtcaccttactcaccaagatggagttggtggagggcgagcttggacggttcgcaatgataaggggcgaggagccaactcaaacatacaaccggctcaagacccttatcaacaaaataaggagctatggaagcacgcgatggacggaccacgacgtcgtccgactgatgctaaggtcctttaccgttcttgatcctcatttggtgaataatattcgtgagaatcccaggtacaccaaaatgtcgcccgaagaagtccttggaaaattcgtaagtgggcgaatgatgatcaaggaggcaaggtacgtggacgacgccttgaatggaccgatcaacgagccgcaacctcttgctctcaaagcaacaagaagcaaggaggcgctacctaacaaggtggcacaaattgaggcggccggacttaatgatgaagagatggctctcatcatcaagagattcaagatggcgctcaagggtcgcaagggacagccaagcaagaccaaagccaaagggaagcgctcatgcttcaaatgcggtaagattggtcattttattgctaactgtcccgataatgaaagtgaccaggaactcgggagcaagagggaaaagaagaaacattacaagaaggccaagggcgaggcacatatcggaaaggagtgggatttggattgctcctcctccgactccgacaatgaaggactcgccgccaccgccttcaacaagtcgtccctcttccccaacgagcatcacacattcctcatggcgaaggagaagaaggtatgtactcgagaaagtaccacttattcttctagtgatgatgattctagtgacgacaatgaaatagactattctagtttatttaaaggtctagatagaattaaaattggcaaaattaatgagttaattgatgccttgaatgaaaaggataggcttttagaaaagcaagaggatttgttatatgatgaacatgataaatttgtagaagcacaaaaatctcatgctttagaagttaaaagaaacgaaatgctttcttgtgaattatcttcttgccatgagacaatttctagcttaaggagcattaatgatgacttgaatgctaagattgctagtaaatctaactcttgcgtagagaatgttataacttgcactaggtgtaaagatattaacattgatgcttatagtgaacacctagcttgcatttctaaattaaatgaagaggtggctagtcttaatacccagcttgagactagcaaaagtgattttgagaaactaaaatttgctagggatgcctacacggttggtagacacccctcaattaagaatggacttggcttcaagagggaagccaagaacttaacaagccataaggctcccatctccgccaaggagaaagggaaggcccctatggctaaaagtactaaaaggaaccatgcttttatgtatcatgataccagacaaactagaaatgcttataggagttatgatgcttatgatgattttgactctcatgccatgtttgcttctagttcttcctatatgcatggtagaaatatgtctaggagaaatgctattcatcatgtgcctagaaagaatattattcatgctcctaggaaagtagtgaatgaaccttctacaatttattgtgctttaaatgcttcctttgctatttgtagaaaggataggaaaatagttgctaggaagttaggggcaaaatgcaagggagacaaaacttgcatttgggtccctaaggatatttgcactaaccttgtaggacccaacatgagttgggtacctaagacccaagcctaaatttgccttgcaggtttatgcatccgggggttcaagctggattatcgacagcggatgcacaaaccatatgacgggggagaagaagatgttcacctcctatgtcaagaataaagattcccaagattcaattatattcggtgatgggaatcaaggcaaggtaaaagggttaggtaaaattgcaatttctaatgagcactctatctctaatgtgtttttagttgagtctcttggatacaatttgctatctattagccaactatgcaatatgggatataattgtctttttacaaatgtagatgtgtctgtctttagaagaagtgatggttcactagcatttaagggtgtattagacggcaaacgttatttagttgattttgcaaaagaggaggccggtctagatgcatgcttaattgctaagactggcatgggctggctgtggcatcgccgcttagcacatgtggggatgaagaaccttcacaagcttctaaagggagaacacgtgataggtttgactaatgtgcatttcgaaaaagatagaccttgtgcagcttgtcaagcaggtaaacaagtgggaggagcgcatcacagcaagaatgtgatgaccacttcaagacccctggagttactacatatggacctctttggacccgtcgcctatctaagcataggaggaagtaagtatggtctagttattgttgatgacttttcccgcttcacttgggtattctttttgcaggataaatctgaaacccaagggaccctcaagcgcttcctaaggagagctcaaaatgagtttgagctcaaggtgaagaagataaggagcgacaacgggtccgagttcaagaaccttcaagtggaggagttccttgaggaggaagggatcaagcacgagttctccgctccctacacaccacagcaaaatggtgtggtggagaggaagaacaggacactcattgatatggcgaggacgatgcttggagagttcaagacccccgagtgcttttggtcggaagccgtgaacacggcttgtcacgccatcaatagggtctaccttcaccgcctcctcaagaagacgtcgtatgagcttctaaccggtaacaaacccaatgtatcttactttcgtgtatttgggagcaaatgctacattctagtgaagaagggtagaaattctaagtttgctcccaaagctgtagaagggtttttgttaggttatgactcaaatacaaaggcgtatagagtcttcaacaaatcatcgggtttggttgaagtctctagcgacgttgtatttgatgagactaatggctctccaagagagcaagttgttgattgtgatgatgtagatgaagaagatgttccgtcggccgctatacgaaccatggcgattggagaagtgcggccacaggaacaagatgaacgagatcaaccttcttcctcaacaacggtgcatcccccaactcaagacgatgaacaggttcatcaacaggaggcgtgtgatcaagggggagcacaagatgatcatgtgatggaggaagaagcgcaaccggcacctccaacccaagttcgagcgatgattcaaaggaatcatcccgtcgatcaaattctgggtgatattagcaagggagtaacaactcgatctcaattagttaatttttgtgagcattactcctttgtctcttctattgagcctttcagggtagaggaggccttgctagatccggactgggtggtggccatgcaggaggagctcaacaatttcaagcgcaatgaagtttggacactggtgcctcgtcccaagcaaaatgttgtgggaaccaagtgggtgttccgcaacaaacaagacgagcacggggtggtgacaaggaacaaggctagacttgtggcaaaaggttatgcccaagtcgcaggtttggactttgaggagacttttgctcctgtggctaggctagaatcaattcgtatcttgctagcatatgctgctcaccattctttcaggttgtaccaaatggatgtgaagagcgctttcctcaacgggccgatcaaagaggaggtgtacgtagagcaaccccctggcttcgaggatgaacggtaccccgaccacgtgtgtaagctctctaaggcgctctatggacttaagcaagccccaagagcatggtatgaatgccttagagactttctaattgttaatgctttcaaggttgggaaagccgatccaactctctttactaagacatgtgatggtgatctgtttgtgtgccaaatttatgtcgatgacataatatttggttctactaaccaaaagtcttgtgaagagtttagcagggtaatgacgcagaaattcgagatgtcgatgatgggcgagttgaactacttccttgggttccaagtgaagcaactcaaggacggtaccttcatctcccaaacgaagtacacgcaagatctgctaaagcggtttgggatgaaggacgccaagcccgcaaagacgccgatgggaaccgacggacacaccgacctcaacaaaggaggtaagtccgttgatcaaaaagcataccggtcaatgatagggtctttactttatttatgtgctagtagaccggatattatgcttagcgtatgcatgtgtgctaaatttcaatccgatcctaaggagtgtcacttagtggcggtgaagcgaattctaagatatttggttgctacgccttgcttcgggctctggtatccaaaagggtctacctttgacttggttggatactcagattccgactatgctggatgtaaggtcgataggaagagtacatcagggatgtgccaattcttaggaaggtccctggtgtcgtggaactctaagaaacaaacctccgttgccctatccaccgctgaggccgagtatgttgccgcaggacagtgttgcgcgcaactactttggatgaggcaaaccctccgggactttggctacaatctgagcaaagtcccactcctatgtgataatgagagtgctatccgcatggcggaaaatcctgttgaacacagccgcacaaagcacatagacatccggcatcactttttgagagaccaccagcaaaagggagatatcgaagtgtttcatgttagcaccgagaaccagctagccgatatctttaccaagcctctagatgagaagaccttttgcaggctgcgtagtgagctaaatgtcttagattcgcggaacttggattgaattgtagcatacatatgtttatgcctttgatcatgttcattctgcattttgttgcttattgtggtgctcaagttgtacaaacattccctggacctcacaagtccttgtgtaagtgatgcacatatttagggggagttgtgttacaacttgaccctttgagactaaccatatgcttgagtttacttgatttagtctcgaaggagaattgaaagggaaaaggtggacttggaccatgaaagacttccactgcactccgatgagagggtaacttattccaagttcatctcatgaactcttattgccatttgctcttaattgaagattttggtgaggcaatggggttatcgggccaagattgatccagttttggtgcttgatgccaaagggggagaaaataaaggccaaagcaatagatggatcagctaccacttgagaaattttgaaaatagtagaatagagcttttggtttgtcaaaactcttgcattgtctcttttaacagaatagagcttttgcattgtctcttttgtcaaaagttggccttttgtggggagaagtgttgattatgggaaatagggggagttttttgaaatctttgatcaatctcttttggaatgactctctttatgcttcaacatgtgtgtttgacttagagatagagatttgagtttgatttgcaaaaacaaaccaagtggtggcaaaggatgatccatatatgccaaaaatgaatcaaaataaatttgagttttatttggaggtgattttgcacttattctagttgctttatgttgtgatggcataaatcaccaaaaagggggagattgaaaagggaaaatgtgctctttgggccatttctagtattttggtgattgagtgccaacacaagtgcttaaatgtgaattcatgcttatggatggacaaagtgcaaaacaagagcaaaggtatgtttctaagtcttagtacattggttttgtgtactaatatacttgtctaagtgttagaaacagaaagaaaaagaaaagagaagagttggctgtgtacagccaaaaggctgtttcggtctggggcaccggactgtccggtggtgcactggacagtgtccggtgcgccaggctgcctcgggcgaagtggccgctctcgggaattcgccgacggcgtacggctaaaattcaccggactgtccggtgtgcaccggactgtccggtgagccaacggtcggccaggccaacggtcggccgcggaatccgcgcgcgacacgtggccgagccaacggtcggaagggggcaccggactgtccggtgtgcaccggacatgtccggtgcgccaacggctccctgatctgcaacggtcgactgcgccatttttggaaggaaatcgggcaccggacagtgtccggtgtgcaccggactgtccggtgcgcctgatgacagaaggcaagaatggccttccagatttgctctcaacggctcctagctgccttggggctataaaagggacccctaggcgcatggagaagaacaccaagcaaccttagagcattcttgatcatccacactcagcctttgcgcattcgtttgtcattctcagtgattcgagctccgttctagtgagaactttgagatagtcttttgagctcgattcttggccgtgtgtgtgcgcattttgctgtggttttgtgtgtgttgcttcccttccttactccgtatttctttgtgaatctcaagtgtaagggcgagagactccaagttgtggagattcctcgcaaacgggatattgaaaggaaaagcaaaacactgtggtattcaagttggtctttggactgcttgagaggggttgattgcaaccctcgtccgttgggacgccacaacgtggagtaggcaagcgttggtcttggccgaaccacgggataaaccactgtgtcacctctgtgtttgatctcttgtggtattgtgttttgttgagactcctctctagccacttggcgattattgtgctaacacttaacaagtttttgtggctataagtttaagtttcccaggatcacctattcaccccccccccctctaggtgctctcagctgatgaactgcaaagagtgcttatggagatggtaaagcaagacagtaggcaccaattaagtgcaaaggtatagagtaatttcctattatttatagagaaaatattcaattaaggtctgtgtataagtggctggtacatccgcctggtagggcgcttccttcttctagtctctatttatttgtcaaaaaaacatgtcaaatacttcttcgatgatgtttattgagtactctaattcttttgcaagggtgaattgaaggaacttcagacgtgcttgtgcccatcctcagcgcaaaacacagtggcaacgaaagatttaaggatgcatgaatatatacttcgaactttctttgtaataaacctggcgctcccatgttgcgacacttactgtggaggtggagctttcctatgcccctagctatcccctccattcaaaggattgtcatcgccagcgctagggataattgtctctggtcagatttctagaaaaaatgtccacagttgaacagccttttttcttctcgtctgcaccctctaattagcagcttagtctcagtctccatgctgtgtgcaattatatatgaaactatggatcaactttttgtaatgcaactattgactttaaatatatatattttgcttatttgccatgtgtgtgtggatgattccagaaatatcaaatgtgcattgttcagcttgttgtaatcttaacctcaaaataaaatattcaaatatttttattggtttattgcttgcaacggataaaaatgttgctacaactcgaaactaaacgttgtagcatcctatgataacgagctggtcttgggcggcaccaacacatgtaagtgttgttgtatcttataaaaatctgttgcagtttaccaacgcttatttatatgacttaccaacgtatgtacaagtgttgcagtagcccctagcaacggcagtataggcaacacataattatgcgttggtatagaccctagcaacgcttatataggcttgtaccaacacatatatgcattgctaaaggggggggccattttgtagtgagagtagccgaatttgggtaaaattttgacgcaggtgctttgagcggtctgtgcttgcgatcatttgcttaaggaattctatttttgtttttgtttttcgtctgtgaagcttgggattggtgagattctgtgagattgcctatttgattgaggtgatcaggagttgacatagacaattggcttgggatttggtcacattgtgatgatgcgatctatcatctgtcatccagatgagtagtgcctgtaactttaacatcttacttagtttatgttgaaagttggtatacctatgacaactttaccaactattgcgactttgtttattccgaattctatgcatatttgactcatctattttcatagtagcattgtctcggtgaacataaatagtagactactgttatttagtttaagcaagcaccttcaccactgttcaacgcaatttatccatatgacattgcttggttatacctgtaattttgatctgatttgttttttgagataaaaaagtgaagcagcttattgatatttgacagtttgatctctgatctggcaattagtcctgcttttattgtcaggaacaaagtagtagaattgaatttggcttgtttgctcttgctaggtggaaaacaagaag

SEQ ID NO: 1236 - DNA, 760 bp, Zea mays
  Intron number 3 from transcript GRMZM2G015648_T01 (locus G RMZM2G015648) derived from phytozome v7.0 (chr-ID 9; pos 1 49429109 to 149429868)
gctttgaacttgcccaggatccatttgggtaaacctttggttgcttatattgtagtttgtttttaaaaaaatgcagcattgttttgtgtgttttttttcaatacatggatgctttgttctggtagattgtagacataaagtctttgtaccttctcagtgcactgccttcatagttttcaatactgatgatcatctcatatatatatttgtacaaggctaaactttgtttgaaataactttacaccagtgacttaattttagtgcagcaaatgtttgttctcctttgtttctatgaacctgtatatgtttatctcgattcaaatctttgtatttttcaaaaactttctcagtgattctgtgtagatgacttttttttcagaagataacatagtatcatagcaaggaccatgaactctgtgccaagccacctttatttttccagaaataaagggagctcaaactgtgctaaaagtaactatatttctcatgacctatagcaaatggcactcttgtttgaataggcagggatttgcacagttctcttggactggcaaggatttttgttcattttattaattatcactcgaagggggagctatgaaccaggctagttgacccacaaaacaccattgggttgcatccttaatcctagccccctttctcatttctcgatggtattttaggaatttattttggacttcatcccacaaatctaagattgctttcccattccccgttatcccaggaactacgtggtcca

SEQ ID NO: 1237 - DNA, 3122 bp, Zea mays
  Intron number 1 from transcript GRMZM2G034868_T01 (locus G RMZM2G034868) derived from phytozome v7.0 (chr-ID 3; pos 1 42950411 to 142953532 reverse strand)
tgattctccattggagacactaggtgtgccaatttgtaagttaatttggtaaattggtttttccgtttcaccctattataccgattgcaattggtgaatgtttgtgaaactataacagatgctgatattaattcactgattgcgtgttacttgaatatgttaaataatttgtgaaactgtgacagttctacatgtttaacaattccttaggcaatttcaattctatgaaatttatcatgttcatttatgtattatatttatattgtcatgtgatattatatttaacaaatattaggctttaggttttaaatttcttttgacagcccttcacatttcgaaaaaccaaccttaaatctgtgggcccaccatttttgtgtgtgtggcaggggtggtttgtgggcaggggtttgcacccaacaacaacaacaataaagcctttttgtcccaagcaagttaggataggctagagttaaaatccaatacaagtcaaggttcaggcaatagatattttttgtgcactcctgttcaagtataaatctttggttatattcaatcccccaagtctccttttactgtatcgttccatgttaacttcggctttctccctcctctcttcccattgctatcatgccttagaattctactatgcattggtgatcctggaagtctggaggtctccgttggatatgtccaaaccatctcaaccggtgttggacaagcttttatttttctaattggtgttacccctagcctatcacatatatcatcatttcagactcgatttattcttgtatgcctgcaaatccaatgtaacatatgcatttcgtaacacatctcttggacatgtcgtctttttataggccaacattctgcaccatacagtatagcagatctaatcgtcgttctataaaactttccttttagcttctgtggtaccctcttgtcatatagatcgtcagatgtttgatgccacttcattcactctgtttgattctatggctaacgtcttcatcaatatccctgtctctctatagcatagggggtgtttgggactgctccactccaagaaatttagctccactccatgaactcgaccatggagtagctccaccgtggagttggaataaaaaaacactttgacttagcattttactctagctccatgaatgatagatttttaggggaaatctctcttatatccttgttttaaagacccatatgtaggtgacccaactctatcgtttatctgtcccatcccactcacacagtattctctctcgatggaacgatgcgaggcatgaggtagcagtctccatcctcactgacgcagatcgaggagcggcggggtgggctacccgattgttcacgaggaggtgtgtggggatgagcccaccgatcgaccatgaggagaggtaggggtgagcccaccggctggccgcgaggaggatctgcgggggtgagctgcctgctggcgtggaggaggcgcgcggtggggggagccgctcgagcccggccgatggcgaggtcttgggcggcggcggcgatgggaggcgaggcgattcgaaacagatggatgattcttttctgcaaactagcacgggagggagtgtgtaaacgatggcaatgcggttaattaccccacaactccatgaggaggtacaaaacaataattttttagcacctattttgctgttctaccaaatcagtggagttggtgaggtggagttgaatatatttgacaaattatttgtggattagacttgcaaaacaagtagtggagtagtctcaaacactccataaataccgaaaggtatccttcccggtcactacttgaccttccaaactagtcgaagtcacatctcatatattcagtttttgttctactaagtctaaaacctttgaatcctaaagtctcccgtcacaactctagttttctatttactcttgtccgactttcatcaactagactacatcatttgcaaaaagcaaccgatggatttcttcttatatgtcttctgtgactttatctatcactaatgcaaaagggtaagggctcaaagttgattcttgatgtagtcctattccaatcgggaagtcatctgtatctccatcacttgttcgaacactagtcacaacattgttgtacatgtccttgtagagtccaacttatttcgttggaactttatgtttgtctaaagcccaccacgtagcattctttggtattttgtcgtatgcgttctccaagtaaataaaaaccatgtgtaggttcttcttctgatccctatactggttattcacttgtcttattaagaaaatggcttctatggttgatcttctaggtgttaaaccaaatgggatcatagagatcctcgttattcctcttaaacgatgctcgataactctctctctctctctctcgtagcttcatagtatggctcatcaacttaattccttggtaacttgtacaactttgaatctctctctcttatttttgtagattggtatcagtatatttctctactcgttaagcatcttgtttgattggaagatatggttgaacaacttggttagccatactatagctatgtctccgaggcatctccatgcctcaattgggataccataagtgtctatcatcttacccccttccatctttttcaatatctctctaacttcagattcttggatccaatgcccaaaacgtttattggtattaaagtgtcatctaactgaaaggttgtgtctccattcttcctattgaacaatttatcaaaatactctcgctatctatgtgtgatctcatcctctttcaccaagaggtgctccatttcatacttaatgcacctaacttggctgaagtcccttatcttcctcttacagaccctagttctcatatatatgtcattctctccttccttcatactcaaacattggtaaaggtcatcgtacgtccaaccctttgccacacttacgacacacttttttgtcttctttgctcccttgtacttttatattttggggttgcacccaaaatatgaaaatggttcaattgtttcagtagtaggtctgttctcgtacttctttggcatttgtaccaatacattgcctttcttgatgcagtg

SEQ ID NO: 1238 - DNA, 4532 bp, Zea mays
  Intron number 4 from transcript GRMZM2G007258_T04 (locus G RMZM2G007258) derived from phytozome v7.0 (chr-ID 8; pos 3 198338 to 3202869 reverse strand)
gaaggcccgtcaggaattccttgaagatattcgtagtaagattatttatcaaatctcaaagttaccttctgtctagtcatgaaaagtagttttctttggtctgaatcttattatccgtgatcatgtttattcaaatttcggtctaacttgccatgaaaagtagacatgagttgggttaatccttcaccttaattctatggcacatttatgtttatgaccaccacaaaggacaatgtgtcactaactcttaagaatgttactgagtaatggctataaaatccctgttaaatggcatgctacaatcatctagtggttgtttagatctataaaataaagatcagtttggtaagaacatgtttttatcagaaatttaaggaaaaactagttttaagttgctagaccattaatctaggtttacataacataacataacatgttatttggattaatatgtaggaaactaaactgaggtttggtaatctctccattgcccattacttcacccttgcatagttgttccttctactcttcattgtacagcacgggagcccctgaatcaatcatcttactgcttcctttctgtagctcacatccatggatgcctcttcattcctaatctcaggaaatggatagggtatccagcagcagcaccaatgacccgccagagcacaaatgaccatagcaccctggctaagcaataaccattgtcatcttgctgaactttctccggcatcttgctgagcacatgaagcccgctgaacttcctctccgtctcagtcatccgtttctccagcatatttgatgagcatccaagtggacggcaacatcctgagtatctccccttcctggccatcgcccatcacgctcacacagcatcatctccctctcatcaatgcgtatgagtaccatagcaccaagctgtttgctgtcctggctgttgtcgtcatcatcgtgctcttaatcatcaccttctggcaaagcatccagcgtggttgtttctttgctggtgacaagctctagcccctgtgactttttggctgaagctgttgtacctgtcagtgttcagtgaagttgccaggttgttgagaatgatgacatctgaaacacactaaacggaaaaactggagtttagagaaaactactgttgctcaccctcaagttagttacatcaaaaaatcagagaaatggacaaacaggtttattgggatccttttttttacaaaactagagatccaaacaatgccttgatgtcttcaacatcattgcagaacaattaaacaaggaaatatttcaataactgtgcccttgctttccttgttggacaaatacttcaaacaggggatactggctagaattgtgatttagagcaagtatatacttatactaattcgagtactgtctataaaattgccacagtgatttgtgtttcaaaaagttcaggtcagagaggacaaccttattgctttgtgtacaccaatggacatctaagtttgatgaatatcaaatttactgctttgctgtacttgattgctggttgtagcttattagcatatctgcatatgataaatcaagaatattttattctgcgaacatttaccaaaaccaaactgttttgtattgtttgcaatatagtcaaacaactggccaattatgcattcataattttttcgagtaatagttgggaggccattgaaatggtacctctactaatgttcacctgtgtctttctggtatggtccgaaatatgttttgacactattactgaacagtgctacattaccaagaactagaataatatctgtgcgttgcgacagtacacaatcatattttcatgatattggttgcgaagggtgagcccgtacctgcaatgcaatcaatggttgaacgaagtaaatcagtcatatggaccctcccctaaaaaaataccaattataaataaatttaatatcaaagtgagcatattgtctatagatcagatgttaaattgataagaataaatattacattttattttagccaaaagaccgagaaagatatgagttgaaaaataaacccaatccctatttttatagagctctctgtagctcgtcctctttcagctaacagggtgtagcttcctgttgtattgggcttagtggcttcttacgatcttcgatctatatatggtgtaacggccttgatgatttataactcaagacattgattccatataaacgcacggtatgactgccggttaaagacccacaacatcttccactgaacctatgttcttttattttctcttagacacacgcattaaacacaaaattcatggatcgtaaagatgcctctagctattgcacaataatctgatagagaagaaaatatgcctcaataattgtcaaacagaggccatgcagagattcatgatgtagcatgcatgagccatgcatgagttgagcggtacccaatatcgtcttgcgtgcaacaaatgagctaatgaaccaaatgtctcgaacaatagctgtccgtgctttgcatcggaaggccaccaaccatctccatctcgttcccaactggcctagctctggtgaaaagtacacgctcaacttcgaatggagctacaataaaatgcttaccaaggacccgtcgtaagtgcgcgatggccttgtagctcctcactcctaaggaagcacttctcctagccgctagtaatgacttgtgacgcttcgtctctctactccgccatggcctcgtgacgatggcgctcatcatgctcatcggtgacagcagcactacgtgccatgccgtgtggcatcttgctcacaccccgtcccccggacattctcctgtcgtgccgaagccgcctatcttgctcgtggtcacccttccattgatgctcgccataccgatgttaccgcggtgggcgtcgtgccacagatccatgtggtaccgaacaccgccgcgctgccccctatgccggctgcagtacccaccgtcatgctaaaagtgacgctgccgccaatgcccactgtcgtgccgaaggttggcgcgttgccactaatgcccgtcgtcgtgcctaaggttggtgacttgtcgttgatgccctccgtgtggcccgtgcctaaccgtcgatgccctccattccagcagcgtcggtctccattaggtcccacgaacgcaacacgaactcggtgaacaggcctgtgaagatgccagtggagtcagtgagccagaaactcagatgtacgcacgtgcataccttggaggacgtaggcgagtcggagtatctggaggggcgtcaggccaccggtggcgagcagatccaccaccgctatcgcttgaggggcctcagtacgactttttgtagccaggttggttggcggattaggatgagtaaaatagttccaccccgcagctgttgaaaccgctttccctgtgtttctatgcatgaaagacacgacatgtgtgggtctgctgaaaccgttttccctgtcccctatggagcggcgtccatgggttgttgggctcctgtcgtggtgcatttggcacgggcccacttgccatgccggtcgtttctataaacggaagacatggcgtgcatgggtttttgtcattgtgtgggttactgaggcgctcgtgcgccgtgcggggcgtggatacgctgtggacagggagtggatagacgaattggattagatgcgatcgatgtgaagagaatgtgtcttgtgggccatttcaaataatagaagggattattttataaaatatgacgcggggtgaccgtcaaaactggtgcttttatatagtagagatagagatagagatgtaacactattgtttcatcctattacagttctaaaactatacatgtcaggaggaggtgctaaactgtgtaaaatgctccaacgtttggatcacccaactattctaacgatggggtccacaggaaataaactactagctccgcctcctttgcttcctcactgtatgcaggactgataaagaccattgtagttgtactgttgagcagagacaaaatattatttaagccctatttggaacgcgggatttttttctgtttcttgtgtttttatgtgaaaatcaactgattctatgaaattcctatacaataactccgaaattcctgcattctaaagggggccttaactcttggcaccggttacacaagctttgcacccgagtctaatctagatattagctccagcgtttcgcaccgtgccaataaatactacgtctagatatataataaaaacaatatatctataaaaaccaaaacatttataatttgaaagagagagtagcttgcatcacgtggttaacaaattgggttatgacaacataatgcatcatgatttgtgaaatggagtggtcctttggaatcaactttacttttaagtttctcccaacagtttttcccttttttatttatttggtaccaaataaattggtttaggtggcactttatttacttatttccatttttgtttcatgcagcaagggacgctgaaattctgaagctgaagcagctc

SEQ ID NO: 1239 - DNA, 4393 bp, Zea mays
  Intron number 1 from transcript GRMZM2G141636_T01 (locus G RMZM2G141636) derived from phytozome v7.0 (chr-ID 1; pos 1 1947516 to 11951908 reverse strand)
gcccgtgggagcttctcgggagtctgctcccaaaggtgataggatttttttacttcccccccacccccccttttttttgtctccacgtctacgagtgcaaatatttaggttcttatctaataagatagggtactgccatgttccgagatacgtaagtgctggcgcatggctggatgttggcgtagttcagttgactgtgttgtgtaggcaattcatgtctgccatgctacttttcgggatcagggacaaggagcatgccgagtgccgcgcatgcctggctgccagcattagcttgctagcgtctgaataggctatacggaagtgttcaagtagtttgcttggcacaagactgaacttcaccatttctaaagtgaaaatgatgtaattcggctgctgtaactgtaacccctgatataaagggacaactgaatgttattagacgagactagggaatagcatgccatactgttagaactcggtagcagttggaatcagaattggggataggtagcaaggacaaggctggattctagacgattctgttgcaaacaagtggactgaatacaagtttctgaataccccttccacaagaagagggtttttacttgccaacgatcacggcgcaacaaatccaacacttgatggagatggaccagatgttcctccaaggagcggctgtagataaggacatcattaaagtaaactaagacacatgtccgcagcagcggcgccaacgtagtgttcatcgccttttgaaacgtagtcaggcaaccgtcaaaccaaaagccatggcccaaaattcatagtgggtctgaaacgtggtcttaaactccccacctagcaacagctgaatctgatggtaaccagttattaattccaaacagaaaaaataggaagcatgggttaactcatcgagcagctcttcaatggatatttagccttggttgtcatagcattgaggtggtggaagtccacacagaactgaaatgaaccatcctccttcgcgctaagcaccgaggaagaaaacaggttgtaacttggctgaatgatccccgagagaagcatctcagtaacttgatgctcaatctcatccttgacagctggtgggtactggtaaggcttgatgttcaccagataggccctggaaggagcagaatggcatggtcgcaatggggagcaggagggtaccctgaaggcggctcaaacacagtctgaaactcggccaaaacagctgaaacggcctgatgcagtggcgccggttcaccaacagtacgttctgacagtaccacagccacctgaacaactgaaccaactggcaattcaggtaactcgcgctgcaacagagatgtgtttgcccataagcaatccgcagccacttgtggttccaatccacttgcataggactatgcaaagatagccaatccatgcccacaataatgccgttcaaaggcaatggcagcaccttgaaatcaaagacaaagcaataatcctgaacttcccaaggtaactgaagaaattcaacagaacaagccactgaactgccgttggtgaccttcaccagaattggtggactgaaagttgtgccacccggtagcttagcagtcaaatccttactgaggaatgagtgagagctccctgaatcaatcagaatcttcactgtattaccctgaacgagcgcaatcaacataatagcccgagaagataactgaccagagacattgtttgagagggttacagcaatacttgttgttatgggatactttgggaggggttctgctttctcaagatgttgacaagcatgtatggatgcactcttcttggcagttctcctcgaagtcttgctacaaggcttttttcatgagttccatttcatttgagccatagaaacgtttgtggaaaacttgggctccccaaaaatgcaagtttttcctccggttggcaataagaaataagtgttgggctgctgatagacttagaaggaaaggactgcagtaccctattgtttgtgttctatgtgaccaagagcaagaaatagttcagcatctcctgtgcacttgcagttttgccagacaattttggcatgatatcctatttcccttgagtctaggggatctcaccccagctgctgatgaaatatcttttgctgaatggtggagaaaggtgcttaaggaggtgcataagagcaggaggaaaggctttaatagccttataattttggggtcgtggtgcttatggcttatttgaaacaaagctgtcttcgatggagtaaacccttccttgatctctgttaaaagtttgcttctgaatgagttaagttgctgggatagggctggggctaagcagttagcaagtattggtcttcctgctgttattagtagggtctaggctgggttccaatttggtctagtgttttggcttgccctttgggcattgtactttggtcctcttagacctttttcctctcttaatataatgacgtgcagttctcccacgcgttcgagaaaaaaaaacaatcgccattgtttccaccaggatggccactgaatcctccaagcaatcactggaattttctggctcctcagaatggtgcaaatcccacagctactgtaaccatgaagttggatcgactctgggcaacagtagtcagaaccacctctcgccgcaagggatgcagggtctacgggccttgcgatacacgtgcagagtcgagagcttgtctttgaccccacggccacgacactcctccgtgctaggcccttaaaccactgtcttgtcacgcggtggaggtggagaggcagcgaaccccagcttgatggcttactgaagttgaaggcatctggcttcttaggttcatgctgctgcgtcggatccaggagctcttcctacaatagaacgagaacaccagtactatcgaaggaaatggaacgttggagatgcacgtcacttcggatatcattgcgaaggaacatctacaaacagattgcataaaaatgaggaacgatattacggccataagctatcaactatcaacgagatccacaaacttgtcaatgtaatcctggatggacctggtctgacaaatctgaaacagctgttggataaccaactcataatgacctttacaaaaacgatccaacgctaactgacaaaactctccgattaaccgatcacatcctctgctcaacagactgcaaccagctcacatacctattcccttcttgggtcggtgttcttgtcagatggtgaacatccagagtgctgacacatacctattctttgttcacatgccatgtacccttgtgactaatgcaagatgcacacagtatattgaaacaaaatgtaactttgtattgttctagaaatacacctcaagttagacaccagatagacctgtagttttggatagggacagtagcgcttctttgatgcagtactgttccatttggaaattataatactttatctattgaactgccagcactgagtttgttctgagatgtctggacaaagtttgttttatggttttattgacaaatgaagcgcagataccttgcaaggactctcaagtgcttgtggtcatatgggtattagtcctgtaattccgtgagttcgaatgttgatgtgaaaccgagcagttttaagttgagatgatatattttggtgttgaatgtttatgacaatgcatcttgataagccgctgataattgaacgcctttgctgttcagttggttttgttacaccatttcctgtttcaaataataggataggatgtcttcttttactcaaggtgatttcaatttcaatatatgtacagactcaatatatcttggatactcatgttagctttcttgttcacatatatcatttgcctactctggatattgcctccattattttaaactgactggatgaatttttttaactgaagataaattgtggtactgacatttgttttggtgctgaggacctcttggtaggtgcattgggaactgaattttctttaaaaagctcaatgcacataaacatatatgctcgtaataacttgtgtattaaattggagagcagtttgagtatgtaagtataacacatccatgtataaaactgatgctagtcacaggttcatattttataagaacacatcgcaggtatcattgtatgcttttgtcaaggcgtattctatgaagttaaatctgatcaaatcatttccgaatttggtatgttttgcttgatttgtgatttctatgctctgctcgcgcgataggatcttgtcatctgccagctaatgccattggtcattagttttgaaatttcttgatgatatttctttccgtcctgttctgatgtctactttctgtattacatacaggcttgcactgctgcccttttcctattg

SEQ ID NO: 1240 - DNA, 1635 bp, Zea mays
  Intron number 3 from transcript GRMZM2G124096_T01 (locus G RMZM2G124096) derived from phytozome v7.0 (chr-ID 2; pos 3 8702494 to 38704128 reverse strand)
tgcggtctactaaggtttatagtcctcagttcatgcttgttattttgcaaatctgagcaacattcatagtatctcatatttcttatttttgtatatgcatttgctaattatcttttatagtttcataacagatggtctcatatgagacatgaatatgcctagtttatgtctcttatattcttgaaaatatgctaaattcttagtgtactagattttcatttttgtgtggatattacttcatatggaacatagtgcatttccctgttcacaccacatgtagtccgcttggcttggggttttataactagaacataatgctttcatctatggtgaagccataaatagaacctttgggtaacttataagctattgcattctgttaaatggcagtagtactatctgtattttccctttctgtgtctaccccaatataatttgaatgtcccacagttttgcttttcatgattgatagtatagtattctaaagaattgtagtttgtcccaataatgaaaatcctataacttgattatagcatagacaccaatttgtgcaagtcgaaaggaaacggtaaaagcttgccatattgtcctaataaagatagtacatgatcaggtttcaaagtttaagctacaagttttagatcctaccggcaagaagataacagctaccactattaatatgcaatctatgttccattatatagcatgtgcttgctctagttacaaataagtgatgttttgggttgtcttaagtcaccggtttcaatcttcggttgtgttctactttttatgggttgagtttggatagttaaaaatggacaaatagtatgagtagatttgtcttgaaatgtagttttgcaagattactcttttactctgttttataattatcttgtgataaaaagtactagtgaaagttgagttttgaagatcgtgcggatgtccaaaaatcacttatttgtgtctggagggagtattttagaaccctctatctaaactatgcaagtagatgcttaacatcctctacatttggatctagatgatgtcaaaactgactgtaaatggtaattctggtcacatagaaattgattccatgtcgatatgcagtcatgtgagggttaggtgttcataagaggtgaggataatctgtgaatcaaatatttgtatattcgagaaatctacaatagagagtttgactatagtgcttggaccaactttaagaaaaacatggttcgatggttgtgtgctttacttctttatattttttatttctcactctgttttagattacgtgatgtttaggataagctaattattttattttttatgaactaattagcttgtcctctactgcatatattttaaaaggctctgtaagttctcttaatggaaaaagcttccttttctgccaagcctttttctttgttgtctgtgataatattttaatgtcttctgatgaaatatggctgtgcgcattatcttgtttattattataacattgctgatatgatatatgaactgctgtagacctgtagtatctttcaatggaagtaacttccttatttcaccttccctttccttgtttctttgtgataatactttttacacttttccagagtgcaacacacccagtta

SEQ ID NO: 1241 - DNA, 1591 bp, Zea mays
  Intron number 1 from transcript GRMZM2G088231_T01 (locus G RMZM2G088231) derived from phytozome v7.0 (chr-ID 8; pos 5 682450 to 5684040 reverse strand)
aggtccctgcccctccctccggggttgagaagaaggtgaggatatgccgcccactccggtctctgttccgatttctgttttttctctccttttgctgttgcggtggtattctagtgttgtgttcagtacaagtgtggtagattggttcgaccgatatgcaatgccaatatgttatactcgcccttttatgcttaataatgcaagttgcacattcgagctcgcatgtgactactatgagtagtttctgcaggaggcttcttgcatatttgtttacttgtcactcagagtgtctggtacttgccacagtactctcagctaccattaaccttttagtattctgattctgattaatattgggttgatgactagattagttctctagaaattagattttacacgcatgctagttgtgtttagacaagcgtttggtattgatttagatataccaggagttttattactttatgcttgtgatttcttaggtatacctatcatacatagcattcagaaaataaagtgcagtcatatggttcttaggttctagacatgcagactttaatatttcaggatggtatttttctagaacatgttataggtgattcgccaagttgttggtgtctcagtcatttttattattgatttaagcaagatttcttattccttttagtctctatttgtcaatgaatgtaaactatcaccatatgatacgttctcactgcattttagtttgtatcaccatgtcttgatcactagaccaagtaatagctcttgatttttagggatgtttttctgttgttgtcctaatcaggtgcaagatatggtggcggagaactttgttggtcttgttattgattgttttgttatcttctttatcttggaacacttcatgactgatgttgttttaatatttggaataagtttgcatagtcatgcttatgaattcttcagagttcagagtcagtgcttatcatgttattgctgtgctgactgttatgttgatgtacacagtttgtcttgtttgatccgtggatccgatgtttctttgctgttatgagataacacatagttctgatgtatccttgcctaattcatacctaattgattcaaaattaaactgaagccacttagctaccttttagaagtgggctttactgtgccaaagctgtcgcactgaatcttattgtctaccaatgtggtcaaaagtgttaacgaaattaatcttgtttaacaacagaagcttggagctatgttcttatagatacatatgttttattttttaattaacattattttatctgaattgctttctctggcattgttagcttcttcatgtctgtagaattttatcacaccgataccatttatacaagtatctgtgttggattcttctgagtcgatgctaatcccacactctatagaggtctaactggttgcgaagtttcatattgtgcgaagcaaaacatatctgggattaagtctactacaatatattgttatgtgtccgttgtacaatttaggttcttttggtaccgacaatacatgctctgatatttgttgtgttataaattggtagcttgaaagcctcccagct

SEQ ID NO: 1242 - DNA, 4567 bp, Zea mays
  Intron number 1 from transcript GRMZM5G879598_T01 (locus G RMZM5G879598) derived from phytozome v7.0 (chr-ID 5; pos 1 63888034 to 163892600)
gtaccggtccacgagtgtctcagctggaagccctgcaaacagcacaaatttacgctgagatcaaatccagccttgcctaacaggtaccatacagcgtatggacattattattacagtacaagtacaaggtggtgcaaatctaaaaattccttttgatgataccttagagcaagttggtttctggtgggggaaaagtattcacatgtgtccagaacaaagttgcttaaacagagggggggtggaataataaggtacagtggtgtctattggatagacccaatggtgatcaagtcaggactaagtcttatttttatgaaatagcagtgcttatttttgcaactcatgcattatttttcgtaaaaatggcaaggtgtgcagatgatagatagatttactgggtaggcaagttcacaagcatcattatgtgtttaagcagtcacagatcacacacggcgacttctaagacaaaaaaaaaatcaccaacaaagatcattgatttaacactaatagagattctcaatccatctacacttgaggtccatgccatgtggtaaggctacatgttcagagtaaaaggagatataccacccagaaactataattcacaactttattctaacaaatgtttacagcttctagtagaaggcaaccttatgatgaaaaaaatatatgaaaaaaaaacacatggaccactaggagacacctacctaaaataaaatacacatatagtgatgtaaacatgacattcaacaaaaaaaaacggcatggagtacaacagatgagagagtttgatggtatacttatgtataagagcgcaagtctagcagaaaaacagtttcagcattaaatttagtttgcagaaaataaaatcaaaatcctcagtccagtaggcacacgtatcatggtttttaaggcggtacagcaaggagtgcagatctacccaccttacaacgtctaggcaacacctaggtgttcataaggcaaggtgaggcaacgttttggaatgtattctgtgctcatgaagctttcatggttatacttatatgagcactacaaatctggtgcatccgtgagcaatccaacaataccaataaattttcacttacctcatgtgctaccaaagccgaggtggaagggagtaagtgaaaaactgccggtcttgttggattgcttacaaatgcaccacgtgctcatatgagcatgaaggctcctatacgttcccttctaagaaataggaaaatagcagcagagaatagacaagaaaaatagaagaaaaaaggaaaaaagacaaaccagaaaagggcaaatgaaaatataagtgattggccttagcccgcgagtgccctcttgtacttatcccttctcaggtcatcttttttttcgaaaacgcaggagatttgtgtatcattatattaagaaaaataggtgaggcaaaaagaaacctcgtacaactccacacaaacccacatacactagattataggaagacaattaacaacaaaagacatctagacccgtgacctaaagattaccgacgggttcactggagcataaggatgctagataaatcactggctccagccctacaccagagatgagactcatactggctccagccctacaccagagatgagactcatccttaacccaattgatgaccatgctgaacctaggctgcacaccattaaatacacaacggttgcggtgattccagatagcccaagcccttgtgcagccccttgtatgctggatcagcaggaggtgcggcaactcctccccaccaatcctccaaggaagagctctcaaggttaggagcaaggtgctgcaacccaacatatttcataatctgaaaccagacttcccgtgagaaaacgcaggagaccagcaaatggtttagtgtctcttcctcttgatcacacagggtacaaaattgagggtgaggcagtcctttctttgctaggcggtcagctgtccagcagcgaccgtgagccacaagccacatgcagcgctgctgcatctcctccctcagttcatgcaaccacgcacacaggtgcaggcgcgcagcaccactctccctccctcggtgatgctcttggctgcacaccctcagcctgccctccgctctccttcagatccccatctcaatcaaccgccgcctcagttgcagatgacccaggcagcaccagatttagtggagatgagcaaggaggcagctgcatggcctttccctatagttttcctctgttttgcctccaggctccattccatggatatcttgctacttttggctaggtatcaaggatgccttactccctgcaagcgcctcgtcgcctaggagaagccgtaaaaacactgcacagtatcattcatggggagcaatccatagcagttcattctagattctagaatgcacaaacttccgaggttaccatgctcagaatctaaaacttcaactaacattataaaagctaaatgttaagtcaccaataacagtttaatttggttactcatgtgaaactgcatatattctcattagccaaattaaattgttaagatgtgttccaggtaagaagtcagcaaaatcttatggaacaatttatggaactctcattcgagaaaaaaaacaatttatggaactctgttcaacaccattcaaaagcctacacaggcttactaataatatagcacaaaggaatcatgttaataagcacaaaggaatcaggaaaaaaaataaaaccttgaatttgtacttcgagttgcctgatgctggtgacctcatgttaataagcaactaaaacaatagatccgtcaaacatctttatcatctcagaaactggtttactagtatttctactacagaaattccaatgaagtaaccatggtgaccccttcctaaagaaaaaatattctctaaagcatccaaaaaccaaaggtttcgttacaatcaaaatattacgatgatctgttttattgctgttccggttagtgttttcattctggcctcagtttaggcctttcccacttgatgttgatgaaacactgatccacatatattggcattaagtgacagagccaaaagaatatattgataagcccattcagcatgtgcttgtcccgtataaggatcgttctgtatagaaagcaaagaacagagtaatgatgaatttcaggtactaaaaattccttttgttatagatgaaagaactagataagggtaaacaaggtgcaagaggagaaagttttatctgttactacgaaatatttatgggtagacctaatgagcagaaaaagtatattcttatttaccacgaattagaaaaaaaaaaaggttgaaggaggaattctttggagataacccacatgaacatgaacccaaccggaatcagttctattgtagtggaggaaagttaaggttgttcagtgaagagacttgcagaacaacaagaaacaagagtgatagtgacgcaggggatgagagctttgtgccacaggcaatagaagtacaaaccagaaaatgccaaaaaaaaatggacacatctaatagttatgaggcccatgtgagaagagtgacacaactagcacaatatttgagtaaaccaaactcttcagtactacgaaaaagagtaaaccgaacttccatagctgtctgacatagctccctcgaattgtaaagtaccttttgatatcatatagcaatacaagttcagggaccagtgtagtacatggaagctccaataagggtcatcactactatcagaaaattattgtgagatgtgagaagaaatggtatatcaacaaaaccgattgtggctcattgcctcattgaatgggttaaagatagtaacttcgatatttagcataacaaaacagtaaaatacatagattgaaaacagctaagtgcacctcagatttccatgaaacagcttgtaaacacactcacatgcagcctagttaacatgaacccttttttccatctaaggcttgttcggttattcccatttcacgtggattggatgggattggaaaaaaaatatgaagaactttgagtctttgacttgtttgggatttaaacccactcaatcccgctcaatccacatggattgagatcaaacagaacaggccctaaatgagtcagagattaacttaacgtggctagtgtaattggatagctctagctacaagagcattgttctacttgtagctaagtacactaactagagaaaagaatcatggaaacacggtccaagctccataagaaccggcacacagtaacaattcatacgagagaaaccatggaatagagcaaataccaattccaatttgcacacaaaattcgtaaatcattcaggtcaactcttcagaaacacaaatacacaatggttcagttcaggatcaagctgagaaaggcatcaccaaattacaagccacgcccgattcttcactacagagccgaaacaaaaatagtcccgctgcgtcctagatcacgtaaggagttcaggaaacagtcctaggcctagcaaccagatctagcattttgagtgatgacgattacctgtgggagccgtcc

SEQ ID NO: 1243 - DNA, 1079 bp, Zea mays
  Intron number 3 from transcript GRMZM2G127154_T02 (locus G RMZM2G127154) derived from phytozome v7.0 (chr-ID 6; pos 9 7913310 to 97914388)
gcccaattcctccaaagctgcttcgacggcagaaggtgagagctaatgactttgtttctatgtgtttcacttgtggataggactaggtgacgaattgatatggttgatgtactgtgactgttgaagtttgtggattggaccttagctgacacctggtttttgagtatgcttgtctctgggtttcaccttttcgatgatgcagcgtaggtcataaggcgtatatttgcattggaaccctacatgaagactactgcctattggttcatgaatctggtcttgtcaaatcaaatttaatatggagagaataatcaaaagcaagttattggatagacttcttagttgatatttatttgccttacaaaagttggtgtgcaactgaaaaataggctcaacaagtttcattttaaaatggaagaacaaaagtactttaggaatgtaattaccataaccggagctctcttcgaacatggtagtcttcatgtgattgagtgaactctatgatatgttggcttgatttccatggaatgttgtcagcttatcctacatatagtcttgtccttgagtggaatagttgaaagtttcgagtttcccaaacttatggtcatcatattaatacagcagcagcttggaatttttggtagattaggtttgttgttcttttttacagattgttatggcactaaataggctcgcctttcctgacctccaatgttttgctttaagctgcagctgctggtttaccagccaatgcatgtatttggttatccggtttatttaagaaatttgtttctgcattttcccaaggaatagtttgtgctaccaaggaagatgctttttaaaatatggctttagtatttattttttttggttgcaacttttttttgtaactactatagccaaatcaattcttgcgaataagactaaattctttgattttaaaaatgtccattgagaaaaagagactattgtttcttaacttggcacgtctgagacatggatcgagctgccacagatccttgggaatgatctttctaatgaggtaatgggatcgtgcaggtgctctgatcaggagggccgaa

SEQ ID NO: 1244 - DNA, 4722 bp, Zea mays
  Intron number 1 from transcript GRMZM2G018462_T02 (locus G RMZM2G018462) derived from phytozome v7.0 (chr-ID 10; pos 141478465 to 141483186 reverse strand)
gcgggggtggccatccgcggcgtactttgtggcaggtaaggtggattaagcaaacatttcattgggattgtgaaatgatgatgtgtagggctgcatagttatgatttctcactgaatcataggaagttcggtattcttgtggtggggtggggaggagttgtgtccgaaattctttgctcttttacctttacattacatggctagctatgcattgtttgtattgagttgatacgtaagttagaaacatactgacttcagggacacgttggaggtataattggttcgttttaatttgagtggatggtcatcggtgtttcacaaatgggacctgtccaatgcaagtgttgttccagacatttttgttccatgttattagtttttaccattttgaaatgtgatgtaataagtctagaacttattggtacattatttgtgcggttgaagttgaaatgtttcaaaacgtaagttgatttaaaggagtatgttttctgccttaactcacctgacagtgaaacctgtgtttgttgataacctaatgtgagtctaaacaatgcctgtactcaaagcaatgtgcctttgggcagtctagccgctagctctagcccttgtaactatggagtttggagggttatgtgctccataacagtttcttagaattttgagatattattttgtaaatgatgactcccaggctcccagccatgtgagatagcacagttaagctcggtatacatgtgaagatgaattgtcatgaacgtaggtggcatataagtttgtcaaaatagtgatcctaaatggcatcggaactcaaatggtaggattgcaaatcgtaggatcataactaatagaattgcaaaatcatatatttaccaaatagaatcgtaaaatcaacctgatcaacaagattgtatagtcgcaaaatcagatgatagacttgcatttttataaccatgctgcttgtcatatcgaccctgttgaaatttgcatggagattggttatgtatctgtttcactcggaatacatgacgttccttaagatattttgttaatgacaattagttctgatagattgagaaggtattgttttttgtgttgtgtatggcctagtttctgagatatagcaaggcagaaacagatacttatcacttaccatgttggtatgttctgtttgcatgttattctcattcttatgtgttatcttacaattatttcctcccctatccctgttaagttgaaacttgaaaacgtctttgctatctgtataaatgataccatgcttctgttctgtagttctctgtgctttctgtacgggatcaatttatgtatgccctcagttcctcacaaatttatgtgaagcaaaacagttatgcattacagtattcctttagatgtgctattaaagcagaatcattttgggaattgaaagaattgcaaataaggcacatactatccctttcagcacttgttgattcagtaaaaaattcgatcatgctgtgctaaactgctagcagaaacattcattttcgtatttggtttgaatgtactggtaacaaggcatgatgtggactttaaatatcacttcgtatttcggtcatgctgtgctaaactgctagcagaaacattcatcaatttggcttattttagtttggagaattttggcagttgctgtgttaaatgaggattgaagaaaaaaatggttggcttctagcttgatggtggatatttgataaacgaagtttagacattttgttgattgtttgtgtctggtcagattttcacaaatgtttgtaaaggtggccactgttagactgtgtgtgtgggccggcactactgttgggctgctgacctattaaggttagggtcatgtgagtctatatactgtacctcatctcctatgcaatacaatgaatattgtcattatcttatatggtatcagactaggttagggttagggttttcccttctacccccacagtcgccacccctttctctgcccaagtccagccgccccccggaggctcatccctcactcccgggggcggccacatcccagccgttgccccctctcctctgctccccgcccccagcagccgccgcccaccggcgcgagcgcccgcagctcgtcgcgttcggccccgcccccaacctccgtagccgacgtttggcgggcgcggtcgtccgccccgcccccaaccggcggtgccctccctcccccgacgccggcgcgggcacgacccagcacccgctccaccgcgtcggctccctcctcctgttcgccggcgcagccccccctgcgcgtcttccgttagcagatggtcatggccccctcggcggcgccaaccacggcggcgcgcatgcgggtccagcagccggcctagatccgttggtggcggccctcatggcagtcgatgccgccgcctccctggtcacgagcgcggctttcctcccccatctaggcacgggtgcgggtctccgccccgtcgtcctgctcaccatgggcttcctccctgctatgcgccgccgctggccccctgttcaaacccgtcgccatcctggccacggacgcggtcccccttctcgcacccgccggtggcggccttcttccgcacagctggtcgcgtggtcccccatctcccctgtgaagccggcggcctgcaacctgccgctgcggccacgcgggcgcgcgtgcaggcgccgctgcgggacgcaggggagcagcgggcgatcccgtccccaacagtcgccgacccttcctcccctcatcctcgcgctgaccacctcctaactgcccgcactgatgcccaacagtgccaaatctttcaagtttctcccgtcgccggcgtcatcgcccccttgtctggttgaatctggcgcaagcctctgcccggctggaaccgccccgtcgccctttccccttctacgtcgccttcgttggattcgtcactgccgcggccttaccgggtggattcaccgttgctgtgacattcctggctagatccgccatccctttggccggatcgccgtcttctcgactggatctgtcgctgtcgtggccttcccggccggatccgccgttacccattctattctgccgcgggcgcagccaccatgactggcgcaaacacgtgcgctgtcgccggcctccctggcagggctcctcgatgttcggacaatctaagaagcaagaaggtcggcgtgctggtgcgcttttgttgtgtcgccctgtcgatcgttgacgctcgaacgtcgaccctctcgaagaacaggctactgttgtgtgtctcccgaccacgaccaccttgactttggctaactcggcatctaggggctatcgtcttctcggagtccacatcggtctctaccccagccgcaacattcgcgccctcacgacgctgcgactacgggagatttcaacccgtcggctcctaccttcggcttctactctagccttatcgtgtgtggtgccctccttgcgactgtggggggatgttagactgtgtgtgtgggccgacaccactgttgggctaccagcccattagggttagtgtcctgtgagtctatatattgtaccccatcttctatgcaatacaatgaatactttcattgtcttacaaccgcgaaagggcctctagctgagttggttaggtggtctgagtagcactccttaggtcctgagttcaaatctcaatgggagcgaatttcatactgaggttaaaaaaggtcactcgctggttctcttagttttgtgcacacaagatgagatgtatggaggtgaatcctcgtgtaggggctaggagggtttaaagcacgagtaaagatttagcctatagggggctgatcctcatgctgcacgaggggccaactttcgtgaccttctcggccagggctccgattgaacttcttaatataataccatgtaggcggtctttggccgaggttttttttttgtccaggtggtcagagttttttggtctccttaggctccaaagtgaccagggccagaaatgtttgggtaaggcaggtcacaatttcagtagtatgtgtagttagttgaaattttttcatggtggctagttcatgttgcatgtggaattaggttggggttatagtttgccgatggttttgtttgtcagcagttgaccattgtttaactgtatctaacaagtatcgagccttgtatctggttgtctgtaaaccatatatacatgttttggttggaaaaaagaagaattatgttcttttgtttgtggagtgtagacttcttagctggataaaacaaaaaccttcattctttcagtttggctatcaggattcaggagtcagacctttggttctgcactgagagccatgttttttcttattctagaatttgattggttgacatttcgcttctcttgctctgctgttgtcattgtctgttacttgttagtttaaatagttagtgttgttcaaaggaaaaattctgcgtccagtggagaaatcaaggaaagatcctactgaaactgacaatgataaaagttaatcctatgctgattcactcctggcgtaagttgattcactttcatcaagggagcattttacgcccgctttattttgtatcctagggctgcatttcaagccaagccattgctaccaagcttaaatctgtcccaaaaccattggtcctcagttcagtatatgcctgcagtgtcaagcattggagatcttttatctaacgttctg

SEQ ID NO: 1245 - DNA, 10105 bp, Zea mays
  Intron number 4 from transcript GRMZM2G180471_T02 (locus G RMZM2G180471) derived from phytozome v7.0 (chr-ID 10; pos 143663719 to 143673823 reverse strand)
ccaggtttgtcctcattttttactctttaagcacgataccctgatttaattgactggggtgcctttttcgatatttggttcattgtcggaagcatttgaacatgtgaaatacacaatcttagtgaaacattttttatggaatcttattgaatggctattaggtgttggaaaaataaaaggtgtttactagccaagttcaataacataatttatttaatctttactgcaaaacagaagaacaagtctcccttagtggagatagctgtacatacagagagagcctcatgggccatatgggtctatagtagatggaccatcatacacttaacatcccccttcaaactcaaggtggaagtggaggatttgaaacattgagtttatcaagtgaagccgatgctgctcttgagtctgtactttaggcaactgacgctcgtgtcgcctcgctctggcggctcggcggcaaatcctagtcgcagccgccactgcccctccacctcgcctacggccttgccgctgctagagcagggtggcggcgcttcccgtgcgcccctgcaaggacagtggcggcgaggagtgctccccctcgctccgcccctccccaaccctaccgccgtgactcgggcaccagacctggacccaatggggagtaggcggcgtgctgactgtgccggctggcgaggcgacagaaggagcaggggacgattgcctgggcggtgggcgcatggcggtcgtggctagcgttgtcgtcctctagttgggcggggcgggtcagtgtgcaggaggactcggatgcgcaggtgagctcttggcgtggcggcacaaggtgcgggtgcttgagcctcgtgacgtcgtggtggccaggtattgcgccgacgacagtggcttgacgggtttgcacagcggcgcacaacaaatgacatttgtacaccatgcaactactcgacaatgatggtcgttcgtgaatctgtgacgacactgagccttggtttgcacagcggcgctgcccgttggccattggccaaagccatgcccgtttgcgggcagacaacggtgacgcatgcaggcgccactaggggtggtaatggatcgcgatccaaatgtttcttcacaattccttaggagaaaatcccttcaatgccatccaaacttataccaatctctgcaatgccatcagaatttatagcttcccttcaatgtcatcaaatttaaattttaatcccttgaatgtcatcgccgttagtttgaagctaacatcgttagttccatttaaagcaaatccctccaatgtcatcaaaatctataccgatcccttcaatgccactagaaattggttcgatctatttgggttttaaaattttcagaataaaaaatatggaattgaagggattttctcactgaaatatggcattgaagggattttctcgctgatatatctgaaaaaccgatccaagggttttgggtttacatgccctaactactatacgactgtattattaaacttgatcttatgcgtggaaaggagcaagcaaggaagcttgcttagaactgtactaaacatagcttggctaatggccaacgggcagcgccgctgtgcaaaccagggcccaatgtcgtcacggattcacgaacgaccatcattgccgagtagttgcatggtgtacaaatgtcatttgttgtgcgaccgatggagtcgtacactgttcacgtatctagtgttgtacactgttcacgtatggggtcgccagtccctcttactcctgccccacgctttgctctcgtacaggacggtttcctcaccggttgggttacccctgtgggctggataaaatactcatggctcgtcagcttgctcggttcgtggttagcttggctcagttcgtttcaattttgtcacaagctgaggtagcatcttagctcggtttgttaacgagtcagcttgagccaactccttagctcgaatgagctagcatttgtcatcaaaacaaagcatgcacttgtgtttctccagccctacctctaacaagcaaaaaaaatgagtcatttagctatttgtataatgaacaacatatacacgtgacatacaaaattttgtttccccaatagaaaactttgtggttatttgtttatatcgatttgacctattcggtttttcatatttttttccaaaattattaggaagcaaatagaccgaactaatatatcggagtaattttggggtttcaaaaagtatggactgaactttggtctatagattttttattctagaatttttaaaccctaaatagatcgaaccaattttagtggcattgaaggtatcggtatagattttgatgacattggaaggatttgctttaaatgaaactaacgacgttaacttcaaactaacgacgatggcattcaagagattaaaatttaaatttgatggtattgaagggaagctataaattctgatggcattgaagggattggtataagtttggatggcattgaagggattttctcattcattagggccctaaaaatattttaattcaaaaatgaatagagatagagcccgatcctaatccgatccgatccttaaattttctagtgtaaaatttagatcccattgtcacccctaggtgccactcctaccctactgagggtgtcgtccatggatctcccttgtcctccgtgttggcgtcctcgcctcggctttcttggggtttcacactggctagttggccgacaccgagctctggtggttggttcctgctgggttggtgcgtcggtggacgacagatggtggcaacgcgcggcggcttggagatcttcactgctctgttgggtcttcggaggaaactctgcctggattgttctaggcgagcggcgacgacatttcgacgacgtttctccttgttgtccagaagaccttcaatttgggtgtttgtcggcaatgtggaggcctttcgtcactccgcttggctcggtggtgcttgggtctttgtcgctctggacgtctgcttgcccccggtgttcggcgtagtggctccaggttcgtcggtgaagaataagagcttcctcgcgtggggcgtgtcgaggcttggcaatgatgcgcaccgcggtcttccttcttgtgtgccggtgtttgtgtgtaggcgttgtcgagtgtctttgatcgtgtgctgcccgttttgggaagtcggagctactcattctttgttgagctcggcaacgatgactcatgttgggctttttgtgtggagttgtcgttgtctgtggtgttgtggtgggccttccatcgtttctcttctatgcactctgtgtaggttttgagcccggtttttccttaaaattgggtcaattccattcttcttaattgagaatcagagctcctgccaatacattcaaaaaagtatgtgctttagtgaaaaagtcaaccaattgcaactctgagggcacatactgaagagcaatggttttctaatgacaatgagaccgagtaaaaagggctcataaaaaacaatatgctactcattaatagtattatgtgaagcatcaatagcaggctcatcatgattgtccaaggtggtgaactagatggaagaacagtagtgtctttgggacgacggttgagaacatgtgttttaggtggtttggaaaaaggagtgaagtggcagaggtggaggaggtggcggagatgaaggtgttacatttgtaggtgacatgatgaaaatagaagactcaggaatgactgtattggacggagaaggtatgttgacaacaccactagatgaaacaggaggaaggtacggaaattatgtggactctgtgggtgagtacgagggttgagtggaggggttgtgaaagaaaggatggttctcaacaaaggccacatcacgagagatacgatgtatgaaacacaaagaaggatcataacaccgataaggcgataacctttatgctcaaaatatggccaacagattgtgtagtcaacttagtacgctcatgaggtacaagcaaaacataacatgtacatccacaaactcttagatgatcatagctcgtagggttatcaaaaagaacatcacatttgtctgacaattttgaagacggttgtctattgatgagatagacaagtgtagaaacaatttcatcccaaaaatgagaagggacaaaagatgaaatcaaaagtgtattagctgtgcctgtttctataagatgacaatgttttcatttaacaactcagaggtcagagaggatctctcggaagcagaagaacaactctcctttagtggagatagctgtatatatagtagattcttcatacacttaacaactgctagtcaaatgaaaatgtttattgaacaacaccatgtggtactctattccaagtatgttttgatataaactgtacgtgacaattcatatcatatttaataaaaacatacattttatagcaacaaagttgttgctaatggcttaatgattgcatttcaacacgctgtactatgccactttgatgcaatgcaattttataagcacattttcagtattgtatctgatggaaaatattctaccaaagcagcctataatggactatttattggacccactcattttgatcactgggagcgaatttggcattcctgggagcctcctacaacaacaacaacaacaacaacaacaaagccttttgtcccaagcacgttggggtaggctagagatgaaaccccgtatgaaaacctcagagctcaacccccaaagaaaacaggggaaacaaaggcaaaggagaaccgaaaacgacgaaacgggggaacacataaaagagataaaacccacaagaaccagcaaggtctaaatgagcacaagaaaaggtcaaacgattaaggaggaaaagcggaactataaatcaaggttctggcacgtgaattgcacacttccaccccttcctatccacggcgagctctttatcaatattccactccttcaggtccctcttcactgcctctgtccacgtcaaggttggtcgacctctacctctcttcacattctcgggacgcctaattattccgatatgcactggtgcctcttcaggtcttcgttggatatgtccaaaccatctcaaacgatgttgcataagcttctcctcaattggcgccactcctactctctctcgtatgtcatcattccggactcggtctctccttgtgtggccacatatccagcgcaacatacgcatctctgccacacacagttgttggacatgtcgtcttttagtgggccaacattctgctccatacaacatagccggccggattgctgtcctgtagaatttgccttttagtttgtgtggcacccgggggtcgcataagacacccgccgcttgccgccacttcaaccatccagctttaattctatgactgacatcctcatcgatgtctccatccttctgaagcattgatcctaagtaacgaaaagtgtctttcttgggtaccacttgcccatcaagactaacatcgccatcttcataccccatggcactgaaatcacacttcatatactccgttttagacctactaagcctaaaaccttttgcttccagcgtctgcctccacaattccaacttttgtgaaacaccactcctactctcctcaataagtaccacatcatcggcaaaaagcatacaccacggtatatctccttgtatgtcccttgtgacctcatctatcaccaaagcgaaaagataagggctcaaagccgacccttgatgtagtcctatgttaattggaaagtcatcggtgtccccatcacttgttcggacacttgtcacaacattagtgtacatatctttaataagattaatgtactttgttgctactttgtgtttttccaaggcccaccacattacactcctaggtactttgtcataagccttctccaagtctatgaagaccatatgcaggtctttcttttgttctctgaatctctccataagttgtcttagtaagaaaatggcctccatagttgatctcccgggcatgaaaccaaactgattttgggtcacgctcgtcagctttcgcaggcggtgttcaatgactctctcccatagcttcattgtatggctcatgagtttaattccacggtaattagtacaactttgaacatctcctttgttcttgaagattggtactaatgtactccgccgccactcgtcgggcattctgtttgtccgaaagatggtgttgaaaagcttagtcagccatactatcgctatgtctccaaggcatctccatacctcgatagggataccatcagggcccatcgcctttcctaccttcatcctttttagcgcctccttaacttcatattcttgtatccttcgcacaaaacccctgttgttgtcatcgaatggttcgtccaattctattgtagaactctcattccctccattgaacaatttgttgaagtactccttccatctattcttgatctcttcattcttcactaatagttggtttgcttcatccttgatgcatttgacttggttgacatcccttgtcttcctttcacgaatcttggccatcctatagatatccttttctccctgctttgtgtccaaccgttgataaaggttgtcaaaggcttgaccccgggctctactaaccgctcgctttgcagacttcttcgctatcctatacttctctatgttttctgcacacttgtcatgatgtaagcgtttgtagcaatctttcttctcctttttttatcgaatacgcaggagggctgcgtatcattaaattaaagtagagggaaaaagggcctgtggcccgggacaaacagaacacacaacacaaacacacactctaaacacaaacacacacttacccttacaaagcacacaccacacagacacaaacgaccccaacactcccgtcttttagtaggctataaggctttcctttctctatccagggtcaaaaagagagcgcaagttcttggctccagcagaaacccacaatctcatctcatctttaaatccatcctctaaggtattaaggcagggtcgagctccttcaaaaacacacctgtttcgctgcttccaaatactccaagccccaaggattatcatactattaaaccccttttttttgctctttggaatcttggttgaagcctttctccaccattcagcaaaaactgaatctcttctcttaggactcacagaagagagaccaatgggggttaaaatcttatgccaaaactgtcttgtgaagacgcaattagatagaatatgctgcacagtttcgtcttcctggtcacatagaacacaaaattcaggatgctgaagtcccctttttttaagtctgtccgctgtccaacatttgttatttatggccagccaaacaaaggtcttacacttaggcgctgcccagctcttccaaattcttttccagggctcaaaggattctgctccaatgaatagagctttataggcagatttggaggtgtacagaccatcgttgctaaatttccacacatgctgatcatttgaattttgaagctgaaaagattcaattacctcccataattgtagatattgctcaatctcagctagggagagattcctctggatatcttgaacccagaaatgagaggtgagggcctgctgcacagtccttacttttttaaacttcatcggaactgcagcagcaataaggggagctatatctacaatagaatacccatgaatccacttatctttccaaaataaagttgaaataccattaccaatggtggtagtcactgctatctgaaataaagcccgggcctgggaagatattttaagatccaggccactccaaggcttcgaaggagcagttttttgtagccaaagccatcgcaattgtagggcccagttcatcttttggagattaggaattccaaggccccctaaatcaagaggccgagagattttatcccaagctacaaggcaattacctcctctagcctcctttcttcctttccacaagaagttccgttgaattttatcaatggctttgataacccatttaggagcattaagagcaataaataagtaaactgggatggcagagaggacagatttgataagagtgattcttcccgcaagatttaaaagctcagccttccatcctggaagcttggcagcaattttatctatccagtgagcgagatccccagcacaaagttttttgcagcttagagggagaccaagataggttgtgggaaaattttttgaggcacatcccaaggtctgaacagccagcgcagtcctctcagtattgcactggattgggtaggagaaacttttttgcaagttagtatgaagacctgaggcaacaccaaaacacctcaaaatttctctgactaccacaaagtccccagaaactggttttacaaacacagcaacatcatctgcaaacattgaaaccctttggctaatgtttctgccagcaagggggtgtaataaaccacactcatctgccctgataaataggctattaagaacatccatgactaggatgaataaaaggggagataaaggatcaccttgtctcaacccacgcttgagatttataggctgtccaggcactccattgacaagaacttgagtggaagatgtccatagcaggttcaaaatcagattgcaccaaccctgcccaaagcctaagtgttgaagaatttccagcagaaatgcccaatgcactgagtcaaaggcctttttaatgtccagcttcaagaaaattgcagggatttttttctggtgcaacatcttggcagtttgactaaccataataaagttatcatgaatacatcttccccgaatgacaggctacaaaaaacgaggtctcaatcatcctgagagatgccccctttgtgaccaagagcctgagactatagatcatctacttgtagggtgtgtctttgagaggaacttctggtttatgctgcttggacaggtcaacctccaaagttttactcctcaggttggagaagaaaatgtcatgcagtggtggaaaagctgcagtgaccagctgcaacagattgctagaaaaggtttcaactctttaattatcctggggctttggacaatttggaaccacagaaatagatgcgtatttgatggtctttctcctaacttggaaacagccatcagaagagcggatgaagaaagagaaatgtgggagctggctggtgccaagcccaagagtttggccctccttactgcctcccggggattggctcgtagtgttttttagtttgtttagatggatcttcgcaggtttgagttttagacctccgtaaaggagtctttgtacctggtctgttttttcagaccttcttttccttcttcttaatataacggggcacagttttcctacgcttttcgagaaaaaagtcaaagcatcactaccatatttgagcagtttatatgaaatatcgtagttgtcaatgtatgtgcttcctctgtggttcaacaatatgtcttgagacttgagagataagtccttactctagtaatgtgtgatggcattactatttattctcataacataaatattagaccagatttctaaacatgatgtcgaagggctgaattttttatataatatttgtcaaccttctgtgcgcactcaacttatattgtataaatgggcagtaagttgctttgggttccttaactttctgtgcgcgctcaactcattagttactgtaacagcataaatattttgggataattgccaaacacatacctgttgcagtgtctaacttgaagatatgttcctgtgtgcacagttgcgcacacatttccgtgatcacgtttttggtagaagtcatatatttgttttacctggaagacaatttgaagctaccatatgttatagtttccaatatattcataattgcagagagatcagattagtaaatcttttggaaactctggttgcaattctcatcctttaataatttgttcgtagataaacatttaaacaaaaccatgtgccttaaaaataagcacaacaatgttatctgaattttttttgttgacagcaattgaatctaacacttgaactttcaggag

SEQ ID NO: 1246 - DNA, 2712 bp, Zea mays
  Intron number 1 from transcript GRMZM2G070432_T01 (locus G RMZM2G070432) derived from phytozome v7.0 (chr-ID 9; pos 8 758504 to 8761215)
gcgcgcaggtacgcctcctcgttcccccgcatgcctccctattccacttctgttgcctcctgacaggcgaaggctccgtggggtccctgtgctgcgtgggggacgaatcagcgagggcgcttagcgtcggtgaggagctcatggccaagagaccatgccgccgggtatacaggatcgacggactggcctgtctgtgtggtgcgaaatcaagatctgctgggggacaggctctgttggtgttcaatttgctatcttgttttagttcttgcttgtttcgattgccatattaagtttcatactgatctggtagggttttgtttcccctgcgaggcgatttccttcttctctgttgtggttggggttgggtggtgttagttttggttaaacaattccccttttggattagaggggacagggcaatgaactaatttgccaactcaagcccttgttgtacacatggtttaatcttgggttacagcacatgcacctttcagatcgcttgcaaaaggttgtttagctatccttcttctctgttgtggttggggaagccgaggttcaacgagggtgccgtgagtctgctctggacgctagctctctgtgccgcacggatctagcgcgggagctcagccacggctccgcgcacacaccccggcgacgtgatagcacccccacctccagatgcctgcactctgcgccgtgcagatctcacacgggagctcagccacgacacctcaggtaaatctccagtccgtctctttgttccgctccatgctccatccgaggagatcctgctttcgtaggttcttaacaacccgtgcaagatttgacagaacgcaacctcgggcttgaaaccctagctgcacatagctgtgcctcacgtcctcacctcacccactgcacggcaggaatagacgtgaaggtcgccaagaattattggaggtacatcgacgcccgacagctgcagtagggatggtggtcgccgtgccgacagtggtggggatggcccttgcggcgaccatttctattgttgcgttgtgagaagaagataacttgttttttaagattcagtgttttattatgttttgtgtaattgtatatcgtattcatgtccaataataaaaaatactataactatgatggaatcatctcaaccctgttagtatggtactttggtttgtagttatagggtcaaagtgttacaaagttgcattgtttttggcattagaaaatatgatggatcaacatggacattaggtgccaaaggtcatcttttgtttggattattcaaaacaaatgcccatcaattccaataaacgataatgttagaacagtttgtgcaataattaaataaaaaaatgtatcaggtcctacacttcttggaacaagaaatattttacgtccagtttgggagtcttaagttatagttttaatgaactgcaaaaagcttaacttatcctacgttattacctttttggttggtttcttacttggtttgctccccaacaattaagcagcataatctgttgggacttgattttctgtacttatgcaggttgggattagtatttcataagttgtgtaatatgtgtggtaatgtttcacctgtgtttctacacttttaatcgaatcggatttattccatcgattaggattggtccgcgtcgctgtgccgttaactagtgatatggagatgtagtcatctctggttgggaataggagccgttagtgttatcctttgatggttgacccactacggggatgaaatttcctgctagcgtgaaggagatgtgtgagtgccggttgaagcgagacttcgctattgccagtcggagttactacgattggtctttgctttatagagtaacagtttttgtgtggtaaatcggatctgtctttcaagagatcagaaaaaaaaacgacattcggtcagagtagatttcgcccaacgaatacaagtagctgaatctgtagctttttttctttgcaaatgtggaaactatttggcatgttgagctattttgtagtcccatgagtttgccattgaacattgaagggtactcattatttaaccttgaatgatggtcacgatgtttgtaccccttgaactatagtggactaccacccaagtgtttttttgaagtttgaacagagggttatccaatttccattgttccaagataacggaaataagatacgaaacaggtaatgttgatgttttctagggggctgtaggtttgatttgaccccacgatggatgtaggacattgtcttttgttattgatttttttgtaatgtgtaggattgaaattgaaaagttatatttcctatttattgataaaaccattttgttttcaatatgaagtttcctttggtttggcaattcattgtcaaatagatacccacttgttctgcaattaccaaacatgttctctcttttttaactctaaacctggaaaatcttctgtggtatcataccctactttattttagggtgtcattgtattctcctaaattgatactaagcttttgatagatttgagtgatatatcagcaacagttcatgagtatgtgcctgaaactatttggaatttccttgctcttaagtcctattgcacacttgttgctgttttattgtgtttgtttgttgaatatggttgataaaaaacttatgatacaggttgtggaggtttctacctccaagactggtaagca

SEQ ID NO: 1247 - DNA, 3865 bp, Zea mays
  Intron number 1 from transcript GRMZM2G138178_T02 (locus G RMZM2G138178) derived from phytozome v7.0 (chr-ID 2; pos 1 74106625 to 174110489 reverse strand)
accattgtggcggagtacgtcgagaagatcgtgaggtacgtccgggcccctggccccctattctcttctgttccgttcccggtggccggtactgctcttccctttcaggttgtagtgagcgagagaaggggaacttgccaacttggatatgggagaagtggttctggggaaatttcttcttgcctcttcgttagggtttagagggaggaccagactcgcaggaagtttgattgtcgaggctgggggtggaagagagaatgcctgttgacatgtagtagagaaggattttaaacattagcttagtgttggattatttgatgttcctgattgggtttggtgatcattactcaccgggaagaagcgaaggacctcttcgctgttagtgatttgtatgatggaagggcatatagttcctatatattgcctaattggtgatcaggcaggctacgggagtaagcgacagttaagaactgccactggaagcttgttggatgagcttgccagtttttggaactgtgctcatggaggtagtcagttcgaagttgatgttttaggtaactcattgttgtagatgtcttctcgcctattttatctatctgtatcatggcttcgatcttctgtcttatcacaacagtacataagtatatttgtttttctcgaacacacaggagactgcacatctttttataaattagggaaacgaaacaaaacaaaagggtttgcaaagcagagaacctgctaaaaaaacacaagaccaaagagctagttagcaatggaaccggccacattcaagaccctagctaggtctatggatctcagagccttagcaccagccataacccaacaaactgattcatcaaggaagctcctttgaagccttcccaatgaaggggaatccccatcaaagaccaccttgttacggtcaagccatatacaccacgcccctaagatgatgacaccattaagcccccttttttgcttttgtgcacactaagctccacctgtttccaccactctgcgaaggaaggaacatcaacagtcggagtgaggtgaaccaatccaaatgggaataataaactgtgccggaactgacagacaaagatataagtgatgagaaggtgctggattgtttctggcccttgatcgcaaaatgggcaaacaaccgggtgtggtaattctctcttttttaatctgtcagcagcccaacacctattcttcttagccaaccaaagaaagaatttacattttggtggatcctaggttttccaaagtcttttccatggttcaaaagtagctgatcctgcaaacaagattcgataacatgattttgaggagaattttcctgaagcatcatgcctccatctatgttgatcgatatcctgtgataattcaacctccctcaaagaatcccaaagcagcaaatattttgtagacccaacagagaaagatgagtcctgatatcattgacccaccggaagttatcaagggcctgagctacggttgtagaagatagagctcatttacccaccttggcgaccacatctaggacaatgtccctgaccgcagccccattcaaccaattactagtctagaaaagagcgctggccccattcccaataatagatatcatagaatctgcaaacaaatctttgacatgctgctgcacaggtaggttaagaccctgccatgtatcaattctttctagccataaccactttgcttgcaatgcccaactcttaaactgtaggtttgggatccctagacccccaaggtagataggctctgtaaccgtttcccaagagaccaggcaactgcctccattaacctccttccttcctttccaaataaacccccttctaattttgtcgatttccttaaacacccatttgggaatattcattgcaatgagaaggtagattgcacaaaccgcacaagagttgtcctaccagcaaggttaagaaggcgtggtttccaatttggtagtcgctctgcaatcatatctacccatagcataagtcacatcttcttagttctttatctgaaattggaagccccaagtaagtgcaaggaaaggtagccgatgtacagttaagaatgctgtggccttgctgaatagatgacacatcacaacttataggaatggcacaacttttatgcatattagcaaccagaccagatgctgcaccaaagcaatccaaagtgtagaaccagacatagttcatctattccaagttttacccctatttgattggtttttgagctgtttctgacttagaatctaaattgttgcacttatgaacccgtgaatcaaagactaggcaagctagttagtccatatggttgtgatggtcatcaagcaccaacatcaattagagaaaatggtaaaggccatttcccttttaggatcagggagaaccacctttctccgggaataaacgttaaagcaaggaggtttaactttgaacctgtcatcaaggggggggggtcagaccatctaaatgcagagaggttccaatctcagaaccagaagcattcaaatctaagggcttcgccatccccatgcaattccttgcatatttgatttgaagttcattgacttaaccaaattaactcttgaaagttcctccccactgatttggtcaactgcggcacccgaatcaatctctggagaaaggatgggcgcatgagatgcttcggaaacaagacccacagggatcgagggcacaagattaaagaacttcaataacgaagagatcgcaattaaggactaggtagctatcacagggccatctggaagagggaaacccaaggtggcaggaactgaagcgttctcttgagacatttgaattgaagaccctgttgaaggcgctgtcagctcgggaacgaggcacaagccgctaggactgagtattaccggtctatggtcctaaggagctgtcaggagtaagtattgccgatctaggagtggacggggtgttacacccgatcaccttcacaggcctgctcgacacctatggaagaactggcacttgatcatcctaacgacccaatcgtgttgcaaactgaggccgccacagggagggaaggtcggacgataggccaccacactagggatcgctggactggacgacgcctcccatcggtgcgggcacacgtaaatacggtgcccaggaagccgacagtggaagcacctcactgggcgacgacacacatcaacacgatgggatggggacaagcaattgaaacacttcccacgcaagttgataggctatgctctgggaggagttgaaaagagggggcgttggcgaagagatcgtcaacccacaaccttcatcatccttcgcaacaggaggaccggaggagacaagcacctcttgaacgtgcggcgaggttggagaggagaaggaacaagatccacgtcgtcacaccagcgttgagctttagagcggccaacaggacgaggggccagagaggaagagggagaaggggagatccccgacgcagggtagaggttggctgtggccgccggacttggggtaagtactgacgtgaggctgttggaggtaggggcgctaggggggaggggaggaaaggcttaggcgtgtcatgccacaacaatcctcaacgatgtacaataatctaaatatatttgtaaatttgtttgtttttaaagaaaatcgtctgattagcatgctagcaatcttggtcaatggtttgaactccagttccaataccactttcgtaattcatttttcacgcgattgtgctatgcaaatgcatcattttaatttttggtaactgattcatggtgaaaattaaaacttgtgcaggagcttttgtgcaagtgaactgccaggccaggtaa

SEQ ID NO: 1248 - DNA, 6658 bp, Zea mays
  Intron number 2 from transcript GRMZM2G153215_T01 (locus G RMZM2G153215) derived from phytozome v7.0 (chr-ID 10; pos 110303832 to 110310489 reverse strand)
tgttgttcaaccatcgtcagcaaaatcaaaaccaggtgagttgcaagtttttgcactttgaggaaatttgttcttatggttttctgacttataccattcaacttattagacttgatataaactttttttatcagtatcatattatctgaaaattccagttctgctgataaaagcttcagtattttattgttatcactattgctttagttttcttaggctttattttctttccttatctaaggttcatgctttaccatgctgccatcatttttttattggctctgtacttccagaagtgtgttctttttgtttacttgagagatactttgtaatagaatgtaaaaaagtgttgacacgagaattattcatatctgctgccgttagagaaagagagagaattaagctatgagctagagctactctataatttgaggttaaaaaaagcagggtttatggagacaatgttcaagaaccgctaccccaattcttcctgctaagccatagtacctcatttgtggctcctttcttgttcataattaggacaccaggaatttgctataaggctatctccagcagccttactcatcccatctattttaaacttcactctgtaaacagtgcaatctgcagtgtaaaacaatgttttgcatggtcatatgcacgatctgctggccatagcctaagtcctatgcaaactgactgttgacatcctttttgttcaaatagtgagctgattgtgattcacagccagcctgattagtgacatgtactaactaaagacatgtattccctttactcttttggaaccaggactcaaaaatgtgcactgacttggccaaaatcactagtttttctgatttggagtgttttttttcatgttttgtactgtacacttgcaaaatgggatccaacccagggttgatctctttctcttatatttttttttctgttctgtttctccataatttgtcttctctgttaggctatctcgagcaacctttcctatcttatctcctattttagactccactatgtaaacagtgcaatttgcagtgcaaaaaagtatgctgcatgaccatatgcatggtctgctgggcacaaccttagacagccacatatgcgtgaatgggctgttggcaggggcggaggcagggcccgtccttcacgggcacgtgcctaggcttcgactctccacccggctagccggttgccctgcttgacgtcgatgtgcatggcgtcgattctttctttcatcccaggcatagcccccactagcacgttttcacgtgtgtccaatagctgtgtcgcagacacagatgctggtccctgagcgtgaggtacgtgtgcgcgttcgaggacgacgacggggctatcacggctcccggctgcctcgtgtgggccaaggtcaagcaccatttgtggtggtctatccaggagttccacgtggcggacgtgttggtgtgccactggccgtgctgtcctcatcacctacttctaggacaagaccttcgcctggaacaatgccgcgacgctcctctcgttccgcactagattcccgcacctcgtcggcaccgccgtggacattgtgctagtcaaggtcgcgcgccgtgtgtttgccgccctctcgtgctgctgctactacgagccgggggcgacagggatgaggtagccgccaacaggcagctgaccaataatgcaagcggtgcctaggcttccattgaagcctagctctaccacttgatgttggcctactatggatattatagattgattgctattgtattaggcaaggagatctgatgatggtcatacttctaaaaaacaacttgggtcctcctccttgcctatatatgtaccctgcctattgacctcctaatcaatctattaatttcacatgcaattctattactctcatggtatcaagagtctaggtttctttcagtgtcgtagctatcgcgcacactctagctacgcatgccgcttgtgaaccccctccttgctgcaaccacggctggcaccctcatcctgcccgtgcagtctttgcctactgctgctgccactacagttggtgtccttgaagacaaggcctcctgcgcactctggaagccaagcgcgcccgcatggcttcccttgagaggttgaatgcgcccacaccgccaacctagaacccaacgggctgccattgttgttgaagccgtgaccgcgtcccaggaacatgactggtgttttgttcactcacgaagctgccgagtcgtcctccactcctctcgatggcatcccctcatctgttggcaacctcgacaacttccgctcctccccgacaagcgtgtcctcatcagcacctccgagttgccctactggcccatgaggctgccaccattatcaacctgcacgcttaggctgttagcatccacaacatctgctccctcgtcctcgccattctggagatggggtccaacaattatacttgctggcaacacctgatgcttctggtcctcaccatgttctccctctagtaccgtgtccttgccaatgttgttgaccacacatactctgactgggcgcgtatgaaccatgttttcgccatgatcgcaaagggatcttgtggttcaaagctcgacttgttgttcgtaaggatccgaaccttcgaaaacggatcttggatgaggcacacctatccaaattctcaatccatccgagaagtaataagacgtattaggatctttgatcattgtattggtggactagaatgaagagggaaattgcaaagtatgtctccgaatgcgatacctgccaacatatcaaggcaagtcacctgaaggtagctggaaccttgcaaccactacctataccatcatggaagtgggatgacataagcatggactttattatagatctgcccaatacttcctagcaaccatcatggaagtgggatgacataagcatggactttattatagatctgcccaatacttcctagcaaccatcatggaagtgggatgacataagcatggactttattattgatctgcccaatacttcctagcaccacgactctatgtgggttattttggacagactaaccaagatcgctcatttcctacctgtgcacactacttacactgcaaggaaatatgcggagttgtatatcgaccgtattgtttgcctacatggagtacctaaaaccattatctccgatagaggtgttcagtttgtggcatctggcatgcttttgggagcagttacaagaagcacttggtaccaccttgattagaagctctgcctaccatccgcagactgatgaccagaccgcgagagtaaatcaaatctttgaggacatgttgagagcttgtgtgatacattatgataagagctaagacaagtgtctttctctggcagaattttcctacaacaacagctatcaggttagtctgaatttctcaccttttgaagccttgtatggcagaagatgtagaaccccgctaagttggtcacatgctggagaaagagaaatctttggccctgatttagtgattgaggccgagaataaagtcaggatcatcaagaagaatctcgaagttgcctaggccaggcaaaaaagttatcatgataagaggagaaaacccctgcaatttgaagtggggaatcatgtgtaccttaaagtctctccgactaaaggtgtacaaagatttagtgtaaaaggcaaattagctcctcgctacattggaccatatgtgagatcacggaattacgtggaccagtggcatataagctcaagcttccacctaaaatgtctacgatacactatgtcttccatgtatcccaactaaagaagtgtattcgggtaccgacaagaatcattgttgagcaagatatcactatagaactagacttgacttatgaggaacatcctattaaggccctggactgcaaagaaagagttacggtaaaaatgtttaaagttcaatggagtaatcataccgaggaagaaataacgtgggaaaccgaggaatatttgaataagaactaccccgagtttctacctaagaatgttggtacgtaatcacaactccacttagtccattccaatcttgaggacaagattcttttagggggtaggctgtaacattttaggtgttacctagaatgttacccaaacctagaccacttgacctattgtcacatgtagattagatagggcaaaaaccactaaaattaagggccaaccttgtaactaagtgataaataccttagggagcctaactcacccaactcatgtgaataaaataaaagagagtggccaaaacccttaaaaccctctttatgaactttggagtgcaaaacaaaagtatgaaaggaacctaacctaaacacttaatcaaagaattgacccttaacaaaagttgtagctgataaagtgatcaacaaaagttattaagggtaaagtccaagaaaagggtagcaaaggccctaaacttactaaagatgtgggagaggagagagaaaaattcaggttttttctcctaatcccatacccttgctttaatcttgggctttgttcactaagctacaaacctcaaaacgaatcactccaataaacaaagatgtgcctaattaccttgggaatgctctggagaagtttgaattcgagaccatactgtttgacatgacaagacacagttttcctctcggattacagcagtgaaacgaacccctttttcacacaaaatctcttcaccctcaacccaaaatctcttgacctccacacaaaagagctagcttatagcttaaggaacaaaacttgtgcagagatcttggcaagatcaggcttagtggaatgacaaagcacgaaagaaaaccggagcaagccaacgtgccaggtgttcgacactggctggcacgtcacgcgctcacttgccgcacgcgttcgcccttcgcgcacggtcggcttggtcgtcgtcggtgatcgcctgagtagccagctccgccgccccacatcctcttcccaaagcacggccaccgcggccagcccataccgcacctccctagccccgaccaaagccaccgtcactcccagagacccagtgaagcttcccaaccacttctccctaccgttaccacactgcagcagcgtgccactactcgccggagttcccaaccccgtcggtgaacgtggacccgcgactgcagcccaccaccgtccgattcctttcacccacagcatcgtcgcaaccccgtgaagctccccggccagcccaattgaactctaccatctccagctagccgaaattcgtgcctccgccgactgctgccgccggagcatgtgatccagcgactctgatcgcgacgtgcacctcgacgtgaccgtcgtgccgccctcaacctcgccagacccttccccggagctctaccgccgccggtaagccgctctgccctgatcttcgccgtcggccactgttccagagaggagggattgtgggttagggaggacagaagcccagggagttttctacgaacgctatgactcatgtaaatagtaatccgaggacttcaattgaaatagaaaaggaaggaaacagccaggggcttagatgcaaatgcattattctttcccatttactttatttcattttaaaatatgcagaaaacttggaaaactcataacttgagaaatataagtccaaaaatgatgaaaccaattttgtaggactctggataatctaaaccttcaaataaaaataggggatgacatgtttatagactttttctgaggattttgatttaaatagataaactgctcatttcctgatagagtattaggcaagaagatccaactgtggtcatacttctataaaaccaacatgggtcctctttgcctatatatgtacccctgcttattggtctcctaatcaatctactaattttctgcgcaattccattgctttaattctcattgttatctctcttaattgatgcccgatgcctgttagtgaaattcaaaggcatggcataaaatcggaaaaaatatattacaattggattcccatttagcgaaactgtgttctaaaaccacttcaagctgtaagtcgacctggttttgttagttttatgagttaaaacgtttgatgttgtggtggatgttttgcaagttcagatgtgtaaaattgacttgttccttaagtaaaataatttgatattctgtttcggcacacctcatcattcattgacctctttttgggtgacttcatttctcaactttcttttcactagccttgttcttccaggaataggggcaagagataagctcattcctttcctgaagtgaaattagaagtaaaaaaaatgataatggtctagtcatactaggacaaatccaacccacaaacaatgtgccccataaccataagtgagaatttcatgttagcatgtctgtcattgaaaactaagttagcctttctcgaaacgggaggaacattgcgtgtcaccgattctggaaatttggtggttgctctttacatttgtcttgtgcagttgaagtttttggattaagttgaatcatcataactttgtaactaagtaggcagccctgaatgttgctacctcgtgttactcttttctgacagataagaaggcgaacaagttgcccaaaaccactcgt

SEQ ID NO: 1249 - DNA, 1238 bp, Zea mays
  Intron number 3 from transcript GRMZM2G074122_T01 (locus G RMZM2G074122) derived from phytozome v7.0 (chr-ID 4; pos 2 27278224 to 227279461 reverse strand)
aggcacttcagagggaggtaaaatatattgacttcaccacttgagctgaaaatgttttattaaaaagatcactttgatgatttactgcagattaagcgcaccacaacctttcgttaacatttctagttggaaaataggtgttcattatttagctgatcatctcctaggcccttttgtccttgatggagccaggggcttcggggttttaacgtgcggatccagagcataggcatctccacattagtgttattagaactttgtcccactcctgaaagacaagttagcttatgttgcattttttggcctctttatgtgagtgatgcctgtcagattctgagactgtataccgttctttgggctagaatgctatatctattgtctatataccgttcttttgatagtaggatacgtaataacttgaacaagacaaggtgatatgaacttaggaagaaagcagtaaagcatatacactagggcagtttcttccttgagaaagaaccaagaagatatacccaatgggcaatggagattagttgataatagcactgacagaagtctagttatctgagaaagttggaaggttctctgggtgtgctgtgcacaacaaatatttcctgtgtgtgaaattatagtcattgttatttgtgctacagacttctacctcaaggttattgttatcagaagtagctgtcaaacctttggaaataactaaccttatgtcaagccaactcttaaacacacacaaattattgttatcagtagtgggcaccaaactttttgaaattaatctggtgaagagcacatatttttgtagtttttactaacttgtttttgaggttatattagatcctattagatgtttccaatgaaacttcaccttggttgtaccaacacttttctctctaaaaatgttactttgtttaactcatgtatgcttgcacatgacaagctgacaaggtgaaaggacaaaaacagtcaattgtgcacaacaaaggtagttcatatgctgcagttgattctatattactgtagtttttttgttgacaatgccgttcaattatgtgagttatagtctttgttcacaggacagctgaataaaatgcatcagagagttcagtttgataacataaaaaacgagtcatggtcatgcatccattttcagtcaattgcagtgaaacatatgttttgctgatttgttgtttgacacccttcacagattcaagctgcttttagaactg

SEQ ID NO: 1250 - DNA, 4776 bp, Zea mays
  Intron number 1 from transcript GRMZM2G081977_T01 (locus G RMZM2G081977) derived from phytozome v7.0 (chr-ID 1; pos 1 49708988 to 149713763)
ccgccatcgccgaggacgtcgccggggagctcgacgccgcctccgggtcctccttctccttcgcgtccgccgccacctcgcagctcgtcttggaccggatcatggcgccgacgtcggtggtacgtgcgtgtgcctccttcgccacttttttcctcatccattctcataataataaaaaacggagaaaaaaatccggtctttcttacaaacagaaaacaaatccgagtcagccaggcttctccttagatttttttcctgccgatttcccgtcttctccgtctgttcttcatgccgattgctatgccgccgccgtcgccgcctctgtttaacctaatctaatctatgccaccatcagatgcctctgactctgcctctactcctagaggagtcagagtcaggtgaggacaacaagaaccagacaaaaaaaaaaaactcgccgtttttccctttctcctcctgcaccaaaaaaaaacaaaaccgacaaacgtgtgaagtgtgatactcatgtcctacactcctactcctccagtggcgcgccgcgcgctcgatctttgttttttttttggttccagcaacggccgcggcactgagtttgaggctcactgatttgatttccttgcttggcttggcttggctggacacaggaggtggcgccgctgacctccggccggctctcccacagcagcgggcctctcaactgcggcgggtcgctctccgacagcccgcccgtctcgccggagatcgacgacaccaaggtctccctcttctaacattctcggacgtttagaacctggatggacgtgtttctttcagtttaatcagaacaaattctgcttattttattattaattaattaattaattaattaattaattaactgccgtgcgctttttatttggtactccaatctctgctctagcctggtcagctgggcttagaagatatggtgcatgcctgcatcttttcttttgttttagtaatttttctgagatcgatgctgcacatcagtctgcatgcctgtacctgtctgtctgactgctgcttcctggctttctcaaccacgctgtccgtaagagctgctcatctggccgctgctccctctgtttgatgctctgtcagcctgcctgcctgccttagtaaacatagtagtagcagtactcgtttgtttgctacttgggctgtgcatttgtgcaagaaccttgtccttgagtcgaagacagggttagtaaactcaggaaggatcattagcatggcatagactcccttagcaaactcagagagcatatccagccacgtcaactatataaatgtcctataatattaaaataaatatatattttatagattgagaaaatcaacaaaatattctactctccaacgataaagcttcaaatctaaactatagggcagcgcactatggtgaagtatatttaatgcacttaaaaaagtgccctataattttttaatcaagttttatcaaataagtcattgtggagtaatttctttttgtactagagcactctatattttcagtttgagctattgttgaagatgctcttatcaaactcactctgttagtaaacacaacaaggatcatcagcacaacatagactcccttaggtcttgttcgtttgtgccggattggtggatcggaacgattcgtaaccggattgcttctctaatttatataaattttgattagctagaacgatttcgggtgcaatccgatagaaacgaacaagatcttagtaaacttagcaaggatcatcagcatattatagtatcctcactcacactaggaagcaggaacatggtcaaatggatacggtcggtcagcgtagtagtaagtagtagcagcagcagcatactagtctgtgtggcggcgtgcatgtactggtgtggtggtcctctgcctcactctgctctgctgctcgctgcgcccgttgcaaactggagagagctagccaggccgccgtgtcgtgtggtccgtgtatatgcaatactgtagtggatgtggtccgtgtacctgcagcggcaaggctgctagagctgcagccctgtgctgttgctctggtcccggtccgtctactgcagtcctgctcccgcaagcaaccactgtagcagcagccagcagcatcagccctcaatctccctgcctggtactggccactgggtgaacaaaaaagcaagaggcttgcagtttagggtgaacaaaaaagcaagaggcttgcagcagacacgggcctatgcatgcagctcttgcctcctcccttttggcgcctgtcatcagatgagccatctcccttttctcacccccctaatcaagtgtcgctgccccagctttcacagtcttaacctaatcatgcagccttttgcaccgtgcccctgtcctgcgccctcaacgctgacgcccgttctgcttaacttgtccccctcccccctcatgattgcgccatgtgtcgctcgaatcctgatcgcacggacggagttgtcaggtcactgtcgcatgcgctgccttgcgttcgacggacacgccatggccatgctggcgcattgggcatttgggcatgcctcgggattccatcagtgcgcccctaacaagcctagattagcgccatggagacacaatcatttgcagcggtcaggggtaaagtctctggcccacgctttgcttgcgagaatcattttactgctgctgctgcttgcccgagcgtgctagccggtgtcacttattaacaagctgtttggttcggattaagtctagctgtttagactgctcctgcagcagctctctattttataaagactagttggttatccgtgcgttgcggcggctcacaataatactcacgtaaattatctaccaaaagaatcttaagattttttattattgtcttcgctcttcccataatattttttatgaacgcacgagtatcgtaggcagcaaatcagagaccctatccctcgcctcccccacttcaaagtttcgtagagcaggagagaaagggaagaggcgaacatacctgttcattgccggagaaggacacgacgaagacctgagcatttggaggcgacataggtagtataccgctagatatatagggagagagcacgcaagcggagaaagaagcccagtcggagcagctccagaccgagagacacccgcaccaggcgtcaatccgacaagggcgagagaatgcgagtgtcttctcagccctggacccattgaagcgacacaacaccactaccaacttcgtagcgtatgccaactgctgccacactgtggtccttggttgtccaacatctcagacctggactcctcatcgctaagataacctaagcgtggcaggcgccaccatgtcctcctcgactgcccgcatggagaaaggctaggagcatgaccgactcgcgtcgtacccgcgttgacaagcgacggtcggctcgcagctgtgaccataggcgggggcagcaggttggggaggaagaacagggcgaaggtcgggaagacgaacgagacgtccgacgacggcgaaaacgatggtgcacgcatgatgtgaaaagtactcgtagacgtgcaatagccactgcgcgagtcggtgtcggggctggtgtcggacaaatacggggaggaggcacatgctcctaagccctctgacaagaatggggtgacgcagaggtggaggcatgaggggagagagaaaaaaatagaatggcaaacgaggtggtgacaactgaggcgaggaccattattatcgtgcggaagtatagatgatcaaatgtgccgtgtctagcgagctgacccgtggcacgatccatttaatagtgccttggccagcccgacacgagcgtcgtgcggtgcttgggccgtagcctcagcccgtagtgctggcttggcccgacacaattatttatttttttattttacaaaaaatcatatatacatatttataatttatacaatattataaacatttgatcatgatgttctactggttacacagcttcgccaagtgtttctcactctttttctatcaaggtgtgggttcaaaccttatcttctgcattgctttttaacattttacgttgagttgatttgaagaaatatagagacttttttgtaaaaaaatgacgcaggacgtctcttgaaactggagctttaattatagtagagatataaaggcagaacattgtagaaacggtagaagcagttttggattaaagccaagcgaatagattctaaagcccgtctgtttagaagcagtttcggattaaagctaagcgaatagcttctaaaacccgtctgtttagatgatgaatcctgtcaatatctgattctaccattgaagttgtatgtgctgcttagacattaacgattcagttcgtttgcctaattgtagggcaaattttgcagaatggcacggtacttcagtttaggtgtgcgagcgagtcagacttcagaccatagtttcgttcacagtgtagtaggatgagcaggagcatttgccaacgcgcaaaaagaagggaaaaaaatccaatctttgatgcgctgaacagtaactaaatgctaactgaacggattgtcgctgttgtggggtggatgcagttctgcagagcggtgagtctgagcacgccgaagccgcagccgtacgcccgcggcgggagcaagacggtggggcggtggctcaaggaccgcagggagaggaggaaggaggaggcgcgggcgcacaacgcgcaggtgcacgccgccgtctccgtggcggccgtggccgcggccat

SEQ ID NO: 1251 - DNA, 987 bp, Zea mays
  Intron number 1 from transcript GRMZM2G353209_T01 (locus G RMZM2G353209) derived from phytozome v7.0 (chr-ID 6; pos 1 48942349 to 148943335 reverse strand)
caggtactcgtattcctcgattctcctgctcttgttttagctcccatctgagtgttgcaggaagtaagatcgaattggggctactgagatggtgacaataaggggcgtagctactgtcagtccagtcgttgattccccgaaacggtggagtcataacacccaaccgagcatcgctttcttcaagtagaaacttgtgttcgtttggggaggatttttaacaaaaagcaggcttgagatctagcaaaattgggtgcactgccctcaaatgattagagattctaactcctaagcgtagaagatccgcagaaatcttaggaatgcatcttcaaacctgtatggttacaattcgtggattatgttgtagatttctccataaacggaagtttaattgatggtgttaattgattatgcgatgacttattcgatatagattatactcctatataaagaaaagtcgagtcatcgagcaagccactgggaacatggaatcgagctgttgacggttgttgggctgtgttttgtctttggatagatctaccagaaaaagtcgtctttaaatgaccccaaatttacgtgtagcatggattgtttggaacatttaatgcaactccagttaaaacacagatgatctcttctggcttgagttaaacttctgtgattctcctggttttaaaattctaacaaaatgcccaagcaacatgcaaacagtggcataggtctatcgttttatgtattctgctagtttgtgtttcctgatcatgcccgtgagatacaggtttaggtgtgactgtgtgagggcagggattgttattcgttcattgcttaaaaagggggttacatttatttgtctgtaggctgtagtgcatccttctgttatttaattttcccctttagtattcttatagctgctaatattgtgatgaaatcatcacactaacttgtggtgctaaatttcatcagctcactgagaactttgtttttggaaga

SEQ ID NO: 1252 - DNA, 925 bp, Zea mays
  Intron number 1 from transcript GRMZM2G501303_T01 (locus G RMZM2G501303) derived from phytozome v7.0 (chr-ID 4; pos 1 80250502 to 180251426)
ttagactccttagtgtcgttctccattctactcctgtaagaatgcatatcaagtaacaaagttacttggttattctttatattttggtgtatggagtattagttttcttttcgaggatagaaaacatgggggctagaactgaacattgatggtaagtaccaagtatgtgaagaatgtagacctcctaattagtttctaatatatttatttgactttgggctgggtatggaaaatgggaagaatataaagctgattagtaacatctagctacttcaaatgatgagtttccctttgaaattctccattcttaacttgtttctcttatagattgcatgattatgtgttggttattagtagataaataaaaaacatagttttgacattttttgttcctttgatatctcaaatcggccaaacaaactagaagtgctggcaggaaaatattggtatgtttatgctaccatattaagacgtttttattttctaggttttctttgaacttgcacggtaccatctatttttcagattttgcaatataattatcagtgaagatttgtgtagttctcttataatgctatataattaccacaatacagtgcactcagtttattatttcttgatgaaaagtgagtgatatagccactttatttggaggtttttacccaagatatcatgtacctgaaatactaagatagtatgaatcaatacatggatattgaaggctatactctgaaatgcagtctcactacataattgactcatgaaaaatctgttttcttattacatgattctgtttagtagaatctatggttttaaggtcgtagtagtttttacgatcgtatacttgaagttctggtctgattcaggatcactattttaacaaccttgtgtggttaatttgcaggatcgtgataactattggaag

SEQ ID NO: 1253 - DNA, 1085 bp, Zea mays
  Intron number 10 from transcript GRMZM2G040720_T04 (locus GRMZM2G040720) derived from phytozome v7.0 (chr-ID 4; pos 210326123 to 210327207)
ggaaattttcactaggtactcattttgctcctgaacatggtattgttacacttactataatcattaaacagtagtgaagaaatactatttgcattgaagagagtggttacccctctcccctcattatatttttgctcttcaggaattaacacatgaaacacccttcaaacttttggttgtaatgggactctctttaccttgtagattttttcagggtagtcagtagtgctacttatcttgtgcagtcatgtggaaatgtttgcataaaaattgctttccttaagtacctatgggaaaaaaacactctgagcccagttaggttccttgtccatattgcatctcctgccagtaaacgattaaatcaatcagtcctgagacaaactggttaatttataaatgggagatatcaaaatatatgttttcttggatggattgactctgaagggcaaatatttattaacacttagacttgaatgttactaaaaatgctgagttgggttttcaatggtttatgagggccgaaataaaaactggcatctcgtagttttgctgcacttgttgtcataagcatcttactggtccacgtataactggtttcataaacctcaaatgtaatttgtgccgtattaattaacaacacaagatacaaaagtaggaaaactagacataatgataatgtatctggtattgtcgaatatgaattccacttgtttcttttttctcgtacttcattgatatagtgctcataagtgcctggttgagccatgcatatattaaaatgaactaatttgcgttaacaactaaatagttcagatttgatgcttctggaatccccggagattgcaaattttaacctgtgaaatgaggccttgttctttttggagcagagccttcttcctgcttttgaaaaggcacatatttagttatggataaaatcttttgaatccttataaagaggttgtaattgtagggctttgaggtaactaatgggagcactcaccattgtgcagaatgagtttgcctcttctattttgtagaatctggacatctaaaatggtgtatggcttttgcagttctgttggatc

SEQ ID NO: 1254 - DNA, 631 bp, Zea mays
  Intron number 7 from transcript GRMZM2G006429_T02 (locus G RMZM2G006429) derived from phytozome v7.0 (chr-ID 9; pos 1 36554429 to 136555059)
ccttggtaggaatccacttccaaacattattggagacatgttgcatcacttgaatatataggctcaggttgcctttcatgtttaggatttaaaatgtagaggaggaaaaaagagtgagtcacattctggttgtggtcgatgaggtttttacttaaaaattcacaattggataaagcatgtctgctatttgcttcttgcagttccaaaaggaactcctgtaatgtaaaaaaaaatacttttgcttgtatacacttagcttcttgtaacatgttgtcttggaaattaggttgtataccacaagagtctgtttgcttaaattcactagaatgcttgattgcatgatgttgttcctactaaatttgttgtcttattttatcagtagaagtttgaggttccttgatgcagtttgcgctagaatggaaggtctttctaactactaggagcagttcatttatcctatttggctgttggagatctattaccagttgatgttctgtttgctttttgaagaggaaagacatcctgctattacctctctgtctgcccatttgggacttttcagatatcccttaacttgtaatctacacctttcgcaggttgggaagtaattttccaccaaaagcaaatctgc

SEQ ID NO: 1255 - DNA, 33164 bp, Zea mays
  Intron number 1 from transcript GRMZM2G001845_T01 (locus G RMZM2G001845) derived from phytozome v7.0 (chr-ID 1; pos 2 33522572 to 233555735)
caggtctatcgatctgtccaacaacaacttgtcaggtccggtcccggacacgttgccggcgtggatgcccaacctcgagcacctcaacctctcgtccaaccagttcatgggcgagataccggttaccctaggcaagctgactaagctgcggaacctcgtccttcactctaaccatctttccggcggcataccgccggtgcttggcaacgtctccgggctaagggacctcgagctgtcaagcaacccgttgggcggcacgattccagccactcttggcaagctcctgtcactggagcgcatcaacgtcagcctgactcgggtggagtcaacgattccaactgagctcagcctctgcaccaacctcactgtcattggtctcgccgggaacaagctcaccgggggcctgccgccgtcgctggccaagctggccagagtacgggagttcaacgtctccaagaacatgctcaccggcgagataccgccgggctacttcacgtcctggacccatctcagggtgtttcaggcggacggcaaccgtttcaccagcatgatccccgtggaagtcgtggcggcacggagactcgagttcctccatttttaacgaaggggcgaagccccctatttcattaagaactaggaaagtttgaaataaccgcaaccatgagacacatcatcccaaaagatcgaacacgaccagaaccctatctagactctaaacactatcaaactagatcagtgaagagcctaagatagcagagaaagtttggcctacgattaactacataagactttcttatttacaacccaatcagacaggcagaaaccacaaaaggaactgaacaagccaaccatcaaaagacagacaaacttccacaccatcttccaagttccagcaaaagacagacaaacttccacaccatcttccaagttccagcttccatatcaaccagaaatgcgcctgtctaaagggcaccaccccaaggccctgccgaaagtctcacttgccgtctttcggattagcttgcttcctagaaccaccattttttgctccttctttttctgacgagtagcccaggaatccagccagaagcagcaaagaaaaatgatgttagaaagatcaagcaaatgttttttttccaaaacaccaatcatttatagtgcgccaaatagcccagaataaagcaccacaaccaaatagaaccaaattagcagttttgtcttttggtttacttaaccaattgtcataaaggttgctgatactattcggaatcagtcttaaattcaaggcaacttgaatcactctccacatatactttgcaatgaggcaatgaaagaacagatgatcaatagattcatcaaccccacaaaaacaacaatccaaagaaccactcgagttccttttcttcaagttgtccttagtaagaattttatttcttaccactaaccaaaagaaaaccttgattttatgaggcaatttagatttccacaagaacttatatggaatcaaaacttgatcttccattttctttttgtacatagagttaactgagaagccttttttcccagattccacacaattttatcctcctgatcagacaaagacacctgattacaacaacttatcatttcatcgaataacatcctcaaattacccacaatccttcttctaaaagtaagagtctcaaaattagatgtgaaagcatcattaacagtaacatctttgtcatatgccaagtcaaaaagaacaggaaactgaacagacagaggcaaattaccaatccaaatacttttcgagaaactagtcttcaggccattaccaactgcatttttacagtatttataaaaattgtcacgcaaactcagaatttttttccagaaatgagaatcactttgtctttgtttaactaaaataaggggttttcccttaatgtatttactggcaataattttttgccataagcctttcgaattttcaatattccaaagccatttagataataaggaatcattcataaactcaagattcaggacccctaatcctccctgatttttgggagagcacactgactcccaatccgctaaatggaattttttggactgacgacccccttgccacagaagccgcctcctaagaatatcaatttttttgataaccgacttagaggcaggataaatcgagagcatatataaaggaacattggataagcaactgtttaaaagagtaagtctacctcctagactcaggaatcttccctgccacccagctagtcttttttccagcttctcaatcatgggtacccaaagacttttattaattttcatcttatcaattggcacccctaaatatttcataggaagattaccaattggacaggtaaagatatcagcatacaaatagtcaatctccttagcatttccaaagaacaaaatttcacttttgtgaaaattaattttcaagcctgacatactttcaaacaaacataagatgaatttaagatttctggccccttctaagcaatcttgaataagaaaatggtatcatcggcatattgtaagcagcaacaaccattgtgaatgatatgaggaatcggaccttcaatcaaaacctcatcttgagctttcttaatcatacaagctaaaccatcagcaaccaaattgaacagaaggggagaaaaaggatccccttgcctaacccctttgtgagtagtgaagtaaggacccaggttatcattggttttgatggctactttgccaccccgcacaatcctcataacccaatcacaccaagtgttcccaaaaccttttttctccatcatagtatagaggaaatgccaatttactttgtcataagctttttcaaaatcaatttttaaaatcactccactttgatttttcctcttaacctcatgaagaatttcattgagagagatgaccccatccataatatatctgtttttaatgaaaccatattgagaatcacttatcacttttgtgatacaacccgcaagcctgttattcagaactttggaaataattttgtaacacacattcaaaagacagataggtctaaaattcttcatgtcagtcgcattatccacttttggtaataaagtaaccatcccataattcagcctttctatcttaagatttccaacataaaaatcattgaataaatgcacaatatccatttgaattgtatcccaaaaattttgaaagaattcagcaggaaaaccatcgggaccaggggcactattatgttttatctcgaaaatcactttcttaatctcatcaactgaaaaaggagccgtcaggaaagatctatcattgtctgacaactggttcatattgaaataagtcatattaatactagataacaccgaagggccaaagagatctttataataagaagtagcaattttattgataccttcagcatcgtttacagagactccttcatgattcaagaaggggattttaaccctccgcttccgaccttttgcaagaaggtgaaagaatttagtattctcatcaccctcattgatgaatttttctctagcagtttgcttttttttacaaatttcttcttccatgattttttccagattccactccatatcgaggttttcgattctttcagtgtccgaaatacccataatttcgcattttttatctaaaatgtcaattttttccatcaaatctttttttaatttcaaatatctaccttcaacattaatattccaacctttcaacatttttttcaacctttttgttttttctttccaaatatcaatactctttttgcttctaacaggcagagaccaattttttacaaccaaagtcttaaactcaggtctcaacttccaataaagctcatatctaaaatctcttttagcaggagaagcaaaatcagttctaagacataaaggcacatggcccgataccggcggtcatcggaaggatggcaagcctcaaggtgctggacctctccgagaacgggttctccggcgccataccccggacgatcggtgatagttgcctagaggggggtgaatagggcgaaactaaaatttacaaatataaacacaactacaagccgggttagcgttagaaatataaacgagaccgcaagagggcgtaaaacaaatcgcaagcaagtaaggagtgtgacacaaggatttattttaccgaggttcggttcttacaaacctactccccgttgaggtggtcacaaagaccgggtctctttcaaccctttccctctctcaaacggtccctccgaccgagtgagcttctcttctcaaatcaaaaccgggaaaaaaacttccccgcaagggccaccacacaattggtgcatcttgccttgattacaatggagttttgatcacaagaacaagtgagaaagaaaggaagcaatccaagcgcaagagctcaaaagaacacggcaaatctctctcgctaatcactaaagccttgtgtggaattggagaggatttgatctctttggtgtgtctagaattgaatgcctagctattgtaagtggttgagaagtggaaaacttggatgcaatgaatggtgggtggttggggttatttatagccccaaccaccaaactagccgtttggtggggctgactgtcgtatggtgcaccggacagtccggtgcacaccggacatgtacggtgcgccagccacgtcaccaaagtcgttgggttctgaccattggagctctgtcttctgggcccgcctggatgtccggtggcgcaccggacatgtactgtagagtgtccggtgcgccactacgcgcgtgcctgacttctgcgcgctctggcacgcattaattgctgttgcaggtgaccgttggcgcgaagtagtcgttgccccgcagttacaccggacagtccggtgtacaccggacatgttcggtgaattatagcggagcagctattgcagtttcccgaagctggcgagttcctgaggccgctcttcgttggagcaccggacactgtccggtgtacaccggacagtccggtgaattatagtggagttgcatctggattttcccgaaggtgacgagtttgcgctggagtcctctggtgcaccggacatgtccggtggtgcaccgaacactgtccggtggcacaccggacagtccggtgcgccagaccagaggtgccttcggttgtccctttgctttttttgttgaacccaatacttggtatttttattggttaagcgtgaacctttggcacctgtataacttatatactagagcaaactagttagtccaattatttatgttgagcatttcaaccaccaaaattatttataaactaggtgtaagcctaattccctttcaatctccccctttttggtgattgatgccaacacaaaccaaagcaaatatacaagtgcataattgaactagtttgcataatgtaagtgcaaagattgcttggaattgagccaatataaatacttacaagatatgcatggattgtttctttatttttatcattttggaccacgcttgcaccatatgttttgtttttgcaaattcttttgtaaatccttttcaaggttcttttgcaaatagtcaaaggtaaatgaataagattttgcaaagcattttcaagatttgaaattttctccccctgtttcaaatgtttttcctttggctaaacaaaactccccctaaatgagatcctcctcttagtgttcaagagggttttgatatatcattttgaaatactactttctccctcttttgaacacaataagataccaatttgaaatttaccaattgaaaatctccaattttaaagttaggtggtggtgcggtccttttgctttgggctcttactctctccccctttggcatgaatcgccaaaaacggaatcattagagccctcgaattactctctccctttggtcataaataaatgagtgaagaatataccaaagatggagtccttttgctttggactcaagttctctcccccaaagatggagagatgcgcggagcgacggcgaaggatgagttacggagtggaagcctttgtcttcgccgaagactccaattccctttcaatacacctatgacttggttttaaatagacttgaaaacacattagtcatagcatatatagaagagacatgatcaaaggcatatttatgagctatgtgtgcaagtcagcaaaagaaattcctagaatcaagaatattgagctcatgcctaagtttgttaaaagtttattcatcaagaggcttggtaaagatatcggctaattgatctttagtgttaatgtaagaaatctcgatatctcccttttgttggtgatccctaagaaaatgatatcgaatggctatgtgcttagtgcggctatgctcaacgggattatccgccattttgattgcactctcattatcacatagcaaagggactttggttaatttgtaaccgtagtcccgcagggtttgcctcatccaaagcaattgcgggcaacaatggcctgcggcaatgtactcggcttcggcggtagaaagagcgaccgaattttgcttctttgaagcccaagacaccaaggaccttcccaagaactagcaagtccccgatgtgctctttctattgattttacaccccgcccaatcggcatccgaataaccaagcaaatcaaaagtggatcccctaggataccaaagcccaaacttaggagtataagccaaatatctcaagattcgttttacggtcgtaaggtgagattccttagggtcggattggaatcttgcacacatgcaaacggaaagcataatgtccggtcgagatgcacataaatagagtaatgaacctatcatcgaccggtataccttttgatcgacggatttacctcccgtgtcgaggtcgagatgcccattggttcccatgggtgtcttgatgggtttaacatccttcattccaaacttggttagaatgtcttgagtatacttcgtttgggtaaggaaggtgccttcttggagttgcttgacttggaatcctagaaaatactgcaactcccccatcatcgacatctcgaatttttgtgtcatgatcctactaaattcttcacatgtagattcgttagtagacccaaatataatatcatcaacataaatttggcatacaaacaaatcattgtcaagagttttagtgaataaagtaggatcggccttgccaactttaaagccattagcaataaggaaatccctaaggcattcataccatgctcttggggcttgcttgagcccataaagcgccttagagagcctatagacatggttagggtactcactatcttcaaagccgggaggttgctcaacatagacctcttccttgattggtccattgaggaaggcacttttcacgtccatttgataaagcttaaagccatggtaagtagcataggccaataatatacgaattgactcaagcctagctacgggtgcataggtttcaccgaaatccaaaccttcgacttgggagtatcccttggccacaagtcgagctttgttccttgtcaccacaccatactcatcttgcttgttgcggaagacccatttggttcctacaacattttgattaggacgtggaactaaatgccatacctcattcctagtgaagttgttgagctcctcttgcatcgccaccacccaatccgaatcttgaagtgcttcctctaccctgtgtggctcaatagaggaaacaaaagagtaatgctcacaaaaatgagcaacacgagatctagtggttacccccttatgaatgtcgccgaggatggtgtcgacggggtgatctcgttggattgcttggtggactcttgggtgtggcggcctttgctcttcatcctccttgtcttgatcatttgtatctcccccttgatcatagccgtcatcttgaggtggctcatttgcttgatcttctatttcatcaacttgagcttcattctcattttgagtcggtggagatgcttgcgtggaggaggatggttgatcttgtgcatttggaggctcttcggattccttaggacacacatccccaatggacatgttccttagcgcgatgcatggagcctcttcattacctatctcatcaagatcaacttgctctacttgagagccgttagtctcatcaaacacaacgtcacaagaaacttcaacttgtccagtggacttgttaaagactctatatgcccttgtgtttgaatcatatcctagtaaaaagccttctacagtcttaggagcaaatttagattttctacctcttttaacaagaataaaacatttgctaccaaagactctaaaatatgaaatattgggctttttaccggttaggagttcataggatgtcttcttgaggattcggtgtagatacaaccggttgatggcgtagcaagcggtgttgaccgcctcggcccaaaaccgatccgaagtcttgtattcatcaagcatggttcttgccatgtctaatagagttcgattcttcctctccactacaccattttgttgtggcgtgtagggagaagagaactcatgcttgatgccctcctcctcaaggaagccttcaatttgagagttcttgaactccgtcccgttgtcgcttcttattttcttgatccttaagtcgaactcattttgagcccgtctcaagaatccctttaaggtctcttgggtttgagatttttcctgcaaaaagaatacccaagtgaagcgagaataatcatccactattacaagacaatacttactcccgtcgatgcttatgtaagcaatcgggccgaatagatccatgtggagtagctcaagcggcctgtcggtcgtcatgatgttcttgtgtggatgatgggctccaacttgctttcctgcctggcatgcgctacaaaccctgtctttctcaaaatgaacattggttaatcctaaaatgtgctctccctttagaagcttatgaagattcttcatcccaacatgtgctagtcggcgatgccagagccagcccatgttagtcttagcaattaagcatgtgtcgagttcagctctatcaaaatctaccaagtatagctgaccctctagcacacccttaaatgctattgaatcatcacttcttctaaagacagtaacacctatatcagtgaaaagacagttgtaacccattttgcataattgagatacagaaagcaaattgtaatctaatgaatcaacaagaaaaacattggaaatggaatggtcaggggatatagctattttacccaaacctttgaccaatccttgatttccatccccgaatgtgatagctcgttggggatcttggtttttctcgtaggaggagaacatctttttctcccctgtcatgtggtttgtgcacccgctatcgatgatccaacttgagcctccggatgcgtaaacctacaaaacaaatttagttcttgactttaggtacccaaacggttttgggtcctttggcattagaaacaagaactttgggtacccaaacacaagtcttggagcccttgtgtttgcccccaacaaacttggcaactaccttgccggatttgttagttaaaacatatgatgcatcaaaagttttgaatgaaatgttatgatcatttgacgcattaggaattctcttcttaggcaacttagcacgggttggttgcctagaactagatgtctcacccttatacataaaagcatggttagggccagagtaagacttcctagaatgaattctcctaattttgtcctcgggataaccggcagggtataaaatgtaaccctcgttatcctgaggcatgggagacttgccctttacaaaattagacaatcttttaggaggggcattaagtttgacattgtctcccctttggaagccaatgccatccttgatgccagggcgtctcccattataaagcatactacgagcaaatttaaatttttcattttctaagttatgctcggcaattttagcatctaattttgctatatgatcattttgttgtttaattaaagacatgtgatcatgaatagcattaatatcaacatctctacatctagtacaaatagatacatgctcaacgatagatgtagagggtttgcaggaattaagttcaacaatcttagcacgcaatatatcattcttatctctaagatcggaaattgtaatattgcaaacatcaaaatctttagccttagtgttggggacttgttctcaaatgctaagaattaagaacaaggcaacacaaaaaatgttaagtgttaagatccttcgtcctccataacgatatatcccttcgggatataaagcatctcggacgaaggttacgaaggacaaaccttcgtaagcataacaacgaagaatgatgcattcacataaattatagaatacgaaataaacatttaaatattgtcatagaattatctttacttgtattaatgactttgaattacaaatgtaccttcggtcctgcggaaggcaaaagtacaagcgtgatgcgaaagcaaatgacagattcacgtgaatagtacagaggtactgttcatctatttataggcacaggtcgcagcctgtgacaaattacaattatgccccttgcgaaagtttatagcattaactcagacctatatgtataaaaaggtcattctatctctatgtcggtttaaaacgccgaagctccatgaaaagggaccttcggccatctcttggagacgacttcagccgaagctgcttcttcgtgtgagaccttcggcgcaccgaagcacgaccccaacagtagcccctttcgcggtgctagatcgttcttcgtaacgagcttgacccgtgaaaaaagcctcttcagcttcgggaagccgaaggtccaaaaaacaccttccctgagctcgttgcggagaaacgatccgacttccgagcgcgtgtcggtcccaccttgcagagttactgtttgatccttgcggtccactgcgcagcgggtacaagttacggcgcgcctggtgtaacaattccgccgcttcgccttcttacctgcagtactatataaacaagcaggtagatgtgaagttaccacagcattcattgctatttgcactgttttgctgccgaaattttccatcatagccgaagcttaaatcccaaaatcgaacgaaggtccgtctcgacgcttgcttcgtcagaaagaaaagcttcgggaaaaaagaaaaaagaaaaaggtttctgacttccccaaactcagaatcaaatggcgagagtgcgatctactgccaaagttgttcgtgagggagacgaagccgaaagttcaggcactgtgcccatctccgaagcgatgcagcgctccggtctagtgactgcggaagaggggcctggtgccgaagcaaacccgacaacagccgaagaagaaaacattgatgggactgactccgaagatgactacgacattgctacacccagcaagcccagtcacctggattttggaaaatcaactgtttcaaaagctgaccttgcgaagatggtaaaagcaggttttttcaatgaagatcagaagaagctacttcgcttcgggggagaggagtctaccccgaagccagagaaggatgagattgtaattttcaaaagctttttaaaagctgggctgagatttcctctccatggaattattggagatgtgttgcaaaaatttggcatttattttcaccaattgactcctaacgccatcgttagactcaatgtttatatctgggccctccgaagccaagctgtggaaccgtttgccgacagcttctgccgagcccacgaattacattaccaaacaaaggccagaacagacggactacacgataatttcggctgttacaattttgcctaccggaagacaacaaagtgtcctgtcatcagctaccgaagcaaatggccagcaggctggaagtctgagtggttctacgtaaaagttgacgaagacagagaaaaattggtacaaagccctctggaattaatcttcggagagacgaggccacgctgccgcatcggtgatttaaagggtcccacctgggctgctctgggtgaatttgaaattatctcaaaaaatattggcaccagggatctagttcaggaattcttggcattcagggttttccctactctaaaagagtgggaaatgccgaagctggagggagagaagaaggagggggagctagttcgtctgccttatcactttaaattcaagaagtactttaagaaaccctgcaaagagtggttagacacagttgagacaatgtgcaatgaaatcttggggaattactccaaaaaggaggatcaattaatgacagcagccttcggcacccgaccgaagcgaaggctgaaccgagtattcgatgccctgggcctcgagtatccagactatgagcagttgaataagggtgccgaaggccacaaaagaaaaagagtggctgaaaccgaaactctgatcagaggtgaagaaggaccagcaaagaaaaagaaaattatcaagaaaagaacaatatccactccgaagcgccaatctcccgaagaagaggggtcccccacaccgccttctaccagcgacgtggatgaaattttaaaggtaatgactgaacccatgcccacgaagctaagtccactagggctccaactgacgaagctttttcgaaaggtggacgagccggatcagacgaagacaagcaaacccaagcggcaaagaatcattgcggtaactgaagttatcgataagacgccgccaagggcgtcaatccaaaaatcggcagctgccgaagatacagcaatcgtcgagggcgtagcttcgggggtcgcggctaccgaagccgctacagccgaagatacaaacttaaaatccacgattgagaatatcaacaagattttggaagacatggctgcggaagaagctggtgcgactactgaaaaaaccatggccacagtgcctgagaaaggaaaagaaatagccgaagacccttcggacgacgaagcctactctttccagaacttagttgggcaaaaactgacgaaggacgaaatagaagaacttaaagactacgccaagtcttgcggctacaagtcaggtgccctcctatttgggggcattgatgacgaacaactgggctgcatccgggactcagctggagctaaggtcatcggtactctatcaaagagtatcggttttccgaagctagagacagacatcagccgctatcgacgacaacatatcgtcggcagcttattttactcaaatttcaaggtaaacatccttctccctaacttctattgttttttaataatggcaatattctttaacgaaggttgtttatttgtagagcatgcttctaagcaaagctttgaggatgcagcaagatctagaagataagaagcacgaaactataattgaaaatttagagaacaaaataaaggagcaatcagatgcttttgagaaaaagaactttgagctccaggcagccgaaggcttactggcggaagctgaagcaaaaatatcagaactaaactcgaagcttctccgccagtccgagcagttcgaacgagaaaaacaagatctcaatgaaaaacttgaagccgaagctcagcagaattcagatttgagaaaactactgacaaatcttcaagaaaaatgcctagaatttagcaacaagtgcattcaacgattaagaaagattttttactcggttggagctagcagcgaaaaatttaccccctcagctgaagatctaccgaaaacctttgaacacattgagggggagattgacgagctcgacgaagtcatagctgggcatggtgacttctgtgcctgggtggcttctcgagggaccgctgctgcatttctgaaggccggctgcgaacacggaaaaattgtcaacaggcccaacttcaccttatctccatcaatcctggatgatatgcctgacctcgcccgaagcatctccaatagatttataaaaatgatatggacaaaaggcgggcgggagaaagctggagacgaagcacgaagtcatcttgaaccagtaagaaatgatacttcggagttaccttttcctttgctcttgatttttactcataaactcttaatttatgtaggatgacgaaggtgaagatgatgcctaaattatgtcgtcgaagctgaaacttaatgaagatcagtagaagtgtactgtagaaaaactcaggatatttttgtaacaattcttgtaaacacaactagactatcttcaaggaactttgtacataccttgtaatatattcttaccctttgcttgaggcgctttgttgtggacgaaatcggtattttgagccgaaggcgaaaaaaaacaccttcccttcttttcgtacacaacgaagcctaaaaggtcgcttcctctttttgccgaagctttgcttttttgtacatgacaaaacataaaagactacttctcctttctgccgaagcttttctgtacaaaacataaaaaactacttctcttttctgccgaagctttcctttacaaaacataaaaaactactttctcttttctgccgaagctttcctttacatgacaaaacataaaagactactactcttttacacaacgattcataaaaatccagttctcccttatactgaaacttttctttgtgccaaagcaacggaacttttcacttttgcacacaacatagcgtaacaagtcataaaaaggcacttctccgaagcttttttgccgaagcagccacttgggaacacaaatgctatgaatgaatgcttatgcatgcgaatgttatgatgtaatgtaatgcacgaatgaatgtccgaagcatatgtccgaagccatattgtcagccattacttggaaacaaccacacattagctctgcattcccttaggaacgactttggagcttcttcgcctcttacttaggcaatatcagcgttgacttttcgctgtaagctctgcatccccttagggacgtctttggagcttcttcgtcttttacttagacggtataagctctgcattcccttgggaacgtctttggagcttcttcgccttttactttcggcggaatcagcgttgacttttcgctgtaagctctgcatccccttagggacgtcttcggagctttttctctttttcagtttcggcactcgatggtgcgctctcagcttttacatgtacatctttgggggattttgctcttataaaactaaaaagaaaaattacatgtgatggccccattaaaaacctttctccccctttagaaaggaaaagggtgccatgaaaaagaaaagaaaagtcaaaattacatcgagttatacataaaaccgccgaagctcatccgcattccaagatcttggaatttcattgccatccatgtccttcagtctgtacgaaccaggccttgacgaagatgctactaagaaaggcccttcccatttcagttgcaatttgcccactgtatccggattggccactctccgaagcaccaagtgtcctggctcaatattttttagccggacctttctatctcgccatttaactgtttcagcctggtacttattgatattctccacggcctggagcctgatcccttctaaggcatctttttccacgagacaagtatcttcgggacctgattctgccgaagctaccactcttattgatccagctttggcctcttccggggttattgcttcgtcaccaaataacaacttaaatggggtaaagcctgtagatcttgatgctgttgtgttatggctccataccactttggtaagctgatctggccactttccccttggttgattgaagattagcttcattattcctgtcattatgatgccgttggccctttcaacaagcccatttgactccgggtgcctgactgacgcaaagtggatcttcgtgccaatttgatcacaaaaatttctgaattcttcggagtcaaattgtgttccattatctacagttatagccttcggcactccgaagcgacagacaatattctgccagaaaaatttttggatagtggccgaagttattgtagctaatggcttcgcctcaatccacttggaaaaatattccacagcaactacaacatatttcagattgccctgagccggtggtaatgggcccagcagatcgaggccccacctttgcaatggccagatgggttgtattagctgtgtcaaagacgaaggttgtttttgatctcttgcacatttctgacaaccttcgcactttcgaactaactcagctgcatccgaagctgccttcggccaataaaatccttgacggaacacttttccaagtaacggcctggatccgatgtgggatccacaaaggcctgcatgtatctccttcatcaactctataccttcggctctagacaagcacttgagcaacggggcacaaactccatgcttgtataactccccttctataatgatatacggacgagctcttgcctctattcttttattataagcttcgtcatctgataggaagttgccctgaaggtaagaaattatttcagttctccaatcttcactgtacacaggggaaatagtaagaactgctctttcaagtaactccaccgaaggtgcctttattgtttcgaagaatacatccgaaggtagcggcaacccctgtgctgcagacctggctaacaaatcagcatgttcattttgccctcgagggatattcttaacagagaatccttcgaaggaagcttcgatccttcggactgtgtctaggtatttttcaagcttcgggtctttagccttgcaacttttgtcaatatgacccgaaacaatctgagaatcagttttaaggatcgccctcctgatccccatcgcctttagtttccgaagacccaggagcaaggcttcgtactcagcaatattatttgtgcagctgaaatccagtcttgctgcgtagcaagttttaaccttggacggtgaaaccaaaacagcagctgctcctgctccgaaggttccccaggagccatcacaaaagactgtccatgcttcggtatctttattcgcttcttcgccctgagcccctggcgtccagtcggcaataaaatctgccaatgcttgagattggatcgaggatctgtgcacataatcaatgtaaaattcattaagctccgcagcccattttccaattcggccagtagcttctttatttctcatgatatctttcaacggctgcgaagaaggaacaataatattatatgcctgaaaataatgccgaagcttcctggatgccattagaacggcatacaacaccttctccagttctgtataatttttctttgagacactaaggacttcagatacaaaatatactgggacctgcttcttgatttgtccatcaaacttctcctgcacaagtgccgcacttactgctgagtgcgaagctgccacatacaacaacagaggagcccctggcattggtggagttaatgttgttagatctatcaggtattgcttgagttcttcgaaagctttttgttgagctgggccccattgaaagacttcagctgattttagcacctcgaagaagggtagatttctttccgctgatctggatataaatctgttaagagatgccagtcttcctgtcaatctttgggccccctttcttgtggttggtggctccattcgaagtatagcttcgattttgtttggattagcttcaattccctttgttgaaaccaagcatccaaggaacttacccttctttactccgaagacacatttttctggattcagcttcagaccagcttgtctgaagctggcgaaggtctcctgcagatcagcaatatggtcttcttgcttcgtgctttttacaataatgtcatcaacataggtcaacacatttctgcctatctgagattggagaaccttcgcagtcatcctgctgaaactccctcctgcattcttaagcccctcaggcatccgaagatagcaatatgtaccacttggggttatgaaactagtcttcggctcatcctcctttttcatccagatttgatgatagcctgagtaacaatccaggagactcatgagttccgaagaagctgctgcatcaactaaagagtctatccgtggcagcgggaactcatccttcggacaagccttgttgagatctgtgaaatcaatacacattctccactttccattggccttcttcaccataacagtgttagctagccattctggatacttcacttctctgataactcctgcacttaggagtctttttacttcgttgcgagccccttcggccttgtcatcagacattttccgaagcctctgcttgcggggtctgaaggatgggtcaacattgagcgaatgttcaataacatcccgattcactccacaaagatcattggctgaccatgcaaaaacatctttattgttgaataaaaaccttatcaaggttttctcttgatcttcagataattgcgagcccaatagcaccttctgctctgctatatcctcacacagcagcatgggcttcggctgatcagccgaagctgctttttccctcctgaacttatactgttcacaagcttcaactccatctatattatggattgccttggaatcagtccagcttccttcggcccttctggcagcttcctgactcccatgaatagcaataggcccttggtccgaaggtatcttcatgcagagataagctgggtgaagaattgcttcaaaagcatttagggtaccacgaccaatgatggcgttgtaggggtattccatgtcaacaatatcaaacacaatttgctcagtccttgtgttattaacaaatccgaaggttaccggcatggtaatcttcccgagtgccacaatctgccgccctccgaagccacaaagagggtgcgtagcatcatgaatcttgtcttcaggctcttgcatctgtctgaaggctttggcaaatataatgtcagctgcactgcctgtgtcaactaggacattgtgaaccagaaaccctttgatcacacaagaaatgaccatagcatcattgtgaggatagtctttgagctgaagatcttcctgagagaaagtaattggaatgtgagaccattttgacttaatgaagggtccctgcactccaacatgctgcacccttctctgagcctccttcttctgctttttgttagctggctctgagcaagaaccgcctgttatcgggagcaccagcttcgaagccgaagcagctccagcttgagtgttgaacgaagccatcagctcagaaaggtggaagtgagttgaccggaggtgggcgccaatgttggggacttgttctcaaatgctaagaattaagaacaaggcaacacaaaaaatgttaagtgttaagatccttcgtcctccataacgatatatcccttcgggatataaagcatctcggacgaaggttacgaaggacaaaccttcgtaagcataacaacgaagaatgatgcattcacataaattatagaatacgaaataaacatttaaatattgtcatagaattatctttacttgtattaatgactttgaattacaaatgtaccttcggtcctgcggaaggcaaaagtacaagcgtgatgcgaaagcaaatgacagattcacgtgaatagtacagaggtactgttcatctatttataggcacaggtcgcagcctgtgacaaattacaattatgccccttgcgaaagtttatagcattaactcagacctatatgtataaaaaggtcattctatctctatgtcggtttaaaacgccgaagctccatgaaaagggaccttcggccatctcttggagacgacttcagccgaagctgcttcttcgtgtgagaccttcggcgcaccgaagcacgaccccaacacttagcaattaatttctcattttcactcctaaggctagcaagagaaatgtttaattcttcaatcctagcaagtaaatcatcattattatttctaggatttggaattaaaacatcacaaacatgagaatcaaccttagcatgtaaattagtattttcatttctaaggttgtcaatggtctcatggcaagtgcttagctcactagataatttttcacatttttcaacttctagagcataagcatttttaaccttaacatgctttttgttttccttgattaggaagtcctcttgggagtccaaaaggtcatccttctcatggatggcactaattaattcatttaacttttctttttgttgcatgtttaggttggcaaaaagtgtgtgtaagttatcttcctcatcactagcattttcatcactagaagactcatatctagtggaggatttagatttaaccttcttccttttgtcgtcctttgccatgaggcacttgtggccgacgttggggaagaggagtcccttggtgacggcgatgttggcggcgtcctcgtcgtcggaggagtcgctagagctttcgtcggagtcccactcccgacaaatatgggcatcgccgcccttcttcttgtagtacctcttcttctcctttcttctccccttcttgtcatcacccctatcactgtcactagaaataggacattttgcaatgaagtgaccgggcttaccacacttgtagcaaaccttcttggagcggggcttgtaatccttccccctcctttgcttgaggatttggcgaaagcttttgatgacaagcgccatctcctcgttgtcgagcttggatgcgtcgattggttgtctacttggtgtagactcctccttcttctcctccgtcgccttaaatgtgaccggttgtgccgcggatgtggagggatcatctagctcgttgatcttcttcgagcccttgatcatatactcaaagctcacaaaattaccgattacttcctcgggagtcattagtgtatatcttggattaccacgaattaattgtacttgagtagggttaaggaaaataagtgatcttagaataaccttgatcacctcgtggtcatcccactttttgctcccgaggttgcgcacttggttcaccaaggttttgagccggttgtacatatcttgtggctcctccccttggcgaagacggaagcgaccgagctccccctcgatcgtttcccgcttggtgatcttggtgagttcatcaccctcgtgcgtggtcttgagtagatcccaaatctccttcgcgttcttcaacccttgcaccttgttatattcctctctacttagagaggcgaggagtatggttgtggcttgggagttgaagtgctcgatttgggctacttcatcctcatcatagttttcatcccctacgaatggtacctgtgcaccaaactcaacaacatcccatatacttttgtggagcgaggttagatgaaatcgcattaaatcactccacctagcgtaatcttcaccatcaaaagttggtggtttgcctaatgggacggaaagtaaaggtgtatgtttagaaatgcgagggtagcgtaggggaatcttactatacttcttacgctcttggcgcttagaagtgacggacgccgcgtcggagccggaggtggatgccgatgaagaatcggtctcgtagtagaccaccttcctcatcctctttttcttgtccccactccgatgcggcttgtgggaagaggatttctccttcttttctttgtggtgtgaagaagatttcttctccttccctttggaggagtccttcttattctccttcctcttggtgtgggactcttccgacgaagtgctcccatggcttgtagtgggcttttcgccggtctccatctccttcttggcgtgatctcccgacatcacttcaagtggttaggctctaatgaagcaccgggctctgataccaattgatagtcgcctagaggggggtgaatagggcgaaactaaaatttacaaatataaacacaactacaagtcgggttatcgttagaaatataaacgagtccgcaacagggcgtaaaacaaatcgcaagcaagtaaggagtgtgacacaaggatttgttttaccgaggttcagttcttacaaacctactccccgttgaggtggtcacaaagaccgggtctctttcaaccctttccctctctcaaacggtccctccgaccgagtgagcttctcttctcaaatcaaaaccgggaacaaaacttccccgcaagggccaccacacaattggtgcctcttgccttgattacaatggagttttgatcacaagaacaagtgagaaagaaaggaagcaatccaagcgcaagagctcaaaagaacacggcaaatctctctcgctaatcactaaagccttgtgtggaattggagaggatttgatctctttggtgtgtctagaattgaatgcctagctcttgtaagtggttgagaagtggaaaacttggatgcaatgaatggtgggtggttggggttatttatagccccaaccaccaaactagccgtttggtggggctgactgtcgtatggtgcaccggacatgtccggtgcgccagccacgtcaccaaagccgttgggttctgaccgttggagctctgtcttctgggcccgcctagatgtccggtggcgcaccggacatgtactgtagagtgtctggtgcgccactacgcgcgtgcctgacttctgcgcgctctggcgcgcattaattgctgttgcaggtgaccgttggcgtgaagtagccgttgccccgcagttacaccggacagtccggtgtacaccggacatgtccggtgaattatagcggagcagctgttgcagtttcccgaagctggcgagttcctgaggcctctcttcgttggagcaccggacactgtccggtgtacaccggacagtccggtgaattatagtggagttgcctctggattttcccgaaggtgacgagtttgcgctggagtcctctggtgcaccggacactgtccagtggcacaccggacagtccggtgcgccagaccagaggtgccttcggttgtccctttgctttttttgttgaacccaatacttggtctttttattggttaagtgtgaacctttggcacctgtataacttatatactagagcaaactagttagtccaattatttgtgttgggcatttcaaccaccaaaattatttataaactaggtgtaagcctaattccctttcaatcggcaacctcacgagcctccacatgctgcgactttatgacaacaagctcaccggcaggttgccggacgagttcgggaacatggcggcgctgcagagactatccataaacaccaacatgcttgagggcgagctaccggcagagctcacgcggctgccgaacctcctcggtatcgttgccttcgacaacctcttctccggcaccgtcccaccggatttcagtcggaacttgtccatcgtcagcatgtcgaacaacaagttctccggcgggctgcctccggggctgtgcaacacaccgcgcctgcggtacctcagcaacgacaacaacgacatctccggcaccgtgcccgcttgctaccgcaagtttaccaagctagtgcgcttccggctggcgcagaaccggctgtccggctgaaagtcgcctagaggggggtgaatagagcgaaactgaaatttacaaagttaatcacaactacaagccgtgttagcgttagaaatataatcaagtccgagagagggcgtaaaaacaaatcgcaagcgaataaggaagtgagacacaaggatttgttttaccgaggttcggttcttgcaaacctactccccgttgaggaggccacaaaggccgggtctttttcaaccctttccctctctcaaacggtccctcggaccgagtgagctttctcttctcaaaacaaccaggaacaaaacttccccgcaaggaccaccacacaattggtgtctcttgccttggttacaagtgagtattgatctcaagaaagaatgagaaggaagaaagcgatccaagcgcaagagctcaatagaacacgacaaatcactctcactagtcactaaagcttttgtcgaattgggagaggatttgatcacttgggtgtgtcttgtattgaatgcctagctcttgtaagtggttggaaggttgaaaacttggataacttgaatgtggggtggttgggggtatttataaccccaaccaccaaactagccgtttggtggaggctgtctgtcgcatggtgcaccggacagtccggtgcacaccagacagtgtccggtgcgccagccacgtcaccaggtcgttggattccgaccgttggagctctgactgctgggcccgcctggatgtccggtggcacaccggacatgcactgtagagtgtccggtgcgccacttcgcgcgtgcctgactcctgcgcgctctggtgcgcatttaatgcttctgcaggtgaccgttggcgcgaagtagtcgttgctccgctggctcaccggacagtccggtgcacaccggacatgtccggtgaattatagcggagcgaattcccgaagctggcgagttccagagacgctcttccttggagcaccggacattgtccggtgtacaccggacagtccggtgaattatagcggagcgcctccggattttcccgaaggagagaagttcagcgtgaagtcccctggtgcaccgaacactgtccggtggcacaccggacagtccggtgcgccagaccagggtgccttcggttatcccttgctctctttgttgaacccaattcttggtctttttattggctaagtgtgaacctttggcacctgtataacttatactctagagcaaactagttagtccaattatttgtgttgggcaattcaaccaccaaaatcaattaggaactaggtgtaagcctaattccctttcaatctccccctttttggtgattgatgccaacacaaaccaaagcaagtatagaagtacataattgaactagcttgcataatgtaagtgcaaaggttgcttagaattgagccaataaaaatacttataagatacgcatggattgtttcttcatttttaacattttggaccacgcttgcaccacatgttttgtttttgcaaattcttttgtaaatccttttcaaagttcttttgcaaatagtcaaaggtaaatgaataagattttgcgaagcattttcaaaatttgaaattttctccccctgtttcaaatgattttcctttgactaacaaaactccccctagatgaaatcctcctcttagtgttcaagagggttttaagatattgattttgaaaatactactctctcccctttttgaacacaaggacacaagtagataccaaattgaaaatcataccaattgaaaaactctttctaaaattagtaccaattgaaaaccaaaaatttttataaattggtggtggtgcggtccttttgctttgggctcatgctctctccccctttggcataaatcgccaaaaacggagtcattagaaccctttttaaactattctctctcctttggcaaataaaacatatgagtgaagattataccaaaatggagtccttttgcttgggacttatgctctctcccccaaagatggagggttgcccggagcgacggcgaaggatgagttacggagtggaagcctttgtctttgccgaagactccaattccctttcaatacacctatgacttgggttgaagtagacttgaaaaacacattagtcatagcatatgaaagagacatgatcaaaggtatatgtatgagctatgtgtgcaaattaacaaaagaaattcctagaatcaagaatatttagctcatgcctaagtttgttaaaagtttgttcatctagtggcttggtaaagatatcggctaattgatctttagtgttaatatatgaaatctcgatatctcccttttgttggtgatcccttagaaaatgataccgaatggctatgtgtttagtgcggctatgctcaacgggattgtctgccatgcggattgcactctcattatcacatagaagaggaactttggttaatttgtaaccatagtccctaagggtttgcctcatccaaagtagttgcgcgcaacaatgtcctgcggcaatgtactcggcttcggcggtagaaagagctacggaattttgcttctttgaagcccaagacaccaaggatcttcccaagaactgacaagtccccgatgtgctctttctattaatcttacaccctgcccaatcggcatccgaataaccaattaaatcaaatgtggatcacctaggataccaaagcccaaacttaggagtataaactaaatatctcaagattcgttttacggccgtaaggtgagcttccttagggtcggcttggaatcttgcacacatgcatacggaaagcataatatctggtcgtgatgcacataagtaaagtaaagaacctatcatcgaccggtataccttttaatccacggacttaccttccgtgtcgaggtcgagatgcccattggttcccatgggtgtcttgatgggtttggcatccttcatcccaaacttgcttagaatatcttgagtatacttcatttggctaatgaaggtgccctcttggagttgcttcacttgaaatcctaagaaatacttcaactcccccatcatagacatctcgaatttttgtgtcatgatcttactaaatttttcacatgtagactcgttagtagacccaaaaataatatcatcaacataaatttggcatacaaacaagtcattttcaagagttttagtgaagagtgtaggatcggcttttccaactttgaatccattagtgataaggaaatctctaaggcattcataccatgctcttggggcttgcttgagcccataaagcgccttagagagtttatacacatggttagggtactcactatcttcaaagccgggaggttgctcaacatagacctcttccttgattggtccattgaggaaggcactcttcacgtccatttggtaaagcttgaagccatggtaagtagcataggccaataatatacgaattgactcaagcctagctacgggtgcataggtttcaccgaaatccaaaccttcgacttgggagtatcccttggccacaagtcgggctttgttccttgtcaccacaccatgctcatattgcttgttgcggaagacccatttggttcctacgacattttgattaggacgtggaactaaatgccatacctcattcctagtgaagttgttgagctcctcttgcatcgccaccacccaatccgaatcttgtagtgcttcctctaccttgtgtggctcaatagaggaaacaaaagagtaatgctcacaaaaatgagcaacacgagatctagtggttacccccttatgaatgtcgccgaggatggtgtcgacggggtgatctcgttggattgcttggtggactcttgggtgtggcggcctttgttcttcatcctccttgtcttgatcatttgcatctcccccttgatcattgtcgtcatcttgaggtggctcatttgcttgatcttgtacttcatcaacttgagcttcatcctcattttgagttggtggagatgcttgcgtggaggaggatggttgatcttgtgcatttggaggctctttggattccttaggacacacatccccaatggacatgttccttagcgcgatgcatggagcctcttcatcacctatctcatcaagatcaacttgctctacttgagagccgttagtctcatcaaacacaacgtcacaagaaacttcaacttgtccagaggacttgttaaagactctatatgcccttgtgtttgaatcatatcctagtaaaaagtcttctacagtcttaggagtaaatttagattttctacctcttttaacaagtataaagcatttgctaccaaagactctaaaatatgaaatattgggctttttaccggttaggagttcatatgatgtcttcttgaggattcggtgtagatacaaccggttgatggcgtagcaggcggtgttgaccgcctctgtccaaaaccgatccgaggtcttgtactcatcaagcatggttcttgccatgtccaatagagttcgattcttcctctccactacaccattttgttgtggcgtgtagggagaagagaactcatgcttgatgccctcctcctcaaggaagccttcaatttgagagttcttgaactccgtaccgttgtcgcttctaattttcttgatccttaagccgaactcattttgagcccgtctcaagaatccctttaaggtctcttgggtatgagatttttcttgcaaaaagaacacccaagtgaagcgagaataatcatccacaataactagacagtacttactcccgccgatgcttatgtaagcgatcgggccgaatagatccatgtgtaggagctccagtggcctgtcggtcgtcatgatgttcttgtgtggatgataagcaccaacttgcttccctgcttggcatgcgctacaaatcctgtctttctcaaaatgaacatttattaatcctaaaatgtgttctccctttagaagcttatgaagattcttcatcccaacatgggctagtcggtggtgccagagccaacccattttagtcttagcaattaagcaagtgtcgagttcagctctatcaaaatctaccaagtatagctgaccctccaactctcccttaaatgctattgaatcatcacttcttctaaagatagtgacacctacatcagtgaataaacagttgtagcccatttgacataattgagaaacagaaagcaaattgtaatctaaagaatcaacaagaaaaacattggaaatagagtggtcaggagatatagcaattttacccaatcctttgaccaaaccttgatttccatccccgaatgtgatagctcgttggggatcttggtttttctcataggaggagaacatcttcttctcccctgtcatgtggtttgtgcacccgctgtcaatgatccaacttgagcccccggatgcataaacctacaaaacatgtttagttcttgactttaggtacccaaatggttttgggtcctttggcattagacataagaactttgggtacccaaacacaagtctttgaccccttgtgcttgcccccaacatatttggcaactaccttgccggatttgttagttaagacatatgatgcatcaaaagttttaaatgaaatgtcatgatcatttgatgcactaggagttttcttcttaggcaacttagcacgggttggttgcctagaactagatgtctcacccttatacataaaagcatggttagggccagagtgagacttcctagaatgaattctcctaattttgctctcaggatagctagcagggtacaaaatgtaaccctcgttatcctgaggcatgggagccttgcccttaacaaaattagataatttcttaggaggggcattaagtttgacattgtcccccttttggaagccaatgccatccttaatgccagggcgtctcccactataaagcatactacgagcaaatttaaatttttcattttcaagttcatgctcggcaatttttgcatttaattttgctatatgatcattttgttgtttaattaaagccatgtgatcatgaatagcattaatatcaacatctctacatctagtacaaatagaagtgtgctcaacggtagatgtagatggtttgcaagattttaattctacaaccttagcatgcaatatatcatttttacttctaaggtcggaaatggtagcattgcaaacatcaaaatctttagccggcaatttttcattttcatctctaaggctagcaagagaaatgttcaattcttcaatcttagcaagcaaatcattatcatttctaagattgggaattgaaacattacaagtaatagaatcaaccttagctaacaaattagcattctcatttctaaggttgtctatagtcttatggcaagtgcttagttcactagataatttttcacatttttcaacttctagagcataagcatttttaactttaacatgctttttgttttccttgattaagaagtcctcttgggagtccaagagatcatccttctcatggatggcactaattaattcatttaatttctctttttgttgcatgtttaagttggcaaaaagagtacgcaaattatcttcctcatcactagcattatcatcgctagaagactcatatctagtggaggatttggatttaacctttttctttttgacgtcctttgccatgaggcacttgtggccgacgttagggaagagaagtcccttggtgacggtgacgttggcggcgtcctcgtcgtcggaggagtcgctagagctttcgtcggagtcccactcgcaacaaacatgggcatcgccacccttcttcttgtagtatctcttcttctcctttcttctccccttcttgtcgtcgcccctgtcactgtcactagaaataggacattttgcaataaagtgaccgggcttaccacacttgtagcaaaccttcttggagcggggcttgtaatctttccccctcctttgcttgaggatttggcgaaagctcttgatgacgagcgtcatttcctcattgttgagcttggaggcgttgatgggtgttctacttggtgtagtcgcgttaaatgctaccggttgtgcttcgggcgtggagggaccgtcaagctcgttgatcttccgtgagcccttgatcataaactcaaagctcacaaaattcccgattacttcctcgggagtcattagtgtgtatctaggattaccacgaattaattgtacttgagtagggttaaggaaaataagtgatcttagaataaccttaaccacctcgtggtcatcccatttcttgctcccgaggttgcgcacttggttcaccaaggttttgagccggttgtacatatcttgtggctcctccccttggcgaagacggaagcgaccgagctccccctcgatcgtttcccgcttggtgatcttggtgagttcatcaccctcgtgcgcggtcttgagcacatcccaaacttccttggcgctctttaatccttgcaccttgttgtactcctccctacttagagaggcgaggagtatagttgtggcttgggagttgaagtgcttgatttgggccacctcgtcctcatcataatcctcatcccctacagatggtacctatgctccaaactcaacaacattccatatacttttgtggagtgaggttaaataaaatttcattaaatcactccacctagcataatcttcaccgtcaaagattggcggtttgcctaacggaacgaaaagtaatggagtatgtctagaagtgcgaggatagtgtaagggaatcttactaaacttcttgcgctcatggcgcttagaagttacggagagtgcgtcggagccggaggtagatggcgatgaggtgttggtctcgtagtagaccacctttctcatcttctttttcttgtccccactccgatgcgacttgtgggaagaggctttcttctccttcccctttccctttttgcgggactcttccgatgaagctttctcgtggcttgtagcgggcttgtcgccggtctccatctcctttttggcgtgttctcccgacatcacttcgagcggttaggctctaatgaagcaccgggctctgataccaattgaaagtcgcctagaggggggtgaatagggcgaaactgaaatttacaaagttaatcacaactacaagccgtgttagcgttagaaatataatcaagtccgagagagggcgtaaaaacaaatcgcaagcgaataaggaagtgagacacaaggatttgttttaccgaggttcggttcttacaaacctactccccgttgaggaggccacaaaggtcgggtctttttcaaccctttccctctctcaaacagtccctcggaccgagtgagctttctcttctcaaaacaaccgggaacaaaacttccccgcaaggaccaccacacaattggtgtctcttgccttggttacaagtgagtattgatctcaagaaagaatgagaaggaagaaagtgatccaagcgcaagagctcaatagaacacgacaaatcactctcactagtcactaaagcttttgtcgaattgggagaggatttgatcacttgggtgtgtcttgtattgaatgcctagctcttgtaagtggttggaaggttgaaaacttggataacttgaatgtggggtggttgggggtatttataaccacaaccaccaaactagccgtttggtggaggctgtctgtcgcatggtgcaccggacagtccggtgcacaccggacagtgtccggtgcgccagccacgtcaccaggccattggattctgaccgttggagctctgactgctgggcccgtctggatgtccggtggcacaccggacatgcactgtagagtgtccggtgcgccactccgcgagtgcctgactcctgcgcgctctggcgcgcatttaatgcttctgcaggtgaccattggcgcgaagtagtcattgctccgctggctcaccggacagtccggtgcacaccggacagtccggtgcacaccggacatgtccaatgaattatagcggagcgaattcccgaagctggcgagttccagagacgctcttccttggagcaccggacattgtccggtgtacaccggacagtccggtgcattatagcggagcgcctccggattgtcctgaaggagagaagttcagcgtgaagtcccctggtgcaccggacactgttcggtggcacaccggacagtccggtgcgccagaccagggtgccttcggttatcccttgctctctttgttgaacccaattcttggtctttttattggctaagtgtgaacctttggcacctgtataacttatactctagagcaaactagttagtccaattatttgtgttgggcaatttaaccaccaaaatcaattaggaactaggtgtatctctaattccctttcaccggcgacgtgtcagagatcttcgggtcacatcctgacctgtactacgtcgatctgtcggggaattcgttcggtggcgagatgtcggcgtactggtctcggtacaagagcctctcatacctgcatttggagggcaacaagatcaccgggacaattccggccagttacagtgcc

SEQ ID NO: 1256 - DNA, 2027 bp, Oryza sativa
  Intron number 2 from transcript LOC_Os03g01520.1 (locus LO C_Os03g01520) derived from phytozome v7.0 (chr-ID Chr3; po s 334669 to 336695 reverse strand)
ctatatttgtgaggcggatacctctatactgtgaggtaccatgtctggtacctggctttagaattgataccggtaccaattttggtacctagtgccaggtactaccaggtaccagacctggtacctggattgctaccaggcaccagaccctggtacctatattcagaccctggtacctatatttgtgtggctgatacccctatgttgtgaggtaccatgtttggtagttgggttcagacctgataccttggttttcccttgatacctttcaaatgcgaggaaaaaatcactttagggtaccagcccctggatacttatagacatttcgatttcatggtttaaaacgtggtatattttttttaaaaaaatgtaccacacaaacatgcataaaaaaagttgagtgctgcaaacgaaaggtaagctgggatgtatttcacatggtgacatggcagtagccattacatggtgacatttgttcacatattcacatggttaaaaacaaaaaaaatgatggtaccactacatagttggcctggttctcattgtattgacaagccacggtgtcatgcttttggacatactacaaacttgcattgacagtaaattctcaaaacaagcattatgcacaaactgagtctgaacaggtgaaagttgagatgctattttgcacatgcggctcgagtagcagctgaaggtaatgacctgcttctgattgtgcactgaaacctaatttaattttctttagtattgtcagcaaactattagatgaaaataggaatagtaaaaaaaaagcttaaatagaaagaagacagttgaaaaatatgataccttcgtttcagtttccatcttcttccttttcttgttgccacaaatggcatttgatttatctggtaggaatttaagcttggtacaaggtttcgaggcacatttcctcctttgctcttcagcattacattggttggatttcttgacccttggtgagcgccttggaccactaggcacaaaatgtacagaatctgaattatctgaacatgtagccatatcgactctgtgtgcgaaaaacaaaaaaaggaaaacatgacaattagtccgctttcaatcattgttactgtaatgtcagattatagtgatacatgttacaaaattagttaaaaaaaatcagtagatgccactcctcccatggtatcaaccagaaaatatatatttatcgatacataaagttatataatgtacaattatcgcttcattttaacagcttcctcttgtgcaatgcttcagagttgtatatgttgtgtgcaaaatatatgtttatactacactagtatccccagtgccatgtaaactgggaaaaatattggtgtgtcagataaattttggtgaaccagtactagtaaacagtgacaagatgcagtttatgcatctcatctccctcccctgtatcaaccagaaaaatcaaaacacattggtggcagatttcgacaattccatcagaacctattgtccttctgtaatctagctgatacctagtaaaaataaaagtagatattactcctagtaaaaattgctggaaacacgatgtatgtgtgttaacagtgtacaatctcatctacgcatgaataacacaaaaacaagtaactcgtctgtttcatatagactactcgatgtcacaaaatagattccaaccacaaacaaaaagtttcatgagaggagtaaccaacctgttaattttaacaggtcaagtatcaaatacgactaccccatcacgggatataattttcttgccacccccatcacggcttcccttggcctcgtctataaaaaatcagaaaatctactgaactttgatgtagaccctagaacagaaatgtagatagaagctgaattagccaagttgaaaagttgggatgcgagaagacataggaaatgaaacttagaaattaagatgaatcacatacctatggtttgagtctgctgcatgagagggggttgctgctaagtggtacctgtggacagaatcggaggaaggg

SEQ ID NO: 1257 - DNA, 559 bp, Oryza sativa
  Intron number 5 from transcript LOC_Os04g48140.1 (locus LO C_Os04g48140) derived from phytozome v7.0 (chr-ID Chr4; po s 28461378 to 28461936 reverse strand)
actggtaaggacttactattacagaaatttgcaatatctttctgctgatatgttttattgtaatcccaacttttctcaatataaactactatgttcatctattttttttttaaaaagagcatgttcatactcctttgcagcttattgattgtagttattttgcaacttctttcaaattcatttttgtttgtaagttaaataccaaagatatcaggcaatttacatatgctcagacctgttctaccactcacaatgaactgtttgtttgagttttgagtagtattgatattcattggatatattggatatttgtatatcttaatagatctcatgcattctgtggcttttatggtactttcctgcaatatttattgttgcactatccataaattttcaagaccttttccccaagaaacatgtattcgtctgtcgaatcaatatattgaggatttgttcatggaatagattaatagtttaatgcttgcatgctgattaatataattattatgatatgcctttggttccaggtgtgagcctttctcaacttatcctcgtacct

SEQ ID NO: 1258 - DNA, 1546 bp, Oryza sativa
  Intron number 1 from transcript LOC_Os01g21180.2 (locus LO C_Os01g21180) derived from phytozome v7.0 (chr-ID Chr1; po s 11813187 to 11814732 reverse strand)
ccgttccgccgcatcctcctctgccgtagctttaggttttacctcctctcccgactctcctccgctttaatcgcaccgccggccgccggcgaccatgttcaaaaagtgagtcggcccccacccttccgccatctcccctctgctttcccacccagcaatttgatctgtttccatggtctgccatccaccgatctgattcgtggaatttattcatctattttctgaatcgatgatgcaagagattgtcttctagatcgggaagtgggggatctgcctactgccctgttagtcttttttttttctttttttgcttaaatgccgctgttgaactatccggtccggaagggggctttgagcttagaagagggatgaagcttttggatggacgatgctttcccatgtgtccttggtattcgtatggccatgatgcgttctcggggatagagctagttttatgcgtccgcaaggatgatgtgatgtttgtgtttctagtggtacatagcacatgttactcaaaagtttagatcacttgatgaacataattgcatctctagcgattaatgtagccatcttggtgtggtagagtatatacattggatgttagatttagggggcatcattgctccctcagagcatcaagtagtggaactacaaatttagaacaaagatatagattcggggaactacaaattaattatcatctactcaagttcctcttgactgtaacacttcacttggttgtgccatgtgcttcactggcatgctctggtccatcattcctttgtttccacacttgtgccttctaaagttttcatgcctgtattgctggttttctcatgcaatttacagcgccttctcgcggtgtttgtctgctggagaatctaattcaaaagggtgttatagtaatctctcttagtcaaaccctgtaacaacaattatcaaattatctctttttatatggcatagcttgattatgttattttagattgcctgcagtttctagctattaggtggagtggtctcaatgcaaaagcttgttttagtggcttacttttcatgcactacattgcataaaacagttgtgatatttgttttcacttcaccaatgttaacttttatatgcacatttctgattatttgtacatttgatgaatcagttccaacttgcattatacactagccaaaatagatgtgcagatgtctgacttgaacctataacaaggaccagattaattcttgtcacctcttattttcagaatgtttaattgctcttgaattacatagttctatgaaaaatactaagcaactgaaatgaaaacttgaagcttcagctcccagatgattgaattgtacagaattgtttactgattgttgcaacttgcaagcacatgattttgatggtttcatctgggacgctctaattagctatgatttctgtattatcggttgtatttgattctgcacttggatatgttattcacacaaacaaacttgttctattttatcttcaggttctcttttgaagatatatctgcgcagaatcaag

SEQ ID NO: 1259 - DNA, 13006 bp, Oryza sativa
  Intron number 1 from transcript LOC_Os01g05970.1 (locus LO C_Os01g05970) derived from phytozome v7.0 (chr-ID Chr1; po s 2843654 to 2856659 reverse strand)
agcttgccaagcacgccgtctccgagggcaccaaggccgtcaccaagttcacttcctcttaggctgcacctggtgctattgtgctagtagtaatattagtttgatctatttatctactagctgtagtgcatcaatgatgggaaatggatgttggggatttagtgactgtaagaagaattaggtggggctgcttttgaggaacttctgtttcatggattcgaaatacactagtaatgcttttgtatcatgtgaatatgtgatctctcctatgttgtctttggttgccttgtgctgaacttgtgtttgttttaattaatttatgtctaattttggggaactaatctttgtgttgtagtaactatttgcattgtcttgcaaattcctcgtcatgttaccggaattgattctggagcatgcatgtttggagtttggaactgctgatgtgctcatgtagacgttattatggaagattgctattatttttgtttctgattaccttaattagctaatgtcactggccacaagacgaatttcactgggctccttttggggaactttttttttttctcatggatcaggaatactctttgatttccttgtgcttgaaggtgaactagtgatgcttatgtctagttttgtggaattaatcttcatgctattgctatttttcattgtctagcaaatcatcaaatccctctgcttgttactggaattttatttcttgagcatctattttggagtttggtactgctcgttggattatgttagttttagatttatggactggcactacttttgtactttggaccgtttgtggactgagcatttggagttcatgatgtttgcattcgaaacaaaacagaggttgttagaagagattagaactttgaaaattgtagtaaactttgttttagcttcgtctggtactaattcaaagaaatctaactcaagtggaaatagtactgaaactccacatatattgcctttgctatttcactatttcaggattatgcatgcctgcccgtttgctacatttctgtcctgaatgtcttatggaggttcctctgttgaagattagctaacaacaaatatgaggtatgcatcttttatcaaaccttgctttgggctgttctgttctgtgcaagatgtgctgactgaagagtgaagatgggactcttgtgggacttcttgtaatgcaatccttttattttctattcagggagattatttgaggtgatcaattatctttaaggttctacagggagagcatcctgaatttctgtttggcttgttcaaattaaatattccatgccaaacaactttagctttaactgattactgtggatatgtactagtatctttttctcatgaaaaagctttatagtggctagtacaaatccacagcgactgaaatgatggatctcatatttcttgggtgaacaatccttcattcctatttggttaattgtttgggctattgttcttctattctataattgtcatggatttggtatcctgtgctagaactgtttagatgcgatcttttttgctgctttgtttatgtcgaatctgaaaactggttgcctgggtatttgagtcagggagttaggaaattttgctgctatggttctgtaggtaactaggaattggtattgaattattattggtgctgcgtaacctttatttaacctctaaaatgcacgaccagtaactatagttggccataaggcccgaggcccgaaggcccggcccacggcacgcctttttggcccggcccaagcacggcacggcccgacttgggtcgggcccgtgctggcccggcccgaccgtcgggccgtgcctgggcctccccaccggcacgctgggctggcccggcacggtcgggccggcccggcacgatgggccggcaggccaggcccggtacataaagtatggggactaaaaatagacatataaatgtaactgtctaaagaatagggaccttaaatagacttattttagctatttatataccccagcccaaagaagagggaggtaaaatagactttttgtagctgtacatatgtcacagcccaataggagggaggaaatttagacttattctgaggaaaagcacgacggcccatcgtgccttcgggccggcccggcacggcccgaggcgtgttgggccgtgcctgggccgtgagtgcggcacgtgggctggcacggcacggcccggtgcgtcggtcgggccgtgccggcccgacaagcctcggcccaggcacggccgggcctgggccgtgccgtgccgggcggcccacatggccaactataccagtaaccatggaaccttgtatgcagctgattattccaggtacagtcatcgatactacacatatgcatattgcccaatatttatgaatgttgctctactgttcattgcccgactcaacatttagttaagagtgctctgttcattttcaaccatccaagacctgagatattcatctctgattgcatgaatctctgatgcagcatctggtaacagcattcggtctctgggttgttgctttgagcaggataagccgagcctaagaacggacaccaaacactgttgaataattcttctttttgtgcttgcatttgtcccatctgtatcatttgcttcttcatgcagccagattgttcgatcagctatgttcatggcgctctcaagaaaagaagctgcaacaaacttgtgcagatccattgaatccctgaaaatgtcatcagtgggacttcttccattaaacatctcaagcaacaatatacctaagctgtaagtatcacctgctctggttactgcagaaccttctccatactctacaatatttgcagttaaagttagtttttcaccgtactaccgacatgtaaaagatacaaagttccagtccaacccccacccatgagggaggaggtggagaaattgtaggatataatacaaaaatataatatttttgacctacctggtgcaatatatccaatggaacctcggattccaattgagctttttgaatattgaagagttctagttgtgcttttggggaggatttttgatatgccaaaatctccaacctttgcactcatgtcttctgcaagaagaatattacttggtttcaggtcacaatgaatgatcggtggctgacaactgttgtgaagataatccagtgcgtccaagatatcaaccacaatgctgagtctctgcgaaaggctcagtgtattgctgggagtgggattgcttgacgtgggatggagccaactatctaagcttccgttgggcatgtactcaaaaactaatgccttgaactcctgaccctgtgggtcaatacttgaacaacaagtgatgatctttgtcagacaacgatggcgaactcttctcaaagcctcacattcagcctgaaagctccttgaagatcctaattgtttaaggtcgaacacttttatggctacaggttcaccctcatcttgtaaagtgcatttataaacagaaccatatcttcctttgccaagcaagtttgcttctgaaaattcattgcttcctcttgataatgcataatatgaaatcctctgatattgttcctctataaccggagatatctcttggctattttgtcttccttttagtttcctgtgctgtaacataatcagaacaatagctgaagctaacaccagaattgctcctgttgttatgaaagctactttaagatatttcatccgttcttttctgtcctttcttacagcaggaattggacatggagccaagtgaagccgaggtattccaccacacaacttgtcgttccctgcaactgatgcatacgtaaggttcctgaaagcaccttcatctggtactttgccttgcaaattattgaaggacacatctaagtgccacagctgtgtcaaattttgtagggtttctgggattgatcctgacaaattgttgtgagctagacacagctgttgcagattgcccatgctaccaatggcattggggatgctaccagaaaacttgttcatggttaggttcagtatggcgatcccttttagttttgtcaaagattgaggtatgcttccttcaaacgagttgctatctagcagcaggtattccagcacctcacaatttcctatactgtcaggtatttgatcagatagctggtttcctgacagttctatactgtttaggttaaccaaggtaccaacttctgatggaatgggtcctgagagagtattatctgacaagattaagaaccaagaaagtgacggcagctcaaaaatttcttttgggaccgaaccgttcagatggtttatggacaaatctagagcaaatagcttctttagcttcccaagggttgcaggtattgggccttccaaatgggcatcgtatgcggctagtatattcaaattggtaagatttccaattactgacggtatgaggcctgacaatctagtgctgtacagagtaattatggccaagtctgctagcttccctatgctctcaggaatcactcctgacaaagaagtggaccctagatcgagcgtgtccaagccaatcaaattgccaatgtctgtggggatgctcccggagacgctattaccacgtaagaagaacttttgaagtgttgtcgacaggttaacaatagagattggcagctgcccaatgaaagaattttctgcgatatctagctgttgcagctgactgcagttggcaagtgaagttataaattcccagcccttcatgttatttgcctcaagtcggttgctagacaaggatagacgcacaagagatttcaaccttcccacggtaggaggcacaaatccactgaatttgttaccatcaaggtatacgtctgtgagtgatgatagattgaataaggaagaggggatgactccgctaaactggttcacagacagaacaaagtgttgcatgttaggtaatttgtcgccaatgttggcgggaatgcttcctttgagcttgttctcatatacttggagaacagtcagttttgacagattccatatggagggcgggaattcgccagagaggctgtttccgtcaagaccaatcttctgcagatttgggatgtttccgaggcttgacgggatcaggcctttcaggtggttgaagtccaactttaggaactcaagcgatgataggtttgctagcgaggctggaatcggccctgtgaagctgttgtttccaagatggagcttctggagccacgtcagtgtgttacccaacttcaccggaatgtggccactaagttggttatagcccagggtcaggtttatcaagctgatgcaggagctcagattatcagggaacgcaccggaaaacgaattgcttccaaggtcgaggatccgtagatgctggaggtggccgaggcttgggggaatctccccgtggagcccattggagctcaggttgaaccaccggaggaaggtgaggtttccgatggcaggagggagcgttccggcgagattactggacggcaggctcagccccaccaccctcgtcggcctatggcggctgcacttgacgccctcccagttgcagaagctggtgctgctgttccatgaggtgagcgtccttgagctgagccccgccttgaaagcgggcagcgtggcctcatcggtgctgccaccggcgatcgtcaggacggagatgagggacagtaatacaagaagcctcatgtggtttctttctttggttccgtctgtgagagagagaggagggagggtctttggagcataacatcagcttacaggctgagatattgctcctatcctatgatcctatttggacatctccagtgtttgcttgacttcattgaccgaatggtctactgttcaatgattacttggctgggactggttgacttgacctaatctgtcaggactcggggctttttacgagtgcattgtgctgctctttccaacaaatgcaagtggtcagggttaagtgcagagcacggtgtgtgctgtccgccatactcgatgatcagtaaagtgggtcacgtagtttttgacatatggtagctgttgacatggacgaggagcaccggacgatacgccagcaacagcagccttgccgtcgtcgtcgctgccaccggtcgccctcatcgtcaatcctccgccattgcggtcttctgaagcacggaccaaggttcttgtttctttgagcacccttttagtgctttttcctagaattggaattcatgatatccctgattatcttgccaactgttaaattttggtgattcatctattgcgaatcaagcattagtcatagcatttgtgatagttgatgttgtcgtaggtgatcagtaacatgcattagtggtgattactgattagtcaggtcaggtgtgtagtttagacatggaaaaaccaccgaaaactgtgttggtagtagaagtgttgaattccgaagtgtatatactcccataatctaactcatgaaacatacagattcacaaaaaatctgtcttctttctctgttccaatcgcgatggcgaagtgatgaggtgcgatagttggcgaagtggaggtgtacggcaattcacagtcgcaaattctcctggtctatattccattaattccagcagataaatatttcactgccatggtgatatatctcgacgagacgacggcgtccagggtcaagcaacaatgacgggggaaacttcgatggtcgacaatggtgatatataggcaacattagagcaagtataatagaacggttgttgctggcattggctcggatcggcagatggcggagtccttgggcttgaagcgtgatggaagcttgcggggccaaaataagtgaaactatatatttacaaacgaaaaataatttatgaataaaatttttatatacgttttcttaactatctaaaaacaaatactgaaaaataaactttgataagaaaacgttaaaatcagctctaaatttaaggctgaaaattcaaattctagctgataagtataaacttaagcgaaaagatgagactcttagaatatccttgtggcaggaacaagattgtgtgaagattggagggagcattatgaggttgttaaaacgttagatatgaaaaggctttcatatcgatgtgtagtaagagaggagtgagtgttcgctgggaatcggcgcgcaccaccgcagaccctgcccactgcactaggcgcgattctcacgtgtatactttacatgttttaaacaattttttcctacaaaatttatttgatctacaattcagttacaccatcatatttggtacaagtaaatcttatatataggctgttacaccatccataattcgattacaggatgtcacatgattatatattttttaaaaaaaatatatccgtacttaaaaaatatataccatatactccctccgtcccataatgtaaggaattttgagtatttgcttccactatttgaccacttgtcttattcaaaaaattttggaattattatttatttttttgtgacttactttattatccaaagtactttaagcacaacttttcattttttatatttgcataaattttttgaataagatgagtggtcaaacactagaagcaaaaacttaaaatcccttatattatgggacggagggagtatgaaatatcaagttaaaacgaatgaaacattataaaaatacttcctgaaacatccagagaagctttgttcggaagttggttactgccggctggcagcagcagcttgaacaatatttttgctgctgattcagttgttgcaggcttgtagtacagcgttgtggctgcacaggaattgttgccgaacacaggccactatatacaattttcacaaataaaactagtgaaacatcgtaaaatacttattgaaacatccaaataataccatcagaaatatttaaaaagattcattgcaacgtaaaacttaaatgtgcaacggaattgaattttggttgaaacattgtttccaatacgcaaaacatcaattttcactaattgaaacatatgtattttatatgaaatcttgatgtagagttttaattataacgaatagaacaatataatcgaatcacatatttgataaataatttagaagaaaaatcattttgaagattgctaggtaaacaattaatgcatattacatgaaatatgcatactcctttatggagagacagtgaatgagcactttccgtggagaggaaagaataaagaacaactcgcgtacaatgtttttccctttgcattcccccaattattttggttgttcaggagcggacactgtgtaggttataggaattcacccaaacttttttctcttgaaaagaaatactatatgtaaatactagaagatataatgatactgcataagtaaatactttgctgggcctaatacctcgttcttaggcctaatactctgctgggcctcctcccgactcaccggcccaataactgcccaggacgcttcctccctaatcgtcatctcctcccggtccccgtcccccgatccccaatcattcctcccctgacgccgcgccgcaactcgccgccactccccgtcgccgccgccgccgcttgtcgaagctggtttgggggattcggggatttgacggattagaggtgactgaactctcgctctcctgctgaaatcataccgtatttttgtgatgatttatggggaggaacctaggttttgatgagagaggcgaacactgatttgattcatccaacgcgttatattcacatcctaacatccagcctttgcgcctacgcatcaggaatcgcagtcgcagatggaggccatggacgacatggcggctctgacggaggacatcctcctccagatcttctcccgcgtgggcagcatcaaggacctcttcaagttcgccgtgacatgccggcggtggctgcgccgcttcaccgacccggccttcctccgcgggctgtgcctggacagcggcgagggccaccgcgcgcgcctcctcggcttcttcttccagcagacgagattctatcgctgcgaaaagatgatcaagatgcgggtgacgcagcagagctcggtctgtccgcccaccttcctgccggcgccgtggtcgccgctcggcctcacggatcgcaccctcacctccttcctcgccgccgacgacgacaccttcaactacgccgagcccctcgcagcgcgctgcggcattgtcctgatgcggcttgtcccccgcaccgcgctgatgatagcgtgcagccacctcctcggcgtctgcaacccgatcaccggggaatgccacgttctcccgcctctgaatctctccggcctccatcgctacttgaccagctacgccatcatcacgtccaccgacagcgacctagatgggaagcagccgccatcatcatcatcgtcagggcgctccacgttctcgcagctgtacctcgtcgtccaacacaagaaagactgtaacgagtacttctactcctactctgctgctacgtgcagctggagcgctcccaccatgtgcgtggacggccgccgcttctccctggtgggtgagagatccgccgtcgttcacaagggcgcggcgcactggctgtttattgatcgtgtatctagcgcaacccaagatgacatactgtacaaactcaccgcggcggtggacacctcagaaatctccttgacaaggctcccctttggtgctggaggctcaccgctcctctgcgtcagtggagacggcaaactttcggtcgcttgcgtgtttcccatccacatgagagtttggactcagcaagatgacacccctgcaacgtggctccgcactgtgatcaggataccattggcggtgccttacccagactattcccatatatgtcagccccgcgagaagtggtttaacttcaacaggggatcaatgctcgtgctgtacaggagcaacggcgtcttcatcctcgacctcgagaagaaggtgatggaaaaggtcatggactgcttactgcccctattcagtgataaactgaacaggacggctgtggcgtatgagatggacttggttgagttctttgtgctccagctcagtggtctatgtagagggtctacaggataattacagatgttatgcagtgggaaaatatatgttctagaataagcaagtttaagttaaacaacagcatattacatggatcatatgcaaactgtgcaaactggcgagtgatatatcttgttctgtagcacggcattgtcattttgatatggtttgacctttactggtttccactgtaacatcccttcactggaaaaacaaattctcttgatcttacagttcacaactacgcaggtggcatttgcggcacagttcacaattttctttgtttgcctgttacgcttgctagcaccttaatttgtcaacttattgctagtgttaatacttatacatctgatggtgtaaatcaaaatagtttctttcatctgagaatccctgattgatctgtttgtaagctgtgttcttgttttgtatggtctgagtaccagctgctttaggtagagtaactgactgtcagttcctgagaatgccgtaatgctagttgtattccatagaactgtgattccttgcagtttacattgtctttattttatattcgatttcttattattattcggctagtaaatgcgagtttcctctggaatctgaatgtaccactttgagctcttaggagttgaagtgagttggagctagattgttagatcctgacgtttttttcttgttactgtgaagaacctgtttgtgctttctctaaaattggacttatatgcacgatatccttgattattttgtctactgtcaaaatctgatcacccatttatcagaaatcatgcattagtcacatttgtgataattgatcgtaggcaagaagtctatattgatgtttgacatccttgagtagtggttgctgatttgtcagctattgtctagacatggaaaagctactgctgaaaggccttcgagttctgaaggttatatactcctacatcttacatagaatttggatagaatgcgtctgttttgtttgtagttagtggcttagtgcacactgttgaatttgatagtatttgcaatacagtgttatatgctgctaaactaaggctgtgttcgtttgtgtgagatagggtgagaaaacacctcgttttccgcgcgcacgcttcctaaactactaaacgatgcgttttttgcaaaaattttctataggaaagttgctttaaaaaatcatataaatccatttttgaaatttaaaatagtttatactcaattaatcatgcgctaatggctcatctcgttttgcgtatcttcccaatcttctcaatctcctatctctcaaactcaccctaagtgaaaatggatttccttgtgaagattgtagaaacttcactaattgccaggattggtctaatttgttccaaggtttatggcattttttgtatttctttactcctttaaacgtttctggtggcgccgccaccaccaaatgacatttgggctccacataactagttgcagaaaaaaatgtgagagtttgcgtgctcagtgatgtcctgaagagtatgtgtaacacaaagatgcataacagaagactagttatgatcacgccgttgccaaaggttatcatcaagttccttgtatgttgtccactatgacttattttggtgtatccctactttttaatctctagatataaaactatggccaatatattgatagaacacagctgtaactaaatgttgcgtttctgactgcaggatacatatggaaattgagtttgttggtgatcacagttacaggtctggtaagatagttattgagtttaacgattgaacaaggtgtctggaaataccaccaggtgcttcaatctttgagcaagatttttctgcgctctccattgttttgtgttgtgtttgtttgcagtctgaaccatgaaagaggaaggagaaagaatgtgagaggaaatgttcttggatttttctctagcagagagatttatcttgtacgacaataaatgtttgctgaattcttagtgtcatctcaaaattcgatttgtctaaacaggaaaaactgacctattaatcaaaatatatagagtttaccctgtttttaattattattttcttcttatttacatgctgtttatggttacagactccatggcaaaaagcccaaaacctgaacccaaagaaagaacagcccaccaccacagcgctccaaaaacggggcccactgcacatttttctttgcaacgtcagcgatccgcacggaaacgcatcgcagccgtctaaccgaaaaggcaccggacgtcacacattcatccacgtcatcgatccgcgggacaagcctctccaccaatcagcgcccacttttacccactataaactcaccgcacccgtgtcctccttccacaccgcaatctcgcaacacatcagcacacaccgctccaaagcaaaacccacggacccgcttcccctccccgagaagaagagagaagcatccatggcgcccaaggcggagaagaagccggccgcgaagaagcccgcggaggaggagcccgcggcagagaaggccgagaaggcccccgcggggaagaagcccaaggcggagaagcgtctccccgccggcaagggcgagaagggcagcggcgaggggaagaaggcggggcggaagaaggggaagaagagcgtcgagacctacaagatctacatcttcaaggtgctcaagcaggttcaccccgacatcggcatctcctccaaggccatgtccatcatgaactccttcatcaacgacatcttcgagaagctcgccggggagtccgccaagctcgcccgctacaacaagaagcccaccatcacctcccgggagattcagacctccgtccgcctcgtcctccccggcgagctcgccaagcacgccgtctccgagggcacgaaggccgtcaccaagtttacttccgcttaggctgc

SEQ ID NO: 1260 - DNA, 3651 bp, Oryza sativa
  Intron number 5 from transcript LOC_Os11g18690.1 (locus LO C_Os11g18690) derived from phytozome v7.0 (chr-ID Chr11; p os 10571440 to 10575090 reverse strand)
gccagaggatacagttgctgtttctatcaaggttggtaagttcattctgcatgtcctgtaaataatgttgatcaagttacagctaaatatactccaatctatcatcactttgaagcaaatgttcaatattgaaatttccaccgcgataagaaattaccggaaattgaacattttatccatatctatctatttctattatatactaaaagtctattaaacttcctaaaaacgctctcgagccgccacgtggcaccctataaacactcctatgccgccacgtggcactttctaatctcaccgtcgattttcatttaattggtggacccgttattttagaccattaaattaaattttgcttcctcttaatatatcatgtcctgtgcatagatgtcgtttataccggaaaaaataaaccatccgtacgtacttggaaagcactaaaggcacctttaggactgttcattttaaaaaagaacgtacttacgtacgataaaaaaactataaaacaggaaaaagaaactgttcacttgaaaaaaatagcaaaaaatatatatcataataataataaaattataaatatatgaccctaataataagaaaagctacaagaccctatattttatgtacataggtagaaaaaaaatatgatttttttactataataatataatttattccacagatatggtcatgtggtgttcctacaaacattcttaccgccacatggcactatataatttcgctatcaattttcttttaaaatgatggacctatttttagattattagattagttcgcttactgttaatttcctatgtatatgagagaaattgtttaccggatgttcgattgaaacaaaacaatgaaagaaatatacgtacgataataaagctataaagcccataaaatacatatataagagtatgtaagtacgataaaaaaccatcaaacagaaaaaactttagatattgttcacttgaaaagatacgtacttatgcatgagtgaaaagaaaatccataagaccagaacaaaatatatgtacatcgatagaaagaaaaatatacggtcttttcaaaatatgactttctatactacaaaaacaaaatttattactcaacaaatatgatcatgtggtgtttcaacaagcactcttagattgccacgtggcactctataattttgctgtcaatttttattttaaaataatggacccattattttagatcattagattagcccatttcctcttaatctcctgtgtatatgagagaaactatttatcaaatattcaatagaaaaaaaagaaacatacatacataagataataaagctataaagccccgaaaaaatatatatataagttggtagaaccttcgaaaacatatagacgtttttcataataggattctacagtattaaatatgcaagttaaactacattaatataaaaacaaattaaatgtgtttaaagacccatttttaaattatatagtcaacttataatcaggtctattcaaatgttgacgatttatcatagttatattatagtgctaaatacattacaacccatggagcggacacataataattaatatcaaaatactttttcaaatcattttggtgacatataataattaatgtcatgataatttttgaaataatttcacattgtattttatggtcaaatatcacttgataattatataacactaactgaaatctacatgcatgaaaatgaaacaacattatagtttgtcaattacatctaattttattttaatttttgtgagattaagattctcaattttttggatttttcagaattatttgattggtatgcccaggcaatgatcttgccataatacaactccttaatctatcacaaaaaatatggtcatttacgttttttctttgccaaataagtttggtaacaaatgaacaatcctataacatgtacataaaactactcatgatatattttcttattttcttatagttgagaaattataatatgttggacagatgtgataattgatgaatgtacgctatacaccctactgatataactataagtgcacttcatctaattagttattataaataatttggaaaaataaatacatttttagaattagtaaaggtgtctcatgtaattattaacagtaggtgccaaaaacaaaccggatgttaaaatttagatctttgtcaaaatatatacaatgatatgatactttaaagattatcacggtcacatgtttgtttagctacatatatgtttaatgatcaatctcactcatttctaaagattacattgtatctctaacataaaaaattaagaagtactacttaacaccataaacaaatcatgtctacacaaaacataaaaaaattatttttttacgggaagaaatgaagaactattttcatcacatccatcttctctttgtttccctgaagggcactgggcagagcatgaataacaaagcttgctaagctaccacaagtatagtagggggcacacatatggttgagttaaagcaagcccagaggaggccacaattgataatagtgctgaacttctcacttactaatacaatcttctttaagggtgccgatagcaaactaggattaattaaaataatgctccatactagctatgaggcatgactatctcgacccatgcttgaaggcagtggataaataaagccttgatggttccacccattagagggggcatttcatgtctattttttaatggtgttatcgtataaaccaatagaagcgcggtagttttagatatttattcatagatttagaaataagtgttgacataaatatttaagtatgtagtggaaatgaacgttttttgtattaatgatgtattaagcttattttggtggtacaaatgaagttttatttattaaaaagatatctaccttttaagagcaatgataaaattaatggtgataataggcaagtttacatataacctggacaaaagcgatttttttaatctgagacattcttatcatttatattaaagattacggtctatttcacaatatagatttttgttattatgagacaaaatctataatttcttatatctattggatgagatatgacataattctaatagcattatttctataaataataaataagatgcccgcgcatatgcgcgggctttctttctagttatgtaaaaataacttagaattttcaagacaacgacaattttttggatctatatccccttttcccttctcgcaatattgaaccctgtttaaagctgagatttgttccgatccaacaaaaagtaccttcagataccagtacctcatggtaccaaatcatttatgatcattggatctaacaatacaaatcctgtccagctagatccaacggtcagaaacgatttagtaccgtaaggtaccgatacctcgaggtactttttgctggcccggaacaaatctctgcaatgaattgtgccgggaaattcacaatgtaccaatattgttgcgaaatttgcaatactgtgaatccttgacagttaatttagcgttccattaacaaaactccaggtatggaattaaaaatcctagattctaggcaatgaatttaactgaaatcgtgttgcaattatcagga

SEQ ID NO: 1261 - DNA, 1527 bp, Oryza sativa
  Intron number 1 from transcript LOC_Os01g73656.1 (locus LO C_Os01g73656) derived from phytozome v7.0 (chr-ID Chr1; po s 42672173 to 42673699)
gactgtctcaactgttcaccgtgcgtaccctgcaggtatttgtttgtttcgtgtgtatacctttagtttttggcgcagattgtagtctgcagaatcgaccctacttgtcaatttcagggctaaaatttcattgttgagtcagtatgtgctatatttcacattgtttttttgcaccatagaataccgttgatgtgtcaggaaccaaatgattttggttcagacaaattcgaaagagattcaaatatggcaattagctaactagtaggaatcctaacacagcaaataattaaaattgtaatgctgaaattaactagaatggaaggaaatatatgtgtgcgccgcaagaacaagaggggaaattatattagggttcagattcgataaagagttacagccaaaacacggggcttatattgagtacgccctctgctagacgacaacgacgatgacgtccacagtacggcaattcttcccctctgtagcacatcgcggcgaatcagggccacccgatcttcataacccttccaatgaatcggtatctcacaatctcagccgtcgattctactacagctatcccccttaactctgaacttccaagtctgattcttcttcaggcctcacatgatgcgtgtttcttttgctgtaacagcgtagttaagatgaatcaactaccatggagtctttcactaaaatcaagacttctcttggtttgcgatgaaaatgaagtttcaaacatgtattcaattacttttgctgttctggcctgttcatggtgtgaatatcgcattgtaaatcaattgaatgacgatcattccatgtctaatatggcagacatttacccatgaatggctattttgttggtgctcgcaacgacttcctgggttatatgctccagtaatgtggaaacaagtataaaaccttgtctgccgtatgcttttatcatgttaacttgttagtagattctttttcttttttaaaaaaaacatggcagatatcaacagttgcggtagtaatttcgcttcatattattcactttcttcgattggtcatcttgagtggtttcctctttcttggttacattctgctactgtgttgttccttcatgcaagtgtactggtcatctttttttcccataatgatgtttgctgaattaactaggagcttagcctgttgtgttttgtgaatgtatgcggaaaatgaataagattttgtataaaaataatgaactgggtatttttttttcaaccttctgagtcctttcatgcaaacaacaataattgttttctcttgataacaaagcatgaactcctggttatcggtctgtaccttgttcagtgcctttcataattagtttaagaatttctaatacactggatgttttagaaccttccattactgggagttgcaaaagttaattggagataatctaaatgaatccctttattagtgttgttctgaaaatagaaatgataggccattttcttttctgcagtttcctaccaaagaaaggtgcttaacaatttgttg

SEQ ID NO: 1262 - DNA, 9211 bp, Oryza sativa
  Intron number 3 from transcript LOC_Os01g46169.1 (locus LO C_Os01g46169) derived from phytozome v7.0 (chr-ID Chr1; po s 26261889 to 26271099)
gggtgaaggccaagacccgcaagaccttgagcaaggcaagtcatcactattccttgaacatgttgatcccaattgcgaaattgttttgtttacaaataaaattgcatgcaattatgaacatcctacttgtaattatgccatgccttgattattgtttactccttattccttcggaaccatgtttacgtatgagtctctagtcaattatgacaattgcttagaaatgctattctagaatcatgcatactcatatttatcaaatgctatatgcttgggcaattacctttgggaaggtagttgagatgcggcatgtggagacatgagcgccacattgccatgatattgatgacatgatttgtgaaaggaaaataaagttaaacaactgttttcgactggggcggctggaggatttgggtggtgtccggaaaaggctagtgccatccctggtcaattaaggaccgagccatgaagttaagcatgaaacgaccccccgtacaaccgcacttctcgtatgggtatagacctagcggagtagatagctgagcggaggcagtatccatgcgtagtggtcttcttttaggtgtgtgatgtggcaagcagtctgctggcggatgcccggttcggatgaccaggtgaatggcggatgcccgttccggatggtcagaggctggcttggcaatactacatgaggatacccataagagaacaatcatgatggactgggttcaacgacaagaagcaacgtaggagtgtgtgtttttcccttcccgggagcgccagaactcctctcactgctagaaacgtatgacgcctagagtgcatgaggatgtaaagttcatggagcgggtactgccaatgcaaggttatcgaaaagctttgccgtgacgcgtctcatgtgttgggatgaggctcatgtgttgggcagtcgcggagtgcgggtaaagtgtacatccactgcagtgtgagtaaactaaatctattcgaatagccgtgctcgcggttaatgagcaccgggacatgtattacacttggctagactctaaattctttaacttgagtgggatggaatattgcatgataatttttatgctgatggagccacttcctgagaggcggaaacgtggacgtcctcagaaaatcataacgactcaatggcgggaagctatccttgggatcataatggatggtggacagaaccgtcattgtttaatatgaacaatggtattaaaacttgattagtctttgctaggtcttaggcttgtgaaaagaattacaaaacttgctttgcgcaaatgaaccatagccatcctttgaaatcctctgtcatgtgcatcattgctgtggtggcttgctgagtacggttggtactcacccttgcaaatataaaatttatcagaagcgggagatgaagcttcggaggatccctatgcctactaccaggagggagatgaagacgaaggcgcccagtaggtcttagtacggtcgttgcctgtggcaatggcatgccgctgcttaaattctgctgccttacctatttctgcttttggatgtattccggaccgctcggtccgatgatttaagactatgcctgcaggcttatgatgtaataattcgtactagacattcgtgtatgtgtatttggtatttcagctatgaattcgtgtgtaccagactacttgatccagggaaatggtactgtttacacgattgattcctgttataaaaacgggggtccacatatcggcatcggctagcattgctatatcggcttattggtcgattggctctttgatcttatatttatacatcttgtcagttacaagatcaaactgactgtatgcttggatcttatcaatattttggacctacactagagctaagtagatcttccaggccattgtgttcgtcgacttagttcatgccaacatagatctggcaccatcggccgagcgcggatttttcgtcaacaccgtcctcgtggagcacaaggcaccatgagcagccgcactgtccacgttgtggctacagacgaagatatggaactcaagctcgatctgccggtgcccgcgccattggagctcgatccatggcttccgagctcgatttgcaccaccggggctcgatccaccgccgccgaagctcgattcgcagaaaggaagatggccttgccaccttcgtctcggcctgccctttctgtcttcgtctactgggccgccggcggggaggggagagggaaacaatggtagtggagaggagagaagccagcgaaggggagaagtgccagtggagtgtggaggagaagcgacggtggtggagaggagagatgttgtcacaggggagaagcggtggtggactgaggaggaggagcggcggtggtggataagggaggcggccacggaggggagaagagacgacgcccgtggagcgaggagaaatggcgacgcccgtggagaaggggatcgggtgagagagaggggaggaagggaggagaaaaaggtatagggaggtgctgacatgtgggtcctgcagtaggttaagggtatatatgtaatcctttttattgttacagggtgtaaaatataaaagttctaattgattactattatagggactgacataaaaataactagggtctaaaataaaaaaacaccattgtgacatccattgtgggtgtgtggcctaaataagtgttttgcttatgtggcatctagggctcctcaaatgaggaaaccgcactgtgaatggccttaggcacccggacttcggcgggatcgaggctcggtggcgtggggagagaaggtcaccggcgcattgcggaggccgtggcttcgctagctgcgccgttcctcccggcgcgatttctccctctatccccaaatcatcctcgtggtcgccctcacgagcacgatactccccccttcccgcgattgccctcgtccttctgagtccgtgccgctactttttttgcctcccgcgctcggtttccatcgctttgtctcactcacgatggcatcaagtccagaacaggtgttgggagcaacaacaggcacatctgtggctctcgccatcattgtggactgaggtaagttgcgtcaaaccctaaccctagcaatgtcacctcaccctctctgcggagatagtagcccatggccaagtcctttcgtacatgaagccactaaggagctgcatcattggcactcttgtcggcgaagtccgcagtcacacggagagcacgagaggaggataggaaggggatgagtcgcgggaggagggatggaggcgaggaatcgcggagagatgggggtgacgagtcgtgggatagaggcgagaaaatcctaagcaaagggtaggactgccatttcactccacctgcagtattgggctacgaggccacgacgtgggctgagtagcatccatgtggttctccagattttatggatccagtttgaggccacattgcactgtggatcatgtgtcctttgaagttcctcagcctatttggtagccctagaaatagcaaattcaaggatgtattgctaatccctaaaacctctcctttcacgcaccttgccacctttgatcatgacgctatgaagtaacagtttgtaggaggtgagggtagctagcagtcgcagtctcccggatccaaatttctgttgtacagcggcatcgattctacacggtagtaattccagtgagagcaagtttaatagtaggctatgaaccaactataaacttacttggatgagagagaattttaaaaatgaagaggtttgactcacatgaaagagctagctattcacatacttcacaattgatacattaaatgcacaggtgagagacaaagaataaaaacaaatagagataaccttatagctcatctgctatacatgttaactctaatatgagctataagcttatagttggctctactattaaacttgcactgaggctgtgagagtaaacagtgaccttactgtagcggttgttactgcataagacgatcccagggttttgattttgattcaacagttaatgcaaacacactacacactgtagcttatctgcattctgtcctcgagagtggattttaaactctcgaggggacatcccctcgttgtttgtatgtcacttatatagtcatgaaaaaaattgagaagatgtattaacatgtgatatatcactccacaaacatacaagttaaaattcaacttctacatatcacaacaaaaatacaaatttgactatgaatatacgttagctagctgtagtttatttttttggttgcgagatgtagaagttgattgaacttgtatgtttgtggagtgatatatcacatattaatacatctttttaatgtttttcataaccatttaagtgacatacaaataacgaggggacatcccctcgggagtttagaatagtttcccttttatcctccactgccgacgatccgtttccagcagccgccaataggtgaggttttaatgccatgaaggtgggagagaccacagactattttggccttttgtttggtttaggggttggatggtgatgatattgggcacacttccaaatttaagatttcgctcagaggagtttgagctaactactactagctataaacccatataataataatgttgaagttaacatgtttacatagattagttataaggttgtctccacttctcttctctctctctctccctctttctctcatttatatatttaatgcatttatgcgtgttttgtttgagttggttttcggatctagtttagagaagaggacttacctaagcacctacccgagggtagtttagactggagcgagattgtccaggccataaagtagagataaaaggattaccataggctcattcatcgaaaattatatatacaggaaaacaaaaacgaatttctacttgaagcatgtgtaaagctatttcttgcattagagctaatccttattatttttctttgtctctttcctctatatatatgcttatagctgactatagtctcctattaaatttgctcttagtaactttcttcatcagtatattatcttaaaatgctttttctaaacgtttttttaactttgtaaacatttaactcatttgtatgtgtccttgaataatggtgataaattttaaataaatgtcataaacactaaattgtccatcaaatttataacatttaacttcatatgggcaattgagcacttattcaattctatctatccatggcccatgctgggtggatcttgctttcagcatcagtacgcacgtctttagcatggagcccatgctggcctgtggtaagtacgattatatcttccagggattcccgagaaccggtccttaattgtcatgggcacgacttccaaaatcatgcatgtatccacaacccaccattaaagcatattttagtttaattaaaccataaccatggtggtacatcataatataattaaggactaaattataatgaatcccattgtgagctaattgatctaagcatggctaagcatccctaaaccaatcatccagtcaattataacccaagttatcaatggcataaggtattcaacaggctgagcatgataggcatccatcccacatgacattctaaaacaatgcaatttaatggaaagcaggggattttataaaacaagttcaacatgattaatgttgtatgtatgacttgccttgctcttgagctgacggaacctcgcaaccactacgaaataaactggatcaccagaactgatggaatctaaatgacaaacaaagcacacaagaaatacaagcactaaggctactgaaacagcaaaagaaaccaattttagtggattctatacattttaacaaattcactgcaacttgaataggttaaaacggagctcggattatttagttatgaattttacaatatgagctacgttattactaataaccgaaaaaacttaatcatttgttacatattattgcccgtatataaaatagatcaatggaaatatatctccggtaagcaagcctcacgaattaacaactgaacgagccaatacttcgtgacacgggaccatccaaacggtcaaccgatccggcgaacggaaccggcggcaagtggctgcggctcgcggcagcagcgcagcagcggcggcagtagccggcaagcggtagcggcggggacggctagggcggcggcgctggtggcggctagggcttaggaaaataaaattgaataggagaataggggggtgttacaacttatataggggagtgaaaatagagagaggtggggccggctaggaggcggcaacagggggagaggggggaaaccgactcgggcaaggggaggggcgcgcgtggccgagagggagaggaggggcacggccgagagggagagggggaggaaaaataggaatatgattaggacaatgactttcccaaataggaaaagaaatccggtgccgttttaggaaaagaacggaaacagaaccgcgaacggattcggactcggctcgttatgcaaaactaaaccgtggacgaagaggggagtgaatcaggcacaattcatgaccaaatgcgggagagaaaatttattattaattcaaatcctgtcaattgaaattaacaacattaattccagtgctctgaatattccgctttaaatcctgttaatgattttagagcaaagagaattcgaaaaaaattctgcctgacattttcgattattgaatacattgttaattaagattttctcctggttagccaaagtaatttctatagacaatttattggtgaattagaaactacggaaaagggaaaacgctaggtgtgacatctaggcacctatcattgactagatcccactgcccgtcaccaacactgtggaagaacactctagctaggaagcagatgttagctttggcccaagaaaatcacaaactcacgtaagcaacaaactcacgggagaacacacacgagcagcaaattgggtggacacacacacaacagattccgtcggcgacacacgcctttgctgacttctctgatattgctgatctactaaaactaactgatgattacacggcttatataacctcccgtacatgcacatagctaacagcccggccgggtcgcacgcacgactacaagccactcactcatacaacgatctgcgcatcttacgccaagattcgctcctccgagctgaccgcgagccacgccacaacgtgctccactaatcctgcatgctcctaactaacttgccgctaatcttgttattcacctaacctgtttagttgctagttgtgctgcaacacacgcagctgccactcactagcactgactgattctacatgcaaatatggactaaccactacctacgtgatgcacacatacacatcacttacaagatacatgaacatatcacgttcctctctacatgcaactaatgcaaaacccaaagacatatgcaagtcatgattagttccaacagcagatagcagccagaggggtgcgcattctggctgcataccacccattgttctagatccgtcgtgtggttgccggctgtgcgcggtacgcctctcccatcacaactccatctgggaaatgaatgccagatgggagaggctggcgaacggaataggggcagaggaggcttgtgcagcccctacggctgcatgacacatttaacccttggctagcgcaacggtgcatcgctcgatagattgtgatgcgtcatgggtgtgtacgttgtggccacctagtccaaggcaagcaacgcgacagaaagcatacaaaacattaaataaatagtcgcatcaaaatattttccatgataatatattgatatactccatccatttctttacttgttagggtattgacatggtatcagcatgttgtatcactatctctgatcatatgaaacattaaatatatagttgcatcaaaatattttccatgacaatataataatgtcattttcacatatcaaattttaatatgtttatatatattaatgagctaagatttgtaggtttgactacacgcattctatcctaatagaacaattcatggcactaggtcattcagtgagggttgtgtggatatggatagtagcaacattctatctcacttttttagtttaccttccttaactttccatgttcattgtctgtttgagaaatgggaatattggattgtctagaataaagtcggagatctaaactcttatgaattgtggttacttagtttatggcacaacaataaattgtgcttccaaagaggagaactgcaccaacaaaaatatggaaagcaatttatcattaccaagaaatagtggaatttatttatgaattgatgattggtggcttctgattgcactaaggaagactgtccatttcaacatccagggggaatattcgaagataacccgtgaaaactggacataagcattttttaatagagataagtataagcatgaaatacattcccaccaaatctactgtttaatgtaaaatttgtcttttggttcccccacatgaagttgagtttggacatgaatatatttcatgtttatacatatctctagtatttttttcattaatttagaaaacttataggttcggttttcacgggttttcatttatttgatggttttcattggatatcccccccccccccaaaatcccccacacccaaacatccataccatgatatatcaattaatcatcatgatacacgataactgatagtgtattttgttaaaattaaattcaataaagaaacattttcagacattttgcttatctcttcattttgcactacaaatccgaatgcattagtttataaatagacatactcatgggatgaaatcagaaattattaaaattatttgataagcacacatcatgccactgctaaatatttggtcagcatgatgtgattgtcatgcgagaaatggttacactcctcgaaggcctacaaaaaaaatctgaaaacaattaatatgcgagtggaaagattatgttgctacaaatctggtttgtaatatgcttaaaaaatgaatatgcagatattgatgaatgtttaactaccatataaagcatcaattttgatacttaaaggcccttttcaacaatactacatatttacatgctaattctaaccatgtttatttcacagattgcaacgac

SEQ ID NO: 1263 - DNA, 1187 bp, Oryza sativa
  Intron number 3 from transcript LOC_Os12g17550.1 (locus LO C_Os12g17550) derived from phytozome v7.0 (chr-ID Chr12; p os 10059008 to 10060194 reverse strand)
agagtggcagaaacccaagtaagagaaggaagatgtaaagagacggatggaagaagagctccatgaaaattcaactgtgcttatgggggatgcaactgtcgtcacaatcggcatcgtcagatttgttcagtgcgattgttttgttggatcaatcttcctctatctgtatccatgtgtaatatcagatgatgtttgttgcttatcgaattcaggaaaccagccatagcagatgttttctgcagtgcaagttttgtgccttcataaacggtttattattgtttataggtttgacaacagtgatgaagaaataattttaaggataaaatgctataacaggcagcagctaagcaggattaaaaatgatgtaccttttttatgtgaaatatgatttacctttttgtagatgaaatattatgatatacattggaaacacacgtaggtttcacttaaggtataaacttttgcaccctcttgttatatttctcgtctacatagataagtggtggaaatgaatggtaagaaaattaaatccagcaggaaaataacatcaaacatgtgtacaaaataacagacaagatttcacagaattcaactttggttgatctagaatcccctttcaggccactcagttgctgctccctgtcagacatggcatcatatgtggcaagtcatggtaaaagcgtggaaacccatctacagccgttgtgcttggcgtctgaccaggaacagccacagaaaatatgccccaatttgcaagcacaaatcacaccgtcttcagtagggcagactatcagtagctcctgctgactttcacactggaaatgagcagcagatcacccacatctgagttcttacaataccaggcgtgaggtcgaaatgcaagcaaaaacttgttgcttttgttgactagtaagatttcattgccgtatgaccgggtgcaggggaattccatgaagaggacgcaaatatcacattcaaatcaactggaccagacacttcatcatgactcgaatgacagagataacataatactactgccaaaaagaaaaaaggaaaagaggatcagtattttcttctaacagtagtcactatataacatgatccgaagtgtcattcatgagcaaatatatatttttgcatattacatttgcatccattcattcacacagaaaaagaagaaaaacaga

SEQ ID NO: 1264 - DNA, 1157 bp, Oryza sativa
  Intron number 3 from transcript LOC_Os04g43390.2 (locus LO C_Os04g43390) derived from phytozome v7.0 (chr-ID Chr4; po s 25476451 to 25477607)
gggacgtagcggacgaccactaccatcggtacacggtacaagagaaattttacaagacagcccataaatgtccaagtgatgcatgttagatttataataactagtatggtggcccgcgcagattgcgcaactagcattattatattttctctcatataatagtatatatgttttctcattatattattaaaatatattacaatgacaacataattttaaattttgtaataactttacgaaactactaatgtgtaatattcaaattgtattttatatacatgttagttattaattatttttaatatcaaattttagttatttgtaaattatatatattcctatatagactctagactcgtcttttaatatttcttttttttaattctgaatttttattatttctaattgtatttctatgtggactctaaactcatctttcaatattctttaatttttaatttcaaatttctgttacttctaaattgtattcctatattaactataaactcttcttcccatgtttttattaattttaaattttagttatttgtaaattgtatttttatacggactctaaactctacttttaattttattatgtttattccgaattttagttagttttaaattcctatatggactctatactctacttctaatattcctttttttttaattccgaatttctatttttttcttaattgtatttctatatggactctatactctacttctaatattccttatttttgattccgaatttatattatttcctaattgtatttctatataaactctatactctatttctaatattccttatttttaattccgaaattcagttatttcctaattatatttctatatggactctagtctcctcttctaatattccttattttttaattccgaattttaatgatttctaaattgtatttatatatggactctagtattctcttctaatatttcttattttttaattctgaatttcagctatttctaaattgtatttctatatggactctgatttttctttttctacgattaatgtgagaatttctaggcaatgagagcgaatgtggaggcttatttttctattcctttaataatataatagattaatataatagatgtgtgatgttgtgaacaggaag

SEQ ID NO: 1265 - DNA, 1497 bp, Oryza sativa
  Intron number 1 from transcript LOC_Os03g43430.1 (locus LO C_Os03g43430) derived from phytozome v7.0 (chr-ID Chr3; po s 24218442 to 24219938 reverse strand)
gcagcatcggcaagaccgtcaagagcttccagcaggtaagcaatcgctgatttaatgcttagagatatatgaatttaccaattaattgctcccctattgcttgacacgatgaggtctcaaggttactccgagcgaaatttctgttagcgctaatttgcaatgttagaaacgagaaccatggatacaattctgatgatttgaaacgattcttgtgattagagaacatcactactctgccatttgaatatgcccatacgcgaggtttagccgttcaggtcacttttcagtgcactacgtgttttcgtctataggaagaatatcacgctagctcaaagatttgtgagtacatttttgtatattttgaagctaatctgggatttgtaggtttgtttatgtgccactttttccttgtgtcagaagtttgtggattgtccaatgttgtgacagcacaaaaggtggcatttggctcagggaaatacatgggtttatgaatgaagaatatgaaattatgttatgtgctaccttttgtaggctttgagttggaaatgtgggttctacaagataagtttgtgtttcattgttacacaattgtttagagctacagtaacatattattgtgcatttgttttagctgtttcattgacacagttgtttagaaatagatgatcatggatttaatgattttgaaatacagtttattttggttgttgaaattgggcataccttgatttagcaaatttaggacctgctacagcatttaagatgattatagtactgaattgtttccttgttgaatccttgacaatacaatagaacagtcaatcaaaagcatagcaatcagtaggagcatgctttaacgctatttttatgttggtcctaatcaaattgcttgacatttgatcatttgggttctccattatctgatcagctacccctctgtctggatccctctgatgtaaaccacttgtgtctggtgaagtagcgaaagaacataactaattccgagtagcctacatgttcacttgaccagttctgtctacatgtttagatttctttttgcatttttgcaatgtcatcagaaatgcaatgtgaattatagatgaaacatgtaaggctgcattcagggagcatttggtgaactttaccacttgaacaattagaacatctctgatcatccttagatataaaaaatcactagtgttgagaggtatccacagttccagatttctactgttaggttgatataatttgttaagtacctgtctaagactaatagactattaagccgcattatcacttgccaatagctcaagctacttttcatgctccaagggcttccagtgttgtactctgttgtgcagtactttatcaagttacggtgtgatactacccttttgaaagcagattatgctatttccggtttgtaactggttcactgacccatttacacaaattcactcaggcagccaaggagttcgaaacggagctgaagaaaga

SEQ ID NO: 1266 - DNA, 3884 bp, Oryza sativa
  Intron number 4 from transcript LOC_Os03g37470.1 (locus LO C_Os03g37470) derived from phytozome v7.0 (chr-ID Chr3; po s 20771915 to 20775798 reverse strand)
gaattcagccagtcctgtcaggtacgtatctagtatatatcctcatttctcgcttgtccttaatttaatttgatattgaccggccagctatctaccaccggcacgtgaatgtcgagtttcaatgtgtattgtttttatatatttttagaaactttagtttaattcctgctaaaatggaatatagctagtataacaataaattattgtcttatatatttattgagttagatgtcgacatacaataatctaggagtaaaaaaatatgtatacctcagtccctaaaagacttcttattgaagtatttgttagttcattgcattgtcgcatgcataacaagtaaaagaaaataaatagttagttacttaagcagtcagataatcatatttacaaaatatggactgcatacgacaactaaatgctgataacgaagaaccattcgaataaactaggaaggaagcccgcgcatttgcgcgggcatgtgttgtacgttaagtttgagataagtacaagagcaaaatattaaacggagaacatctgccacgatttgtccatgaattattttcatcagcattaattgctcaatatgttaatttctgacctattagttttacattatatcatatttaagtaatatctataagcaattatttataatcttctttatcatttgaaaataaggtagaccttttttttagaaaacatgtaaacgaaagtaaagtaaggtgtttttttaaattgcatatctattataataattcatttaaggatgaattgggtgggaatgaagcttcactaaatgtatgggtttatataggctaatacgattgatgtagtttgagaggtcatccatctatgaacatttcatgtagggtgggtgagaggctccatacaacccaacatgaatacaataatgatgaaatataattgtgtagtaatattttagaaattttatgtatcatgaatacatgcttaacttttatataagatagatctaatggttataattaatagttcatcgatttaaaaggcataaaagtattccaataacgtagcttaaaaattatgattgttttaataatcaacgttattgcgaagtgagcgcagctcaattaattaggtttcatgtggtggaacttgcccacctggttcaagtcctagacttgacacgggtgcccgtatttacggctaattattctttcagtggtaggtgatgtacctatcgacagcgagacacccgtggtgactcaaaatgtgtcgactcagtttcttggaggtactcaaaggggtgctgtgtttctaaaagaaatccaatattattgattgtttctattttagtttaatagctaagaaatagcaaggagacaacaaaacttatttgcatttgttcttaaaaatatatggattagtgaacaatagctagtccgtataatatatataatccaaagtaatgaattttttaataatatagttaacttgattctttaattttaaattttatagtaaataatctaatttatctcttacttaggctacattcgatctcattggttgagcttatgcagtgcacgaaaaacgatgtaggtcatcaacgcaatattaattaagtattaaatattacaaacatgaaaatagattttttttaaaagtatagaaagtatttgcaaaacatgaacagtttaatagttcggagaatatgctcaagataaggtatagtcaatttgataagcacttaagaattcaaccttaaatttattaattatgtacttaaaaaatatatacaaatcaaaagcgcagattgagtcattaacggctaaaatcctgactgtgttttgttagaaaacaatgcgacatatttttaatttctgacaatatgtcctgagtaatattttaattactcattatttcatcttgaactatcaatgtaggcccattgatgcaaataaaatctatctattctcaacaattgtagtgtgaaatgatacgtttatttgatattttatattatattatagatctatttttggatgtgcatgttttatgaagtaatatatttttcttgtactaccacattcactaaatatatatttgatgttgattaccataaagaaaataaaaaaaatccagaggaattataatagaaaaactagcttaaaatcgttgttttctttcggtagtttcactaaatatttaacgttggctgtcattaaaaaaatacggagaaagtgaaaatccagtttaaaagctatgttttttttccaagtagtacgtatatatgcagtatgctttttttcttttttgttgtatgtcatttcttcttttctcgtttgtggttgttaacttgtacgtacgtatgccttcttggcttattccggccaatattttttaggtaagaattacatggtaaattaggagggatatattactatttataatggatctaatctaacggtgtaaattaataggtccaccaacttaaatgaaaatcgagggctagattagtttccttttctttaaatttctaagattttctctattttattaaagcgccatgtggcaacttgagagcatttttagagcgctatgtggaagcatgagagcgtttgtagaaagtttaatggacttttagtatataatagatagatagatagataatagataatagatagataaccgaaataaaattatatatccagaatagacctaagaaaacatggtcctaagtaataggcattctattaactttgttttaataatgtaatatctattttctctctgtcaaaaaagttagattgccccactcacaatactaaaaaatgattttctggacgagcactccaataggttgtagatgggccataagtgttcgtgtcttcaaaactcgaccaccattttcccatacggctccttaagagatccgcatgcaaaaattattttttccaagcgggtcacttaaaatgttcgcgtgtgggctctttaactcacccgcatgcaaaaatcccccctctcctcttcccactcttttattactgttctccccagctctcttctctctgtctcccaccgcccactatcctctcccggctctctctctctctccccaactcctctcaaactcctctcccctatacctcttctcccggcctcctcctctccccaccttctcgcccctttcctccggtggcgggatccggtggtaggaatgcgtcacggcagcatatctggcggtgtcgagatgcggcggtggcagatccagtggtggggaggcacaggagagacggatcaggctccccctcccatgcggcgacagcaacgacgacttgcggtggtggcaagcggtggacccagccacccctactcccgcaagatgacgaggacaaggacaaggatggggacggtgacaagatgacgacgacgacgacgacggcttcgagcaacgatggcgacaatgacccggcggcttcgagcaatgaaggcggcgacgagtagggcggcggggtcttctagggttagagtttcgtgatttttggattttattttattttttctttttatttttgtgtgtggatgacgtaagcatctggactatttccatgtgcgggtgcgccacccacacgcaaaaaaaaaagattttcgcagaccccttggtgcatgtgggtcgcccagccgcctacgaaaaatggattcaaccttatggaaaaatgcatttggtagtagtggatcacttcaacctctccgggtgcagtttcaacacatttgttgatggctatatatttctctgcatatatgtaatattcggcttttccataaaataatatggttaactaagcatgtcgggaaattgtacctaaatccttataacactattctataggtgtggcggttgg

SEQ ID NO: 1267 - DNA, 1017 bp, Oryza sativa
  Intron number 2 from transcript LOC_Os03g15430.2 (locus LO C_Os03g15430) derived from phytozome v7.0 (chr-ID Chr3; po s 8438162 to 8439178 reverse strand)
accgattaagcaccatcagtagcattttgcttcaggtactccttatcttcttgtctgatctccttgttaggcacaattaattttgttcatagtcgtttatcatgacttattattcgtcatgcgcataatccagtgtacagttatctttcaattaatccagttctatattctgcttctttgaagatgtaaagcatactataacatatttgctgtcagagcttcagttgaacattgacctgcactttataccgctgattactgtgcacagaattaatgctcctctgccttgattattgaacgtcctctttggttagctggtagaacaatatctattggtccataataaatattactctcgtgtgatactgggcatgtagtactacaaatacatcatgcttcaatatcatactgatgatacttgaagcagaaatgtacgataagcttgaacatagcactaaaccatcttactcaatggagaacagctcttgctaactagacttgaccatcaattataatttactaataattgcatttatatgtaacaataatgatgtagtgtgctatactgatgtcaatgcaccttcagactcgcttaatgtacactcaatagcaggacagatgaaggtggctatacattcagcacttaaaccataactggcctgtgtcaacctacaatggtagttaaatttactaaactataactctatttatctttggcagctattacgaatcaaattatgtcttatctgtgccttataatttccgtaacccactttgtctctagcacttatatagatttctaatggtgtcataacagtactagaggagatttttttttttatgttgggctatctgtgcataacacattgtctatgttggattatctgtgcataatacattgtcaaaattcttgtaccatttatatgccacgcatctctgctaattctgcttacaatgctgggcctgaattttatcctaaaaggtactgtagggacgcaggaattatctcttccttgg

SEQ ID NO: 1268 - DNA, 767 bp, Oryza sativa
  Intron number 16 from transcript LOC_Os05g11140.3 (locus L OC_Os05g11140) derived from phytozome v7.0 (chr-ID Chr5; p os 6273086 to 6273852 reverse strand)
aggtccacattctgtttggctgcttctttgtagagtttattcatatcaaccgctggagatatgatttagaatgcgaattttgaagggcaatgatatttttaattgcttacctatagttaactgaattgatagatggccaagcctcctgcgtgtgttctgtataggtgccccagcctggaagttgcataatgtatactgtgctgtcctgttgttgtacccccttgtccatagattgctaaagtcgccatgttgtaagttagcgagttgtaccatgtttagaagtcgtgcatatagtttaaatttatatttaacctggaggtaggcgacaaaattgtacaaagctaactcgagtctgcggtcctgttatttctctgttttggctttttcgtgtttgtgaaccccctatagtgcttagagtttggagttctttttttctttttgagctccaaagttcggagttctcatctgtaaattaaatctgcaatgcatgcatctagtgactggtgaatctattatcattcactcttgcagtccatcacttatgtgtaattctgtttggttaatttcagattgcatgaagctaagcacagtacatttcgtcactagttattcatctccaaattcctatgcaattctgttctattctactcatttatatctgattctgcgatcctgttgatttggtgctaatctgatatgtacctgctttcccagcccctctaatatttctgatcttggtagctttgtgttcagtcactgtatcacca

SEQ ID NO: 1269 - DNA, 1494 bp, Oryza sativa
  Intron number 6 from transcript LOC_Os06g35030.1 (locus LO C_Os06g35030) derived from phytozome v7.0 (chr-ID Chr6; po s 20376857 to 20378350)
caaggactgtgtattgtactaacatcgataagaatgtaagctgatctctctatcatttctgttatgcttataattgcacgtatgtattaaaccacatctaaaagtttggcctacaagatttagttcaattccctttgaatgaatgaactagctgaaggctcacaatatgtcattgttgtccaaatcacttcctaagtaacctgacatgctacaagcacttggcaactgaatgaatgtgataccagtgcattaagaaaatatcatatgtcagaaatacatattgttttgtttgcactgagaaatagtaattgtaaaccttttctgcagtcatttatgagctcatctttctttgaaaatgcaaattcttgatccatgattcaagcttctgtaacttcccagatcaatagaaacatttacttcagtgcagcgttattggtcttcctcttgtgtgccccatgcaagataatgacactgatgtggaccactagaaaccttggtctctaaagtgcccaactgagtcttaattttatttaatctcttgagttggtatcttgattaaattacacccagttggccaattatggtagatcctcggctccttgcctgtatttcgatgattttgatgtaattccgttaatccatattttcatcacacaatcctaaaaacagttgatctgatgaagggctgaattaataacttgtcaaggttgggagaagactaggttttattgtatctgcgtatagctttagccatctgtcctagtatggaatgtatctattgtagatcatttacctacaaggaaatgttttgtgaacttataattcttttttttgtatatagctgagttggtgtgtttcttaaaaaaggaggtcattaataattggattctgatcctccaccattgtgttgtaatatcattgtagcagtaagtcttaaattattcttatagctatatatatttttaattctcttctatcatcaatctttccaattttagtctgaacaaacgtaaagccgagttagattttgttctcatttgcttctcaatcctcaaatattaatagccataaaagataaccctgatagaacaagcatctaccatctcttcaactccaaagtcactccactcagtgagaaaccaaataaacaaattgagcaaattctaccacacttttcatgaacagatttgtttttcttttctttctttttgcttctagatgtgtagatcaaatttagccttgcatgttcgtgttgtgacagtgacataaaattataatctgagttaaaattttcagaattttttaagaccgtttgggtcacatgcaagagattagggtatgtgcccttactgtgtaaattgactttctcagataaataatgaatgctatgatctagatgtctttttgttgtttgtttcctaattctggtgtggtaattgtaccacaactttctgcattatttaatatcttgtttctaaatataggttcctgaag

SEQ ID NO: 1270 - DNA, 1714 bp, Oryza sativa
  Intron number 2 from transcript LOC_Os02g17910.1 (locus LO C_Os02g17910) derived from phytozome v7.0 (chr-ID Chr2; po s 10371593 to 10373306)
acgtcgacacgtacgagatagtcgccgtcaagattgtaagctctcttcctcctccaactctcatgttagattttgcttcagtatttgtttgttgcggaaattaggttttgggctgattgcatcgttctgatagctttaactcgcagtgtgccgtgcatgtgtgttctataaaaccctgaataaaatgttaggttacaacttaattcgctgttgatgtcggtgagttagaattgtgcagtaatcctttctgtttggaaatcactggtttatgctgaaatggtatacattttttgtgggagcgaaactgcatggcctgtagtcagtgccggagccaggattaggacaggaaaagagaatatgtgtgtgtcggtgggtgcggcgcaaataacaatggcaatagaacatgaaatggtaactagcagctaaagaatgtcccgctctctgtgactctgaacgcattgccacgaagtagtagatgcagtctgcaatggtggatgtgttcaaatttgcccgcgaatagtgaatgtatctcccaatgaggaatgctattatgctttgtttcgacgagagatgctaaagctaatattcaactaatgatcccatgtttgtaagctactgctgtatttatgttttttctgtagtcatttatggtttactgtagcttcaaaccaagcagtggcaataaaccatatgcttacattaatcacataattaggcactaggtgcccaagaaaataaaatttcttgaggggatgtgccattgctctagttcagcccctgcctgtagctacaaaaatttcaagtggatatcatggaacagagtatggtttcctacacaactgtgctatgtgcccattagtatgggctcatcgaagaaaagtcaaaacggtgcatgatagtaggtctcaatttatcttttgcacctactatccactttcacttgtgtgtgtctgtttctagattgtgagtagctagatgtttggtatgctgctgtgaagtatgcgagttctgaggaggagcgctttgcgttataggaggaaactattgtgcctcatttggttcttaaacagatttgtgaacacctatttggtgtcttagttgtatttgacacaaagaattgaaaacattctttatattttgaaattcgaattcaattcaaatgctaattttcaatatttattttatctaaaatttatttttaaaagggaaaaatgctttactttgtctttctaacacatgtaattttatcctagttgaagatgctagacgtttagcattctatccttgcattggaaatttcttcttaagatgttcaatttcactactgactattccaagaaataataagtgaaataaaacttttaaagatctcattttgtttggttttggattgaacttgttgtgaaagtcttgtaaacagtgttttattgtatattatgctttagtgatgtaccttttctgctttaagtttctctcttttcttattttcatataatatatttacattgtatcgaattagatggtaattcgcatatttatgtactaataaggtctctgatatatcttcaatatgatatagtttctttgccatgtcactgcaacaaccatgatttaagaggacatttgaactgtttatccattttattgtgctgatgtatactgcaactggttatattcaggaaagcagcaaaacaaatcatccccagttgcttta

SEQ ID NO: 1271 - DNA, 4094 bp, Oryza sativa
  Intron number 1 from transcript LOC_Os07g25450.1 (locus LO C_Os07g25450) derived from phytozome v7.0 (chr-ID Chr7; po s 14564617 to 14568710)
tagtcaggctgtctactagaaggcaatactcagtttatcttcctttgttttgatgctttcataatccttctcatggagatttttgaggtgattgctgacaacaagtttctctgatggtaactctcccagtccttccatgatctttttattttgagatttctaggattatgtttcgaactcagtacttataatatgcctttataacaagtctacattacttgtgtgtgaattgcttcaatttgcattttctgtacctccttttgattgacctgtattacttcctacttaattagtattttgtttatctcttgcttattcaacttcattgcatttttcaatgctgggatcatgattcataaattggttgtggtacttgaaaagattgaatgaagtaatgaattggttaaagtgcagccttgtgaagtagtgctcctgggtgcatgcgttccttgccctctataaataggcaacaatctccatacatatgtaccataaatgttatctttgatttactagtcttcatttctttcagtcagaaatatttggattttatcgtactattggtggtcagctgctgatatgtgctgttcaaaaaaaaaaaactagtggtttcaaaatttagtttgaaattaaatatcttataccaattatcatgatgatttctggggatattgttcttcagcctggcttatgttagaatatcaattatatattgttacatttttttgcatcgtttctggaatctggaggtcaatctagcccatatatggtaatacgtgcccatataattccccaacgagctttatggttgttaagtagtaaagttgagtcaagttgcccctctaccgacttgagagttgacactagtctttggtagtatatctgacttttactacatttactggttgcttctaccactcgtcttgcactacatgctgtgctgatggacctaatggaactcttttcttatctcccttcattcagtaataatgggcctgacagaccaagcctcctaagcaactcatcgttgctgccttgcttcattgtgtcttctactgccaacaacttcttgtgccctcaagtcatcctctctggccaatatgtggatttgttttgtgggtttgatggtaatgttatccatgatgctactatgggacacatatgttcacagtaaattgggttcagtgacctaataaaagaaacaaatattattaagattaggcaatgccatgatttagaaataaacatggccttgtgccatctcccaaaactacctaaaaatagaacaaaatgtgtttgatctccatgtataggcagtaaaaccatagttttgcggccataactatttggaagcttgtttcatggcacaccatgagaaggatgcacacatgtatctgcttgtcctatgttttatgggctcatggcactgattgtaaatgtgaatgtctggtccaccattatcttcatatgtgattgtacttagcatgcctatagaagcctatcttggcatcacttggatggagtttattgaaaatactctcatgtattttgatggtgtgtttggttgagggaggagggtggatgggataggaaaatgcatgatggatgaaatggtctagaatggactgtgatacaagttgtccctccatctcaaaatatagctacctttagcattcaagttctgttaaaacaaaagttctcatcaggtgttagcgctatcttgttcacttttgtcaactgaagtcgcgcccaaaatgtagctacttacacctaccagtcatctcaaccaatcacaaccatctcatttaatttctccacctacttactcatcccaaccaatcacaaccatccccatttaattccacctacttccttaaccaaggtagctagctattttgggacggagggagtagatgtttggttggttacacagtatggtacaaattttctttgcttggttgtgtcggatggttcaggatggtaccatacgatgtttggtttgtaagatgacaagtaggatactgtttgacacgcatgacccacagcatggttcaacattttttttctcacatggaattgtacagaatcaatatagaatattcctggaatatgtatcccaccatccgggaggatattatcccatctgtgaaatcaaacagcatgatcaaccttgaagttgaagatcaaaccatccactctcatcccctcatgcatgcgtgtcagaccatgccatgtcatagccttgccatgccaacgtccctggcgcggcaaggaagcgctgcaatgccgtgctccttggtgtggcataaatggctgctagtgcttgcatgcgtgtcagaccatgtcgtaggtagctgcatgctttgcctgtgttagctagtaggtgcataccattgatcaccactctttgcatattttctagatattcatgtacagtaatatatgaagataattgtcataaaagttactccatcccataaaaattaaatctagtacgggatgttttttatgggacggagagagtacatcatatatatcacttttacacaaatgcatgtatggctaaattacatctataatttcaaacaaaataaacaaatagttatgagtaaccactgatatagcagagcatgtagggaccggactcatactgcatgctttgtttttcctatggcactttcaaaggactcttattattttttcctgtgtttttttattgatgtaggatttaagaaacatactattttaatttttgtgttttttctattcatgtatttttcctatcctacaaatcaaagggcccttcactgagtggcttgcgactttgaaataattcagagtgcaatatgttgtgaccccctcctgtaatataatgacatcacttcaaaaatacttttaaacgatcaatcaacattatttgttagctagctggcaactcaagctaattaattaaagtgtcatacatgtatggcacgctagggggccattacctccaataggcatgcaaagcctgctcgcatccaaaccagggcatgatcagcatgcatgcaaatctccgtcatgccgcagggcacggcaattcagagcaaggttgtcacgccaaggatgttggcatggcaaggctatgacgtagcacagtctttcagtgtgtcacgttccatcatgccagggttatttggcaacgccagtattcttggcatggccaaaagattcagatttggaaataaaattttaatagggtctaatattaaattattatatgtaaaaggtttaagaaataaaaacaattctgcgtgttgatcattgttgttaagttgtaaactactaaagtcaagttgatgcatccttctaccaacctgtggaccagtcattactagtcgatgagttgattagtgttttataaaggagatcagggaaaagagggaacacatgagcaaaggaggtgtgaaattcttgctgcttcctctaatctggctctagctctggtggctggctatatatggaagaggaaaataactctcctctttttcccctttcctatgaacttggcctcccaaacaagacccagtttgctctcaagcagtcccaagttgagtcgtgtccctctagttgtgctctatggtcgacttgtcaactagtcacctactgtgtaatagtggtttggatttgctgttgggacggtagacgacactctctctttgtctaaatagtagtgatttgttatgacatgactttttctgcgtgcgttttaaattactgccatgctgtaccatattgttttgcagatcagcatcctatttgtttttaccaaagcattttggtctacagcatatctgaggtggttattgtattttacatgttcaaattcaatcagctgtttctactttgctagtatttttttttatgttagctttacatttttccaacaacatcattatgcatttttgtcaaactagtgcattgctttcatttcctgtaaataatagttacactccttttttttaactcatcattgcccgtaataattcctttcctttttcaaatatgaatgaacctgttatttcttatttcaggcgaataacagaagcttgcat

SEQ ID NO: 1272 - DNA, 2335 bp, Oryza sativa
  Intron number 2 from transcript LOC_Os02g06130.1 (locus LO C_Os02g06130) derived from phytozome v7.0 (chr-ID Chr2; po s 3061970 to 3064304 reverse strand)
gaaaggtgaacaacttggagagaaaggggaataaagtatgctttgtattggagaatgtgtcgtacaatagcgttaacgaccaaatttaggtttttcgcatcaacaaatagctgatgaagaaattattgcattgacgtctataactaagatggaagactacaagagtaagcaatgggcgacactattaaccttgctctaatagttgtagaatctaagccagattctaagaatttataattgtaaaatctagaaaatgaataaaaagttaaaatttgagttttagctatctaaattctcagaaactggatattaaccggctgcttattagaatattatattcctccaaatagagtctaatagtttactatggaatagttacttataaatatatactactcctacatcattaatacccaatccatctctcatttacacagtgtcttcccctatagctagctataaatttggtgcccttaattattcactctattctcttcaccatgacaccatctaaatataagttttatgtgacaattttccaagcctgcttatataagtactttctctagtagttgcctgaaagactgaaggaagggtataaaaatacagatccggaacaaagcacggaatctgacatgctttagacagagtaattctggaatatgcatatacaagactgtaacatagaattttcacaccaactttattgaaatttcgtagaaaacaacgaagggatatatatgaaaacttgaaggcacaaagtttgttcaaccatgcaaacgcaaacgaatttcagtagcccaaccatgcacgcaaacatgttatatacctgcttcagtttactctttcagtaacccaaccaaccatctctcaagagagaaaaaaaagtaatgcaattagagcaaatggattgttagggtagattacgaaaatgcaaatgatagagagagtaatgagattattagcagcgggccggcagtgtacgtcacaatcatggtaaaagaaaccagaatttaacaagccgtgttataatataaaagcgtgtttcaagaggccaggtgtatggtgaggaaatttacttggtccaataagcgttgtcaatgtcaaacaatattttttttaattagggtataatgtcaaacaatctgggactcacatcatgtcggcaaaaaggaaatgagagaggaaaaaccctaggaatagcaccaagtgactagggagatagcggaaagtaaactcataggtcaacactccatcaacttgtaaatcttcgatgcatcgacaatatacaatattcgtgcgtgcgtattattctttgtcataactatttaaattttggtaggtgaaattatataccccataactttatcactataaattaaataaaattcatgcgtttaaaagaatccctaaaataatttcactatggaatcatagttccgatcgaggaactgaatatcaaaacgtcaagatatgccttatgccgggtcgtagcatattaatatgatagatttctcatacatgcctctacttttttctaaaaaaaaatataaacacatacatatatatatatacatacgtgcatattcacctctataaactaataaacatatatacacacttataatatctatgagaatcttcgaaaaattgagttagcataatttgagactgacaaaatcatcccgggcaacttactcttgtcaactgaaagaatatttagcggcaaatattagtatccatatcaagtctaagacttgaacccgagcaagttaattccaccattacaaacctagctagcagtttgccacgtctcctttttttttttggactgcgcacatttgtagtgatctgaaattataaaatacaaacccggaacgagagccgaagcgatctgagataatatcagactttagacatagtaaatctggaacatgcgaatccaagagctgtctgtgacatagaaatttcacacaaacttttatgaaatttcatagaagcaacaatcgcaagaatttgaactgaaaaataaatgaaagcaatatactactagtggacagcactatagcagtacaggagtacaggctttgtaaaggattggatttggaaagcaaacaacacaaccttttcttgaaacttaaggcttgatcaacctttacaaatgttacttgaaacttgaagggttgatcaaattttgttcaaccatgcaagtgcaaacgcattccaccaccagcagcagcacacaaacatgtaacctgcatcagttaaacttttagcagtgtagccaaaccatttcaagtttttttaaaaagaagtatgtaaccaatgtaggttg

SEQ ID NO: 1273 - DNA, 670 bp, Oryza sativa
  Intron number 1 from transcript LOC_Os01g42679.1 (locus LO C_Os01g42679) derived from phytozome v7.0 (chr-ID Chr1; po s 24272089 to 24272758 reverse strand)
cacaggtatgtgataactgacaggaacacttaactgtaaattgcccatcaagagaaactacaaggacctattctttcgttataaatctcatcaagttttacatcgacgatctgccaaaaaaatattcctcagcagcatacctgcttctcctttgaggcaagcttttctaacaaactgctattcttaggttcggcttgcgaaaaaagtgacgtaactttggccagggttgctttcagtgtagagaggtaggcagtaggctttgatcccctctcgacgatggaaatttaaaagggattaaacaaagagctaagtcaaatctaaacaaaacccctggggaatttgtgatagaagaatgatgcaaagctctgcacatttgcacctagtttttccctcccgtgtaagctccactacacacaggaagaatcatatgcacttcacctctgtattttctatgcattgagattagcagtgtgggaggcagcttgaggctaaactatgtgggctatgtgagatttttgtccctatatgttattttttttattctttttagtgtagtccctatctgagcttgagagattagagtctacatagattagggactaggtgaagtttctcactgaaacacttgcttattaactacctaatcctttctccatgctagagattatag

SEQ ID NO: 1274 - DNA, 2712 bp, Oryza sativa
  Intron number 4 from transcript LOC_Os12g19590.3 (locus LO C_Os12g19590) derived from phytozome v7.0 (chr-ID Chr12; p os 11420940 to 11423651)
tgactcaagtatgtattgttctacgtcatatattttactttgcattctttttgttactcaggactgtttgttccttctctacattaatggaacaatctgttcaagaaaatatgtgggtgcaagtagtccgcaaataaaattggtcatacatttttatgttattgtgtatttatgtaaagtagctgactcattgcattattagagccatagtacaaaaaaccggacaggccagggggttaaaccgaaaaaaccagaaccagaggtctggatggcttggtttgctataaagaccgcccctgcatgtgaagtggaacaaaccgtctaaaccggatggttttcatgtgaaccggtgaaccaaggcaaaccgagccggccggttaatcatgccaagagaggatgagccttgatgggccagtcaagggccttgtgcatgcaaagatcacaaggcccacggttcatgtacttattgaaaatagcaagaaaaaggtagagaatgggggttcgaacacaggtcagctggttgaaagctctacgcatccactgtccagctaactttcgcagtgacaaatggagaatatgcatacaatatagcacttccggttcaacattcgaaccatgtgaaccggcagttgaaccgctcatgtttagagcataactatctcaactaaaagacgccttgcaatagatagctcttgtttagtgttgacttgaatgatgcagcctcaggctaggtacatgaatcagtttcacctgttaaaggaatgtaatgtttaacctaattggaggaataggaatcatggaccaagcaggatcaatgttaaagcttgtttacttgctgttctgtttcatagctgcttcatttggtagctgcatttgtggaatttggagggctctggtcctggtgaatggagagtattcacaatctaagaggtattggacacctggctgcatcaatagttatatcttatgtgcagaaagatcatttgtgcaattttgatgtcatgctaatatgcatgctgctgcctagtcaccgactagtcatctgactaattacccaaactgaccttttgtgagttgactcgacttgatggcttaatgctgtgagcaactgagcattacaccttgtgacttcatcttttggagcagacactgaatgtgttcatctgttatggacactaattcatggatgggttaagggtctaaagactgggatagaagtgagatcactctcatcggtactaggcttgtcctcattgccagtagaccctgatcaagctacacctactttatgattctttattgcttacttacatgggttacatgggtcccttatatgggaggttcttttgctgcagtactggaggcacttacgtgaacagtaccatgaatagtatctctaccttaacacaccatatttctaatttctaactgaacattcctaactactacctccgtcccaaaatacaaggagttgtagacttgggcacgggtattaaagaaagtaggtggtattaaatgggagaatgattgattaagaagaggaagtaggtggaaaaaaattgaatggtggaaggttgtgttttgttgaaaaggaattgtaggtgaagttgttctattttgggataaattttgaatgctagaagttgtattttgggagagggagtaatagatataataccaaataactaagccatattgacacaatagatgtgattggttgaggcaatagatttattatggaaggtaaatcctaaaccttaattgtattgctacactgctacagtacatgatactgttcgtgcactacatctgttgtggcaaggcatctcaacctcaagctgtggcagtaactacggctgaagtctttggtgacccatgtcgatgaaactgtatgccaacggaatcttgtgtagacgatcattggctctccaatgaacagttgtgaaggaacccttccataacatcacctttatataaaaacacttaggctgtgttcttccccccattttccaaacacatctctcgttttccgcgcgcacgcttttcaaactgctaaacggtgggatttatgcaaaaactttctatatgaaagttattttaaaaaaatcatattaatccatttttcaaaaaaaaggttaatacttaattaatcatgtaataatacaagctttgttttgcgtgctgggaacctcctcccgaacacagccttaatcaagtgagaactgagtcatcctgctggcatatttgaaggcattaatgctggagactacatgtgtatactatcaaaatatgtgagcatgcggatatccaatcgaaatggtcctagaagcaaacagtacttttatataaaaatcatgatctaatgatctgctgtctccgtaccatgcattatcagcatttagattgatggactagatatcaaatatgcaccattatattttacaaagtgatgcttggatggttttgtatgttttctactcttcatggagacaactatttttatatcacaggagacaactactttcatcacttactctaaacattttgataatgtgcttactgaatcacttgaatgcattttattgtgaaaatatcttgtatttgctactgttcctctcatactatttctgtattctgggtgattataaatttttatgttgtcaccttttttggacaggtaaaatttgcaccacatcagcatagcaaactcat

SEQ ID NO: 1275 - DNA, 1590 bp, Oryza sativa
  Intron number 3 from transcript LOC_Os08g04440.1 (locus LO C_Os08g04440) derived from phytozome v7.0 (chr-ID Chr8; po s 2173105 to 2174694 reverse strand)
gaaaggtatgtttcatactttcatatcatttttgttgttaggatttgttgttttttcctcaattctcttgtgttgaactctcactgtttatataatgatcagttcccatgatgcaataagcagaatatatgaccttacctctctacttgttatgcctcattttaaaaattttaatacaagaactgcctaatttcactggctgccactggaaaggcggaaacagtaagaaagctagttttgtattggagcataggcagttaatatatacacagaattgatttgattatgtggaattcagagaaagcaggacaagttggagaggtaggtagagcccagggagcctgcttaggcaccctttgtcaacagactatttcaaactaaatatgttgtagaattattcaggtatctcattttgacagtaccgaagtatagatatttgcatcctagttgaccagaaactgtgagcgtatgttcgttgtgcaatactatagtagtactatttaataacttggacatgctatggggtggacatcataggcatcacatttttctggacattttatcctgagattgaaattgagagcatcgtggtcactcaggtttactctttgtgttttgcacaagcagacagggcatgtgttaccacttttcaagttcatgtgtaagttttttttattatgatattggtagcacaatttgctaactacctaaggtctcaccacaattcaactctgatatattttgcacacattctttcttgttgtgctcatctctgaagaacaaaaatgcaaaaaaaaatgttcattattttaaaaataattatgtgtgaataatccagaattactatgtgcaagattcttaagaacacagatatcagcctcatgcactcatttcatatagcttgtattgtgctagatgctggatatcttgataaatttctgtggtaatttttaaggtatacgctaaccttttaatgctcaagtataatagttacattgttttcttacatgttatcgctgtgacttgtgacttgtgttgcttcgttgcaactggcaaatcatgaaccgtactcagacatgcttggactgatttcttcaacaaaaatcgtgaactggtggttctgcactgtctttagaatcttaatacaaatttgcattctggtatcttgtttttatttttgctttatatttagatactaaaatattttactctgtatgtttcctcattagcaatgatactccatatttttcttaattcattcttgaattcttgtggcaccaaagcaatacttcacacataatgtaagaaaattacgtatgtgatacactaactattgcccacatgaccctcatgctataatttatgctttcttgaatggctgagctctcaattatttatttattttttcagtctactaatttctaccatagtgaaaataaaatgaagcgtttatttggtgtggttagatactctgaaagcaactggtgaaaatatcattgaccattttgggcttctttttagagccttgctgcagtatatcataatgcacaggttttttctgatatatctctgcttctatgcagtttctcg

SEQ ID NO: 1276 - DNA, 2618 bp, Oryza sativa
  Intron number 4 from transcript LOC_Os04g27340.1 (locus LO C_Os04g27340) derived from phytozome v7.0 (chr-ID Chr4; po s 15983192 to 15985809 reverse strand)
aagccatacaaaggtacgattaattaataggtcaaaaacaacagaaattaatatccttcatctcaagccaccaattgtaagagaaatcaagaaaaccgcacaacaaattatatttaaaagttctaaagtttcacagaatattataatatgttaaagatcaggcttttcaaaattgaaaggtacagatgatcaaatcagaagcccaaaaataaatcaaaatttaactattctacccctatacctgtaaatctgaatcaattaaaacctctaaccgctatgcatgaccgtgtgatataacctcatatacttaaagtaatttctatggaaaaatatacagagatagatagaaagagggagagagagagaacgtgctattgcgtaacacgtagcatgttgtttaactaagcaatgtgtcacacgcgtgcccatcgatcctctgcacctctcccaccccttcattagctaccctctgcccctcccatgcagattcaatattttgtgtatttttggaagaccctacctatacttttacttctagatgggatggggaggggatagattgggatggttgtctctgacgcattgtctagatggccaaaagctggcagtctttttatttcaataataggcacatgcacatttttcatcgtaaccactacaaaccatttccgtgtccctatgaagatgactaatgccgcccagggtcatataacaaaagaaaactatttctacagatagctccttatgaaaaattgcatgtgaaaataggtctattaacacaaatgggtcgcgtaatttgaaaggtggggtcatttttatatacggatcttataagaaaaaatcaataaaattgatttttaagggcagttctattaggaaaccacttgtaactctttcctatgatgtcgcctaatgacaaatgttatgtgacaattgtagttcttgttgagatgttgtagttaatgtttttctattttaggtagttaatgggatcaaaagttcattataagaagctttaaggtctacattagaattttttgttacatacgttgacgggtacaatttctataaaacaatatagcgctcgacaaggtttgtaactttctagtcaaagttatttcatttaagaacacttaggtgccgaaatattcgtttcaaattcggaatctactttttaaaaaaggatgattttacaaacagatctttatgaagtctaaagttttaaaattcatagaaaatacaccttaagtccaattgagttaatccaaagttctatgagatccttacaatatttcctcaaatatggcctagtcaatttttttttatatttcctttattatgaacattcacaaatgtcaagttgcataacacatcaaaacatacagtgggaacttgacataagtgaacaatgatattaccaaaatatggaccttacaaatttaatgaaaaaattgttgggatcatatataactttagttcacctcaatcgcacttcaaatgaacactacataaatctttaaggttttaatatgtgttacaagtttaagagagtttaaattagaagatcaacgtctatttcatagtaattaacaaagtgcttcatatgtaagatggtaataagtaagatacacgtgaagggagagatcccggatttgaatcctacatactagatgcatattttgtgtgaaaaaattgcgaacttgtgacaattaaaatatgaaatactttttgcgcctacaataattaaagacttgaaagtcgaacttaaaatacaaaaaaatagatttgttaacatgcagttgtgcaatccactagcacaaaactgtcgatttctataggccctatgtaacatttggttggctaaacacttccaaaaatgggggtaccaattatattgtaactgcctataaaagtagttttccgagcattcaacattccacctctaattctagagcagcaaaacatgcgagtttttccaactactatgcaatgaccaagcagagtaccgctcatgcatacacatatattctactgtcattctatcaagaaacagctaaggccaacttttagttaattaaaacagagatgtgcaactggaggtagagctagctacaactaccaaaggtagctggcatcagtattcttgttaccgagctgttgctgccagcatgatatgaaccaacaatttccatgaacccgagctacttagagcaaataaaaaagaaattgtttattttaccttttgatgtttaatgcacctaaacaattaatctgagtaaagcacaactgaaaaaccatgttgatcctctaactaaataaatttgttgtacagttaccatcgaatttatcgatcactatacatctcaattaattatggtcacgcgtttcacacaatgttaacaagtctttcattcgagaaatattaaacatcatcaaaccactttattcgtcactggtacatggcgtgtccatttgagcataatttacaaagtatttcattcatttatttgtggtttcaacgcgatacatccctgtcaaactatctttttcggctagatttatttacacttgcctaattaagtaatttcataaaaattcccaattggcctattggacag

SEQ ID NO: 1277 - DNA, 1122 bp, Oryza sativa
  Intron number 1 from transcript LOC_Os09g19390.1 (locus LO C_Os09g19390) derived from phytozome v7.0 (chr-ID Chr9; po s 11608517 to 11609638 reverse strand)
gcttgatttcccccaggttcattgactgttgcttaatttgattcgtcgatcgctttttttagtttttgtgatttttatcaccgtgtcaacttgtattgttgttagttcagcatgacctagaccaaactgaagtaaccgaatactgaagtgcttgttattcactttccgatgaccgaattttcaaaaataccgtggaactactgatttgaattattcgatccgattgaacggccagccatgcctagataggagaaacacgggctcctttgcaacattggatttttaacatacatggatcaaaaaaacggaagaaaactatataaatgattgtttggatagagcccaggaaaaaaatatgaatcacaaaagagatgagcacaaaaggattttcacaagcagttgatgaaacttacgttgagaatcctccaaaatttatatgatttgagataatcctaaggaatttgaaaggaattaattgcttcaaagatcacgtaggaatttttttcatagcaatccaatgctctgaaatttctctaaaattcttttattcgaaagtcaaagaaaagatgctctgaggtagatgctccaacaaatatgagattcttagtttttgactcaacaccattaatctaatttccaaccatattagatatactatcaggggtttcagtccgaaggaaatataaaatattctccatagaaattttgcaatatgacagtcaaggaaaatatgttcaatagtctcaatatgcataaaaaaaatcacatctttgactctcattccaatttcttctcctaaattattcttggttagaatcacacctttggataaaaactaccaaaatatattaatcttaattagcacttttagtttccatatgaagataaattgatgagttatactttctccgttttcaaattgcttgtggttattgtcttgtcataagtcaaatatttaaaactcatatatagttcaaattactatttattttgctaggggtgtcctccttaatcaagtgtttaattcccttgtacgtgaacgattcagaacaatttttaaataattttgcgttctatgcaactccatttctgttgaaagttattttccctattccatagttg

SEQ ID NO: 1278 - DNA, 2417 bp, Oryza sativa
  Intron number 1 from transcript LOC_Os02g53110.2 (locus LO C_Os02g53110) derived from phytozome v7.0 (chr-ID Chr2; po s 32489476 to 32491892)
cgctcccgcatcgggcgctcgccccccgggtctaggtacttgcccttgcccccctgcccatgcccttcgtcccgattcgaacatgtcagatttggttggttgggtatcttggtggtgggttggttcgccaggcgccgaggcccaagttctttgtcctggaatggtggctagggagctttgtttcggggttctatctctgtgatttgggtgcggatgggaggaattcttcttggtttgggggaatttggggggttccggtgctgatttgagtgttttctggctggttcttggcgctccttcgggagaattttgtggagctctctgatgggagtggtctaggtcgggatctcagactggatggcctaatttgatcttatcaaggtgaattatgccttctcagtgaggatttaggtgactgtggttacaattgctggggtatttgacctaaaaacgaagatgggcgagcaaaaggggcctcctattgtcaaaattttagtcattgaaccagtagcacgagagcggtgttctcggtgtattctttgcgtgtagattggaggattggccgcaatggcgtagcaaaataccctttaatgtatcttttgagcttctgttgatgcttttaagctttttgattgttgtagtagtgattaacaattttgtaggaaatgatctactgcgagaaggtactgtagtaaggaaatttaattggcagtaaagcttcattttctgaactgtccttgtgcccattgataatgccattaacgtagaaaaaatagcatttcggatagcattttagttaaatcgtgagcacttatctagtcttgggccgtggccctttcatttctttgcttaaagttaacgaagaaagatgcttctcgggtaatatttaataatgcactattcagtggataaggtgcactttttagatggagaagaaagtgtttttgtcactgatttgagttgaaaatggtgaattttgaaccaatttgtggcataagaaaacccttttgccaacctccatccatgtgttagcaatcatggtaggaggatcaagattgaagtaaaacttaaagaagccctttgcttcaaatacctttcttgtgctggttacttagcatgttcttaaaggatggaatccttggcccaattgcagtatcaattgattctctctaattaaaaagttatgtgttgttccttgtttctctttaattctggtagatctgggaggggtcctgacatgctccatgtgggccactggttttccctttatctcttatctggctcttaggtgtgacttttttaatgggtattgtagatcacatctaatgtgcttcattgatttgattatttaaaagcctttggttgttgctattcgtttgtttatgttcctacccttctgtggttggatcccataaagtctacctgtgacttctgctgccttggttgcttgttagtcattgttgtggatcttaagtttgctgacttggtttaaggaggaaggctgctgcaagagtaaagctgcaattggttggtaatgttgctcatgagtttttcttgtataattgcaacaaccaaggaggatctttttgtttgttttccattttgacattgtacaatgccagtttgctacttcttgcttcttttttataagtttgcagccttagtttagtaagtttgcttggtttcatatgcttgatttgactcacaaaaatgataactgtgtggatgcctcttttccttgtttgattatgtgattatatcagggtctacattcactgcctctgtggcggggttcatccctatcatcatgttaaatattaaactttcctccttatgccaattcaatggagcagcaaatggtgattccaatgccaacagaaattgctgcctttggaagttggacagttgtgatttgtgttttttgtttcatgattttagttgcgcccttcaactatccatccataaagctgtgttcatttttacgttgccttgtgtgttctgtttgacaaatgatgaaaatgaccagataaggaatcaggaaatgttttgacttggccaaggaagatccatctgtgcagctcctactgacccccacccccaccccccaaaaaaaagtcctcaacacattcttgacaaagttgattaatctttttcccttttgttttgctaaattgtaatataaagaattaaccttgtacatattttctctctttaatgaaattacactactaggcaaagcccttgtagttttcccagtcaaaaaaaaattgtaatctaaagaaggttaatttctgtgtttatcttgtattttaatatccttgcagatccctggcctgtttttgtttataagaaaacaactgtatcaacaattcatgcaaatcacgttatggtttctttctggacaggtttccgaagaa

SEQ ID NO: 1279 - DNA, 1244 bp, Oryza sativa
  Intron number 1 from transcript LOC_Os09g23500.1 (locus LO C_Os09g23500) derived from phytozome v7.0 (chr-ID Chr9; po s 13963754 to 13964997)
aggtggccgtgccgccgatcatcagccttccgctggtgcagggctacctgcagtcagcttggcaggcagttcaaactgcagcaacagtatcaataatcccggcaaaacaccatgcactcctcctagctctaagccttaagagtcttctatatataaattatttgtgctgatgtgttaataaattaataaattagtaaacgaataattaatgtaccccaatttgattcctgctaggaaatctgcacctatagtcagttcccaaccggcaccaataagggtttctgctgtaatgtacaacttagggatggaacataaataaatgtatttccattaattaattgataattttggggtcaagagattatattgaaccattagttaggccagctagctatagcttgtgtgtatatcgatccattgctggttaatttacgttgtttcagatagcagagttgctttctgtgattaagcagctatcctttgctttctctgattaaccagctatccttaaaattgttttgttcctgtattctacaagttattttgaaataaagaaggtggttctttgttttcaagggctctataatatttttgcgatgttacataatatataaatatacgcttaatatgttctacaaccactactaaaaaaaccttcatacagacaaaccaactgacacctataagttgtttcctgtctaattcccctgagtgaggagtattggtgccggcacctatgacccttccgccaacaaggccactaacaaaaaaacgagcaccaatgtggactcgtgctgtgcagaacaataggtgcctgttcttaccaagaaccggcacctatttgatacagccatgcaaattcataaactagctaaaaggttttctctaagcttgcatgtagctttcgatacagccatgcagatccatgacaccatttatactctgtatttattttcataacactcttctcacgcgaaaaaataaattccacaccttcgaaaaaataaagttcatgcgatttcaaaagggggaaaacgaaacaagagaagagggtagtacaatcttccgatttgagttataaaatgagtcttcttgtgaatgtggaggatgtggatgtgtatgatgtgaatgtaatattttttgattttgtgatttttgtggaggatgtgaatgtaatattctgtaaattttatgatttctgtgtttcaggaaccggcacctatagaattataggtgttggcggt

SEQ ID NO: 1280 - DNA, 5993 bp, Oryza sativa
  Intron number 3 from transcript LOC_Os08g14850.1 (locus LO C_Os08g14850) derived from phytozome v7.0 (chr-ID Chr8; po s 8943928 to 8949920)
tagaagttaccggagccattaaactcttcgatcaggtatatatatatatatatgataactctcaataagcatttcactgttctacaactaaattccatcaaatgaaccaacgcaacgcctcaaagaaatttcacatctcacgtgcaagtttttccttgtttaatttagcctttttttttttgcaaaataccagtacagacacatgctcacacgcacacacagttacccctatgaatacatgtgcctcgctatcgacgagtatatcatgtaccacttaaagaatagtgccggttaaaacctagaataaatctaagaaaatgcgagtacatacgactcaaactaggatggcaggctccaccgcaagaaaactaatcagcttagttacactcggttcgccttgttaatttaaattcattgaccattaattacatacattagtaatactaatttaccaacccatgctcttacagagatattatctttcatttattcgtatcacaacacaatacttagatatttgttaatatttatctggttaaaatatatgtctcttcatccccattcatagttttcccctttgcattgcgcctccatgtgcgtattcgatatgtgtttagttgaaaccttagcttgtgttgtatctctaatatggaaatcaatattgttaatcatttcttacatacacgtgtacatgttctgcatggtgacataccttatgcatatatatatgtcttgagtttttttttatattccctacgtaaaaaaagaagtcttttttagttttgtcctaagtcaccttttataagtttagaaaaaatctatggcaaaacatatcaatttttataatatcaaataggtatattataaaaatatatttcatgatgaaactaatgatacttattggatatcataaatattgatatttttttataaagttggtcaaacatgagaaagtttgactaggacaaaatgacttgcctcttgggatggaggaagtatatataacagtgacaaaattcgataatttaaaagcatatataggactttttcaacaatgatagagataggtaatttctatgcaaatttagaggttactttagatttttcttttcataatggcatacgtcactaatttggataaagatttacgtgttattttcatagtggtagaggtggggtaatttagatgaagatttcaagggttactttagtttattcttcataagggaagatgtgggtaagtttgatataaatgcatatgggtttactttagactatttttttacaatagcaaacgtgggtaatttttttaaaaaacaaaataattccaatggctattatagtcattgatgatgaattggtggcctgatgtttctggattttttttttcgatattttctaagattcatttctttttctagtgtgtccttacgtggaggctccaaaaaaattatctattattaaattccacactagcatatgccttgataggaatagggaaatagatacacctcttttgatcttgaaccctaagggcgatccagtgtagatactatatacactataggaaaaaggcattggtgccggttgggaacatcacaggtgctggatttcccagcaggcggaaccgattatagaactgacacctatatacagtaatatatatatatatgctggatttagccaagaaccgtcacctatagggatgaatgagaaaaaaaaaggcccggcttggcagagccgagcaaaggctataataaatcaaagaaaccaaatcaaacggaccgaggtcttcagcaatcaaactcaaaatcgaccaaaaactttcacgttggtctagatttggaggttggcgatgatgaagtcggtcaggaaggtggagatggcgtgaatgccaccgaccttggaggcaacgaggatgacatagcgcgggagctcggcggggaagaaggccttgacgtcgaactgccggttgaggccgagctcggagcgggtgcggacgaccatgttggtgtagccgaggaaaaggaggcgtcggaggatggtggagccgacgaggccgcagtggctggccacgaagaccttggcacccttgttggcgaggaaggaggtgtgtggacccgcaaaaaggaggagcagggaaggtaagaggaaggatggaaagggagaggaggagcatcgatgggcttactggcggtagcggggagcgtggtgcgacggagtcggcgtgcggagcccgccgccttccctcctgccggatttggcggagtggagggcgacgccaccgccgtcgtcgggtaggtagccttccgcctcccctcccgcctgatctggcggaggggaggacgccgtcaccgttgtcatgctatcgcgccgccatcactctcgcatggatccctcggtcaggagagtgagagtgggagagaggaagcgcaacagaggcaggtggggggagacgatggtaggtgcaggtgtgaggcaacggtgtggaggaggagagaggagggaggaggggacgggagtgaggcaacagtgtagaggatgacgagtagataaggttcggttcggctcgatcggctcctatcggttcttttaacagatgtttgtttttcttaaaaaaaactgcacctataatataaagacattggttcttgaaaaaagagacctacaatatataatatattgtaggtgtcgatttttctaaaaagaaccgacatgaatactatgtgtaccggtttttatatagatcctactcctatctcttcacaaaggtgtcggtttttatcgctggcgcttacatgggcgggaaaacactataggtaccgagtttagctattccagtacgtatagtgccaacacttttgtgcatttctatagtctatagtagtgtatatatcaagtaaattccatacttatccatatcatatgaacatcactctagacactgctttttccgatgcatcatctatatccatatatagcccaagtaactaatagtatttgctcaagtttcttctctccaccaaccctattttttctccatctatattgcaaaacaccacacctcgcacaatgcactactggagaaaccatctttcgcgggtcggccaaattccacaatagtcccggttctttaaaaaaccggggctaaaaagcattttagtcccggtttgctacccgggactaagggattacaaaccgggctataaagggtttgtgtagcagtgatacaaaacttggtagagtgaactgaatttttgcatgtgacacggtttcttcctctgtccactctctctgtctcatttaatacaccacctatagctaaaaaagagtccagaaaagctagtgggcatcaactatacacatagtatcgattgacatggaagggaagtcaatttcttttatggcgcagaaggaaaatgtataccacctatgcttcatcatacttgttttagagtcgggcgtatgaattaatgagatagataaaatgaccatcttgccctcaattaataatcttctccatagtgtgttagcatgaaaaagaggttactatttgataatgcagtttatggtgggactgaaaaaaaaaagccaaacttacctataagatgacgaacaaataagtatttttttaatattatggaaaacattgaaacaataattttttaaactagaggggccaatattatgttagagtttgtatcgaatatatgtacaaaatcggttagacttgaaattgtactaggtatatgatgaatagatgggtggaattgttataaccgcttggtgacttaatataggcgaaaggtagtggctactagcggcacggcgtccagccaaggtcattgcaactctgatacgttgtaatatgctggatcaggtggagcgccataattagtgctccagggatgtagtttttggttgaacctcgtaacaaatatagtgtatcggtgtcgtcatcgtgtttggatcttctataatgtttcttttgcgtttgattttttatggtgatttcagaccggtttcgtaacatattcagtggaataaaatgaattctcttggtaaaataaacagagaccatgctaggttgcttttaagtaaaaacagatacagtacaatgtttatgaagtacatcctctgatcccaattgtaactccatataactttatctcaaatgtacaatatataagtccatgacaactccaatacagcatttcacctcattaatcttccatgtctgcccatatttaaagggtttatttaaatgcaccctaatcaatgtaacgaacttggtagctattttaactatctagccagtatctatattctataactatctagccagtatctaaccttcaacttttctagctctctctggaaccattttgatgtgaaatgttgacattttacaggaaggtttaatcaattctaatcaaatcctttatacaccccataattttgtgctactgtatatgcattaaagactgacatttttttagaaaaagggagtaaaagttttgtaatagtactagcctttgaaccatgctcttgtaaagggatagtgattttaagagcaataagtgttagaaactcatgaataaatatgggctccacacccaatcaaaaatatttatctttactcactcactctctctctctctctctctctctctcccccctatttgttcatattctaaaaacaacccatattcttatgtttttccggttgtgatagactttattagtttccaattaatatgtatgattttccattatcatccatagtttgtttcctttccaccgcatctccatgccatgtgtttagcttaaacgttagcttgagctatgtttttgacatgaaaatcgatatgctcacctcttaatggtctatatatagggtgaaacacatcatgcttgtataccttgaactatctttttctatattaataatagcaaaagtgggtaactagaaccatacaaaggagtaccttgagatagtttttataatgacaaaggaagttaattatttgattcaaatttagtggttactttataatttttagaaatatttatgttttttagtaatggcggtggggaaatttagattcaaatatagagggttattttagattattttccatagtgacattggtgggtaagtagatgaaagatagagggttacttaatgttatctttcatatatgtgtgtgtgtgtcaaaggtcgataatttagatataagatttaggatgttactttaaactattttaatagtgactgatcatatcgattgcaggatatttttttggttttgctagctagctgaaaactgtcatttttttggccattaattccgcgctaagatttgcaccgagatattttgctatcggatctaaaccctcttttcacaagctagtcttaccatcttatgtttatggcagatttgtttatgttatattctagttactatagttacattgtaactacattgtttacaatgtaactatagtgtaactacactataactatattgttatatctatataaattagatataaaattgtatatattattttaatacatatatacaagttattattattattattattgtatagttatagtgaaattatatactatagtcagatttgaaagtttattctaaaaaaacttgcgatagttttttagctaatccctatttttttgggaaaaaaagaaaaatagatctaatgatcaatggtgaatagagtctaccgaatttatagccggatgtttctatttttgtgagaattactagtatttatattctttttgtaatgtctctcgtgagaatcaacgtgtaatctccaaggctccaattagtaatagtaaaatattatgatttgctttttctagagactatggtttttcttttgaaggcacatttctgggttatgcttatattgtcgtttgaacaacaggtagcagctaatcagcggcagcgcttgtggccctg

SEQ ID NO: 1281 - DNA, 2877 bp, Oryza sativa
  Intron number 1 from transcript LOC_Os01g07370.1 (locus LO C_Os01g07370) derived from phytozome v7.0 (chr-ID Chr1; po s 3480611 to 3483487 reverse strand)
aggaaggaggctttgcctcgatctcgctctctccggtaatctcttctccttctccagcccttgctcgcttgcttgtttgtttcctggcgctgtgttgcgatttaggaactggagtttttttttttcgttttctttttctggatggtgttcttggcctgagacgttatacgcttcaagaacagaaaggattttgcgttgactactttgggtgttcaatcgtttgtgcgcactcttcgtcgatgctcaaaatgggcgaggagtgtgattttgttgttacttttcttttttttcttggggagaagaagaagtggttttgtgttaaacacgatagttcaaaaaaggggaaaaaagagaagagaattttgaaggaatacctttttgtttctatcgcaaggttatgcttctgatctgtgccttgtctttgtagcaggtcaaaacggcatttaagtgtggtgttcttcttgttgttttcttcccacatgtttcatgtactgttgttgcttaattcactcatttccgtggtgtgagggtacccaggagaagaagaaaaaaaatcttgataatgatttcaaacttttggtgtggttatgatttctgagctcatgacgctgaaagaaaaggaccctttttccagcttaaattgactttttttaacattctttttaattgaccatgataaaatactatttgatagtatatgcttttgcttacattttttttttcacatacaagaattactttaagtttctgaattgccaccattagaaagctcctgaagctaattgattcaagcgtagttgtacttagtctgtggccatttccccctaaaggccccctttgaacttggtgtgtgtaggtgtcctgtgtccatggtctcaatttctcaaagagttttcctagaagagatcagctgatcgaatgaagaaattattatttcaggttggtccaagaacatgcatatcagtgaccatcttagttggtgcatgtgcaacaactgtctggattagggaccttctatagttttagattattttactgttataaactcttaccatcattggttccgagaagtagttaatatgaatggaaattggcccccaaattatttggaacaacttctgatattttctctgtttgtctgggtccacttgctagctgccagagagtatgacaaattatttgtaagattgcttcatatgcatgcctagctgtgttcattaattctatccatattcacatggatggcaagatttcctctaaagatatacaatacaattatctgagatatcaaatataggtttatttgttggcatgatttgaaaaatgcagttgacattgaaatgtgctggtcgactagtcgaatggccattactctcctggctctgtgcctggccgcatgtgtccatgtaggtgtaactgtgtaaccaaagccatgttttttgtgggtcacaatcatttttactttctaatcaaccacttatttattgagtggatagaccttgacaagaacatatccgaattgcaatgtttcagcttgaatctgctacctcttctgtctatgtgggggcagaacataattgctgccctgggttgggcttaagtttatttgttttttggacttaacaatggagtggtagttgacacatgtttagcgttgtgctgtgtgataaccaagtcctagccatttttgttccatgttttccaactaatattgattcctgtagtatctgatcaacttcgttgttgttagttgtcatgtttcacagtgcacattttttccctttgcccatatttattaagtttgtcgttagaagcttttttcttttaaagtttatttctgggctttcctactctgtatctatctattttgggataaatgcttgcctatgttcgggttaatgatatttccagtttccagataaacttttttgtggtaaacattgtgtagttatagctttgtgtgagagaagataaggtactattcaagaatgcagggatcccttttctgtttgataggtttatattttacttccagaccttctcatcagcttctcccttagatagctgatgcttatcaatattttgctctgtcagtgctgattagctgataagacattcatgaattatatagcagtttgctgtttgcacctctttttggtagccaattgatgttctggtccctggttccatgcattatggaggttgacatgcctagtccctttccttgtccccttgagaagtggaagccatgcttcccttacataggcacttatgcaatggaagaattacattggttgttagtactgtgttacacttttagggcccctttgaattgtaggaatgaaaaaacagaggaatagaaaaaacacatgattctgacaggaatacaattgtaaaacagaggattacaaaacacaagaaaaacacaggaatggctgtttgattggaccacaggaaaaacgcaggaatcagatgagagagatagactcagaggaaatgttccaagaggttagacctcttgctaactttcctccaaaatgtgcataggattacccattccataggaattttaaaggattggataggattcaatcctttgtttcaaaggccttcataggattttttttcataggattgaaatcctccaaaattcctgcatttttcctaaaatcaaaggggcccttaagctgttttatgtgcataactacactggttctagtcctaacattttccttctgcagaactgcctagaaaatatttatttcttagttgcagattgctcgacatcatcaaacttcacatgtatctatcgccttctcattttttcctccatcatgattagggcttcatttgaggagtcatcttatttttggtcaa

SEQ ID NO: 1282 - DNA, 504 bp, Oryza sativa
  Intron number 2 from transcript LOC_Os07g47194.3 (locus LO C_Os07g47194) derived from phytozome v7.0 (chr-ID Chr7; po s 28211335 to 28211838 reverse strand)
tacagttttcaggcacaagctcttcaggagagcaggtgataataattacagcacaaacttgcattcttttgtctgaaaatgacagtccaattgtccaaagtaaattttgaatttcaaagtttgatttttaagaatagtttaggtagatttctttttattgatcttcttgaactattttgagaggagagcttgacaacctctgaaactgattctaaaatcaaaatttaaatttaaaataagcctcagcttttttgtgatagctatttgagggtacaaatgaatgaattaactcctattaagttgaaaagtttttgtacaaaagtatttcaagaaagttttatatagatttttttttacaaaacacgttggttagtagattgggaagcgtgcaaatgaaaatccaaaatccagaaaaagaatagggcctatgatatgaagatgaacaagtaatggatgatctagacaccagcaaaattgcagggaaaccattcagaagctggcgca

SEQ ID NO: 1283 - DNA, 1900 bp, Oryza sativa
  Intron number 6 from transcript LOC_Os06g04600.1 (locus LO C_Os06g04600) derived from phytozome v7.0 (chr-ID Chr6; po s 2004039 to 2005938 reverse strand)
aactatctaaacttattctgcggaaggacataaaggtactttatctgtattttctttatcatactagcaaaatgcctttgctatgggtaaaatgcacatgcttatttgaatatatgttattcacttgattcaaatgaatattagactattatataatacaagaaaatatcaaggactattttgtaagttgtgcaaatgtagttgtgggttggtgaaccaccaccaccgctattgtcttttacagtagtatagattatcacctactaactaatgttatattgttttcttaaataatatctactgaaactacaactcttagatgagttattcaaaattttgttggaaatggtaacctgtatttatttatttttatttttgtttttgggagaacttgttgaatagctttggtgttgtctacatatctttgtgctaacttagcatatattttcaccataccaaagggataggacagcaacactgttatccatcttctatgtgttctgataatctttgtatttgcattgtgaagaacaaatagtaacagctacttcagacaagcacaaattagtgctatttttgaagaatcatatgcatactatcttctgctactgcaaatctcctgtattagttagtttataataactgtttgatctgtttgtgtttttaattgtgatctgatcacgatatcctttgttcttagttttttgcacacatgtaagagtgagaaaatcccacggctgtctagatcttagcaaattgacaacaatatgctagttgggaactgtgattatgtcctctccagaaaaaaaaaagttaactgtgattatgtgttatgatgactgagagccaacacacatggctattttctgaattctttagatctaatgctgatctttaccctattaaacatttaaacctctatacacaaaaggaagaatataaaattatatgagtatatttaaagtcagatagtaaatgtgccattgttttattttcagaaatcttaaacacaatcttgtttttaccgaatgctatcaggaattcattagggacatactggttgtggtttggtatattgttatctgcaggaaaagagccttgcttgtgcataacaactccttttgagggtcttatattattgttagtaattagtgcggtggcctattggctaatataaacacatagtgtagttcagaagataaaacaaactttgatgatcacgttcatcacaatgatgaatatgaaaatgtcaactaattcgtaacgttgtttagatagttatggtaataacaatgattatatcatagctgcatatctgttattacaccgctaacctctttagactaaaggtgcactggaagtgaacaaagcccaagttgacatcaattggtcatcctacttgtctctagtttgtctctaggatgacttagtcatctgagctttgccctcaaaatcaaatgtgcatgtgactatgttcggtatcatatgacatgtctgctagatgctgatccatgtctctatccaacatagcatgttttagttttagtttttccagtctttcaatgattgtataaattattgcaattgcaatggagttgggttgataaccatgttgctgatggtcatctagattgatggaaagcagaaaaaaaatagctggaaggaacgtctttattctgctgcacctggactttgactaattttagtagcgtttcatatccagatttattcagtttatttgatatgttcttgttaaatgacaaaaggttctcagcttattttccaatattatataaatctgtttttgaattttagctttgcgaaccagttaatattcatggctttgtttacctttttggttgcagaaccacggcaaccccacaagtcataagccagagtt

SEQ ID NO: 1284 - DNA, 789 bp, Oryza sativa
  Intron number 6 from transcript LOC_Os01g74520.1 (locus LO C_Os01g74520) derived from phytozome v7.0 (chr-ID Chr1; po s 43159261 to 43160049 reverse strand)
ttccgctttttaaagagatgtaagtttctttagccaagtatatgtttcttttctacctaatttagaaacacaggtaggatagtttcatataaggtattttccaagtgtcttcttacacatggtgtaaaataaaagagaaaataacagagttaaatcagttgtgaacaattacatttttagctttcataactggtaatcatttctataaagctatcgttcgtagttctataccaagctatgtattaaagcgttgagggttctaaaaatgaaaatattacttgagatgtctcaatggtttaaaggttcccttcttctggggaaaaagaatatttgatgtttcttcctaccaatgcttgcggaaattaacaattctgaggattgtaaaaaacaaaagtaatacttgtggtgatttgtcagtggacagcttaatccaaccggaaaagtttcccttctgttagaaaatatatttgaagcttcttcctgctggttcttgtggaaatttgacgccaaagtttttggcatagttctgttactaacggagagtgaatctgtacacgtgaacaaagctgtgaccaacatttgtgagaccattagaccagaatattttcagcaggacagtttctgtaaaatatgcatagttactagtagtatttaacaaggagtcattcttgaggcagttaaagttttaaatcaacagaaatagcatatctattatgtgtatatagttgccagttacctttccattgatctattgacaagttgttgattcttttggccttttcttcagtt

SEQ ID NO: 1285 - DNA, 2847 bp, Oryza sativa
  Intron number 2 from transcript LOC_Os01g73460.1 (locus LO C_Os01g73460) derived from phytozome v7.0 (chr-ID Chr1; po s 42567497 to 42570343)
ggctttttcaaggtaattttgcatttgggaaaagtgcaccattgttctataagtctgaattgtgataccattttgattgcttggagtgccttactgatgatacagtggttagcttatggataggattccatcttataatttgtgtggcttaagcttttgtagtagtggtgacaaatagcgacattcatgctactgctaattatctgattatcagtatgatctacctggttaggaccgttcagtagcagagattctgctattatgcaacctatatttttattatgcgtaatgtaggtcaattctagtgtagttttccaattacgctttgtaggacttgtggtgatggtgagaaatagccacatgataagcgtactgtgctacagctgaatatataagtggatatatccgggcttgtccagatttattcctagaagttgattctttttgggacggagggtgtatccaataggagcgtttagtagtacagattctgttagtatgcaatttatatttctgtgcacaatgtacgttaactctagagttgttttggctgcatatctagttagtagatgcaataggtgggaatagacaatactgtgaccctccaatatgaaatgctcacttacgtctccactggaaatacgcgggaaagctctccctgctgtaaataggtggggaagttatattgagcaagcatttaagatgtaataatggtgcatgcattcgtaatagcaacaagaatgtgtaattttgcaattgggagaggtcatgaaaagtgcaccattgtacaagtctgaattgggagaccattatgattgcgtggggtaccttattgatgatacaatggtgaggcttatggattggattctatcatatattcgtgtggcttaagcttttgtagtggtggtgagtagccacatgataagcataccgtgctactgctaattatctggttatcagtatgacatactccccccatcccaaaacaaatcaacttctagctaggttatcagtatgacatactccccccatcccaaaacaaatcaacttctagctatgtatcagctagaagttgattctttttaggacagaaggtgtacctgataggagcgatcagtagcagagattctgttattatgcaacctatatttttatgtgtaatgtaggtcaattctagtgtagttttgccttaagcttttgtagacttgtggtggtggtgagaaacatccacatgataagcataccgtgctaatgctgaatacataagtggttatcgctatgatttactctccgtccaagaaaagatcaacttttggggatgaatctgggctagtccagattcattcctagaaattgattctttttgggatggagggtgtatccaatagaagcgtgcagttgtatagattctgttagtgtgcaatttatatttctgtgtgcaatgtatgttaactctagagttgttgggctgcataggcgggaatagacaatgttgcgaccttccaatatgaaatgctcacttatgttaccactggaagtacgcgggaaagctttccttgttgtaaataggtgggaaagttgtattgaacaagcatttaattcatgtaacaatggtgcatgcattcgtagtagcaataagaacatgtaactttgcaattgggagaggtcatgaaaagtgttccattgtacaagtctgaattgtgagaccattttgattgtgtggggtgccttattgctgatacagtggtgaggcttatggattggattccatcatatatccgtgtggcctaagcttttgtagtggtgatgagaaatagacacatgataagcataccacactactgctaattatctttggttatcagtatgacgtactccctctgtcccaagacaaatcaacttctggctatgtatcagctagaagttgattcttttcgcgacggagggtgtacctgataggagcgattagtagcagagattttgttattatgcaacctatatttttatgcgtaatgtaggtcaattctagtgttgttttgccttacgctttccccactgtaataggcgggacaattatattgcacaaacatttaattgatgttataatggtgcacacattcataatagaaataggaatgtgtgattgccacaaagatcatgtaatttactgcttttttgatcggtcaaactatatggattgaccaacttccatcaatgctgctagtatttttatgatccgctctgcattcagttagccataaaatagctcccatgttgccataatgatccatacaagcatcggtcttattatcactgctttgtgaatatgtttgtacaagctttacaaagctgtagcgttattccagagcagttcattagcttatgttagctacacttttgctgaataaagaaaatagcacatgtttgctagttaatatgatagacataacaacaaagtattcttgcataccagaaattatttaaacatgcttggttgtaatagaaacattgtcactgaggtattcgaatggaagagttttaagtatgttgcaccacttctcgaacatgctcttggttcagatatcagaaattcataatatagatataaatatttttcaagaaacttggcaaaaaccattctttggatgctcttgttttccatggttgaatattcattgaaattaagttcttgtgaaatttccgtgcctatcatatattgtaccaattaaactcttgaagattgatccaatgtttgcaagatggctgacagtttgaccgcaagacttagttgttcaattgtgtcaagcagttgacttaacatagctaatttactttatacttgtgtag

SEQ ID NO: 1286 - DNA, 13940 bp, Oryza sativa
  Intron number 1 from transcript LOC_Os03g40720.1 (locus LO C_Os03g40720) derived from phytozome v7.0 (chr-ID Chr3; po s 22641583 to 22655522 reverse strand)
tcctcggcctctccaacgtcacgattctgccgctggtaagcccattcttctaggctggtttggggagagggggggtgttcttggcaatgaaatcgttgaggctgacctcgccggcagggaatatgttggtgagccccatcatctccttctcgaatgtgtccagatccacaccctccacagtcggcgcctctgtgggcttatcccaagaaatggtggtcgtagtggatggtggcgcggcaggagaatcgaaggtgagctccttgcggatgccgacctcgtcgttgcaaagttcgcaaccaacgacgacgtcgggaatgcggaaggacaccgaggaggttggcgagggaggggtaggtaaacgatgtggtgaggaggacgtgccatcctcctcaccgtccgccgccggtctctagggcctgctctgcctcgagggctatccagtgattgcaagttcggttctatatttcggaccgcaccggcaaatcaatatatcgaccgaaattttcggattttatcaaatgtttgttgaatttggtcaaagtttatttaaatccagtcaaaatatgtagaaagttcaatccgaaaagtgccgaaaatcacgaaattttgtaaattttggtcctaccgaaattgaaaatgcaaaccctggggctatccgccgctacgtgtcggggccaccgagtcaacgctccgttcgaggccgcgccgtcactctgccacgaggctagaccgccgcacatgttggggtcacgcccagaaatttagcccaaattttcagactattttgtgtattaaatctctgtccaggaccagccagggtacacaaaacgacaagtaatatacagttccaaacgtaaataaagcgtaaaatacttacagaaaaggcacttagtcctcacaccgaaacaaaagcagcagcagcgaaaaaggcaatcctagcggggcttcagctccactccacaggcaaaactcaactggggtctgagccttggtcctctaactccatcttcagctcagaagcactacacttctgaaaagggggaataatagcaagactgagtacaaccaccgtactcagcaagccacaccaacgatgcagacgtgcaaggggatacaaggagggtttgtggctatttgcatgaaggcagttgtaaaacactttattgagcaaaacagtaaaactgttgagtaattaaagtaatattgaatctccactgatcaacgctaccccacgttgaacaggcccaaccaacccacctgaactacagtgtattgggtcgatttattaagatgggactaatcacggtgaatctggtcgaccgcccataaccgcgggcacggctattcgaatagttttactctgatcagaggtgtacaactgtacccacaagacacagccccacgacacgtttccgtgcgccgacatgccaccacgacataccggaaagaggccgtgacaggacccttcgcataaccccctctaaccaagcacaccacacctcaggtttcacccccactcctcgcaaggcagcgggcagtcccctctcgtgcctaggtgaatccggaagccgcataggccgtcgcagggcccatccaaactccatcacgcccacccttgcctggatgcgttggctagaggaaagctacactacaagcccagccgttgcccacgctggcttgtggtaagtacgataagttcttccagggcatcccgcaaaccggtccttaactgccatgggtgcgaccagcaaaaccatgcacccacagcccaccattcagtcgcattttagttggataattacgaccatgaagcatggccagatgtctcgagcacgcggctcaatctgatactaaaagggtctaatactgtaattatcccatcaactgagctagtggtaattaagcatggctaagcatatagttctagctaagtcacataagtaacatgagctagtcgattcattacccaaagttgacaaagaacagatatcaagtaaacatggcacaagcgagcagataggtaataccctgaccccatgtaattagcaaaatatgcatatttatttgcaaacagtaaaacatttgtaaattgggatcaacatgctcaaggggaatgtgtgacttgccttgcttcttcactttgatcttccgaactcttttcctcgcgaccgcggtcttccgaaacgacggaaactacacgctggcacgcaaaacgaggaaaaactctaataaaaaccaaggaaacagtacataaaaactaaacaaacatgtagagctcaattttagatgaattttgcaagttgaatggctcaattcggagttcgaatgaattagatatgaattttagaagttttgagccatttaaatgaatttctagaattatcatcgaattatgacgcaattattatttatttttacaaaggaaatggtcctcgctgacgtcagcaaggggcggccggcgccgacacgcgggccccacacatcagcgagtcaaagggggagggcgcacggtggacatggtccagacgtgcctcgggtgcgcgtccaccacgtggacggcccagatcggccaaggccgatcggacggctggggacagccgggcggcgcggcctggccagcgctcacacaaagctggcggcggcggcggccgggaccgaagcgacggcggtacacgggccgggcggccaccggcggcggcggcacggcgtgcgcaagcacgggaggcggccggccaaggggaataagagggaggggagaggagtgctcaccgagggcggcgacggcgagacgaccacggagaggcgaccggcggcggaaaggatggcggcggtcggcacgggaggcgacaagaacggcgttccgatgacgcccgaccacggcggagccacggccgaggggcggtgggatgcagcgaatgcggtggaggcggtggcgcggcgtgaagtagatggggatggcggcaagaggcggccggttggcggcagttagtggtggggctcgggtttgcggcgggaatggtgcttcgggggtggatttgaggagtgggccggtggccgggatgcggcacggagcggcggcgctgtgggaggcagccgcacgaccgggcgaggtcggtatcgccggcggggagcggctggagacggagggaagagcggcggctcggttttcacggtggggtggtatttcggtggtggtttgggggaaaaaggagtggaggacggggtagagcttggcagggcgttgccgacggcgcaagcggcgaggtgcggcgacgactaacgcggcggcagcggccggctgaaggcggtgtgtggcggtagtggctcggcctcgcgatgggaaggtggttccggcggtggaggagggagatggagtggatgccggggtgcggcacgacgcggcggagctgtcggtgcaagcggcgcggcgcggcggcggctacagcgacggcggcgtgcagccggagcttgccggaaagcggcggagcgcgggagcaacgtggggagagcggtagggagtgcagcgggttcgggaaaattggggaaatgggaaaggagaccacggggatcgtttttattggctcggggcggtgggatcatggccgcggagggcggaatcgaccggcaacggtcttcggagtgggctccggcgacgtgggcgaagtggggtggttcggcgccggttttggagggggaaagtgggggaggagagtggaggaggtggggcgacgcggtcccgcggtcggggcgagcgcgcgggtggaggaggaggcggaatcggcggcgacgtggggaggccgtggcggcggtttcggctgagggagccggaggttagggatggccctgacaggtgggacccacctgtcggtggctcggggggaaggagagaggaggagacggttgggggaggccaagtagacttgcgcgaaggagggggcaagccgggccgatggcccaaagagaagggaggaggggaaaaggagggcggccgggcccaagaggatggagggggagaagatcttgggccgaaagcggcccaaagacaaagaggggaaattttatttgttttctttttattctaattgatgcaatgatctttgtgctattaaaactatttctcgagctccgaaaattcacggaaaattccggagagtacattagggcacaaagaatattacaaaatattcccggccaatgatttttaaaggaaaatttcaaattctcccattatttcacttgattaaattgatttatcttttatttaatttctagaaaatgcattatttaatgatttttaaacccgaacgaaaatcggggcgttacagtcacccagccggcgcgccgtcgctccgccttgaggcgggctgccaccgctccgtccctagggatggcaacagggcggggcggggacgggttggataagaactcccccgccgccactccctgcatttgccccctgccctcggccccgcagggacatccgggtgaaaatcgttcgccggccctagcctcgtaggggacccggcgggtgagcgggcccccgtatcacccggggtgcacaaggctgccaatgttgaacggcaactcagaaagaatgaaaagatggcatgaggtgttactagtccagtcagtaatcagtaatcaatggatcacaaattcacaattagtagtaatatgcattctaggtaggggacggctaatggacgcctagcgatcaccggcccacccctccccctatatgctaccttctctctccctttctcctccccttcttctcttcttactacagtacaccatataattttaaaaaataataaaacaaagttggaaaaatttatgtatagaaatacaaatactatacataaaaaaattgaattcaaattcaaatttaaaatgggtatgtaaacttttgatttataaactttagatctataaactaatatttgaattcaaattcaaatttgaacgggtgtaaacttttgacttataaactttgggtctataaactaatatttgaattcaaattcaaatttgaatgggtatgtaaacttttgacttataaactttgggtctataaactaatatttgaattcaaattcaaatttgaaacgggtatgtaaacttttgacttataaactttgggtctataaactttaggtgtataaactttagatgtatagaaatattatatataaaaaatatttgaattcaaatttaaatttgaatcggatatataaacttttgacttataaactttggatctctaaactttagatatgtaaatttgaggtgtataaactttagatgcataaatttactaaaataggaaagtattacggtaccaaaaaaggaaaccaggtggaggaagtgggattcggatccaatcgccctgggcgatcgctcgcccagtagcaattcccttctaggtagccggatgcccaaatacacataaacacaagtactaatgtagttaagtggtatgtatgataaatacacaactaccaactcacaagcaaagcagcagccagccaattagcagtatactagtagctttgctcgaggttgaggagctggtcgcaggagtcaagcttagctcgaggttgaggagctggccacaggagtcaagcacttggacagtcggatggcagacctgcaacgcgcggcgatggcgctccactccggctcgatgttgcgggctccggcgctctggtcgccagcatcgcgctccgcttcaccgccacgccgccgtcgccgccgcacgcaatgggcgcctgggagctaccaaactgatttagggttatcgattcttcagattttcttttaggaataagttcactttaggtccctctatttgtcgtccagtccgattttcgtcccttgaccgtaaaaccgggtatgacccatccccaacttacgaaaaccggttaaacgtggtccctcggcggttttgaaggcggttttggctgacgtggcgcctacgtggcttgtttgactaggtcttcatcccaagtggcattgacgtggcgcttacgtggcaattatatctcggaaaaataataaaaaatgtggccccacatgtcatctgtaaaaaaataattttaaaatagtggggtccatgtgggccccacatgtcagccacactcctctcttcttccctctcccttctctctcttcttcccttttccctctctctctccccttcccgggcagcggacggcgtgggtgggaggcggagcaggcgagctccggcggtggcggagggcgtggtcggcaccgccccctgaccggagcaccaccggtccgcgtgaaggcagatctggggaggtccggcagccagcgctacggcagaagctcatctagatgctactcgaccccaacccgggcacccgcatcaccgtccctggccttctcgagacgccgtggttccgaaagacagcgcccgtcccgcgccccatcatcgccgaccccgtgccgacgccggtacacgcatggcaatgccgcccgaggtctgcacgcggttccacctaatctccctgtctgagggcttcgacctgtcgtcgctgttcgagcatgaccccgccgtgtcgccagggcgagccacggcgcgcgcgggcagcacgcggttcgcgacacgggaggcggcaagcggcgtggtcacgcagctagaggcgctcgcgacgggcggcgccacgcccacgcgcgtggcgaggagcggcgcgcgcggggtgcggctcgccatggcggccgatcgacgtcttcagcgtggcaccgtcgttgctcgtggtggtcctggtggacgtcaagaaggatggcggtgacactatggagtactggtcgttctgcagcgaagagctccggccggagctcaaggacatcgtctggtcgccggtggcgacctgacgacacggcgggacgtcgctgctgccattattgcacgtcatcgaatcgtatccgttgctatccaatggggtgcattattgtttggtgccggggtgatgtctggctcgctcgtttgtccgtagcaactcgaagtcaatggctgctgtagcctgctagtgttgctggctagagtagcttgctgccgcggatgtagtagtaggtcggtatcaagatcatgggccttttcatctccaaacggcgagggcggggacacggcggtggaggcggcgaagcaggccatcgccaccgggcacgtggaggccaagagcgcggcgaacggcgtaggcctcaccaccttggagaagggcggcggatggctaggtgagcggcgcgcaagagagagatggctgccgccaccccacacgcctcgtgcgccgtcgcccgccgccggccatgcgctgtccatctccgcgccgcccgccgctgccgcggtccgccgccgcctgccgtgttggacgccgtctggcgagaggagggaggaagatggggagagccggagagaggaggaagaagaggattggatttggtcatttgagaatgacatgtggggcccacgtgggccccaccatatttatttttagctgacatgtgggacccaccatttttaaattattttttttctatggctgacatgtgggtccacgatttttattatttttccaatatataattgccacgtcaacgccacatcaatgccacgtgggacggagaactagtcaaacaagacacatagacgccacgtcagccaaaaccaccttcaaaaccgctgaaggacctcgtttgcccggttttcggaagttgggggacgggtcgcacccggttttgtggtcaagggatgaaatagagggacccaaagtgaacttattcctttcttttatactatgctgggctgttgggatgttgggctattgggctgacctttgtgggcctatttcgcacaaattttaacgactgggctacataccctggggccccgcaggtacccgcgggtgggaatagccacctgcccccgcccccgcataattccgtgtcacgatcagtcagcgagattcgagattcagacagatattggaagcaggaatagaggaagaagacgagttcagggaagaatttgatagcaggaagagagaagatttgaattgagttgagatatttttctattacaagccatctctctctccactgccgacctttatagcacaacactattaggtctctatcactgactctggccccagccgatagctactggacccacactccacccatatatctcgtgttgggcttgggttgccttacggtgcgcttcatggacctcaactgttgaaggagtagaaatagactccgtgacattctccccccgttgagatgaagcttgtccccaagcttctgaagttggaaagcgtcgacgcatttcttggaggttctcccaagtaatggcgcgaggttcctctccggaccacagaatttgaacttgaaccaccatcttggagcccttgcgaatgagacggtgatccaaaacctgaagaggaacagatgcatgctctgcactggaatccaagacgggcaaagtaggttgcacagactcagttggcgctaaagcatgcttgagctaagaaacgtgtactactggatggatcaaactgcttgatgcaagagctaagtgataagccacagtgccatctttggccaagatctgaaaagggccatagaatctaaaagatagctttcggttggcacgagtaacaactgattgctgcacataaggttgcaatttgagatatgcccaatcaccaatctcaaaagaccgctccgaacgtttcagatcagcctgagctttcatgcgaatctgtgaccgcaacagatgttctttgataagagtttgcatcttcatacgatcctgtagccaatccgataattcggacgatgtgcaagcagcgtcaatagatagtccaaaataccgtagcttgtgtccatatagaacctcgaatggtgaagtgcccaaagaagaatgaaacaatgtattgtaccaatattctgctaatgccaaccaacgactccattgacgggggcaagcgtggacaaaacagcgaagaaaagtttccaagcactgattcacgcgttccatttggccgttggtctgaggatgataagaagagatcatacgcaattgtgttccggccaattggaacaaagaagtccacaaggtactagtaaaaatgcgatcccgatcagaaatcaaggactgaggcatgccgtgcagacgatgaatgtgttgcatatactattctgccacttccaaagctgtgaagggatgagataaagggacaaaatgggcatatttggagaatttatccaccaccacaagaatgcaattgaaagaaacatagcgggacaagcctttgatgaaatccaatgaaactatttgccaagcgtgattaggaactggcaatggttgtaacataccagggtacttaacgtgttccgatttggccttctgacaaatttcacaggcttgcacaaattcaaccacagaatgacgtaagcctggccaagcaaacatttgcttaatccgttgacaagtgatagcagtgcctgaatggcccccaatagcagcagtatgaaggttggccaaaatcttctgttgaaggctgacattgttcccaatccacattcgctaatcataacacaacactccatttttcaatgtataacgaggcacagaagcaccagcaatacacagcgtctgaactttactagcagcatctggatcgtgctgatatcctgccaccacctcctgaatccaatctagaacacaagtagacaaggctgatagttcaacaatcgcattctcaggatagcgagacagagcatcaaccactctgttatttgtccctttttttgtatatgatcttgtaactcaaacccaacaacttagtcagggccttatgttgccaaggtgtggataaacgttgatcacggagaaaagccaaactgcgatgatcagttttaatcaaaaactcatcatgctgtaagtaaggtcgccatttttccactgccaacataatagcaagactttctttctcatatgtcgaaagaccctgatggcgcggacccaatgcacgactgagaaacgcaatgggatgtccattctgcataagtattgcgccaatacctttgtcagaagcatctgtttccaccacaaaaacttatgtaaaatctaacattgccaaaactggtgtagagacaagagcatgtttcaaagcctgaaacatagcttctttatcggaagtccaaacgaaaacttgcccttttcgcaacagattagtgagtggtttgctgaggatgccaaaatgtcgaacaaatttgcggtagtagcccgctaagcccaagaaactacataaatccttgacagaagttggagaaggccaattgcgaacggcatgaatcttatcctaatcagtagaaacaccattagggctaatgatgtgtcccagatatgcgagtcgttgctgagcgaaagaacacttgctcttcttgactttaagttgatgacgatccaatatctgaaagacctgttgcaaatgctgaacatgttcctgaagagttctgctataaatgagaatgtcatcgacgaaaaccaacacacaacgtctcagcaaggaagatagaatactgttcataactccctaaaaagtagccggggcactggtgaggccaaaaggaatgactctgaactcaaaatggccactatgagtcttgaatgctgttttatgttcatcatcaggatgcatacgaatctggtgatagccggcacgaaggtccaatttggtaaaccattgagcacctgctagttcatccaatagttcatcgatgattggtagtggatacttattcttaatagtaatagcattcaagtgacgatagtcaacacaaaaacgctacgacccatccttcttcttgactaaaagcactggagaagagaatggactggcactaggccgaattattcccttagtgagaatatcctgaacttgagattcaatctcatccttctgagcaggtgtgtacctatatggtcgcacattcactggttgagcaccatgaatcaagggaatggtgtgatcatatggtcgcgaaggaggcaaaccagtaggcttatcgaagacagttgcataatcttgcaataccttctggaccacttcaggaatttgctcgactgtaactggtgttgacaattcacacagttgcactagatgggccactgcatgacgatctccaaatgcttgcatctgtctaggagtggctaaagcacaagtatttactgctggtttgattccacacagagtgatggactgcctgtgagcactgatagttagaactctgttacaccaatcaactgtcattggactatgggtagctaaccaatcaatgcctaagatcatatcaaaactggtcaagggaagcacacgcaagtcagtgcgaaaagtgtatccctgcgtgaaccattcacattgagtcacaatcgaatcacagtgtaagacaccaccactagccacctgcactttcagtggagttggaagagaatgcagtcctgataatccagtagccaatttgctactaatgaagctgaccgaactacccgaatcgaccaaaatcagcacctcaaaaccttgaacatagcccagaattcgcatagttcccacagattccaccccttgtaatgcaagtaaagagacaaccattaattctgaccgtgcagggctctcgacatctaagatatcagctgaaacactgtcctggggatcctgcaaatgggcaaacacctcctgaaccgcatgcagttgcacagaattagcacatttatgattgtgagaccatttctttgcacagatataacacaatccttgagccttgcggtaagcacgaagagtagccattttgtcaggggatggtacagccttgactccatcagatttagcttcaatactaccagatggtcggggtggtggcaacggcaaaggataagctcttttgacctgagctcgagtaggtgcaccaccatcataacgcttgaaatcagtcggactcttagccatctcctcttcttgtaatgaagcaagaacaaaagcagtctcgaggtcgcgaggccgatgaagtataactgcaccccgaatctcttttcttaacccattggtgaacttatgagtgaaatatctatcattagccgctaggtcataaaccaagagctgattggctaattcatcaaatttctcataatactcctgaactgtgcctaactgctttatggtgtccaattgccccaaaacccaatcatgcaagtttatgtcaaatttacacgctactgcaccacaaaactctgcccaccctagataacaaacatgagcacgagacgaatgtaaccaggaagctgctctacctcgaaaataaatggtggcaattcgtacccacggatttggagatgtatcgcaaacatcaaaataatgctcgcatttcatacgccaatcctgtgggtccgaaccatcaaaaatcggaaaatccaacttaggcattcgatgattgaaggacttttcccaaaattgcgtcccaaaatttccctcaccactctcccaattcccagcaaaattaagatgagagggggtggcatcgtacgtactcttgatcggagtcaggaccagggatgtgaccacccccgatgcccttccccggaaattttgtggtgcgcggtggccattggcccacttctctgctcctcccgctgcagtcgtctccttcgtcggcgaagcgggcgtgggaagcagcgacgccttcctttcctcatccgtcaacggaactcgaggggaagatgccgccgtagaagtttgcaccgccttgccgaggagatcaacttgctgacgaagttcgccgacctcctctcgcagctcctgcacggcctcctccacttgtggcctccagttgttcatgcctagatccagcttgacgatggcagcttgtgtctcaacctgagcccgattcaacactacgagcgactcctggatccggacaagcaccttgccgaaatcgatggtttgctttccatcgcctccacctgcagctgcagccgagatgtgtagcgtggcttctccaggatttgaggctctgataccagaatgtcacgattagtcagcgagattcatgattcagacagagattggaagtaggaacaaaggaagaagacgagttcagggaagaatttaatagcaggaagagagaagatttgaattgagttgagatatttttctattacaagccatctctctctctccactgccgacctttatagcacaacactattaggtctctctcactgactctaggcccagccgatagctactggacccacactccacccatatatctcgttttgggcttgggctgccttgcggtgcgcttcaactggacctcaactgttgaaggagtagaagtagacttcatggcattccggggccccgccccgatggacccgcggggtgaaatttgcactccccccccccccccgcgcccccgtaggggggccgtcgctgctcccctcgagactgcaccgttgctccaccatgagaccgggccggcgtcggggccaccacccagccgccgcgtgctccccctcgaggtgacgaacctgccgctggcggtggacccggccgtcatcaacctccgcgaggatggttacaaatgccgcgcgcgcgaaagacagcaagtggccgactctggagctgtggtggagtggtcacagtgcttgcgcggtaaaagtggcggttgatcgctcactagctacattcactctcagcccaccgaaacccatttcatttccacgtacgatttatacttcttccgatcctcaccattaattaatccacctcctcctaggcctagctctgcatcgatctgtccgtgcgggatcagaggaggagctaataagctaggtaggtaggtgaagaaga

SEQ ID NO: 1287 - DNA, 468 bp, Oryza sativa
  Intron number 2 from transcript LOC_Os12g03810.1 (locus LO C_Os12g03810) derived from phytozome v7.0 (chr-ID Chr12; p os 1555772 to 1556239)
aggtaattaaaaatattctcttccttttgtgttggtatctcagttaatcctatatttgttcagcagaaaatagctaggaagagagaaaggtttttaaagcatgtctagggtccatgccagaacatcaaagtatctataggccccatcgtttggcttttttcctaataagccaaaacggcttattaggaaataaaaatgaatttgtaggtaaaacttttatatatgtgttcttggtaacttaaaagccaatgctaaaaaacaaactacgttgaaaatatttcaaaatcaatctcaaaattaagtttaaaaatttaaattttggctttttctttggctgattaggccatccgatgggagccatcattaatcataattttgtttacagaaattccagatgcaattagtcagaatctttttattaggggacactgctaatcgtcaaatcaatgttctctctgatttcaggtg

SEQ ID NO: 1288 - DNA, 4970 bp, Oryza sativa
  Intron number 1 from transcript LOC_Os01g44069.1 (locus LO C_Os01g44069) derived from phytozome v7.0 (chr-ID Chr1; po s 25256947 to 25261916)
gccagctcgaccacccctgcttcccatactgcaaggtgcgtccgtacgttgttttgttcttaacgatcatttaataggctttcctctagttaactatacatctcatgtcgctgtagatcagatcattagtactgttatatagctctaattgtttttggctttaaaatccatttcatactaggagtacatacatataacttccctttgaaaaaaaacaaaaaaagaaagacaacggtttgtgtcagagtatcaccttctcttcgggctggtacagaatatatatacgtaaacagctaatacttcaaaactaatatacacatgcacatacacacagaaagaaaaaactgatccgatatatggagctggtcatctgataaatcaaccgttggatcagaaacaaacggcctgatcgtaaaccgtaagatcttccctagcttagccgctacacacagagaacgcacgacataataaacaaacttcaggttaaccctgtttggcctttacggcatggtggatctacagagactagcacgttgcaccacgctataaaacctactacaaccacacccacttgtaggcataaatgtactagcagcagtagatgagacccgtccaatatgtggatcgaatcacctagaacagtgtactgctaccacatggatgagactcactgttggttcaggcagtttaccccaggcagggacctagaaagaactcgacaaacatgcacagacacctggccaatttgtggccaacttgccatgggcgcgcagggcatggacggcctggacgggaggacgggagaggcgcatgcatgcagatgcaggcagacagccgcacggtggtggtggcctctcgatccttcacacgccccagacgcgcgcgcgcgccattgaaagcgcatttacgcggtgtttggtgacatttaagcttgtgtttttccccctgtgcggcgctgtgctccgtagccgggcggccggctagagtgcgcgcgcgacatggccgtcgcatcgcggcaaagcgaggcgtcctctcgcgctgctttggcatttgctagttttgcacacctcgcctgctgcctttgctctgctctctctgggtcttctacagtaggcgtagtgccaatgcaactccactctcacgctagtacgttacgtcctccttgcattaacgcccgcagattaattaccttcgccgcgagcgtacaaatccaagtctccaactactactagtatcagtagaaagaaccgctccctgtctttatgggtcttaattatcttcgtctaaactgcacggccaaggtgcgtggcgagtaatggcttcgggtaggacgacgagtagctcgatccttttataactaccacgagtacaatacatatatagatggggcgtttatagtttggactacaatacgtatatatagaagagccgaggcgcaagtgcaacactgcagtgcgtaggacgtccaaaatgtgtggatggtatagatcccgaaaggagcccgtcagcccgtccgacaatagtgattaaagttcataaatgagatccctctacgcctacctctctatttccgatgaatactaggatagtactggtacagtgcctgacaaaggacgaaagttctactattaaggtctgatgtacggtggaaaaggtctgatgtttgaaaatggcgactgatatactttcaaacaattaagtactccattttcacatttttcagctgcctaaatgtagtactactacctccgttccaatatactccctccgtctaataaaaaaccaacctagtactaagatgtgctagaatatgtcgcatctggttctagattcgttttttatggaacggagggagtaagattgtgttcggcacccacttttccaaccccactctatcgttttccgcacgcacgtttttcaaactgctaaacggtgcgttttttgcaaaaagtttctatgcgaaagttgcttaaaaaatcaaattaatccatttttgaaaaaaaaagataatacttaattaatcacgcgctaatagaccgctccatttcccgtgcgtactgtatccggctgggaacgaggaaggacgaacacagcctaagtgcagttgtgagttttcgtgtccaacgtttgatcattcttcttggttaagaaaatatatgattagtatttttattgttattatatgataaacttgaatagtactttatgtgtgactatttctttttaatttttttataaaatttttaaatgaaatggacggtcaaatgttggacacggaaactcataacaacacttatattgggacggatatagtaataaattcatatccaatatttagaatagataatatttttgaaataaactgcaacataaatatgataatgcaacacatcataatctagtattttgaatgctaatcattattaaaattgatacaatattagtcagcaatatttaaaacagagtatttatctcatacacgtggataatgccttagactataagtataaaattacagactactttctctatgccatatagcgatttttgcggatcatttagggtagacgggccaaccttccgcacgcgaaaataggttttgggccatccggaaattaacaacccttttttactagtgatatatcgtactactctctcattgagaaatattacagtataagttgtgttaggtttttgcacagtttttaatataatatcaacaactacaaaagcaatagtattatatactcactctgttctaaattgatcatcacataataaaaaaaataaaatttttcaaattgatcgtcatataactttgatcccttcatttaacatgcagtattattgtatatgtgcatgcaaattgagtctacatgtttattgatccttacttatcacataataacattaaatgaaatacacaaaagttaagtctttcttctcgatgaaaaaacttatatgatgagattagataggaacttaactgagggtgtatgaaagtactttcagatacgaatgcatcgataccacttatatgacataaaacatatatgttgagtatttaattgttagtaaaaaaaattacaaaccttgactttctaaatacatgcatgccttaggccagtcacaatgggggtttcactggtgtgtcatgcacatttaataggggtaagactgaataaaaaatgattatttgcatgaaatggggatgagagagaaggaaagagtttcatcctggtgaaactcgtcagcgtcgtttccaagtcctcggtaacagagtgaaacccccgttgaggccgattcgtttcattcaccggatctcttgcgtccgcctccgccgtgcgacctccgcattctcccgcgccgcgccggattttgggtacaaatgatcccagcaacttgtatcaattaaatgctttgcttagtcttggaaacgtcaaagtgaaacccctccactgtggggattgtttcataaaagatttcatttgagagaagatggtataatattttgggtagccgtgcaatgacactagccattgtgactggccttatatttaagtccagaaaaaaaaagtactacgaaaaagacacctattgttgtaaatgtacagaaggagcattgaattgggccattaatggatctttcctctctattacaaaagttaggttacttcatatagggtgtgtttagttcataccaaaattgtaagtttagttgaaattggaacgatatgatgtaaaagttaaaagtttaaaagtaacctaactttatttaaatatatatgtggaacgatgtgttttaaatatatattttttatttaatttccataaattttatttaaaagtattgaatgaaaaagaaaaggacaattttgacagtaaattatgtgttcctatcaatcaaactgtataaaagtcatagcaatgctagaacgttgccaaaaaaaatgaacaccattaaatgatgatggcatcatgcatttacacacttcagagtctctgcgacagagctaagaatgccactggttgcgacagtatttgtgagaagtagtcaacaaacgccgtgtttagttacaaaataattctttaaactttcaactttttcatcacatcaaaactttactacacacacaaatttctaactttttcatcacgtcgttccaatttcaaccaaattttcaattttagtgtgaactaaacacagccaaaattaaatttcagtttgttgggagaattcagagagtaaattatactaggcttaaaggcaacacaacttatcttttgcacaataaaaatattctctcattttaattgtgatcatcagaacatttcgtcactgagtacggtcttcccaaaacaaaaattttcacgctgttgcatcgaatgtttaacacatgcatagagtattaaatgcagaaaaaaaacccaattacacaaattgcgtataaattacaagacgaatcttttaaatctaattgtgccatgatgtaaacatttgctaaagacagattaattaggtttaataaattcgtctcgcagtttcctagcggaattagagtagtaatttattttgttattagactaagtttaatacttcaaatgtgtgtccatatatccgatgtgacaaccaaatctaaaaattttcctcaactaaacaaggctccagaaaagaaatacaatatttagtgcagttgtgggttccgtgttttaaaaatttatgaaagaaaataaaaaaaatcatgcataaagtaatattcttgttttatcatctaataataataaaaatagtaagcataaaaaaattaaataagatgaacgatgaaatgttggataaaaattccacagctgtatttaaattgggacggatggaatactatagtcgtagtctagtagtacacagagtacttaccacagttggattgattactgcaggaagtttacgtcgtgaacagggagagcaccaagac

SEQ ID NO: 1289 - DNA, 1494 bp, Oryza sativa; identical to SEQ ID NO: 1269
  Intron number 6 from transcript LOC_Os06g35030.3 (locus LO C_Os06g35030) derived from phytozome v7.0 (chr-ID Chr6; po s 20376857 to 20378350)

SEQ ID NO: 1290 - DNA, 12182 bp, Oryza sativa
  Intron number 2 from transcript LOC_Os08g18000.1 (locus LO C_Os08g18000) derived from phytozome v7.0 (chr-ID Chr8; po s 11036931 to 11049112 reverse strand)
ttgaggggagatttttttcaatctcttgtacacaggtgcggtctttttattatgcaacttgttttttaagttccattatgcgtgatgcatggatgtctgttgttaacctaaaccacaagttctggtctttggcaaagcttccaagtccaaaatgacactggtggagaaaccctttgtagtcccggttcgtaacccccctttagtcccggtttccaaaccgggagtaccaatccggtactaaagatcgctatctttagtcccgggtgaaataaccgggagtaaagatcgatctttagtcccggttggtaccaaccgggactaaagatggctcagccacgtggccggctgagccatctttagtcccggttggtgttaccaaccgggactaaagatagagctgacctttttttttttttgcatgcccctgttgctgcatggtttatatatatatatatatatatatatatatatatatatatatatatatatatatatatatatatatataaaccatgcatatatatgtttcatatatatgtttcaatacatatatatgcatacatatatatatgtatttatacatatatatgttatgcaaatgcatatgtatatagatatatatatgaacaaaatatatttacattatagaaaatgtgtacacatgcatatagaacatatgtagtcatgtattaattacaatccattatatgtcctagctagctacgatttcgacgtagtagtactcgctgttagctcagaagctaaggaccggtgaattgtgtttccgtcgtagtagaattcacccttgggatcaaggatttcttcgttgatgaatcccatgagttgttcttgaaccgccgcgataaattccttgtgtgtggtcaggttatccctcatgcgaataaactatatgaatgtatgaaattgattagtaattaaacaagaaatcgctacgtaatgaaattttgaatttatttgtacgtacatcgagctctcttgtggtgatgatttggtctgcaaggcagtggcaatactcgcacacgtaatagccgcacaagttagttccctgcttttgctttgcgcactacaaataaatgacaaacaacgagagatctaattaatatacacttgtatgtatttgaatcggagaaatataaatgtagagcatgtgtactcacaggaaatttgaacttccgcctaagtctttctctccatttgccgcggaccaaatgacggaaccgataccaagccctacatggagtttaaagctatgattcgtagtagcaattaacataacaagattttcttaattaacaaaggaacttatgacggtacctgtctataagttcgaaaaccttgtcaaacgtagactcttttttatccattgagtcatatacgttgacggtgcaggcctccaggtcgatgagtaaaagcacccagtggaatctgcaatgtgcgtgggatgcattacatatgaaacacttagcaagttcgtacgggaatgaaatttggtatgtaggaagacagtaaaattaaactaactctgtgttgtatggcaacagtatgaacgtcttgtaatgctgcgccttcaggagatggacgagattgtcctctgtttcttgtggatattggtcgagcattgcgacgtttactttccgagggtcgatgaatccagtatcgaaaaccctccgccgtcgggccctttgaatctccattctacaacgataaaagggagtatattattttctatggtctacttatatacaaggacctaattaattaaaggagacgtatagtaagaaatctaactgaacgatatacttataaaatccagcaactcataatagagacgtcgagggcgtccagctggtatagttcgtagattcccctgaaattgatccagagaatgtcatctccttgcaagaagtccgtgtccctgatcctcgctccgatcatctctctaccggtggcgctcatctccatgtacagctgatggaacttgtacatttgtgtgggtagggactgcagcagctcaggcttgacaagcggtttaccgagttcgtacatgtatttcacttccgccttttcgattggtgcgactcctagcaattgatccgtagttagaccggtgtcagtaataaattgttctatcgtcatttctttaccagtcaccaacggctcgatctcctggtttggttgctctccaagctgagggactggtttggactttccagaagatgctttcttcagcgttcgctcatagtccgatagcttgatggcctccttgacagatgcagacatacccctgaagaagttcctgacactggggtctataggaatcttcttttctggacttcgaggcttgaattgtctcttgacttctgatgcaacgtaagcgtcaagctcctcttgcgtgcaatcgtaccccgggtccttgatcttggcggcgtcaactttcgccttctttgttgcccttgtgtgggcaagcggtggagctaggggggcccttgactttgaaggtgccggaagaggagcttgcgggggagtaggtgtaggagcacgaggaggagtcggtgcaggatcctgaggagtcgatgctggagcctgaggtggagacggtgctggcggagcatgaggaggagacggtgcaggatcctgaggaggagatggcggagccggaggagatggtgcacgagacgccgcttgtcgcccagggaggatgatgtaccgcctgcgccatagaataatggcatggcatgtgtctcgtagatgcgtctcaccgtctcctccagggtaatccagctcgaggtcctcgtacgcgccttcgaccaactcaacttcgaccttggagtatcctgctggaatcggcctgcagtggtaagtacctgaagggtccgttgggatggccatgcccgacgccaccttcatgttgtgagagattatttattagtaatcaacatatataagcagcaactagcggaatggctaaatcttacctttattgataagttcttcaaaggaatatgcagctcacatggtgtccgctgagtgatgtcatcaacgggacaggtcgattcgtcctgtgtttgcatggcgtccatgctctgtgatcctacctgccccgttgaggcgcagctgctacggtttcctgacgtgctcaccattgcaggaggaatggtcggctggggatcatgggaccgatgtgcggccatgcgttcatcaaccttccttgccacctcctcttgcatgttgagttcgtagctcgatacccggaactctaggtctgcaatcttcgcctcggtatctctcttgctcctcatccgactcctgtacgtgtggatgtcctccttgaaaccaatcttccaaggaatcacccctttccctcgagttcgtcctggatgctctggagtctgcagggcgagtgtcagctcgtccctatctctgtctggtcggaacgtgccctgagaggaggcttccactgcatctgttagtcgtcgcgcagcctcttgtatctgatagccgaagaccagtgagccatcagctgggttgagcgttccaccgtgagcatagtaccagaacttcgatcgttccggccaattggctgttgccggttcgatacccctctcaatcaagctagcctccatctgctcccacttcggcatcgcgacgctatagcctcctgaccccaagtggtgatggtacttcttcttggcggcattttctttgtttctttccatcatcgccttcccttgttcacctgtcttatatgcaacgaactcgtcccagtgatcccttagctttgggaatgtgtcgaagttcggtgtctgccccttcagtatatacttctggtacagatctcccttgaagctctgaaattgttctgccattttcttcagagtccaccttttcactttgtcctctgtacccgcaggaagggtgaatgtctcgagcattgtggtccacagcatctctttctccgaatctgggacaaagctctcatgatctccgcgtgcccttgttcttcgccagtacaccgtactgacaggcacgttatcccgcacaacccaaccgctgtgacgtacatagttcttggcggcttcggccggggcactaggacgtccatcttcttccacttccgttatgatgtgccgaccctcaagcttcttcgctgcacctcgttgcccgcgtgccctcttctgtccaacggagggttgactaccactagcctcctcctcctggttcccctccacatccctttccacgtgcccctgctggttcccctccgcatccctctccacgttcccttcctcgttcaagtactggtttggatcctcgttcccctcttcttcattccagtactggctgcttccctccgcgattgtatcgtacaatatctgttcctcatcgcggtcagccatctgttgatacaagaaacatctgctaagtcacgagacatttatgttttaacaatctaagtcatgtatgctaagtgtaaatgtcgtacattagaaccctacacaaccttacgtgctaagtctaattacaaatcgtgatataagctaagtctaggtgacgtatattatacaaccctagctagtaaataattatatactaagtctaattacaaataaaataatcttatattaaaactcaaataatattacatgctaatactaaaatagtcatgtatatgctaagtgtttcgtgcgtatatgctaagtctaattaagactacaatagtcaattgctacttgtcgcaccaattccgtagtcaataattacataccaagtctaattacaaataaagtaatattatattaaaactcaaataatattacatgctaagactaaaatagtaatgtatgctaagtgtttcgtgcgtatatgctaagtctaattaagactacaatagtcaattcctaggagtcgcaccaattccgtagtcaataatgtcatactaagtctaatttgcaataaaataatcttatattaaaactcaaataatattagaacactacacaatcttatatgataagtctaattacaggtctaataatcttaattaattgcattacaaatataacaatcatttatattattacgtcacttgcttgctccaattccttctagggctagctcttccactcaggcttgacggacgactccgacaacacgtcttttctgcaagataaaaaaaatgtattaggataaatgcgaagtaacatatatatatatatatatatatatatatatacatgtatatatatatatatattgcatttcacgttaacgttcgtcctcgttcgttcgctcgttcacgttccctagctcgttcacgttcgttcgatcgttctcgttctcgttcacgttgtcgcggcaacgtacgttgacgtgttcgttctcgctctcgttcgttcgatcgttctcgttctcgttcgttaacggcggtgtggcggcatcggggcggcggttggcgcggcggcgtggcgacggcggcggcggcgtggcgttgtggggccgtggcggcggcggcgtggcgtggcggcggtggcgtggcgtggcgtggcggcggcggcattgcgcgcgcggcggcgaaggcggcggcggcgtggcgacggcggcggcggcgtggcgttggcatgcagcggcggcgttgcgcggcgtcgaaggcggcggcgtcgaaggcgacggagagagatcgagatcggagagatcgagatgcatgaagggagatgcggcggctctcaccccagagatgcggcggcagcggaggaggcggaggcggcggcgaggacgacgagctcgagacgacggcgagatacggcggcgtcggcgcggggatttgccctaggcagtggcggtgaaggagagaggccgagagagatcgatcggccgaaaacgtttaagtgttggtgaagaagacgagggcgcaccgggaatatatatacccctggatctttactcccggttgttctcaacaaccgggactaaagatatctttagtcccggttgttgagaacaaccgggagtaaagaaaaaatctttactcccggttgttgagaacaaccgggagtaaagaaaagatctttagtcccggttgttctcaacaaccgggagtaaatatcttttcccgctatttcgaaattctttttaaacccggttagggttaagaaccgggactaaagattatagaactgcatatgattttcgcttacatatgtgtttataaaatagaagttaatgcattaacattatttaaagtacaaagattgatgacaattacttcgaaaaattatttttgtctgtaataaattaagtggataaatcgtaataagcaaatatatgacttataattaataaaaattccaatatatatatattcttagcatatatatgaatgatattattatattggtaaaaactctaattaagatattaatgtacatactgcatgatttaaaattaataaaaattgtaatcatcatatgtacttagcgtaggaattatattaaattaaatgctaaaaactctaattaacatatgtaaatgccacatgcatgatttaaaccttttaaaaattcgaatagtcatatataagtagcatatgaaagatagtaaattaaattgtgaaaaactctaatatatgaatgatagttttaaaaatatattaaatttaatacttttaaaaattctccagtcaattataattagcatatgaatgatagtaaattaaatgttaaaaactctaattaacatatgaaattgccacttgcgtgatttaaaacttttaaaaatcctctagtcaattataattagcatatgaatgctagtaaattaaatgttaaaaactctaattaacatacatatgaaattgccacctgtgtgatttaaaacttttaaaaattgtaagtatcacatataactaacatatacatgatttaaacttgttgaaacctctaataatcgtgcgtaattaacatatgccatacatcaattgatttatatggataatcaatacatccaaaatagtttacatcgtgtacacaataattacggcattacatcggcggtgacggttgaccgcacgtactttctcctcactattgttccctccttgtgatcgctgcgtgagtaaggggtgtcttcatttgataggaggatgctagggtcaatcgtcaccgtgaaagggggttgcccatccaactgatcgtaatcctcgtcagtcttgtcctcaactccgacgatttttcttttgcctgggagaaccacttgacgcttaggctcatcaggccctctgcccttctttcctttgctagacatgtccttcacgaaaaagacttgcgttacatcattggcaaggacaaaaggttcgtccgagtatccaaccttgttaaggtcaacagttgtcatcccactgtcatcaatcattacgcctccaccagtcaacctaacccattggcaccggaacagaggaaccttgagaggaccatagtcaagttcccatatgtcctcgatggcaccgtaatacgtggcagttgttccatcgtgtcccatggcatcgacacgaacagcgctgttttggttcgtgctcttcatgtcttgggctctcgtgtagaatgtgtacccattgatctcatatccctggaatgtcgcgatcgacccagacggtcccctcgccaggaaggcaagttgttggttgatcgactcgttacccatgagatgttgtcgtagccacgcggggaaagtatcaatgtgatgccgtgtaatccatgcatcggacttaccgatgttcctggcgcgaactagagccaagtgctcctcgatgtaaggagctaccaatgaagagtgttgcagaacagtgaaatgggctttacggaataaattgttgtctaccgtcattattgctttccttccgagagtttcctttccccgtagtctcccttcatggcgtgattcaggtaccccgattgggtgaaggtcttcgataaattctacgcaaaattcgatgacctcctctgttccataacccttggcgatgcttgcctctggacgagcacggttacgaacatacttcttcagaacgcccatgtacctctcgaaaggaaacatgttgtgtaggtacataggcccgagaatacggatctctttcacaaggtgacaaagcagatgcgtcattatattgaaaaatgaaggtggaaatatcaactcaaaactgacgagatattgcaccacttcattctgaagggcttctaatctatccggatcgatgaccttctgcgaaattgcgttcatgaatgcacatagctttgttattgttgcccggacattgtctggaaggataccccttattacaactggtagcagttgtgtcatcaacacgtgacagtcatgagactttaggtttgtgaacttcttctccttcgtgcttattattcgcttgatattcgtggagtatccagacggtacctttatgctctccaagcattcaaacatactttccttctctgccttgctaagagtgtagctggctggactcaagtaatggcttcctttctcctttggttccgggtgaaggtcgccgcgttgttccatatgcttcagatcattacgtgcttccagtgtatctttcgactttccgtatacacctaggaagccaagaaggtttacgcaaaggttcttagtgaggtgcatcacgtcgattgcgtggcgtacgtccaagaattcccaatatggtaactcccaaaatatagagttctttttccacatcgccgcgtgaccatcttcgctctctatatgctggcttccaggcccctttccgaacactactttaagatctttaaccatagcaaacactgttttcccgctgcgatgtttaggcttcgtacggtggtcggccttatgttcgaagtgcttgccattcttccgtaccgggtggtttgctgcaaggaatcgacgatgacccatgtatacaaccttcctacagtgcttaagatacgtactttctgtttcatccatacagtgagtgcaagccttgtaccccttgttggactgtccggataggttgctaagtgcaggccaatcgttgatggttacgaacagcagcgctcgtaggttaaactcctcctgtttgtcctcgtcccacacggggacaccttccttcttccacaactgtttaagatcttctaccagtggtcttaggtacacgtcgatgtcgttaccaggttgcttggggccttgaataataatcggcatcattatgtacttcctcttcatgcatagccagggggggaggttgtagatacacatcgtaacgggccaagtgctatggccgctgctcatctctccaaaaggattcatgccatccgtactcaaaccaaaccgtatgtttcgtgcgtcctttccaaattctttaaattttctgtcgatgtttcgccactgcgaaccatcggcggggtgtctcagcatcccgtcctgttgacgctcttcagcgtgccatcgcaacattctagcattccccttgttcctgaacaaacgccttagccgtggtattatagggaaataccacatcaccttagcaggaattctcttctttgttagctgcccgtcaacttctcctggatcgtcccgtctaatcttgtatcgtagtgctttgcaaacagggcatgcttctaggttctcatactcctcaccgcgatataggatacaatcattcggacatgcgtgaatcttatgaacttccagtcctaacgggcggactatcttcttagcctcgtacgttgtctcgggcaatttgtttccccccggaagaatgttcttgacgagtttcaataaatcgccaaatgccttgtcactaaccccattttttgccttccattgcaacaactccagagtggtatccaactttttgtgcccctgctcgcaacctgggtacaacgaagttctgtggtcctccaacatcttgtccaatttatgtgcctccttttcactttcgcagtcttccctggcgtcctgcaacatctgaccaagatcatccgcaacgtcgttaccatcagcagctatttcctcctcgcccgtttgatttcctttaaatccaacatactgagcaaagtccggaatattgtcgtcttccacttcatcttcttccatttcaacaccttgctctccgtgggatgtccaacaattatagcttggcatgaaccccgactcaaacaagtggaaatgaatagtcctggatgcagaatactccttctgattcttacacttattgcatggacaacaaataaaacccctttgcctgttagcttcggccactctcaaaaaatagtgcacgccgtcaataaactctttggaccgccggtcagcgtacatccattgccgatccatctacatgagtcaaaaaaaccgcacacaaataattattcttacaataatgacagtcatacaataattataagatatctttattcatacaaaaatcataaaatattacaccaaataattcttaaaaactatttgtaaagttttaaactaattttaatgtgttttacttcttttaatttttattttagtttgttttctattatttaatattaactttcactagagttttccttctcaactattttataaaaccttgtttagcaaatgaactaaatttctatatattctttcttccccacacacattttctctctcatcaacttacaactaaattttggagacaaaaaaagtgtgcaaaacataggtgcaaatgtagtatgacaaaaaaaacattggaggatgaagttgcaaaccttttaggcacctccgatttgtatgtaatcaccaaaataaattcaatagaaattttggcatgacctcccctcttttttgaagaaattttgaagcttgctcgggtagctggaggaggaagaagacatatatataggggtgggactttagtcccggttggtagcaccaaccggggctaaagatcaccgggatcattagtcccggttggtattaccaaccgggactaaagttaagatctttagtctcggttggtagcaccaaccggggctaaagatcaccgggatctttagtcccggttggtattaccaaccgggactaaagttaagatctttagtcccggttggtgctaccaaccgggactaaagatcccgggggggcctgacaggtcctgacagcattcgaaccgggactaacgatgatctttagtcccggttggtaacacaaaccgggactaaagatcaaatatgcccgttacccttttgaaccggtttttattgcatccgggactattgtggaaatcggccgaccgacgaaagatggtttctccaccagtgtgagtaacattgttttgcatcgttcagatatatctctgatctttttattctatgcatgttaagcaggtgtttgcctaatattcagtctcagctttaaaaagaatttgcaggggaaaaactggctcccatgacttttcactaagaagaaacctcagccaaagccagccgagaaaggccacgaaccctggccccttgacacgtggatccacaccccatggttcaggccttaacaaatgctttgaggcccctgccccatacacgagggcccacccaccataggtcgtttcttaacaagtgtttaaaccaaggggccagcgtgtgatgtttcttaaaccaactctgaaaattcgctcccgagtagagtcgaacccagacactggttggtgctagtagagtgctgcaaccactaggctatagacccgttcgttatccattcttagtttcacatttgcacatatgtatttcattgtggttcagacttagaagaccttttacctttattgtttgtataaagttggtagtatgtctgtatgtgagaaaatcatatttttaattcccatggtataggaggaggttattaaagtggtccaacattggtcatgaagtggctgggattagtttttagcataagtgggtgataactgagaaggcccaatagcagaatgggagattccttggatgtcgtcagttttcataaacaagcactcgtctttcgtcaaagggtggtagcgttaatgcctagtgttgatttcatatgtatcagcatgacatgctaaaatttgataaattttgttcctatatgttcagagtgactatctgaggaggctttctctcaga

SEQ ID NO: 1291 - DNA, 2142 bp, Oryza sativa
  Intron number 2 from transcript LOC_Os11g40110.1 (locus LO C_Os11g40110) derived from phytozome v7.0 (chr-ID Chr11; p os 23460181 to 23462322 reverse strand)
gccgaggtatcggagctcctgaccacagtgtgtgtctgtgtgaagctcacaagctgccattggcatgcagacatgggtgagatgcaggagcggcggagacgacacggagaaggccgcgctaacgaccgccggcgcgccgttccacctcgccgccgtcgccgctgggcaaaggaggtggtcgggcgccagttggaggggtggccggtggcgctgtccgctcgactcggcggagacggcggtgacgagggaaggggaggccggcgtggcggcgcgggcgtccagcagctcggccacgctcggctgggtgccggctgggagtgacgcagacgcggatgccatggagagaggggaatcgagagagaagagagagtgaaagggcaagagcaacatttttcctgctcgggcccatatgtcagagctgctaaacagttaaaaccaaacagaatagtgacggaatggtgtggagggcgcaataaagttggtgtggaggacgcgataaagttggacgatggcatagagggaggctcaaacttttttgtggcaaagaggtaggcaccatctttttttaatggcaggaaaaacctcaaaaagtgaaatccattcaaccgaggagcgcacacacgcatcgcattggtctctctctctctcccgtttcccccaaatccaccccaccgagcggcggcgaggcgagcccacgccggcgacgagatgagcttcgagtacctgggggggccgatcagcaagaacccaaatcatggtggcgccaccgtcggagtcctcgacgacgcgcactccgggaggcgtgagagggcctggcctcgtcaggacaagcgcagaccctacccttccaagttcatcgttgattttgcctgtgattctgcctgatgtgtgtgtaacgtggggtgggtatccgcatacgtgtgttcatccccctgttccttccaagttcatcgttgattttgcctgcgattctgcctgaagtgtgtgtgtgtgttcatccccctgttcgtcgtcgcatctgattgtgggattttttgcctgatgtatatacgtgggcaggggctttgtagttagtgttcttagggatcatagacttgggacttccatttctggctggcggctcgtgcacactgtttgttggtggttggttgatcaggtgtagtaactgatttatttgggcgctacctggatagagaaattaattaaggcttcagttctcagctgtcatgaaagcaactgtagttggctttgatcagtttgatgccatatgtcatatagccatataggtctgactgcaactttagatttggattcaaccttgttaaatagttctattactatggctcgcacaaaacatagtcctcttaagattatattgggaaagttttcatgttgatgtggcactcaaaccaaagtgccttgtaaggtttgcacctccttatattctatcattatttgatcttgttcttcacaactgtgattagtttaacacctccttatagtccatcattatttgatattgttcttcacaactgtgattagtttaacagttaataccttattgtactgctcctgtaacaagctatcaggtgcttcaggacctgatccaattgccttgtcattgcattgccaaaaggttccagatggatcagttttagtaccttcaacacagaggaattcacgaatcaatacaagcaatgcagaagtaaccgattgcaattagcatgatgcattttttcctttatttgtcctgccatgttctttgatgtttgccatagtcctatttttttcaattggcatttgccaaactctttgtcctgtgcaaccttagctctgttataaaacattttatcataaaattttgagtcccttatactttaccatacgttacatcaatcacagtttttgcaactagatgttatttatgagtattgtactaaatgatttggttgggacatgttctaattggtcttgtgtttgtgtgctaactaggaagaatgctagcggtatcacctgatatttgtaactaagactgatctactgttgtcaatcaagatttactggaaccgtattttgttcttatgttttcctgctggtaattatttgctttaacgtgcttttgtttctctctaaaacagttta

SEQ ID NO: 1292 - DNA, 4570 bp, Oryza sativa
  Intron number 1 from transcript LOC_Os10g22310.3 (locus LO C_Os10g22310) derived from phytozome v7.0 (chr-ID Chr10; p os 11466706 to 11471275)
acaaggtatctataagtaataactcccaatgttctaaaataaatctttacctatatataaatctgaacatgtagctgtactttaggacgaatgtagctgtattttgagacgaagggagcgagtaatttgtgtcatagactcatagttggtccaagcatttttaatctctcgtgtaaatggtgataatcagtcatgtgattttttttgattttttttaaagaagggtaatttttacccagccgctatatccaaccggataaatgtagcctttttaaattgggaacttagccatcaaacagggaacttagccctcaaataacccaatatgaaattgggtactatgaagatttgaactcaggactttgagatattactcatgtcattgcaactattaggctatgtgccctttcgcaatcactcatgcgatggctgacaatgtgcatgcagtacattttgtcgcgccatgggcgccgatgttcaaggggaagacagaggaggagaaggcggaggggataaagcagatactcgcggcggtggaaacactggagggagccttgaagggttgctcaaaggagaaacccttcttcggtggcggcaccgttgggctcgtggatatcatgctgggtgcccatatccctggggtgagggcgaccgaggttctcaccggtgccaagatcttcaacgctgcaattaccccccttttggcctcatggacggagcgcttcggtgagcttgacgctcccaagaaggtgttgccggatgtcgacgggatggttgagtacgtcaagaggaggcaggcacagtgggctgccgctggtgctgcggcggcggcggcttcaaagagctgattggccggcattgcgacgtactttttccgtctcaaaaaaaaacaaattctagagtttgattctttttaggacagaggagtctaaaactcccgtttttgcttaatttggaggaaataatgtgcttgttgctgaaaagtagtggagaccagacagattaattagttgcttatttgacttggttgtgagtgtagaataaatgtttctgttagtcgcttgatgacttggtacgttgtgagttagaaaagaattatgcaaatcattttctctcttattctcaactctagctcagttttctttagtctttatcaccgtatccaccacctagttggagatttacaggccttaaattgtaggcagagccactggccgtatgtgttttgagcgcctgcgaaactgattttcatagaaacgtggccacagtttgagataggaaggggaaagtgtcacaaagatcagaagacccacatttaaaatagggaaaagtccatttgacaccctcgaacttttatgcttgtctaaaatacacccccaaactacgaaaccgggtataatacaccatctaactgtcaataccggatacttgacccccttgggctgttttaccatggtttttgcacacgtggatgacacgtaggatgctacatcaacccttcaccacgtcagcgcttacgattatgtgggccaagcccatatcgctgggttgttttgatcttactttttcacgagcggcggcggtagcggcactgcgaaggcagggtcgagcggtcagtggtgcgcatctccgacaagcagctgtggtcgtcggcggaggaggtgtcgcaggaaagtagcagctccaagccgttgcgcgcggtcgtcggcggaagcgaggaagaagcagctccgacacaagcgcgatatagacctcgacctgtctctagtgacttgtgtgtgatgcttctcctgtttatcgtaactactaatatactccctccatcccaaaatgttatctttgacgtcgttgacttttaaaaaaatgtttgaccgttcgtcttattcaaaaaatttaagtaattattaattcttttcctatcatttgatttattattaaatatacttttatatagttttacacatttcacaaaagtttttgaataaaacgaatggtcaaacatgtttaaaaaagtaacatttaaggaaggagggagtatactattactaatctcggcaagctattacgttgtgctgctagctactcatctttgcagtcatgagcatgtcaatcccaaagctaaagctgttcggcttccacacctccaagcaggagacgatggattagcacaagcacggctaggagcaggacaggagtagtactcgactgagcgtctgagccggagaacgcgccggccggtctgcggcaacggagacggagctcgatcgcagaggaggagctaggcggccagcgatgacagagctagctcgtagacaatctgatggaggcgtgcccgctgctcattgagtaaagctcgagcttgcttccgccaagctcgacgaatgggtgcgccaaactcgcggtagtcatggcgctcgagctcctccccgcgcatgtatcttcggcgagctccgcctctccactcggagttgcttcgtccctgtgccgctgccttcgccggagaacgccgcccccactgccgcctccaccaccaccgccgtaggtgctggagctcgatttggttgcgcgcttgcggctgtcatcctctacggcggtggaatgggtattggaggacggtgtttgcaggcggcgaatctgcagctccgtcagggacgagatgtcgatgggtgtgcggtggtcctcgctgggcagatggatgagccatgcgcccatgccgaaggagagagagacagtggagaggaggaaggaggaccggactgatacatgggactaactaatctatacaggtggcatcctaatgtgcaaaaatagtgtagaaaaccactcgagggtgtcttttgtactgtattgaaagtttgagggggtcaaatgtctgtctggttttaaagttgtggggtgtgctttagacaagctaaagacttagagggtgtaaaatagacttatccctttaattctgagagagttctggatgttggtgtcggctgccgtagtgtctctagccagtgttggctgaaggaaatctgttattttggtttaagttctaacttgtaagctggaatgcccggcaaaatgctatatttgcttcaatagaagcagggtcattggctgaaggaaatctgttatttttgtttaagttctaacttgtaagctggaatccccggcaaaatgctatatttgctttcaatagaagcagggtcctagtgaccttttctctaaaaaaatactccatgtattaaagggatgtaaagcgaaactttattacaagccaaactaaaattcacttagaaattactaccttcgtctgaaaatattaggtattacgtgagctcaaccattaatttctttcataattatcaacaactacgaaacgaactcagtatggaaaatactttcaagtacaaatctaataacaacacatgttagttcagttattaatcaaaagttatattaggttgcctattatttttttttaaaaaaaacatgggctcgttatatacggatggagcacagaagagtgtattttgaagttcaaaaaacgtgaatttcaacttaaaaatcgtgaatttttaatctcgaatattgtggattgaaactacccgggagaattaatagttcatttcggttatgaagaagcaagcatacaaagtcctgatcttttaaggaggtgacgggagaagcgccttgacgagccagttttgttcctgcaaaactcgctcagttcacaaatattacaagtatttttacgttatttataagtcgagattaaggtttacgagaaaatactgtggactgaggagaaaattattctgaaaatgtgactatctctatgatctatagcatatatgttcggtatgccgtccacagtgcttgacatgccctttttttaaactgttgaatcagttgttcattggcaactgttctgagtcctctagtttttccttctctctgtactttggacttgctgctacttgtattgggttgttgctgatagagttggagttggaatttgagagttgggcttgctaacattttcatagaaggaataaggggcaattacgcaaacaacattttgtagtaatcatttccagaaagcgaactctgttctaggttgacaactgacatgcacccatgttttggtatggtaaaattataaaaacttcacaacgtcatagatgttggaaaatgttcaattggcaaaagtaaagatcatcctattagtacaaatacaacacaatttattctgtaatgtaaatttcacttctttttatttaatagtgcaaattttatcttttttacacaaatttctgcacatgcaaatgttccagaatgttttacatcgatgattctttagttttagggtgtgcacacatgaatagacacaaataactgcacatgtagctagatgcaaaatatccacttcaactttataaccagtaaatgttttactttcatcagcgtaatgtgcttgtaagaaaattcactgcaactagctgagaacttccctttccaaactttcaaggatcctaatggaagcattttttcacaggcgagcacacaagcgaacactaca

SEQ ID NO: 1293 - DNA, 4002 bp, Oryza sativa
  Intron number 10 from transcript LOC_Os11g20554.1 (locus L OC_Os11g20554) derived from phytozome v7.0 (chr-ID Chr11; pos 11911645 to 11915646)
gcaggtattctcagcttgcttgtcccatttcaattgaaatgaaatcaggtggttatttgagtttgtcttcactcttgaacaatgtatgcaattaaagtttgatcaaatcacgagcatatctggtttctttttcttttatttgaacttcacatggtctaattttatttgttgcataccaatataatattgttgtatctttagttcaatatgtgcatgtgcgtttttgatgactctgttagcacatccagcacatgaagtaactgttgatgtgtggagcggcagcatgaacagggatgatcattttctgtgtttgtcatcttctttttgttaaccttttggctttattttaagaagtttatactcttaaatatgtaacggtctaacctctaatgttctatataaggaggccatacctggcaatgttttgatatttcaattcagaaatgtctgatatatacaactgttaagaggtctaatgtttttgtgcaaagcttcaggcagtttatgttgacattgttgttttattggtatttctaacaggaatacttacctagtagcctccggtcagattactgcgttttggggatttttcttttttttttacccctccagtgtttgccgcgtgttaaactgttttctttcctagctgtgactggctcttttttctcttaatgacgtagctggtgtccagttttgtttgttgacgtttctacaggggtttcgtatacgtgccggtctttgggtttttacaatttttgtagttgacttgcttacctggttatttctgctctgcgtgttttttccttggtgtgttcggctgctgcttgtgcacggcttgtgtttgcatgcgtcctgcacgtggtgccatgcgcttgtgtgtgtagcctcgtgggtgtgcccatgctgtcttacgtggctgctcccaacccttttgtttctactcctatttcttattttctttttccctttcatatatttagccttgatcgtcccaaagtttttcatgcttgctgtatgttacgtttccttaatcaacgttgtgttgtcatcttcggttgctaggtcgcgttgtgctgctgttcggtgccgttcttgttttgatcttcaagctggcaatggtctgtttattgtttcttgttttacttttataatttgtacagttttttttccttatactacaaccgtgtgtttttcctcccgttgactcaaatcctttttgtgttcacacttcacagtgtgttctccgatagaattgctatcgttctcttaattttgctttgcacttatgcgggtatgccactggttgcttggcgctacatatagtttgtgctggatgattctgatgattctattgttgcctcttcattgagcatgaaggtagcagcaggaatccgtccacatataccccatgccaggtagcctgaaatgtctacagggctagaaatctcaataattctcatctcatccatgagctgaaggaatttaaaagattatgagtttgggtttttttgtaccatccttgagaaatatgttgaagtaccaaaaatttttatgtaaaattagtatctcgaggtatcaaaattttacactacaaaatatagtatctcgagttttgtcttttccactggtttccaaccagaagcagccttcaggagtgtatagtgcacttttttcggtttcaaggtagtgccatggtttcttacacttatctaagtgcaattccaggtcaaggaaaactccattcctaatctgttatctgatcaactgataaagcaatgaaccagatggatttgttctcgcaagatgcttgttgggcatagactagtttactaagctagaaaacgtactatatctatgcttgctttaatgctttgaagtggaacaacaggctaatatggaaccacatgagagcgaacggaaagcatatttggattttaggggtttttacaacaaagagtgaattttttagttaatcacggcacatatgcatgtttacaagtttctataagcaatattatatgatagttgatattaacctgtgctgtgatcatcatgtgtggatgtgcgatcatcaagtttctataagttgatattttatcttacattagccatgtgtggattgtcatcatgtgtataaaatatttttagtattcttttaggccaaataaaactgaagtgaaacgagtaattgcctgagcgcggcgtgtcgccgcgtgggcacgtctagttttttaatgtctggtgagtttttgtgtagtaagatttgttccctgtgcaatggccatagttttcctcttgttttgtcttgagtatgagccgtttacatgtctatataatgtttggaatttgaatatctccacaatgttatagaacctgtcttgggaacaagctgttgcttttgtaatgatctggaaatttccacagttttgtactatctgcttctaattttctagatatatgatatttattgggaaaattttgtatttgcaactagtaacttgtctaatactccctctgtttcatattgtaagatattttgggtttgtcataagtcaaacttctcaagtttgaccaagtttatagaaaaaaagtaataacatctacaacaccaaattagtttcattactatttgtatactatatttgttttgtgttgaaaatattgctattcatttttctgtaaaacttggttaaacttatagaagaatagaagattgacttaggacaaacccataatgacttataatggaaggaagaagtatcaagttgtcaactatatattcgaaaaccattcttttcacatgccagtgttccatcaggtcacattcttacatgactggtatatgagaaaactgttgtgagatttttacttgtaattcataacttcttaaatcctgcaatatgttgctaggcttgataaccaattgtttacctatgtcatctgagcccattagttcccatataaaagcagtggtcaatatctccaggtccagcagcattgcgcacatgaacagtacccgcgtggttactgttcaaacgtatgaagctcacgtgattgctttaatttagattaatgagttatttattaccatgatcttagatataagtttcttaagaggcaatataaggatggggctgtatttctgttcattaagcaagagataaacaagtgtctttagtctcgccatcttcttgcctgcccttgtggtacacagcctccatggtgccaatgtgccacttgggtcaactatgcctaaggcccttatcttagtaatgcccattacatgctattgtattttatgattgtacgcgacatgatttgctagactaaatatggtgcttgtagtagatataggagtatgacgtgggtgtgggtcactctgtttgtacctgttgactgactctggttcaacaaaaccaattttacttttgttgaactagagtgggtcaacgggtacccacagagtaatttgtacccatctaaaagtagctatattattcctacccctttactagaaatgttgcaattgcttatctgtactggagtacataacagaacctagtgggtactgggtagcgatgatgctgaaattgtgagtgtgtgataaattatgatggcttcatgatggactgttattcacatgtgatgaattctgtttgttggatatgatttgtgtgtatgccactgatagataaattatttgtgatggacacaatgtgcaagggtgatgccaaatttttgtggcagccaacgcacccccttctgcctaaaaagacttggtgccaataacccttggctccagttacctgatgttgacccatggccacgtcgggatccagcgtcgcacagctgcaccagggttgatggtgctggaatgttgtttagaaaagaaccagtacgtcaaaattctagtgtcaagtaacttatggacttatgcaagatatgttgtcccgtgatatgtgtgcagagctccctcttgagccttctctttcaaggactttg

SEQ ID NO: 1294 - DNA, 2467 bp, Oryza sativa
  Intron number 1 from transcript LOC_Os11g40100.1 (locus LO C_Os11g40100) derived from phytozome v7.0 (chr-ID Chr11; p os 23448445 to 23450911 reverse strand)
cggcggccggcatcaccaccgagcagatccaaaaggttcgtttcgcttccctcaccctctctctctctctctctctctctctctctatctcgctagggtttctggaaaagatggctcctttggcgattgcttcggccaaagatcagatctttttcgtgcccgggtggacaagtattgagcctttttgttcttgtcttgcctttaatcaaatggggggattaatcactgaggcgtaaataagaacgcatttttgcagagagtggagacgcttgtgcatgggggattagaggtttaaacagcttaagagaagtcgaaataggcatgaaaatgtgataggagtaaggggtgtggtctccagttgaaccaaattttgaatctatagccaccagtctccaaatttggtaatactgtaatattgcgaaaagcatgatacggttgaaatgataagcatgcattaatgcatgaggatgataggaatttagtagtccacaagttcggttttcccctttttttggggttcttgaatacggctttctgctttcattgccccttttcttgttagtagttttgttcttttttgtgctctgtaaccactgatgtggtctattttgcccttctgtgtagcttcaatttaccttatgccctacttatatgctaatttctctcttatatgcttaataattggcacagctcctgccactgttataagaaaatgttcatgcatgttattatacctgatcaatattgatgataacatgtcaacataaaagaactctgcctgcaaaattttatgctacacaccttttggccccttacatttcagttacaacagaatcacacatctgaattatgtcagctctctgatcatgtagttgtggttgcatcaagtttgatacgaaagaaatcaaccttttctcaatcattggtccactattgatcacaatagcattgacatcagaaacctaatatcgaatggctagcattaacttaagcttgggtttttcaagaaataaaccatgttgccattgtagaatgaaactgcatatacaattcttacagagagacgataaatgaattattttaagattacacatagattagcattatagcgtggtcatcaacatcattaacttcagatacttattcaatttctcttttgcagtatttggatgaaaataaacagctaattttggccatcctggaaaatcaaaacctagggaagttggctgaatgtgctcagtaagttgcttgctaaacatctttgaaaggctttattgctggattactatatgaaatgcttctaggtggctgccatatcttgaccattttgtttcatgtaaatgacctaaaattggaaatctgcaattgttgacggcttggaagatgttttcagaactacatttgaagtcatttgatcttattctgttaaaatcatgcactaaggattgcacacaagtgccaagttttgatagttgtgtcttctgaagtttactttaccatttggaggatctaaatgacagtggtcaataagttttggcatctgaaatttactttaccatttggaggatctaaatgacagtggccaatatgttttggcatctgaagtttagttgacttgcatgaagtatatgcttattcactgtcttccctactgaggacctataatatggagaataaaatcttgtttctgtgcctgatttgatcatctggaacaccttgcttaattactctattggtctatccagtgtatgatatcgtatatatctgttggcctgtgctatgcaatggaaagttagattttcagctgaatgccttattaattgttgcaatggatgaggagtttgatcttctatccaagtgctactatgaagtcctataagggatctatcattgctttattgatggatctttcctatctacatgcattcagtggagtttgggcctacgtgtaacatgatgccatgaagatataagtttttgtgggcagatagttgttttaaatttaatgttcttggaagtgtaacaatcattttcgttttacaccttctagtgaaggaactcctgcttagctcccatcttttttgtctgaatagtaactaccccaaggcatgaaaatcatcctagtgataccagcatgtagtattctactactgttggatctttcacttcacaacagaaaattcttttgaagtttgggggaaaaaacaagattagtttaacagttgagcatctgcattactcattccatcttgattttgccatgctagtttcatctgtcaaggaagaaggttgcaagatttctaatcttctttgatgcaccaaacttgtctagttgtcttaattgaattattcgtaatgtgatctgcctatttggatgcagccttctaaatgatcttgtaacaatgcttatctttcatgctctcatattttaggtaccaagctcagcttcaaaagaatctcttgtatc

SEQ ID NO: 1295 - DNA, 475 bp, Oryza sativa
  Intron number 7 from transcript LOC_Os04g53310.1 (locus LO C_Os04g53310) derived from phytozome v7.0 (chr-ID Chr4; po s 31569676 to 31570150 reverse strand)
actgtttaaacctaagcaatgtaaggcatcctggcgtcttccttttcggttgcattcttttcagtgtttcaatggaattctatggaaatgctatgtatatgcacagtgcagatggtttctttcttgttttatctaatatatgtagctctggggttttgtggaatcttaaagatactggcaaaaacaaagtgcaaatatcaaatcaactgtaagtgctggagcaataggtggttcaatggttgcaactagtccctctaaacactttaaattctgtggttttcacttttcacttttgaaagagcactgaagcatttctcgtgaaatcaactatagtccatgcttttatttttacgatcatttgcttccttcgctggtgagagtgtgaacatcgctgtttgtgggggcttttttctcattaatttacttgtcttttggttcaggtgaaagatttacattaccgtcaaagttttacttg

SEQ ID NO: 1296 - DNA, 1279 bp, Oryza sativa
  Intron number 4 from transcript LOC_Os08g05510.1 (locus LO C_Os08g05510) derived from phytozome v7.0 (chr-ID Chr8; po s 2937461 to 2938739)
aaccacgtaatgctactggttttcatttttgacatattagatatcagatatctcatactttaagaggtggtgatttctcataaagagtttggatgtttttcatttgaaccattttctattggtctaggcattgctccgcattgatgatcgccaacttttaaataccatattgcaactataatgtgggcatatttaccaaccaaaagccacacacatcagggaaatgaaaataggcacagctatttcatagctggtaaaatgatgagttgtgggaaattgaaattgcatgggcatatttgctttcagtgcttccaatctccttcctatgaaggaccatccagatcatcaaagatagttcaaagactgataatattgggttcaaaattgttaatcaacatactgaatttcagtccaaactggaatttgtcatgagggaaaaaatattcttttgaaaaataatactcggtgaaggtaaataaagaagtaaaagcgattgttgagtgaacttctctgttctgctatgtgtagtaaaacctgcaattttatgggcactagatcactctgatccttaccttcttaattttgtttttgtagaatcttttgcgataatttggatggttccttatcagagtgtcggagcatctaataggtaggctgcactggataaacacacctttctgcacttttaatgtaaacccaacaagtaacaactgcatatccaaaattatgttcttaaactgtttctatgcactattggtactgttccaaaaacgacggtacaattgtttccataatagtggtcccaagcaccaacacaaatattctgtggatttgggagttggtacttggtagttactattcatgttgaagcatatgtgcaaaaatgaaaattatgaaaagacaccgtaacttgtaatgtcaaagttatttggtgccctgagttccagcaatattagggaattagttttgatcagaacaactatcttgttggtaaccgcctgagaacatcatgttatattagattattagttgatgtactttacttggtagttgcctagttggtagtggtactgtattgattacaagtactgttgtttagggtgccaacgatcagtatgagagcctgagcatttgttccttgaactcattatgaaacacacagatttgttcattttctacattttaggagctacatttgtaatacaatgagccattactatctatacttatggattaattaaccttcattcctttccaggacggtttcttgagggcgccc

SEQ ID NO: 1297 - DNA, 7766 bp, Oryza sativa
  Intron number 1 from transcript LOC_Os12g16080.1 (locus LO C_Os12g16080) derived from phytozome v7.0 (chr-ID Chr12; p os 9169323 to 9177088)
agtctcaccgtcatcaccctcgcacaaacaactgggttagtgatctatatttaacttgctcctcaagcttcatttgctgcttattaattcgttgtctccttttttttttttgtttctggtaataaatttgagaaaggagaaaaggcttttggagcttggaacttcgaaaaaaagctccttgactcactcctccgcatcatttctgatgttcatgtagttttatccggaatatataagaatttgtgatgcaaaggaattacataggaattaacactagcagtcctatagaaacacgttgtcagtaattagaaagagcacaggttaattgcttgacgggagtcaataataaaatcagcgcgaaaatagtgctgattgaggaaaatgtacaccgttggcgaatggcgatagatgttttgctcctccttgtccagatagctgatcaatgatctgctccaataatttccatgatgacagcactgatgtcagagattccaggacagctgtgacgtcaaagagcgacagggagggacagaataataaagatgaagtaatgggcgtggttgactggctaaccacgactgtgtttaggtcacactgaagtttaaaagcttggttgaaattagtatgatgtgatagaaaagttgtgtgtgtataaaaggtttaatgtgatagaaagttggaagtttggaaaaaaactttagaactaaacagggcccaaaattctttgggatctattctttcttcctctcttctaaattttactctcatgtttttcatgcgcacgccttctaaattatgtgtttttacgcatatttttagaaaagttgctttaaaaattatattaatatattttcaaataaaatgtaggtaatacttaattaatcatcactactggatagctttactcccggttggtaaccccctatagtcctggttatgcaaccgggactacgaatccaggattaaagatgctcatctttagtcctgggtaaaataactagagtaaaaattcattttctagtcccggcactaaccaggactaaagatggagccaggccaggtccatttgctctctttttcctttttcattgtttttaacattaaatattgatttcactctgtcggtgacatggaaccgggagtatcatgactagaggcttgaggcagacacaatcgcccacgtagcctggcaccctcggggggcgtcgggcccgagggtgatgcgttcgccctcctcttagtccccccgagggggtcgggccacacccccctcggccccgagggccgaggcgccccgacccctcgtgggtttttgcgccgcgtgtatgggttaggtgagcacattggggctcacctaaccacatttattgcggtttggttgagcgtgtcacgccgcatgtaacgcagtgcagtgcactcgtttatccggtctgtgaccagtcacagaccggtcagatcgcgggttaggtggcgacaggcgatctgacacacgcctcgccccatcccgtcaggacgagggcttctaggcactcgtccccagctggagctagcgtgttacctcccagagatggcacgttagtcctggtcagatatatgccaggcttcatcctaaccattacaggcaagatgttgtgtgaagaagggcgagcatgtagattgctaagctgacacgtggtggacaagaatgaccgacgtgactggactaataccggtcatgtcgtcagcagacagccacgattccacgtcgcgcctgcttccggcggaagtggaggtaggtatgggccgtcccatcagaaggtcattcggacggcaaccatacaagtctccgtctgtttatgaaaaggtggggtaagtccccacaaaaaagagagaaatggtgcatgtggtatccccttaagatataaaaggaggaccttgcccacggagagacgagactggacttttccagattagaaacccagaacaagggagaggctggctgatactttgtagctccttcatacacagatgtcccaaaacacaggagtagggtattacgcttctcagcggcccgaacctgtatacatcgcccgtgtcttgcgtgtttcctgtctcgcgagccttccacatacagagagcttagaatctctccctgagtccccggccgaaccggcaaaggggggcctgcgcggtctcccggtgaggagccccacgctccgtcacactccatcctcgaatcatccctaaatcctgaaatcccaaatcctcaaatcgatcatctccaagtacatcctaagtcatcacagatcacagatcaaaaggatcatctccaaatcctcaaatcgatcatctccaaatacatcacaaattcctaaaaaaattacatcataagttctaaaaaattcatcataaatacatcacatattcacatcacacacaaataaaatacatcgcaggatcatgcaatgaatcacaaattctttaaaaaaaattgttgctgcagcctcccgcctcctctccggcagaggcgccggccggccgctaccgcctcccctcctcccgtccacgccggccattgccacctcccgcctcccctccgcactgccctccatgtcgtcacgcaggctgctgcccgtcgcccggacgaccggccctctaccgcgccctgcgccgcccggtcttcccgctccagcactccttctccagcgctcgttcctagccaataaggctcagctctcagcgaaggaaagagataaggaaaaaagaaatagagagaggagtttgtgtggacgggagaagaggataagtgctatggaggattatatactgcattttgatttttattcctggttagtaattggtgttactaaccgggactaaagatcccgatcgccctgacacggcttgacatggaatcaactgggactaaagatcacatagtcccattgtgcttttaaaccaagactaaaaatattctttagtcttggatttttaagcaatcgggactattgtggtttttggcaaccgaccaaggatggtttctccagtagtgcatgcgttaatccatcgctctgtttcgtgtgtcggggaggatgagttcccaacccctcctcctgaacagagatcactgaactacacacgacgttgaccttccatcttcacttgtcacatctacaaccctaatgtagtttaccgcttgcaacccaaaaatgttttcccgctgctctcgctgttgtcaagccttgcacagctcaaaacactggcaccatcacaaaagagcacattagtaccctcttatcagtgctggtttgacaaaacccgatactgatgatggttgatggttttgaaccccaaaaaataagttcttgctacatacatgcttcatctggcattgatgaggagacatcaccatggtcaccggcacacctcactttccctgtcccaacctttgcctctcaagtttatccaactgccaccttgtcttagcgcatctgtatcaccacaactctgtcactccttgctctagcaccatctacagtgacaccaaaggaagtatgcagcagaaaatgaacgtgaaccgattcctaggaaactgtgcgatgctggtactagtcccaggaagaacatgctagtacctgtggttaattgaggtacatcatataatataaatagttgatatcatataggaggtcacaccttcagaataacttcgaaaaagtaaacagtaagtagagaagtagcaacggaacttagtgtagctagaacccagttacaagcaactggttgggattagatatgaaacccaactcttcaacttcacttctttctagggagaggaaaaataaggttgagttcgtatgtactcagcaagtcatgaaaaatgtgagtatgcaagcttcgaaggagggctgggtttatttcataaatctttcttcaaaatacatttttttaaaacactaagcgtgggttgtttttataacatgactgtaaagaggctttcgcttcaaccctattcatgaattgatttgcaacaactaaagcagacgaagcaagttttagttgattgaaattactagtgaagtctattgctctgccatttgtctaaccaaagaaaatggctcatagtctaccatcaggcaactcttatctcttctctcctctggctgattctagtaaatggttctcattcccacaatccatttttacaaagcataggcaaagaaatctacacaagaggaaccattgcacatacacccatgaccatgggcgcaattgtccgaacagtttcatcctgcagaggtgcacgctttacccacatgactcgaacttacttcccacacctgtagatagggaaggttcatgtcaaggccttcccaaaacaattctagtgatacctcatgcacgatagtcaatccactctcaaacaagtagtatgcgaaccttctgcatcctcacccttctccagaattcggggatgtcacctcactgcacatcccgacatttctcacctattggcaaatgaggtatattgttctggctaattacatagccagccatgtcctataccactcatgtgatcgtactgtatttatgatcagtgtaattccacaaggaatcgatccttatatgcaaatatagaggattgcctccaataaggccgctttgcatcgtgtgttttcgaaaataacttctattttcacaaacattgcaacaccacgtgttgggattttaaaggttttgcaatctagttttacatgtcgacaagcaatgcttttgtgagtgggaccatcggcaatatgaccaagagcacagttaccgaggtaccatggggtggagtgacaaggcgtactggtatcaatcaacctataggattgatgcaactatcaggtaggtccatcggtttgtcacacaaaccaaggccagtcaatttagtgtgcacactagtaatgtaatttgcaaataaaacattttgtaaaatggggaccatatatggtcaagggtgacttgcctctgtcttcatcttcaaaatctcgagaacccgctccaaaaataatttccatcatcgaagactgcatgcaagatggagaaaataacacaaaatcttacaaagaaaatactatacttagcaactaatagtgccattggtagatctcattttttacaaaaatttggagacttgaacggggtcaagcggagatatggataaaaagatattgattttctggaatttttggaaaagattaatgaattttggaaaagagtattctcaagaatattctttttgtcagactggcatgtggggtccacatgtcagtgatagggtgagagggagggaggtaatgtggacttacgtatacggaagggggtaatgggctcggcccaaagaggagggaggcataatggactttgcaatgtggatcgggcttagtgggtcggcctcaccagctcaagcggagagatgctgcagcatgggggagggaggttaaggaggtggggcctagtgtcatcaacactttatttgaaatcacctttaaatggtctctagcccacatgtcaatgaggtacgaggagggattagcatggatgagcggtgtcagtgggatctgacgatggggtggcggtccaaattttgccgacgaatgacggcggtccgcgagcagtggcgaccaccatgagaataagtgggagtatgggagtccttatgcgggctcagatgtggatgggggtggacaacggtgacaaatggcaggttcagacatcagtgacggactactccagccgtgcgacgtaatgtcactggtggcaaccaaagaggtggcagaggtgggtgggctatggttcgggtggaggcggtgcacggagagagagagaggaaaaggaagaaaagaggctaaatggggctcatcgaatgagagggagcataagagaaggcggcaccactcttgttgacttaagcttgagctcttccagctagcatggggaggccagctagtgagcacactgggggaagagaagaggagagggtccacaggttcatagccataaggtggtgctaggcgacaagtaagaatggaggggtgcgcggcgtggattagtgcggctggctagtgggcccgtgggattggctgtgcggcggacgttcatgctgacatgggtgagcgggtgtgtgcgggggtacgatgtgcgctcctgggctggcctgtggccgtggggcggtggcggtgcgagggatcaagttgggccgaagaaggaaaggaggggacgtctctatagggaacattagcacttcataatttcaagagaatatatatgaagggtagttgaaggatttgaattgtggtttgaatcaaaatttgatatttgagctcacaaaaagttttggatttcattcaagaggcttttgactgggatttagaatatttttgagaaaaggtcttgatcttcagtataaattgaagaacaaaaggatagaaaaaaatggaaaattcaaggaggtttggatttgaaaatttgaaatttgaataggagatatttggtgggggggggcattgatcaggaagaggcttcagggacaaacttgatgagaccttggcatttgggtttttattagagtaagtttcataatggatcagtttttattaccttcattgcatgatggactaggtggtagcataacttttcactttgggctaggtattattaccataaattcacttaacactagtggcccatatgtcagtcaatgtccgtaacccttatctctctcgaacactggtggccaacaattaacagatactcaacctaatcatagctacccatcatcaacttctctcctgaagcagcttgttggatggaggtttagcttgagagattgcaggactaggagggttgagcttgatgcagtgacgggtgtgggcgagatcgaccgagtggcctgagctgacaaaggtcgagctcaaacttgagctccaatgcacaagcagggattggaggaggtcaagctagattggtggcacgatcttgatggtctgctcaccgccgatggtgagctcaagtgcggagcaacgctcaatgcagctccagtgcaaggtcgagcttgatgcagtgtagggcaggggcttgatcaccggccagcggcagctcactcaaggtcctggtctcccagagccttgctcatctatggtagcgaccttcagctagatggcaggtacacctttacagattgggtacaatacaactcaatggagaagagagttggagaagaacaccggttcaatgtgcaactattgtacagttaacaggcccaatgtgaaaatataggtttacctctagttcactgtgcaaccaatgtaaatattagtggtccaatatgtaattcacttcttttattaaaatagtttttaacagaccataaaatagggcatgcttaatagtttacaaatagtttacaaagggtgatttaattgagatctttggcacgcaaacgtagctacgctcagagaatctagatttttgacatagcagggttcgtgttaaaatagttttgtcaattgcatggaattcgaggtgttatagtctgcgggggtcagcgtcaaggagattggcatggacccgtatgacatcagcaccaacagggctggtgctaagctcgcggtccctttttattgaagttttctaacgcagtgtttcgaaataagttttcaaagtgaaacaatttgtcaaattttcggcctccttattacattcgtctgcaatatactacggagtatatgtccacagggtgttcg

SEQ ID NO: 1298 - DNA, 1469 bp, Oryza sativa
  Intron number 1 from transcript LOC_Os06g38940.2 (locus LO C_Os06g38940) derived from phytozome v7.0 (chr-ID Chr6; po s 23099377 to 23100845 reverse strand)
cgcgctcgatccgtccgctccccagtacgcccgaggtgaggcccgtccccttcgattggttccttccttcgctctcacttttcccttccccccagtctggaatcccggcgactgaccccccctgtttcgatctccgtgcgcgggggagcggtcgatccggtcggtgaatgcggccggggttagctttgggtcgccccgctgctggtggcttgtcgagagtggataggccctagggttcatgtgtgactttttgcggcgcgccaatccgtagtaagcatgaacacactgataggttctctcttttttttttgcgaagtttgttgagatttagaagagagtttaggttacaaatacgacattaatcccgcaagcagctgccccggggtaaaagattactagcatcccgtccaggacgagcctgactaccccactgataggttcaaccggcgtatggaacctcgaggataggttctctttgtgtatagaacacactgataggttctcttcgtgtatggattatccaacgggggatggattgagccttccattggacgtttggctctgtgtgctggttgctagattggatttagaatatgagagtcatgaatcgtgttgcattattatactagtgaaatggattgtttcttcactgagctatgtgtttcctacagtgatgcatcttctataagctatcgcgattgtttctttaacagattaagcgtggtagttgctatgttatgtatcaagagagaaggaaaccttcacgcatatatgtggttttaatggttaatgtttgcaatgttcttgaggcatacagttcgtacacatggagattctttaccgattgtttagaacaaccgagttagttcaagcaatgcatatataaagcttgaaatggaccttttatgttctgctctgtagtgggaacacatgcactgtgagtgatcttggattctgggatcaggcttacatgatcatttcgtttcctcccattcttttgatttcagtgtcaggaggatatgactatgttaggtcattttggcgtgttctaatgttgttattatgcagaatagaactctgcaacttgtcgttcagcattttcttgtcccaaacatatttcacttacctgtagcatctagacaatgttctaatcttttgatgtttttatctcagaaacaaggagaaaagttaaatacctaccgttgtatggtttaccattgtactctttctgtagcttcttgatcactaaatatttacatttacagtttctgaacctgtgttatgcttgctgcaattcaacgcagactgatttaatagcagttagactctatcatacatctttcaaaaaaaatttctttctggaagttttctcaatgaactacttacatatctgtggttttttgacttggtacagggcagtgatactctgctgcttagttgggtgcagtgtgcactacaagtctacaaca

SEQ ID NO: 1299 - DNA, 7431 bp, Oryza sativa
  Intron number 5 from transcript LOC_Os12g09089.1 (locus LO C_Os12g09089) derived from phytozome v7.0 (chr-ID Chr12; p os 4747476 to 4754906 reverse strand)
aaaaaagtccgtgaagacttctgggtcccatggtcatatcacatggtttagattatcgtatctacctccttttttgtggtacaatcaatagttatctttcttaattaaaattgaaatgcctctaatcattttcttctctgtgtgtcatataaaatatgttccaatggtaactactgcttatactttggctcgatacctatatccaagtttccttggttatatggatccatgacacagttattttaatatgacttgggtatatatatgatatagtttagttaatgactcagtcatgccacatatggagcatgaagtctgaattctatgtggagatataattaagcatatcagagaaatgttccttccatcatgtattacatgtcattctgaaaaaaaaccagtgagctttttatgaaatgaatacacattgttgcttgtgtttactagtatgggtctataccctagattttactcttgacaataactaatttattgtttctctcacttttagttttgcaatggtatctatgttaagggcgttagtctctttatgctagattatttcaagcgtttattacttgttactagatttcatcaaacatggtcacatgggcagcaagctgttttttgtcgagctctcttgccaaattcccaaacggcattttcttcagataccatacttttcttatctaggttgacgtaggtcaatgcttttaccaatagtgaattgcgataagatgatggctagattaatgtcaaccgctgcatatttcaaagtataatgtatcagtgaaccaaagactgttatcagcagaaggggatgcaaaatagaagtgatgtttgttgtgttagaagttatttgcctcagtcaatctttaaggccatcatacctcgaagaagtctatatttaggatcatggttgccttccctttttggggggttttggctcaacttatatgatgtagtttacctacctaagttgttcatctgaatttgtttgcctttggacacatgaatgatgagtatttcacatttcctatccttgtgaactgttcatgtggaagtggaacttgttcttacataccttttgtgagcttgattagaaagtgcttctcacttatggggtttaaattttaattattaagtctgatattattctgaccgctcctaaaatattttgggactgcgtgtcctgagaccatagtttcaatctcatgtcgtattatagagagtgagcttagtcacagacttggcaggtactaggttttcaccattgtacatctcaatagatctagtggtcagtcaggaacatatttggccattttagaagtctacaggtaatattaacctgtatagctttacatatgcatgagcatatcaccttgtgctccctgaggtcagattaccacggtggctgcaactctgatccacgtgccactttgctacctgaggtcagattaccagagtggccacttcgctacttgtcaagttggccttgtcctgtactggattgtctactgggacatccaacttcaacatgtattagcagttctgctttctggaagtggagttttgataccagcagtttgtgtactaccaaaacctgaggttaatatttgagttgctgctactagcctttttcggggttcatggtggaacgttctaggtgatgttaagctgtacatagtgaagcatcactgttgctaaatttgccctttaccttgtactcttggaatgatgacgggcaaaataaattcttgcaaagtgtaggtggaactatgcatgactatcatcaaccaggtgttagagatgcataaagtggttccttctgagttacatgcctaaattgcaactagatgaacctgcctcctgttctaaatgtgatatcttcaagatgagcactatggacgctgattggcattttggtccattttctgtattttggaacctgggcattgctgatcgactaccggaaaggtctgcataaccatgtttggttcaaatttgcggagtgtcatttgcctaagcctggaaagaccatatatctacaaaatagtgtatcatgcctgaactgtatgaactctttagctctggaacgctgcctcaataaggggaaatgatatcagtggttctgtatggttgcagccaatggaaatttggtgtgctctgcctgtctgcaatagacttcttaaagcatgctgcagatctgaatacaaggtggctgaagaggttaccttccaatttttgggctacatgggtgcaccctttaacatacaaggtccatgtaaagagcttatggatattaagttgtgttggtggttcatggggtatagcttttgtggagaacaggaaatgataataaaattgatcgaattacagagaccgttctgatgttttcaaatgacacagacaagctggtgatgacttggcaaccatgaggcaagtagtttcttcatccacagcagaagttgcactaagtttttatctgttctattcttataatgcagcttccttaacctctagtaaaatgttagcttgcatgctcttaggatatttgagtcagctctgctgctctagagtaacccatatcgtatgctagatatcattttccttctgagaattggtgattttagatcctgtaccattggaaatttagaaccaagcctatacttaactgttcttctggttgataccttttggaacttagtgaagcagttaatatgccatattccaagaaaccttgttggtgatgaggcttctccttcagatggttatccccatatatgttgatttattgccatgaataagcttagctgaatgcggcatttgtgcctttaggtaacatatgattaatgttttggcaagaaatatgtccatatgacccctagtctacccaacacttccaactataaaaccactcatctgacattttgtattgcttaagtggtgtgataggtaataggttgatggtttttccatgtgttaacaaggttgccacattagaataatgatctggtgggttttgagctagtggtaacatacccaacatatggccctacgagctaggggtgctgggtggaagggagagaagcagtgagataattgtgctcttgtctagtgaacatgcgggagccccaaataatggaatgagttagtgaaggggtggttttatcagtcgccttgctggtgatggcatcatagaaggggcaaagtaaggcaccatgcgagtgccgcagtgcttagatgtaagtgatgggtgatagaccatgcacttgccttggatagtgaggagtcatttcgtcatacaatgtatgggaggcattgttgattgtgttctcgaggacaacaaatcttgagcagtcatcccgtacctaatgtactggtttagtagggaagccttttgttaaggtgcccttaagaaaggggtcgtcccaaacttgtggagtgcgatggggacttggatatagattgtgtgctgagtgaggagctttgcagagcgtaatctggtagatgtattccactgcaagatattaagtgttgtccgtactgaagataggttagattacattaggttagttctgatggtgggacatgctgagcgtagcatggggagatatcctgaaagtgttggatccggttctaccatcattggaaaaggcaggtgtttgaaaaatcaaattccaggacagcaaaccactaagagatgatgacacaaacttcaatagatttgtactgtgatatccaaacgatagagccatgcattggcagtggggagggagggataaagatgattggagacttagctagggagaaagatgatggccacacagtgctatctgctggagctgaggaaaaatttagtggtgtcgcattcctatgaaagagaaagtatgattgaaggaatgacaacaatatagcggcgttcgagaatgcagtttgatgcaagtaattggactcactaggtagaagatgatgacaaggcgaagccgtctgctggaattgagaagatggtagtggcatgacattcctgtgggcatgatcatatttgattacgtaaaagctagagggtgtttgagaatgcagtttgacacgatagatttggaaacatgctcactgtggtgtgcggtgtccatagtgtcgatgatgcttgtaaacctcgtgagggcatggggctttgagtgatgaatgttattccggaaatcggtgcatggcactctcctctatcttctcaagtccttaaccgcctccctaataaaaaggagacagtaaattccaaaatagactaaatatagtctgaacgttcctaaaagtccctcaaatgagataatataataaagaacccaatgtagacagtatgcaagggtgctcctaagaatccaaaagaggttgctcagaagagatagatgtcgtgtaaagcctttctttttacgtgacaggaaaaattgactatggtttcccctttttgtttgcaaacaattatgggaatagaatagaaagcagctaacttttcatggttaatgctgttgcttgttttgtttcactagtttgagagaaacattatggtactctacatctgtgtgaactgtgttgctaaacagaactactgaagaaaacatggcacttctttgggaaaaaaaatgctgttaaacttgtcatgaaaatggtagtcacatgtttgttataatttcacacatggttggactttttaaaaaatgtactgttagaaagcagcatcctttattgaagcagagttttgttgaattcgtggtagggtttttgaaatgttagtccatgatctcaagaatattatgatttggatgtatatgtagcttagatttattttattcaaattctagataatagatacaacaattgaatcaactaagggtataagaccaaatttcctgcaatgttttgtttgaagattactaatctgtatctcgagaattattcttctaatttcaaatttctgctggcttaaaaactggagtgatatccttgctgcatctccaaaacttctactggaactacattggataacatgaaatctcagtgtaccgatttatcttgttatgtgataaacctgggtacatggtacagtgcagttaggaaatggaagcggaacagctttgatgaaattgagactataatctagcatgtaacctttgatctaaatccatggagaggatcaacttaatacaaactctttttttgcatgtataaattgcacattgttttcttcctgaacattttagctgcatatgagttccagtttgtttttaccctactcgtctcccttctgtttattatcagattgatgcctattgacatgtttatgttaagtgattaagtggtttctgttatattcatgagtaatcaaagtataatttctgtagtatgtgctgcttttctcctattacaatagcttcttgtttactatttacacaactgcttatgcctttctgttttccaataaatgtctaacgctgtttttgaccatgcaggttgaaatcattagttggtctgtccctctgactgaagatatattgcattaatgagaagacagggacatctgcttgaagaaaacagtaatacggggagctgctgatgccgaatcttctctagcagatcagttatgcttctaggcatgtgctctttggacaagcaacagatcggcatatctaaactttctgatctcaagacacgaaaatgttccatcaactggagacacgagcaaaatgttaaatcaaccaggagaatgcataagcatctacagtattaatgcttgatggagatgaatgtgacaccttcggatgattgattcataagcaggcattgttcttttgggagaaaggatagtagatattgattatgtactacggagctgtagaaactttcagctgccagcttgtcaagattataacaagttgctctcatcgtgtgctgcattcaggaaagatgtgaggcaggaactattataaggttgaactgaaagcctttcttaactctgtttgatcgaggccatgttgtgtagcggtattgatgatgatggttcttatggaaaacgaagagactaggacaagttccatcaaccttcttgataacaagcggatactgtacctgcttcattttggttaagagtgttgcttgaaatgaagatctcccaggtccccatgtgatatcacatcttctctgaagcttgtatatataactgaaatggacttgtgtcctgaaccgaacaattgtcagcatcatgcccaagcagaataaacagattggaggaaaaacaagagttcgaggtggaaggaatctgactatgacaagatgggcctacacctacctagtggctcaagtccaacatctcactgatgtataaggttcaaaacccatcgtaaaccacaggcacgtgacattcttcatccaaaggaaaccaagagttccccagccccaggactgcagataccactttccatgcgttgtttgtccctccctgcatcacatgcaatctgacatgtttctggggttgattccggtatgtggactccattcaatgactgtttgtttcctgaatcgactgcacaattgtggttgatggatgattgccagaacaagccgttgatgaggattcttgtgggcatactgatggactggtatttgcattgcatattgcatatggttcctagtagtaggaggtttgtgtgaatgttttgatcggtgaggctgagtgaacagtagagtgttggtaatcctacggctttccctcattttatgatgggttgaggtatggtcgagtttccattcgagtgagttttcttttttctgggtgacgtactgacttagatcagtttcatcgtgtttagttccaaaataattcctcaaactttcaactttttcatcacattaaaacttttctacatacacaaacttccaacttttctgtcacatcgtttcaatttcaaccaaacttacaatttttatgtgaactaaacacagccaaagtcgtgccaagtaaattagcaaacgttcacctgcgatgcatcttgattatacaaacagacgcttcgtcttgcttcccagaaatgaaagaactgccgttcgatgtttttgccgatatgaccatgagaatttcattatcaaattgcacgaacggtttccatcgttttcttttggtactcattatttgtacttgttttcttggtacctagtagtgatttcagaaccctaggttaggtgttaaccatgcatcttagactagtgtatcctgccggccggccaaagtcatttgcttttttttactctccagtgttgcactgaaaatataagagattattgcatcgagttgccatgtgtttgtccatatcgtcgcctctaacactcaaatcgtcccgtgcctcaggcctcatctataaaatcccttgtgcattctccaac

SEQ ID NO: 1300 - DNA, 947 bp, Oryza sativa
  Intron number 16 from transcript LOC_Os10g10190.1 (locus L OC_Os10g10190) derived from phytozome v7.0 (chr-ID Chr10; pos 5614987 to 5615933 reverse strand)
aggtttgcagtttgcatcctgtaggctttcaattaagtcatgttgtgcttgtaggtgctaattcttttggtttctttggaacccatcatagcacttgaagagttgatcagttgaacgaattctgcttccactccttccgcttatagtctttataataacatctacaaactcaattcttgatctctttcttaaataaaaaaactaatcaaacacaaaaaacaatctggtatttcttttggctgtaggtagttctttgtgtattcatatgatgccaattatatgggacactactataaatcaggcaccagattttctctcaaaaatcgggctgtcaaatgtttcagttgaccaccggtgaaacgctaagttgtacatagtgaaacaaaaaaaatgtctctgtaacatttacaaattttgtgaaacacctgtcgaaacatttaaccatcacgtatgaaacattgaatttcaacaattgaacataagtttttctttcatcagaatataatcatgtgatatctccttgtaaaggtttaattaccacgaatacaacggtatatgggttgtagattggagaaataatttaggtgagaaatcgttttaagctagctaaaaagtttgcatgcttgcatgcaagaaatatggagaagagagtaaactgcttgcatgtaggagaggagacaggctagtgcatgcacatgcagtggctggacagtttggacatgcagcagccgggcaacagcatgcccaatctttgtggctttgatcgggcgcctgagcagaagcattgttgaactatatgttagacttttatagctatgataatattttttgctgattaattatcttatccctcttagagcatatgaaacacactgatattttagtttgctttgaattttatgtggtattcagaattcagtagatattggctctgaaggtgcacttga

SEQ ID NO: 1301 - DNA, 1084 bp, Oryza sativa
  Intron number 6 from transcript LOC_Os06g32730.1 (locus LO C_Os06g32730) derived from phytozome v7.0 (chr-ID Chr6; po s 19027867 to 19028950)
tggtcccagataagatagtacatcacattgctcaggtaatcatgcaattaacactgggaccatccatcaccaaactgttttgctgttaatgatggctagaattttttttttgtggttaatactattatgtagcagtttataagatgacatggtgacagtagagtacaaaatgtatcacaattatgtcatcgattagcagctgctatcaaaagaaaacaaataaaatatctgaactaaagatttaacaaatattttatctgggtatgtttgatcagaattccgcagttctggttaatttctctctagactacaaattaaccaccaatgttaagttcatacaaaataaaacaattcaatttattaatgattttaaaattatgattagtaataactaaagaaatgcacatcttatagattatattctgtatataatgtctgatgttatacttttattctgttcctttgtattttatcatttaatagttctgagagttaaaattaataatttcatgtttttcttcattaaataagtatggtagctaggattaataaatacgaaattgtaaagagttaattttggattcaattattatagctcttctatgattcaataattttaaacattggaaataataaataccaagttttactcgtgtttagttttcaattctagtacttccttaattccataatttcaagattagctcaatgtccatgacatgcactctcttaatatataccatttcagttctgaccctccttggtatatggttaggttcataattattttctccaacaaatgtaaaaagttatatggactgcgccgaattactttagctatatctactgtatgaaaaaaaactaatggtgttggagcttgtgagtattatttttgtagtgatattttcttgtgttggtagctgactatggataaatatagtccactctcttgctctattagatgcaactaggcataacttccttttcatctatagctagatttttttctacttttactctgacatgttatcctttcaactcttcttcaggcagtgacggattgtgaaaattttcactttgaacc

SEQ ID NO: 1302 - DNA, 2781 bp, Oryza sativa
  Intron number 1 from transcript LOC_Os11g18730.1 (locus LO C_Os11g18730) derived from phytozome v7.0 (chr-ID Chr11; p os 10607245 to 10610025 reverse strand)
ccttcgacgaccgcctctggttccgcatcggccaggtacgtgtatgcctagctaagggtgtaaatggttaacccgagaacccacttagcttagacgttaaaaataaatccgtgaattcactaaaagatcaaaatatacgggttcacggtttattttaacctacaaataggttcgtggattaaccatttacaaccctacagtcttgctaccatcgtattactaacttatcaccacgacgacgatgagtatacatgttagtatgtatatcggtaattttaccatttttaataaggtactagctggagaagtaatatttttgttatgtaaacttaggtacatgtaaaattcatagctcgaagtatttttttcgaggaccatatgatttttcatgcgtataaacttcgtgaacgtatatatttatgtacttgcgtgtacttatacatgtactgtacgtagagcgcctacttgttagggactccgtatacgtacatcgttgggacaagtagacgaactcactgtaggtagtagtacattgtacagacactttacagctagactcgagtaacgtacacgtatgttgcaaattttgtgtaataagacattaaattaaacacacgggacctaatggagatatataaaattattcccgattttcttgttttaaaatacgtgtatatgcatatactgtatttatgtgtaaaatttgtatacgtgtatatacatatactatacattttaaaatacgtgtatactacatatactgcattatccagggaagaaagaattaagaggcggaaaaaaagaaaggaaatatgcgtgctgtggtgagcccactttaatttggattatctgccaactatttgggcagtacatgcctgccgttgctgaaaatgtagtcaagataaacactctggacattgataaacatgcaggacagctcaaagtccttaatccatatcgactgtgcacgatcgaatatcatctgttaaccccactttgttgatcgatcaggtgaggttgaggtataattctcctgggctgctgggcccacatgtcactcactgtaattgtttccaatcgtttcgttactagtatttatcagctataggagcatatgcttgttaattatggcaatgcaaatcgtatttgcgatagacaatccaagtaaaatatatatatatatataatcccaaaaaaatatatatcaaggcgtggtaaataaaatacagtatcaatttttgtttgcgactgaattcggcaagataaagttggcatgcatgcatgcctggccattaatttcatatatgtgatcataaatggtccaggccagaagagacagagtagagaggcatcaaggggattgtacataatagtgacatatatatagtggtaggaaatgatataatatttttttataatgaaaaagtggatatatatcttagagtatctgatttggggaaacttggagatgctcacttaagtgggacaagatcaaatatatataatagtatgccttaattttctttttaccaatatgctacgtttaaataacaatgttccaagctaaaataagcgtgttagttagataattaagcttatcctgccgatatatatgtaaaaggacaaattaaatcagttggtggtgagaataatttaaaatctgaccaacacatacattctgctttccagcaacacacacatacattgtttgcaatcaaggtataagagctatataggacggcataagaatcaggaccctacactgcacatcatatagaagggccagtaaacagagtgaagacgacaacaggtgcatgcaaagcacaagcacacacatgattggttgttcagttctgacttgttaaccactagatgccacataacaatatgtctggttgttgcaaagcactagcaatgacctgaggcggcgttaaccgttacaaaggctagctatagatatagttaggtcaggcaggccggacggctagcttttctgtacccaactaccctgctaagcatgtagagtacaattatgttgattaatgtctggcctctgcttaatttacccaacttttgactagttatcaactaattatagctgctgttatagtggtttgcttaatctaacagctagcatgcaagcatgatgaggccatatacatggatctagatcttgttttggccatccatcgattaaatgatcttgttatgcatgccggctgtcatactagtttcttcaagtaattatgccggctgtcgtgactgtgtacatcatcaacagtacatgcacacattaatcagccagacgtcgctgtctttgtcgtctgttatgacagtaaacactagtgttttgtggcctccatgatcgctggatcataccataatggttaggtacacttgacttggtgcgaaaaaagtgatactatctagcttagctagctcccatgtgcattatgcatgctggatatgcttggttagttagactccaccaaacgagcgtgcaaccgaagcatgtcctatcagttggtaaccctagctagtgcatactctcctttctagtactcactaactttgaaggaaaaaaaactcagaatccctgactatatgactactaacgataaattgttcttgtctagatttatagtataagcacgtgtcacatctcatatttttttattttgcaacggaggaagtacctataagtgatggtgataataatgataattataagcgtgattatgtgcaggcgatcggcacggaggccagggccttgtacaacct

SEQ ID NO: 1303 - DNA, 2607 bp, Oryza sativa
  Intron number 1 from transcript LOC_Os04g42420.1 (locus LO C_Os04g42420) derived from phytozome v7.0 (chr-ID Chr4; po s 24917721 to 24920327)
ccgtactgggtggtacgtagcctcccgccctcgccctttcagtgattgtgtgctcgtcttggcttttgcttgtttgcgtggggatttcttgctgtttttgcctgatttgagctcctcatcggggaggagattgagggatgatgatgaacagttttttattgagggacctaaaattttagcacatacgaagtagctctcaaattcccaattttatctttttttaaaaaaaaagcgattattgtccttttggagcgtaatttctggatatggcttggttgactgaacgaatgtcgaaggtgatgatcgactagcggcatctgtagaatgttgaaagatgtgcgagttttttaactgtatgattgacaacaacgccggtagatattttcctagaataagcgtgaaaccaaatgtggcatatgtagttctttacttcctgccattcggtagaacatgtcagactttggtccattctttaggtgaataattgttgactatttaaacaatcatgcttgcaaatggggcacaattggttccggtactgagagccacagcaaacctagaactttaatttcgcaaatctgccaactcgagctggtgacctggtgtattcgcatccctacaacttcttatatagttttaagtgttggtgacagattttggcaagttaatgccctaaagttattttcaagaagcagtaaggctgactttaatcagttcaaaattctggttttagtaaattgcataaaaatatcacatgtaaagacatttactgttcagttttacatgagttttctgttgcagcagcaacagaaaactatattatctgtgtgtgccacatatataaagattatgccataaatgaggaggtcaaaatataagtagtaaggcatgcttagtagtgctatctaggttgtctcttatgattgccatgttatatatattaaaaaaaaagtaggtggcagagaaagggggtgaagtgagagaacgtgtcatctcttatacaagagacgatatgagagaggacaccgacacacaagactgagagttctgaggtgagtatgcgattaaaagaaggggaattataatggcatttatgatagagacaaactgttagagatcatataggttgtacgtgaggttattcttgaatcttgatgagtcagatttgtaggagattacattaggggtctctttattttacatggtctaagttcgtattacttgattgaagcattggctgacacccaaatacccaatacaacatgattgagattcctgaatgtgatggttgctcaacttttggtgattttcaactttgaatagccatctgacctgcaacgcctggggatgtcattcattggtgtttgtgaccactggaaggttattgctgaagttggtatgaacacaatttttgttgggactttttccattacaaaatacattgacaatgtaaaagcaagccaaagaaaaacagtgaagttcatgcatccttagctttatacacttactggtaaacatgttctggtcttgtgttgtgtagctgtttattattattatatttgcttgtgtgttgcttttttgtgaccctgaatgtctaaactctaaaatgccagcccattctgtatatattaatgttttcacaatttagagacatacattagacctactgtattgcttttttgcattcgtatcgtattgttttagggaaaaaatgtttgttgttttgagccaagatttaatcaatccaacaagatattggtattacactgtaactttttaatcactgtaaataattttttgccaaaatgatatggaattcctagtcgacatttgatactttttttaagttcagagctcactagaatttccatagaaacaccagtcactttacaatcagtgtcttcatcttcaaaatctcagccgctgaatgaacttcttggacaaaattagtccctttttagtttcatgatcgtcctgatatgttcaacatactcaattcatgaatcaagatactccattaaccgcatagtttttccaacaaagtagaattgtctcacaaagaagccactattaaggcacttattttctttgaatgttgcaagaatttcctgtaattgtaaatgttctgaatctccaaagatccaaaaaaatcgatcatcatgtctcttttccctttttatgtactagtaaatgtaaatcaggcgagcagtacacgtgcatgctatccttatggagagatctgataaagaaaataaattatgcacacgcttagaaggcaattggttgtttaccataaatattttatctgtaatgttggcaagtacgaaaatgctgactagtgttacgtgcatagaacttttatatctgtaatgttggcaagtacgaaaatgctgactaatgttggcaagtacgaaaatgctgactagtgttaaatgctgactagcttcctaaatcatggaaccgcatcttggtaaaattctgtctcaaatgcctgatgagttgtccatatctgatatttcttgctcatgttgtagctcatactttcaagcgagtctttttatatttagcatattttgttggatgcctcttgcagttgtgcatagcctt

SEQ ID NO: 1304 - DNA, 460 bp, Oryza sativa
  Intron number 4 from transcript LOC_Os03g63710.2 (locus LO C_Os03g63710) derived from phytozome v7.0 (chr-ID Chr3; po s 35969315 to 35969774 reverse strand)
aaaagaaaacaagcacagctgccacaaagacccaggtaaatattgaaccaatgtttgtgctatgtcaataagtaaataataaatagattgacttttctgatcaatacataagtttgcaaagtttactttctatgataatgtaaacactgcactagattttgctgcatccactagcttgacttgttttgatttcatgatgtcatttccccttcctttatttgctgcatgcttgcattctgctgtttaatcatcagtgaacatctacaaatttcacagaataattaccttttgaactttggaaaagtcagttctctctatgcaagctgttgttattgctagcatgttcttattatatcaaatagttttccgcttgtagatttttgttatgttaataagtactgacactggacgtgaatacctttcagattcaggagactgacgaagcaaggaaaaaattctc

SEQ ID NO: 1305 - DNA, 6677 bp, Oryza sativa
  Intron number 1 from transcript LOC_Os12g29340.1 (locus LO C_Os12g29340) derived from phytozome v7.0 (chr-ID Chr12; p os 17400913 to 17407589 reverse strand)
acaacgccaagaagcgcctcaagcgcctctggcaggtaaatcaatccccccatggccgcgccctcccccatcctctttcatctccgttcacgtttacccccatgcgaaccccacccgcgtggatgaacgtttcttgcgggggggggggcgttctggtgatctgctcccaacgattctgttattttggtgcccagtttaaattcaatttcagtgattccgtttggtgtaatctaggattggtaacattttgggtagtttgattgtgtctagtagtatataattggtatggacatgcacttgattccggaagtacttgtttgtgatttttaatttagtcatttaaaggagaagggttgattggggatgaacagcctcagtggtgaaaacgggtggatgttaaattggacctcgtattcggacggaggcaaccattcggtttttgttcctttcatataccacctccaatgtcaaattcacgtgcataagtatgcagttcgataggatacttgatgtagattaatcggtagtatggtagtagaagttagggcattggcattgcaatttggaacttgttaatttcatacgaaagggcttacctgctcttagaggagtggatttttttaaaaaaaatttctctgggaataatcctatatacctaacaggaaagctgcttgcttgagaatgttgaatgtagcatcatcatatttacttcttagtaataggaacaaattggttgtttgtgctaactgaacctcataccttgagtttgctggtagtcgggtaatccaattcaaatcaaactctaattttggagaaaatctaagtccagttcattattagagaaaaatacaaacaaaaacatgcaggagccctgacctctcccctcaataccattcccatctgttatatgcccattaatccacattgtgtgtttctcatcaaggctaatcttcacttgtgtgatctttgccttgcttgtgggttcaaatcatccatgtgagttctctttgctgctacacacccctgttgcttttgcactttgacagtgcaaggtgttgagtttcctgggctatgacacagtaaagttgtaggcgcctgggccctgggttgtaataattagtaaaggactgcatggcaactggcaaaagaaatccttgttacattaggtgtgcagtagcctgaaaaatgaggaaggatgtgttcatcttgttgtggattttattacccattttcatggatatcaattttcttcctttgatactatccatggacttaatttgttaatagtggaagtagattattgggcaaaggcagactcgggtaatttcaggtctttgagggcctctgacctgatcatgagaaagtaatgattatggaagctttggacaattttttaatacttctataaaaatccaagtttggttgcataggtgaaaatttgtgctgcttagaattagaagtttattattgtgacaatttattgccgtctttgacagaagtcatgcattgcataatacctttgaaagtggttgcattaactttagtctttaaagacatatatatatattaagttgtgtagttgctgaaagaaattaaacaaggtttactttagcaaagttactttggctgattttgcatgttaattcagggtacaaggctcaaaataacaaccaattgtctgtatagccctgacagaactttgaatgccactttggggatgatcttaacaactttcttgttcattaacttctatcaggaaacagctctcaaaaactgtaaagcattatgctgaccccatattgatacatcaaaaagttatcttcctggctccaaattatgaaatcacctccactaatatacaacaaaaaattataatcaagattactaactagggtaagggaatttgaaccgataccaacaaaagcaaacagtggattctctttggagtcgtttccttgtagtgtttgtagttaatgagttttcaccctcataagcatgctcagtaaggaaaagtacaaagagacaaaactaaagagtttctacacatatatttagcttgagaaccattgatgtggagagggaaaataaaagtaagccatattctgaagagtctataggttcggacattcaatggtgtaccttctcatttgtgatttattctgaagagtggaaaatgtgcataagatgaaaagataataagacctcatgcatttataaaaaaaaaatgataagtctcctagattacagatcatttccctctattagaacatacctttttgaccacaaccacctgtcaatcccagaacctcagatctcaagctcaaccatacgaggtacaatatgatatataaccatgttaaggatatatgcctgtatctaaatattcactgtgtacatagcaactaatgcaggtttgttccatgcaaaatttgtctacgcaaacttcagtacttttgagtttgataagttatatatcttagtgttacatcagaacccagtaccacctaactcctcagagtgctttctgtatgacattggttgcaatgatcttttttctgctggtaggtcaaattttatctagagcctacattagtattagtgagactcatgaagtgtcaacatgctgatattcaggagtgaataacaggaatcaattgacactctaaaagggtggaaactggaaagagtttctggtttcatcatcaatacctaatgatataaaggctagtgaatttcttatgcgtatttattgaacaggatgaggatcaaaatatgcaaataaggaaggggggtctttttaattgcatagggctttctagagttactaagtacagaactttgcatgcactgtgaagattgtcgatcatcagagagagatctaattgattttcttaggcaggaggtaggtaggatgcagttgatggtatcctatgctgagataccacagtcagttaattacaaagtctgtgactagttgcactcaaattgttgaaaaaaatatctttgctactgcttcttagtgcatcaatatgctgacccatattgatgcacacatttcgtgcatgtgtgcatcacttgagccttttgatcaccaacaacttgttacttttgatcaccaaaatgtggtgccataattttagcaatccctcgatttttgttcttttggaatgaagggcaaatttcatataccacctccaatgtcagattcacgcgcataagtatgcagttggataggatacttgatgtagattgaccggtagtctggtagtagaaagttagggcattggaatttggaacttgttaatttcatagggaagggtttacctgctcttagaggagtgagattttatttttatggaatttctccgggagttctacatacctaacaggacagctacttgccaatgttcttgtagcatcatcaaattttacttcttaactgggaacgaattagatatttgtagtaactgggcctaatgccccaagtttggtggcagtaatacaattcaaatcatactatatggaaaataaactgagtccagtttatgagagaaaaataagaataaaaaaaagacatgcagaagccctgacctctcccctcaggccctcatcctatccacaatgcgtgttcctcatcaagtctctagaccctacctctgcttctcatcttcacttgtgtgatcattgcgttgattatgagttcaaaccatcatgtgagtatgtgacctgttccagtttcatggatattagtttttaatactacccccatggccccatccaatgcatgatgctggttagttcaattttgaactaaccaacgtcaaacaaaaagaaatggagggagtagtagattagtgggcagacttggggacccctgacttctagaatgtattaaaatccaagtttggttgcatgcattgcaaatgaaccattgaaagtgcttgcattaagatttaactttcgtctttaaaaacatatattaagttgcgtagttgctgaaagaaattaatcaaggttgctttggcaaatttactttggttgatttcgcgtgttatttcagggtacaaggctcaaataccaattgtttgtgtagcaccaagcagaacttttagtcccactttggggatgatcttaacaactttcatgttaattaattttcatggctacatcaggaaacggccctaaaaaatgtgaagcattatgctgacccccatattaatgtatcaaaaagttatctttctacctccaaattatgaaatcacctccactaatatacaataaaaaaattaatcaagattactaactagggttagggaatttgaactgactcaaacaaaagcaaacagcaaaatctctttggagtcgttttcatgtagtgtttgtagcttataagtctttaccctcataatgctcagtaaggaaaagtacaaaagagacaaaactcaagagtttctagtttctacacctatattaagctaggaagtccctagaaatctcaccctcttgagaagagtctacatggattcagacattcactggtgtaccttctcatctacgatttattctgaagagtagaaaatgtgaataagatgaacatataataagacctcacaaggtatgctgcattgctgcatttataaaacactgatagtctcagacacagaccattcctaaatcaaaatgtagctatttgaccacacttcctgtcattcccagaaccttaggcctcagccatatgaggtgcaatatgatataaccatgttaaggatatatgcctatatctaaatattcattgtttacaaagcaaataatgcaggtttgttccatgcaaaagatggaataaattgacactttaaaagggtggaaagagtttctgatttcatcagcaatacctaaagatatgaaggctagtgaattgtaatgtgttattgattgaacagaatgaagagtaacatgcaaatagggaagtgggttcttttttattgcacatgactttctagagttagtagagtattaactttacatgcactgtaaagatatggatgtacttgatttgctctaggcaggaggtaggtaggatgcagggaaggcacttgattgtatcctatgctgagataccacggtcagttataaagtctgtgaccagttgcactcaagtgttgaaaaaattatctttgctactgcttcttagtatatacatttggtgcatggagtgcatcacttgattcttttgatcaccaccaacttgtcacttgaaccaacattttatcctttttctgtactcacctagtcacctttcttcctctctgtgaagtttggtcacataaacaactatactgccaatataattaattttgtactgttcttattcagtttgttggatgcagttaatacttaatacccttcactgagactaactttagtgaagcatatggaatcacaacatgctagttgaactatccagatcttccgtcattactccctaatgaataccttaagtaattcatgagttcaacttagcagttctgtttgttggtgcagccacaattacagtgttatttgtttggacgatcatcactggtatttatcttgttcagtttatatgcatgattgaagatcattttagctttgagaactcaaattatttgcataatttcacattgcttgttatttgctcacatttacaaagttaccatgttccctcatttgactattttgcaatttactcatgatacattatatctgtattatcccaactaactattactcagtggttaattcaaatgggatgcacaagtgcattgttcacttttgtctataagttttgtttcgaagtatgatttggagtttaaatctatgatttgtttagattattttattccatccaaaaagaacatatcaaacgaggtgtagcaaaaaccaagaataaataaaagaaactctttcctcttaagctttttccctgaaattttgtcgggcaataatatgctatgatttgttagaagatagtttttattagatacttcattttctgcaacagtaacagttcaaatgaggtggagcaagagccctaggatagactaaaagaacattaatttgctgttattattaattggtatcagctagacaattaatttgcaaagtcctgaaccaaggatctgcaatagaacctcaaaatccccacttaactcctaaatgattatttatttccacattccatccaagttgtgcagtttatcccattgaatttgagccaatatttgttggatggcggttatgaggctcttttactatgttttggttaaaaatttgtgattgcgtgcacttccataatgataatgcactgtcctttgatgcgaaagataaggcaaaatagcgttcacgggttgcatctctatcgttttcactttgaactctattggccagttatcacttaaccttatagtattctactattcttgcatttcatattcccagatcagatgagtgaaatgctaatgactgtttgctacgtttttgttttcagaatgaggcagttataagggcttgtggtgaagcagaatcgtcgtcgtcgtcaacatcaaacaccgcatcggcctctgggaaacaacagtagatcccaaagtcaatctgatgacatgcacacaggtttaaatgcaatttgaaaaggcctctgc

SEQ ID NO: 1306 - DNA, 677 bp, Oryza sativa
  Intron number 4 from transcript LOC_Os11g21990.1 (locus LO C_Os11g21990) derived from phytozome v7.0 (chr-ID Chr11; p os 12173431 to 12174107 reverse strand)
tcaacttctcacgttacggtgacaccttttttgaggtatttccatagaattatatgtatgtagaattctcttggatgttgcatttgtggttatgacctttaatagtctacatctatatttatagttaactaagatattattacagttctcttctagcttatattgtaattagtttggagttttagcttgcttgcttgcttggatgctgtactctgtggcaccaaactgccatttgtcaagctatttttatactattagctaaatgccggtgctttgcaatggattaaacaaaatgtattaatgtgttacggaatattcatcttgaactatttttttatgtggctatccatttagttttgatcctttttaatattaagaagttcaagaagaggtaacatgcaaacatttaaaatgggagtaggtgccaccaccactacctgattaaaagagtatagatacacagttatttttgagctatttgtgatttaattcttttgtgtttattttgaacaaaagtaaaactacaaatagtattgtgcctttgaaagatgtgcaaaatgaattaagtactggagtttcaatttccttgaataacccttgttgtcaacgaacacttaaatgtaaatatttgaaaaactgcaggttgtattcattggagggcgcactcagcctggcac

SEQ ID NO: 1307 - DNA, 1446 bp, Oryza sativa
  Intron number 3 from transcript LOC_Os06g11850.1 (locus LO C_Os06g11850) derived from phytozome v7.0 (chr-ID Chr6; po s 6295276 to 6296721 reverse strand)
tggaggtctgtccaaattcgtagtaatgtgaatatgtcatattagattacttcttccttcatcccagaatataacaacctagttagtatcagataagacgtacttcctccgtcccagtaaacatgtcattctaccgatcgatccgtgtctcatactctagattgctatatcctagtatttgattctacattgctatattccattaaaaaaccaacctaggtaaggatgtgacacttcataatacaacgaatctagatatacttatgtctaaaattatcgtactatgaagtgttctatctgtgccaaggttggtttttttagacggagtatattttaagatgggtattaagagcaactaggaaggtagcccgcgcatatgcgcgggcatcttatttaatatcgcttgaatttttattttgaaaatttatatgtgggtgactttttctttatatattttgactctattatatatatatatatatatatatttccatcaataacttctttgagattgctttaaacatttcttaagatttccttctaaccgaatttagtatagaatacccatgtaccatgcatatttaatagaaatcaaagaggaaaaaaacattaagcatactccctccattcttttacttatattaagggcactgaagcagtctccaaaacatataacttatacatggtggtaaataggatttatactttcttttagaagttaaaatatagtcaatatagataaatattgttaattcaatggtaattaacgtgatggtgtaaactttgttctcaaacattgtagagctaatttagttatgcatgcttgtaaagtgatgcatgatattataatatgtgttgttgttgttatccgttagatatgatgcaaagggttaaaatatgacccagaataatatttatttttttataaataagaacatagtcaacatggatctttagctattgatttaattgcaaagaatataagagtatgaacgtataaaagttgtgtgtgtaatctaaaagataccatttgtttaaaatttcttatataataaatgttatcttaactactataaaaagtaaattttataaaaaaaacctagcaattataatcaaatcgcacaaaattgtagggattttggcacgtggcacataacctatgctaatttttttttaaaaaaaacagaccattaactaatttgacatagtcatatatcaaaatttttaaaaagaatatacttacattgatgtaatatttatatgatgaataaaggactcatatgtgattgtataagtcaatgctcaatagagtggttttataaagctttatggccataatacttgaggttatgtgctacgtgccaaaatctctgtggttttgtgcaacttagaccataatatgtgtgtttaggtcaaatttactcaaaaaagagtaaaagggaggga

SEQ ID NO: 1308 - DNA, 1663 bp, Oryza sativa
  Intron number 1 from transcript LOC_Os09g35960.1 (locus LO C_Os09g35960) derived from phytozome v7.0 (chr-ID Chr9; po s 20718695 to 20720357 reverse strand)
cccgcccccgcgccgtcctcgccgcactcggatcggtgggttttctccctctccttcggattggtgaaaaggaggagtaaaaatgactccttttttagtcctttccttttgggggcgtcttgatctgcttcccgtggagtctagcctcacatgttctgatctaattggtggtctggaggctgcttaggtgctcatgttatggtttttttgtgcgcctcaatccaaccaagtctttggatttcagcttaagagtgcagtaaaacgttagagtgacagcctggcttaattgtgtgcctagcaattcctgcctcgtgcaggaaggttgcggggcctgcaatccaaactgaggacaccggatttttaagagcgaatcgattatgtgttcaatctgttgacatgatagtgggggagattcggtttgttgattcagagagatcatggattctgttgcagagtggtttgcttactctaaaggtgccttccgtctaagttctagtgtgataagattttgtcatagtttagtggcagcgttagtgctgaatgcagcttgcacaattgcctcaagatatgttgatgatgtgatgctgttggtggtttgaacaagggacagcttgctgctatcttgaattatgtgctttaggttgttggatggcatggtatttaagaccttggaggtgatcctgtcccctaaggtagcaaatttagtttctaagaataatagggggggtgcttgatgtttccttttggtttgggagtgaagctgtggcactgtaaatgctacctaaaagtttggatcttccatgagttgaacaattttgctgacctgaataggtatcaccgtaaatcacaagagtttttagatgatacacctccagttttcctgtgatctgctcttgttccgtagttatctcttgtcaagtttgctttcaacttatttgttcactgatctaggtattatattgaactgcatgttgactataacgattcctttttgtagcccaggtcctcagataactcataactatgaatcattgcctagaaaatcgttttatgtggtcatcttttcttaatccaattaccaagttcaataccatcaatttttttcactagcgtatggtgttagggaccctgtttcatccacagattccatagtattgtctgatttatgcctcttgatcgatgtatgtattattcagctatgtagttttgtttagataatggataaaattgtatggttagttcaaaatatggtagaccatactgcttgattaagaatcagttcatgctgcgcataacgaatgtatccttgacgctgcacaattatgttcttaacagcactttgaaacaataactaggaggaagtttttcagtatcacgtttgtttcgtaaactaattaataccttaatatctgtctattttatgaatttgttttatatccaaccttttcgtgtgcatacaaattatatgtgaagttggatttatgaggactcaaagcattccctcttcggatgctgtagcttagagagtgtgttaaagatggtactattagttagtctgtcagttggtatggcagtgttatcttttattgatccatatcttccttgttgctccactttctaaaactattctttaatcttctttcaggggtggaataaagtctcc

SEQ ID NO: 1309 - DNA, 2188 bp, Oryza sativa
  Intron number 10 from transcript LOC_Os06g35530.1 (locus L OC_Os06g35530) derived from phytozome v7.0 (chr-ID Chr6; p os 20720382 to 20722569)
tactgcggtaagtttttgatgcttgatttcctgattgaaacttgaaagtatattaaaattgctgcatgcctattaaattttacacacatttgaaattcactaaaaagaaccagatgatagaacatggtaatggtagttgtcgctagactcggactcacagtgctcgttttggttaattaaagtttgtacatccatgctagtgaccccatttctcatcacgtggttgtgtgtgaccctatatttcaaattatgttggtaaacggttggttatttggtgctaatcaaaagaatcgaagagctaatgctgttcaaggttgaggaaacaacaacaattcaacattgagaaattaaaaaaaaaatgtgttgcttgaatttactaggaaacttgggtgaaatcaagatagtttctggtttctcattggggttcagaattttcctgaaatctacaaaatcaaaccccagtgatgcgagaacagtttgtcctaaacattatgcacagaacaatgcaccatcttctattcatgccgagtgaccctgcttccttctcttgccacccaatgggcttgaatgtctaatgtgcaagtaaaaaagaagacagttaggtcatcggaaccatgaattcatagtgttctctgttagttcctgaaagggtcacttaggcctaggaaggacgccggggggggggggggggggggttgaatgggctaatttgaaacttaagtaaatgcggaagcaaggcttttcggaaattctgaaaatcacagagtaaacgcacagctcaaagtatgctagatctaggtactcacaaatatgaagaacaagcacaaacagcaactagactagtagtgccacaaacaagcaatgctagaggagggagagagggatttcaccgaggttcttgcaagatgaggtgttcctgaagtttgaatacttgaggggattctagtctccgttgaggagctcaccaagagccaggtcttcgctaaccctttcctctagaggttgcacaaaacactcattccactaatggtaactctttcctttcggtggtgagatctgaccctcacaaacttctcctggccaaccacaagtgaatcagtggatcaagagtgacacctaaccgtccaggaatcctcaactcatactcaaataagttgttagtcctctctaatcacattattattaatcaccaaaataattaggggcctagacgcactttcagttttccttcttccattcttaaaattctaatatcacataatatgctagcaatgtattcctcattactatgatgtatacagtctagtagggaaggcattcactggataattttttatctccatgttagacatatcgaatatatacaatagcttttatcactcccttcagctctctttgtgattttgtactgttcatgcgtacttgatgttctgacattaatttgtggaaaaacttagtgtcatgcgctatgaacttctgcttcacctgatgttatccacacccttcctttgtgcatgtttagttgtttaccttgttactccctccgtttcacaatgtaagtcattctagcatttcccacattcatatttatgttaatgaatctagatagatatatttgtctagattcattaacatcaatatgaatgtgggaaatgctagaatgacttacattgtgaaacggagggagtacaggttatgctcactatattctattttaaatcctctgaagtcaaaataatgtgacatttttagagtctatgcttctactggtaggaatgcaagtgaatagaggcatgaagtaccgacctatcccacctttcatggtttaacaacttgcataagggttgttggattgatttggcccgctctcttagccaattgaagaaatattggtttcaaaattggaagtgatgagttgatgttatcacttgcattttcacacagaatttatgcttgtcgtaatgttcatcatacacacgtacaagttagttaataaaataatcaccatatctcaagcttttatcacttcctctcttgctctgaaatttatcacttcctctcttgctctgaaatatattttctttgtcttgtcttgttcccaattaggtcatctgatatatgataaaaatatttggcatgtcctgcaagcctcttaattactctttgtgttattattacagctggaggc

SEQ ID NO: 1310 - DNA, 1215 bp, Oryza sativa
  Intron number 6 from transcript LOC_Os07g32420.2 (locus LO C_Os07g32420) derived from phytozome v7.0 (chr-ID Chr7; po s 19285513 to 19286727)
tgcttctacttcacctcttgcttcttccagacaaggttggacatgctatctatttatccatctatttgtgcatgttaatttgcatactagtatctctgttctcaaaaggatgatgtcctagattcattgcaaacacagtcaaacctcaaaaatcttaaatcattaataaatgaaaaaataccaggatttaaaaatcatattagtagatttgtgaggaaaaactgtcatatggttatattttaaatattgttcccatactatcataaaaatacaaactgattccatttgtcatccttgagttttcggccatggcgcaattctgtcgatttcctgcacgtgatttttcggtcgtctcatcattgtttgtttttcatctgagtcctgtgcacactgtggtccgttgtctgcatccgagacccactcacatccgttgtccaacgtcccacgcatgaccctgcctcaccttggccacatgcacccctcttccgtgtgcccatggtgctcccctcctgatccatcctttcctttcgtccatctccctcttcctatgctgcgagaagcagagctgccacaagcagaggcaaagcacagagcgtgattcacttagctaagctgaacatgatcccttaatttttctccatcagataagcatcgagaagaagtggaacaaatttctggattgattcattgtttatgtgagtagttctcaagtctggtttagttacattacgtaaatgtttctgatccacacccttcttttcgtaggacgatgaaaaagaatggataaagatcccaagaatacatagtttgatctgaatactcataccttgagaatagcacatctacaagtaggatttcctctgtgatcgtaccaaaacatgagttccatttggattttcttttttatcattggatttcttcaatgctatagtgtcattcttctggcgcttaatgctatctattcccaattacaattgtgtacagccctacacccgttgcaatgcacggtcattttgctagtaaatatataacttgagaaagtaatgataaaacatgtgcattggagactgccgatgtcctaaatgacaaccatttgagaacagagggtagtaactttatcatctattctttccatatgttcctttgctaatatattgcatcttatgatgtgaattttcagaagaggaatatttgcctgaagaacctttatcacca

SEQ ID NO: 1311 - DNA, 1969 bp, Oryza sativa
  Intron number 2 from transcript LOC_Os10g05940.1 (locus LO C_Os10g05940) derived from phytozome v7.0 (chr-ID Chr10; p os 2994715 to 2996683)
tgcggctcaagaagctcggcatcccctgcaagcaggtaatctccttcagtcgagcctcttggttcatctctgtatgtgcagattgagcaacggattgtgattatgctagtttcctctgctattcagcatttcggaatgtgattatatgttttggttagatttcgttgtatgatgctgccgttattagatgtcgtcgttatttttgtttcatagaagcgaactgatccatatgtgtgcttataacaatggctcgttgtattatgcctacatttttgtttgagaaattgttggatgcatgattaaattttgagcaaatttcacagaatcatatgctttgtgttccaagttgcacaaaaaccacaggggtttcggcactcggcacttaacaactataagtgtcgctttctcaggaatgtttttgttatttcatctgagtggatttcaacttatttttagttaacagattagctaatgctatgtaattcggcatgctttgaggttaacgttttctgatggtaattttgtctgtgtgttatctaactcttggctttgaacgaatcagtattgtactaggttgcttatttctctctagactgctctggataagcatttgaccatggaaacccttatgttttaaaactaaacttttttcttttgattaataagctatgtcagtgttaatgttttttctaaaggaatatagataagtgttatgtggataattttcttttgtttggtcaagtttcagcatccaagtagtgaaagttaagtaattctggcatagtctcatactttgaacttgaagggaacttacctctctgatctgagatgttgatatattacccttttgttattgggaatgacttcaagtgaattactcaacagcgagatgtggtattccgaaccatgtttttcgtagagcgatacatttttacttaattaagctatgaaattaatcaattttttaatgcttttttagatgccttagtgaatttgacaatgctaaggtgtctagaatttgatgtgcaaaataacacaaattttccttcaagacaattgtaatatttggatgccaagaaagttccatggttttgcattgtacttaggctggattcttggttgtgaaatatacaatttgagttttacatgatattctgaagtgaacacacatgtggcttatgacctgcatgctgaaggaaatattcagttccttttgttaagtaatgggaacctgatcccattttgcagacaatgtgaagacattggctaactagtaactgtatacaaatttggagatgagttagacatctccttgccatgtttgtctccctcccgatctctgtttttaccgtttcttattcttcctttcttccttgagtttcttctctctccaatttgtatttgtccagttaaggatgatcttggctgtctgctgttaatgcattgtttggaaacttactatgtttcctttagaaagcagtcaaatcaaatatagtacgtccctttttttaataccttaagccaatccctttgaattatttgctgccagcatattgagactggaatcttcattagcatgtcatgatgttttctaggaaatagaacacctttgtaggtttgtcggtaatattgcttctcctaacctacagcacaagcatatttttttattatttaaatctcaagtaaaactctgaacattgctactaatattgaggttgatcacccgcccaggaacttaaaaggtagggtgctcacctaagctagtcgatacttgtaacatggttgtggattaggctggtggaatcatcttgataacagtatctttatttatcaactattttttatctgttctgagttccttgttgaggtatgtgaaaataatttttaggggatctattaagttctcttatttctcttttatacttgtgatgcagaggaaattaattttgagtttcgctcacaagtatcg

SEQ ID NO: 1312 - DNA, 596 bp, Oryza sativa
  Intron number 3 from transcript LOC_Os02g01720.1 (locus LO C_Os02g01720) derived from phytozome v7.0 (chr-ID Chr2; po s 398708 to 399303)
agctcagagtgaaggacgagtacaacaactacagggtagattttagatgcttcttcgataatttttttttagaaagcttatgcatttactttggatatgatttcttggaccaatttaataaagctatctgtactttttattacttttattttgatgacttaagcattctaaatttccaatgattactccaattggtgtattctttaaattttgatctgtgataagaatcactattgaagagaactactaccattttctacaaaaatctaagtaaatttcagattatcaaggtcaacgagtatggtgtgtattcaatctcagacagcatgctgataaaaccttgaacctgttttgtatgtcatatggtttaattagtaaatacgggaaacatgcaattctggactaatactctagaaatcatgttgaaaggttatgtaagtgttccttttcatgtcgaattcaagcagtcctttctaaattgaacatagtggcttaactggtagagtatacttggtataattttcgctactataaatttttatgtcatgcctgacagtattgatggtttcatttatttgcaggatagggctgcctat

SEQ ID NO: 1313 - DNA, 2529 bp, Oryza sativa
  Intron number 3 from transcript LOC_Os05g25700.1 (locus LO C_Os05g25700) derived from phytozome v7.0 (chr-ID Chr5; po s 14892310 to 14894838)
ggccagaaggacatcctcggctccagatatcccaggtaccacagaattactaatgtttaatttaatttaattttggaactctttaattttgcttatacttattttgttttgatattttcaaattgtattttaataacgtgtatcgtaatgggggctttgttgagtaaaactactatagcttttttttggaaagtaaaactatagctgattaattaaatatgatttggctggacatatttaggtctggcagtgtgtatggttggctaacattcgcatcttcatatcgatttttcttcacctttttttccgcttcctccactacaccagtagtattattgcatacacaaagcatcatatattcatatctttctgtttttgggaaaaagaaacatatactatagtacagtacacgtagcccgatcgatggctaatacgcaagtgtgtacgtatatactaactcaattagcaccgggggtatgaaagtccagcaacatatatacatgtgcacatttatatctatatctatatctatatcaatactattatacatgtgcacgtcatccatattgtttgagtcagtttttttaagtttatttgtttttggaaatacaaatctatgtttaagtcgatttttaagttcgttcaattttaaaaatacagaaggagtcgtataagaaatctcttttaaaaaaactcgcacactaatttgtgacaatcggactccaatttacagctcatgattttataaaaataatatacaagcgaattcgcacaattcaccataggtaaaccgtacaataataataagattaaaatagctttcacccgttgctatgcacgggtatttttttctagtatataatatatcgctaattgcaatgtcaaattcacttatggtatctaggaaaagatcgagcatgcgcgcagaataacctagtatcagttttctttcttttccacgtgagttttctttctttttttgaattagttggctttcagcatggtgtgggtccaattcaagtgaaccaagaatgcaacatatatatgcatatggttaactatattgttattttttgtaggaaaaatagatagctccatagtttactcttttagcttattagccgtatagctaaattttaaactttaaaagttaaattgtagaattgattttatttttttatcatagtttacttttaagtataggatttaattcactaagaacatataaataaagttttttcaatggattatttttttatcactaaaagtattatggcatataatcagttgtaaatgaaacgattaatggagatagaaaaatcttcgtggagataacctagcttgtgtattaatttgtgatgagcaagaaaccagttgctagattagctagcttgtcgtcgagtaattaatattaaagttcaacaaaagttgcctagaagaacttatatttgaaaatttaaaattatttggtcggtttactttacttgtcttgaaattgctatgtttatctgtacgtttacttacagagagaaattgaagagaccgagcgatgcaatggaaaatcaatcattattacatgccttggagagtttggcgttttattcaagaaaattcctgaagactttttttttcaattttgaaatattgaaataataactatagaatgatttcaacttttggtcgaattattaaatggtttgaaacaatttttttccgaggctaggtttcgaaataattgaaaaactgagttgccaaatgatcctaattaagtcacttctcaagtttaatgggccaagagtttttttaaaaaaacacactacttttcctttagtcttgctacaattcaaaactagtttaaacataatgcactttgcaatgtgtcagtgtcagtgaaacatcatagaaaccactctaaacgcaggcgaatgttgaaaagttacatctttttatcgttgacggtaaaaaagaatttctagtcttggccagtgaaaaaacattcaagtctttacgctaatggttaattttcaaatgtcacgaaaagtttaggtaataaaatagacaagttccgacgttgtttcctggaaacgtacaatcgatcacctttagctaaacagtctactgcttctggataaatatatatacaaccaatgtatatttatgtgttcattttcctgtaataattaaatggaagaccttcgtggataattaatgcatggcataaatttttaagaatattaagatactttaatcaaaatctgaaactgtggtgaactaattaacgattgttaccgcggaatttttgaaattaaattacgtataagttgtattacacacttaattatatatgtataattagtgtaattacattatgatttatgattgtattatgtttatatttaacgactgtattacagttatatctgttaaattttatcgataaatatatataagatagttccactaattaatatacgacaatatccgaaaattacaggagctactaccggtgcactcacaagaactactacg

SEQ ID NO: 1314 - DNA, 8203 bp, Oryza sativa
  Intron number 1 from transcript LOC_Os11g18194.1 (locus LO C_Os11g18194) derived from phytozome v7.0 (chr-ID Chr11; p os 10253470 to 10261672 reverse strand)
caggcacgttagttattaattaacaaattttgtttttaacgctttggtccgttttacttccttaatactactggtgtgctgtggtggtacagtcgtaagtgtgagctttgtaatctcttgatatcaacctcttttttttatgggactgatcttgatatcaactattatcctaagcatgaccacctaatatctaattctaatattacggaatccagtaaaagactgaccggatgaagaatccatgagttatatattgtcaagactaccaatataaaatattaaacaggaatgtttgattgctacgacaacttatcatattcaacttggtaattatctattaaaatgtttctataattttcttattatttatgaaagtaattcagtcatgatataaaatattaatgatatagataaggatggcactagtacaataacgatttttccgtgcggttggaattgatttttgtgtgcagatcttccacccgtctagaacgaggtgtctacgaaaatctcgcatgcgggcgcttaaaccgcccgcacgggaaaataaaaaatcgaaaaaaaaatcaaaagcctcctggaaccctaatctagacttcgtcgttgccgtcaccaccgtcatcatcgccgccttgcctgaggcccgctgcagtagtccccgtagtggccggcgacggatccggcatccccgcggtagcaggcgacggattcggcctcccgcttgccacactggccgatgccgcctcggccgctctaaccgatgccgctacctccgccgccctagccgaggccatcgccgggagatgggaggagtgggacgaggagagggatagggagaggaaggagtgggacgaggagagggatagggagagggaggagtcgtgcgagagtgagacgggaggagacgggatctgagagggagagtgtgggtgtggggcggcgatgtcgagattaaaaatgtgggtggtattttcatgtgcgggtcatttaacaggtccacatgcgaaaataagcccgcctgtgaaaattgatttttccgtgcggtcattttaaagagccgcacgcgaaaatggagcacgatttctacagacgcgaccacttacgatccgtctacaatttaaaatgactgccatccaggaaaatcattcctgtactagataggatagcttggctgattaagctcggctcggtctaaatcgttataacgagccggctcggctcattaagagtatatataacgaggtgaaatgccaacttggctcagctcagtgaactggctagttgagcttatttaattagctagttaacgatcgaattgactcctttgaacccttgtgcaatcctgttaattaattaatatgatccactacatccacaccaagaatacatcatgccgcagtagctagtaatgatgttagaaggaataaagcaatgagataggatcaaacatcataagaatctagaaagcactatgttatagtccactcatccagtcagtgcaaccacttaggatatagagagcactaagcacttagaatttagagtgtgtttggcaaatgggatatgggaggtgggattgaaaaagggaaatggattaatgggtaggattaaataaggtgtgaggaatgaatagatatgatgcaatattgctctttggagggtgggatattattttccaatctcatttaccaaacaaagccttagagatgtcgctgacgagttcttccccttgctgcggttcttggacttcacgcatgccaaccggcattccaaaccatgcagtgtggtgctaagggcctgagggcataaagggcagcgttagcctgcagtgctgaggcggcgcatggaagtggcgcgtagggatgcaagcgggacgagacaagcgggctttgtttgtctacttgtcctatttctaattaactttttcttctaaattttgtactgctatatactccctccgtactcgtaaagaaagtcgacagcgatacggtctccaaaacacaactttaacttgttatttctataaaaatatttattgaaaagtgatatatgtttctgtaaaaatatttatttaaaagtgatatatgtatacttttataaaagtatttttcaagataaatctatttatattatttttatattttcaaacccaataacttaagagttatttatgatttattcccaatgtttgatttaaacattgtgctaaacaactttctttatgagtatgaagggagtttaaaataaactaacaaacatattttttatacgggtgacgagactatattcacttgcatggtcagtggcgcgaccctgcagaagagcccctacgggaggagtaggggcgcatgggactgggaggcgacggggcagtctatcaggggacagcgagactctgggagtagtggccggcggcacaggagagctggggcgcgaaacgtggcgttctcccactcgcacgaccgacgtgacgtgtctcgtgggccctagcttcttgcgtgcgtacgtgcgactaaggttgtgtactgttagggaatagggagtaggattatcaacttgatcgagcctgcccagccaggctcgagctttgtatggactcgactcgggcctcatcaaatcttgagctttatgttgggctccgactcagcccgttcgagctttgagtttttctcaaggtttgctactgtactcctcctactacaagtcaactatgcatgccatgcactcctgactccttcagggaaaaagtgattgccattgggcaaagtctactttgctaatgaagatttgcttataaaacatttagttgggatctaatgaagatgaagaaagggtacgtaaaacgagaaagctattaacttgattaatttatttttaattattgaaaatttgaaaaatgggtttatttggtattttagaataacttgtatataaaaagttttcgcacgaaacataccgtttagtaaattaaaaagcgtgctaacagaaatcgatgaaaattttatatcttaataagaaaagaacaccaaatatttattcgatattgtgcttgtgctggattgttaattgcagtaggctagctagtgtgaaacaacaaatgaagacacgtgtgaccatgtggtttgatggagtgagtcagaagataagctcgagcttggctcatttgaagttcaaatccagctcaagcttagcctaataggagccaagttagagcatctccaacagcctctctaaatcgaactcttcaaacgctaatatagccaactcttcatctgatttggctagttaaactagatatttactccaacagactctctattaattctctccaaaataaaatcggacccacatatcagccactctcccctcttcttctctctccctctcccccttcttctttctctttcctttttccccattccttccttccggtcgaggcgacgaccacgctggagggaggcgggaggtggcgcggggaggtgggaggcgacggagcttggggcggggatggagatggcggcggcggcatggggaggcgggaggcggcggagcacagggcggggattgcgatggcggtggtggctcgtggcaacgacctcgaggatgaccccgacaacgacctcgaagatgacctcgacgatgaccctgatgacgacgacggcgcccccgacgacctcgacaacgaccccgacgacgacctagatgacgaccccgacgacgacgacggcgcccactccgacctcgcgaggagtacaccagccgcgccgaccgatcgatgtgttggcaggcgttttgactagccaaatctagccagccagcgagcgagtttggtcagctggatggcttggccattcggttggccagtctgttggatctctttttttacttaaatggttaaaatttgacttggagagaccgatagagagactattggagatgctcttaaagtagcctaataggtctcgagctttttcaacagacctattgaggacgatggggagctttctactggcctactgtactgggctgggccatctgattgggatgcgggagtggcaaatgcgaaactgacatgaaactgaaataacgagtataacgagcctaacaagtagctcgtgaactggctcaggatcaggatcggctcgtagctcaacgagcaaaatagctgtctcgtcttggcttgttaaggcccggtttagctcctaatttttttttacaaaaacatcacatcgaatctctagaaacatacataaagcattgaatatagataacaagaaaaattaattgcacagtttgcatgaaaatcgcgagacgaatcttttgagcctaattagtctatgattagccataagtgttacagtaacccacatgtgctagtgacggattaattagactccaaagattcgtctcttggtttccagccgagttatgaaattagttttttcattcgtctccgaaaaccacttccgacatatggtcaaatgtccgatgatgtgacacctaaaatttttttttcgcaaacttaacaaggcctcaagctagccgatctgagccgggttttggaactcctcttcccccctaatagtacaattaagaaatttgtacattcctagatattactacaaatgatatatctaactgaatatgtatgtttctaataaaaacattttctgcagacagatatatgtcaagaacagtaaatgtgtaataaaaaaattatcttgcactacttaaaaaataatttttctggacgagaccttcgttaatttggatgcagatggaccataagtagccgcgtctataaaatcgacctccattttcacatacggctccttaagatgtccagatgcaaaaattagttttcacatacgaaccacttaagtagctgcatgcgaaagttagcctatttttacaggcggacctcttaagtgccacatgcaataatatattttcgtagacggatctcttatggatccgcctaacttgcctccactttccttctcaacacattacattttcttctaagtccaaccttatcttctcagtcctcctctcctctctgtctcacctcctctccctctctctcagtggctagcggccggtgggcagtgggtgtggccggtggcaggcagcgggcggcttcggcttccttgggctcagccccttgatggccttggtggtaggcagcgacaacggcggctatctcgggtgctcggtgatgggtaacctcaggacaatgggagcgggcagatccaccgtaccccctcccccaacaacgggagcaatggcggcgagcagatccatgccctttgaccgaaggagcggtggcggtagcggcgagctgcaggggcgggcggatccaccacccacgacctcaggagtggccacggcgggaaggtagtggccggcaccaggctagctagggtttctgtttttcaattttgaggtgtttttttctttggggaattttattttttcacgtggcacacatgagcacccggattttcgtatgcagatgtggtaactgcatggaaaaatcgcaatttttggagaccttttggggcatacaggcgtcccaaccacatggaaaaatagggtttggccagatagaaaaatgcttttttaggtagtgtcggatcggttggtcagaaggtaaacatagatcccagtaaaaaaaaatatagtgatttatttggatttccatcaggcagaaaataatgttgtatttaaattatcccttcataaaccaaggtctaaactgtagcatattgaaccggcagtgatcgatacggagtaaacttttgtcaaccggcagagaagtgtgggctccaaattaaaggtgttccgttgtagcgcttttagtggtattcttttttataaaattttttgtggtaaatataaatacggttttgctaaatttttggtgacacattttctggttggttacagtcagtttttgtgccgttggatcggtcataggattcgtgctattataattaattatattacgcgtaactacaagttataggtcagtgtagggatgaaaacggaccatatagtttccgtccgctccggacaaaaacgaaaacagatacctcttggactggataattctcggatagttcggatacggatacgaatatggttatggtatcgaggtttccttcaatatacctttatagattttaatagtagtttatctcttaacattagtctatactattaaaatggacacaactacactgagagtgctagctggatagtgctaaagagagacacccttctttcaaaaaaaaaaaagctactagtacactcaatatctatgtattttttttcctcttagagaagtttctcttaaattacttatccgatttataatctgattatactgttgtgttcgttgcaattaaatctttacaacaagatcttatatgattatattctgataaaaaatatatgtatgttgtaaattttattatatgtaagttacttctattatatatgtaagttagttttatcatatatataaattaattttagatttaagctctttaataacttatatattttaaatcatgtattattttcaagatatatttgcatcgttatactctacataaaatatgtgacaatgcaagatccatattggatatattcaaatattttattaatttaaaagtaatgtatttaaattgtagaagtaacttagctatacaatagaagtaacttagctatgtaatagaaataactttctgtagtagaagtaattatatgcaacagaagtaacttagttatgcaatagaagtacttcctccgtttcataatgtaacttttctatgtctagattcattaacatctatatgaatgtgggcaatgctagaatgacttacgttatgaaacggagggagtaattttactctctgtagtagaaataattaggggcccaaataattaaattgtgagtgagctgaaataagaaactatgtagagtaaattcgcaagtaaagtgtatagaagatttataaagtccacaaaatatagaattaactaaaaacaataataaaaataatcaacttagagtattatgaatgtatagaagtaatttagtcaaatctaaaagtaacttatatatatatgataaaagtaacttacgtatataataaaagtaatttataaatataaatatttttttatcgtaatacaatcatgtaagatcttgttgtaaagatttaattgcaacgaacgtaatggtataatcagattgtagattggataactagtttaagacaaaattctataagaagaaaactaagatatgcactattggatatactaatagcaaccaaaactcctaaaagtactagcacgtgggtgtctctggttaagactaactggagaggcctctccaattagatttaccgtattaatattatttaaattgtaaaaaatatttataaattatacttcattttatataaaatgagctaattatatatgttgatatttgtttctattagaagctgagttggttttcgtgttccgagaaaaaattgtttccgtattcgtgtccgatcatattcgattcttattcgtaatcgagataatccgtatttgtttctgtattcgagctatccgtattcattttcgtatctggtaaaaaaatataaaaacgaatatggtatgagcgttatccgtccgtatctgctccgttttcatccctaggtcagtggattagtggtctactgcagaacttaatttgttgatatttttttcttctcattgcatgcactcaagtatcagacctgttgatatttacatcgtaaatacactactgcagaatagggactcagtgcctatatgtaggtgccagttgtagcacttccgtcacctataagtgtcgacacctatttgatgttttctagtagtgtgttgactattttttcatgaaaaatacggcgacataaatatagatagtccatataaatatcgatagagtactcaaatgcatgggattgatagtgtcttatcttatgacctcttagttttggcccaataaggtccgagtttttataagaaaaaaatcttcagtctatataaagggcctaggaattactgaggtcgtggaagcataatttgttacaaaactaataagtcttttcagacagttgatcctttttgttaactggtatctcttctctgcagt

SEQ ID NO: 1315 - DNA, 16271 bp, Oryza sativa
  Intron number 10 from transcript LOC_Os01g08020.1 (locus L OC_Os01g08020) derived from phytozome v7.0 (chr-ID Chr1; p os 3878673 to 3894943 reverse strand)
gactgcgaaaaaaatgtaggtatttactcttcattactgaagtatgttaccatataatttcctctttaatttatctgctgcattttacttctattgtgaatgctggttcctgtcaaaattactagttgtcaagaaacttagtcctgctccatgtaattgcctgaaccccttacttttcacctaacgattaagggttcatacttttgcttttctttcaccaactattcgaaatgttgatgccactgttagtcttgtatggaaaatgttcaagcaaatcaacttataggtcaaaaattgtcctgcagactgattctgttgacaaggagttaaagagcttgaaggatgctattctgcaagaagttgataaagaagggacattggctgaagaatttgaccctataaaacatattgaagcacatttgcctgttcgagtgaatgagcagagactaagtaacttgctgcaatccttattagttggtgcttgtgttggagctatgccagtcatcaagatgataccgacatcggtcctctggggttactttgcttatatggctattgacagtctacctggcaaccagttttgggaaaggttaagacttatattcatcccatcaagccgacgctacaagtaatatctctatctgcatctgtttaccccaattgaacaatgaaattgcatgcttgactacttgcggtgcagcctatgtgcctcctttggattaatcaaaagataatccattttttttgttagaaaagtgattaacagcttacactatgcttcatcatttgcagggttcttgagggtccccatgcctctttcatggaatcagtgccttcaaaaacaattactgtcttcacgatcttccagttggtttacctcttgatatgcttcggcattacgtggataccaatagcagggatcctgttcccgctgccattcttccttatgattcttatcaggcagcatgtcctcccaaagttttttgagccaaatgaccttcgggaattggacgcagctgagtatgaagagcttgaaggtgtccaccacgatcacacgctggtatacatttacctcaccttcttggattatttgcttgtagtgacgattttgtgtttcattcttcaatgctccgatgccccacatctgttgttaatctgaagtttggttcctcacaggaggatggtgaatctgattcaggaagctgtggcagccgtgacgacgctgagatatttgatgagctgacaactaaccgtggagagctaaagcacagaacttccagccaccgtgaagaaaggcacctgcaggtaattaaattatttgcaaatgaacaatattgcagcgaatgtgcacaggattagagatgagatgatagagggtgtgggcttaattaacaatttgctctctaaccttctgctgtggtcaactactaggctactagccagtctgttgaaataccactcacgatctattgtactttggacctaaaatggcatagagtaaattctcttcagttaagcgcatttcatggcatccttttttttattttacctatttgagtttcacaaatgtttcgtctccatcgtgcaggtgcattcaaacgccattcaacccaggtgtggagatactgaaaacttgtccgagtgctaatgaatttctgcttattctgtcggatgagtatattataggcgtatatagcacttcctcaagcagcggtccgttgtattatatacataatacattcatactttcatatacatcgtactgtagctggagatcggccgtacgatatgacatgcttgtacgttgtcaacttgtcacattgtgcatgcagtaaacagaagcaactggattttactgaaggtctgtaaggctgtgtgacatgtagatttcaatgttctctagcctgtgaattgttgctcctagattgttctgtttgattgtaaaattgcatggcaatcaatatggaatatagatgtggagtttgggctttcaatgcagtagcacttgatgtttcgtttgatctggcataagcttttagcgttttatttatatagaaaacactcgtgcaaaaagtaagtggatggactcccaagatggtcatgtccaagtttggccatttgtctgatttaattttttttagattaatatttaagtaaattgcacccacaatgtatcaacttggcaggtgggtgtaaattggtgtaaaaacttgtgaaatgagcgttctagtgcaacaacttggtaggtaagtgtaatttagtacaagaactttataagtgatcgcataagaacttgcaagatacgtacaattttgatataataagttaagaagttatgcgacaacttaattatttggagcacttttttttatacatattcaatttttaagtacttattttggcaatatactagtgtggatttgtatataagcatatttatatttttatcctaataactaataactgaaagtcaattaagctggatgtagaaattattatatttcggttgagatttgggaaggtgaagaaaacaaaaattcttaaaggtaattggatgtgtagtataatttttaaagataatatccttaggatttctatgtaatggcatattgacatcgtgaaaaaaaaaactcacctagcatatgattagctaagttgatgcactttttcaactttttaataagttttttaaataagataaacggtcaaaggtacttatggctacacttattttggaacgaatataatataataattttgcaccacgaaacgataaactgacatatggacaaaaagttgttccactttgcagagggttgatattaaatcgagtagtgcagttgtgcaatcctaggatccaacaaaattccgtaacaccagaccccgcatagacccatgactccgcacgtatattttgtgaccgttggatctttcgatctaacgtcccatccctgacctccccactcggctctgcctatcacgcttctccctccctgattcctctcggaaaccgcatctcctccccgagtctccaggcaggcaggctcccagcaaccgcatgcgtcggcacttcatcgccaccgctctgccatcgccgcccaccctagcacccagccaacgtcgtcgccgcctaacgcgcccaatgtcgtcgcagccatcgtgcacgctataagagcaaggttaatagtatagccaactactagctctaattcatctatagctaatctaatagccaatttatacaatagttgtttactatactaatagtatatggtcccactgtcatacatacattgcatcttggagtccgtgctgcagctagctacagatctgtatcccgctgctcttctctctcatcttttatctcattaaaatatatttgtagctggctaatattctgctattgtacctgctctaattgtcgcctcccccgcttctgcttgcctcgccgccaacctcgcccgtcgcacctcttttctcctcaccttcacatacaatcgtgtgaagatttgtcttttagttaacattttgagggttctatcggtttgatttatcaaatttgaattttcaaacttaattttgatgttaaatttaaaatatttttaacatagttttttttatattggcttaagttgccagaaatatatatacaaaagttttactgtaaattaatttttgtttcctaataaactgttttaacatattcgaaaatatggacaaccgatgaggctgagtgtgtgtgtgtgtgtatatatatatatatatatatatatatatatatatatatatatatatatatatatatatatatatatatatatatatgcgcgcgcgcgcgcaatatccatcgccatatgcaagatacgctggcacaaatatggcaaaaacacaacaccctcaaaacaaaggcaaatatgcaaggcatatatgtctttttcccactaaattaacaccgagccgtagcttgaggaagaggaagaagacggggaagacggggttgccgaagacgaggttgaactcggcggtgagagagaagggcgtgcggcgcaggcatgggagccgaggggcccgacattgacgcggacggagatggagaatgggaggctggggcagtgggctagaggaggagatggtggagacaacgaaccgaagagcgctcacgcgagtcaccgctggtagagagatcggactggaaaggcagcctgagcatcccgattggtacgttgccccgcatcaatggtcgtcatcgtggaatttgatcgatgccatgaaggtcgatgggtgcgtgccggggagagggccgtcacggccgtcaacctccactccagtgccgcctgggcctctccgcatgctgtcgcggcctggtcaactagctgagagagagataagggaagtggagagtttgactagtgggttccacaccgtttttcaccccgagttgtcacattggtatgtcacatggataaaaatggtaaatagttaaagaagtcatcaccttagaggggtaaaaatatttgcaaaaaaataagtgcaaatataagaatgacatctagataattgtttattctagaagtggcaaatagttaaattttcgtttacaaccaatgctatgtatatcatcggtcaagaaataatacttttccctatgtcggtactagctatactctcctaccgatcatctatatgacactgtgatattgatcccaacgtcatactcatacatatccctgtacatgtctcgagttcgtacttaactacggattagtacgttctattgccattgaaaatttcccttatcgatccagagaaaagaaacttcccaccgaccaattaactggagtacgtgctcctccctccattaaaaaaaacctacaagaagatgtaatctttttttataataaatttaaacagtctgtctagtacaatgaatctggatagagagtgagtcagattcattgtgctagaagaaattacatctttacttcgattaagggcatccacaatgtactccaaaaatggtccataagcaatataatatttgattcagccacctagcaacattgtgaaactagcccataggaaagaaataacaaaagctactcataaacatatggcctgcctatagagaataaaatatattatttgtctctatctcttctcttctactaatactatttgctatccatatacattgtgaaatttataatagttaaagtttatatatgtgggttctagttttatggactacttttgtcatatatattgttgttgtcctcagtgttgtttttaagaacggagggagtgcattcgacgatgcttactcgtgacaaagtacaaataattagtgctaactcctcacaagcaacggcagctgcctattctgctttgtacccctgaacagcgaacacatggccaacttatatactgtactatgttctaatcacaatcttgatcttgccgaccacctgatccgtacgactaactaaacgctacctgagctagtgaaagtgactgcgtaatacttcctctgtttttttaaacattacttcctctgtttttaaaatggtggttttcgattaatattgtatttgaccttcgtcatattaaaataatgatattttcgatgagtatgtactaattattatttattttcgtgtggtttgttttatcattaaaaacgctttttatgcatgagtagtatttctgcaaatttatagtattgatgttttaacacgatgaatggtcaaacatatcaagtcggagtataaaacaaaggaagtaattatcaaccctcctctgcatattaggcgaccagacaattggacatttatgctgcatgatccgatcgagattagtataataaaccagctgataatataatcagaaacgtgcgtgtacgtgtcagctggttaattcgcccagactttttaatcagcgagaacattctggaggttaaacctgagccatgtttcagatgattcgcattttatccttttgtttcatccgtcagctgcctgcctggtctgagaattgcatttggactttggagctacacctccgcttttgatttttttcaagttaaacttttcttttagttttgatcaaatttataagaaaatatagtaacatttttaatataaaataaactatcaaaatatatttaatgttatatttaataaaattaatttggtactataaatattaatattgttgtacatttctataaacttaaaatgttgactttagaatagttaaagcaacttataaacagaaggaggagctagtgtagattaatttaatgtaatggatttagtgtgtgtacatatcgtttaaaatcttcaggattaattatttatttgataagaataatcaatcgattcaattgactgatattgaaacttgttcttttttattttcttgctacaaacattgtgtatatgagaaatttaaagttaaaaattagttttaaagattgtgttaaatttcatcatgtcttatttagtggaacggaaagagaatgacggaggggtgtagggggcattatttgtattgctttgcatggccgcatgctaaatggtaaatgtaaaaaataaaagtgatcttgacccagtgactcatcaaatttaatttacaggcattccttttttctagttatgatcctaaattgtaatttttttctactctatcaatagaacttcgtttaaaaaaatacagacatccctttgaaacattcctggcagcatcaaactttattgagactaatcaacatttttacgagatgtacttgatagtgcagtggtaagtagcgtgtgattttaaccataaaatctcatgttcgataaaaaaatatttggagggacgtctctccctccaaaactcatttttcttaatcaatatttttgcatcgataattcaacatggcctctcatattctcatacagtcagtctcgttgtcatcttcatatagccagtgccttcactgccttgatgagcgaatctggactctataggcgccgtcatcgcttagatcacgattatcatatctttttttgtgtgtattttacagcagaattaattcgaaaatgcttctcttcgaacgtccgatcagatgaaaaacatcgaacgcctacggtcagctcagtccttgcttgctaatttcttctttctctttattgacgtcaacaaaatgttgtagatcagcagcctggtactgtcgtactgtaacatacatgcatatacatagttgtttcttttcattcttttctcatctctttaaatattttttcttctaaattacttatctgatctataaaccgatcacaccgttgtattcgttgcaattaaatctttacaacaagatatcacatgattatattatgtcaaaagaaaaacgtatgtttcaaaccgttaaaacaaaatgtttcatacgtgatagtgatatgtttcaatatgtgttttaagtgtgtttcacaaaattcctgaaactacctactactactctctctccacctcatgcatgcatacatacatgtattttagcaagcttcaaaataatttttctcttaaattacctattcaatctaagaaccgatcacaccattatattcgttgtaattaaatctttacaacaagatatcgcttgattatattttcataaaagaaaaacatgtgtttcaatcagttaatacttgttgtttcatgtgtaacagcaacatgtttcaacatgtatcttcactatgtttcataaaatatttaaatgttccagttgctgacttttttgtttcaccatatatataacatgatgttttacttgttggtcaactgcaacatttgaccatccgtttttttaatttaaaaatgtttcacctaatgtactcataatgtttcactatgtatgaatcaactattgcagtgagttgaaacatcatttcgctattcgctaaaacattattttcatataaggcgaaacggcgtccaataaaacattttcgatctacctagtggaacaagtccgatatacttggtgcaactgcgtgcaacatttaaaaataattcaataataagctaaaattttttttcatcggattatattcatgtgtggtcttgttttaaagatttaattgcaacgaatttaatggtgcaatcggatcatgatttggataaatattttgagagaaaaaatagtttaaaattcgtttgatacatgcatgatggatggatggtgcatctgtgcatggatcggacggttgcggaggcgtctgatttttcgtctcgcgccgtacgtccgacacgtagcgctctccgaattaattgtacgagacagtaaagtattagcacgtcctgtttaagatttataccaagcaaagtaccaacaaatatcttgtgaaggctacgatttttcttgtacacaataactgtattttttttgaacattataactgtacttagtagtacgattttgttacgcataggtaaaagggagtacaatgtaagtactgctatacacaaaatgcagatattttagctactagggtctgctttttaaggctcaatgactgaatgattcttttttttttacaattatttgatagcacaaacgaatgtattaaatactataaagttaagaaatatattttaattgttttttttcatgaattcatatatacaatgttttttgtaaaaaaaaatatagtaaacatttgctaatgatggattaattaggtttaatagattcgtctcatagtttacatgcggaatctgtaatttgttttgtaaatagtttacgttcaatacttcaaatgtttcaaatgtttgtccgtatacataaaaaaaattaacaaggaaataaacacggcctaaggagcggcaaacaaattgttagccacacccacgcagccacgcttgttgcttcctgaccaagaggctaccattccgtttttctgttcagatcataacaattcgagacgtcgctgcagctgcaatctgcaggatccaaactgaaaacccccaaagaaggcagcatgcagttgctacgttgcgccttattattaacagcccaatcgttaggtatattagagtaaaaagtgaaacgatatattttcaaaaaaaaatctataaataaaacttttatacatgtattcttaacgatctaagaaaaataaacaacgatgaaaaaaaaacttaaaatctactctatatttaaggttaaaaatttaaactttggctaataggtataaataagatctaagactccaagaactcaccggccacacaaaaaactttgaagtacactcaagagcatgaaaagtccttgtctcttttaagtttttatcagggaacatatgagaagtccttgtctcataaaatttaaattttagagattcgtttttttctctttcttggcttgagaggtcctacattctccttatttggtagagacaaaagaagaggttgtggtgatgaggttgccgtcaggttcacgttacgttcctagcagctgcgagcatttcttgggtgtttttttccattgaatgcaacaacacatccgtgagtagtttcagtgacgcctggccaggtgtagggaaaatactttccagttttgaaagaaaggggtatttctcacccttaatttacgctaactcatggttatttatgtgtattaggaattacacatgatttaaacacgatggaggagtcttacacgtacgactacacaaagaatacagtaatactccaatacataaaaatatatgatgtcaccatttcaccatagagctatacaacttacggaaacggaataaaactaaaatattttggccattagaagtagaacctcatctaaataaccataaataaattatatatttttttattacacacaacacgtatgtgcacacataccactcactcactcacctgccagtttgctccaaaacacacgttttgaagagataaaaaccgccgcatagcccaagccctactatacatatgataaaatttcttgctaatgttgcttctatgaaactagtgcatgcaacaaacatgagctccaatataatgttttaatggcccaatcgttaatcatgcaaggcaggatcataacaagattttatcaattttatcatacatatagttattttcagcatagccctgactctgaatacccgtaaatttttattaaaaacggactcacacatacataatatttatagatacagggaatctactgacccactattgtccccctttaataagtttcattttaaccgatcatctgttagagtacgacatcttttacattaatgtaaacgtctcaaaactaaattacacctttcgctataaaactaaatcacaacttactgtttctcatcaatacagcgtggcaaatgtgtcagcatctcaacaaaaagctcctgcaatttactcctccacaacttcttttcattttggcatcgtaggctcgttagtagcagctgttcgttgcgcttagcttgttggttggacgagaaacccacatcggccgtgcctgctgctgctgctggtggtggtgatggccgtgccttcggccgcgcggcgtacgtggcggtgccctgcagcagtggatgcctgggtggcagggggaagctgacgatgacgcaacgatcggtacacgtcaccatcaccccggccttaaaattaatttttaggtttggttatcacatcgaatatatacaagcacatatttaaagtattaaacgtaatataatataaaataaaatatatgttccgctaggaaactgctagacgaatttattaagtctaattaatccatcattagcaagtgtttactgtagcaccacattatcatatcatagcgtaattaggattaaaagattcgtctcgtaatttacacgcaaactgtgtaattgatttatttttcacatttaatacttcatacacaagatgataagtgaaaagtttttttttaactaaacaaggccatacagccataccgtactatctctatcatataatataataattaaatcttttatttttttttcttcatcaatatttcttttccaaccaatcataatccttcattatttaatttttttcataactttatttctcaatcaatcataaacttgtcccatttaattttatttattttaaccatatctaatttgaaacgaattttatcttagaatgtaggtactccctccatcccacagaaaattaacttctgtgaatgaatctagataagtattagtcagattcattcgtagaagttatttttttagaacggagggtatatgtaggagtagagtatctttggcgctgacccttcaacctcagggagtcgtcgtcacggctgccatgcggcagagcccctagtatcaccggtgagccccactggtgtcagctcctggggcccacttgtcagagagtgacgccgatgagagagtagacaaaaagaaaaaaaatcctttggaatttatttgggtgtagctatatttataacacaatatttttcataaaaaatagtcggcatgtatttacattgtaagttcctaaatatatatatatatatatatatgtaattttagtgtatttacagtgtaaatctcaaaattacatatgtaagtaataaaattacatatgtaaattcaaaaattacatactaattacatatgtaagtgaggtgtaactactatataaatggctgaaaaaatcgactgtagtatatggcgtcatatttctaacaactccgatttatttttcaaaaaaaatactcctaggtaaacgggttctcgtctcctttgttttccagccttccagaggcagccgcggcggcttttttttttttcttttctccccttcttctcggcagcgtccattcgattcgccctcgattataaatagccgcacatcacgggggccttgaggtttgaggagccaaccccgccccgcgccgccccgccgcggccgcgtcgtctcctccgccacctccacgtctagggttcccctccgccgtcagcattgcccgccggaggtacgggtcctctcgccgctgcctcgattgctcggccgatgttgagtgagcgatgggtttttggaggttttgcagtcacggtgtgcgtgcgttccctttcggactgtgaagtcttgtgttgcatgctggtgtttgcggctgatttctcttcctacttgtggggagatttgcttgggttttttcatagttttttttttgatcgatttcggtggtaaaagtttgtgggttttttgttcgaggtgatggagaaacgcggcgcttgttcgtttcgcaagtgcggtggttgcgtgcgcatgtagatgtcgggatgtggaatgcttgcatatggatctaacaagttatctgtaaatatttcgtgatttgggtctctactgcttgatttttttttctttttgctgttttctgattttttttaccactaagtaataatattggagtaacatgtatgtgttgtttgctgttatgactgaaccccacgcatgacggcatgagaggagaggaagtgttggacacttgccgcggttacctgacgacaattttttagtgcttttatttttgaaagaacccagcaagctggttttattttagtgcttttatgcatgatgtttagctcagcaagtgaccaagtaatttgtatagtataaacttcctagaaattgtatgcagaaatgcaaatttgtctcctcgtcatgcagaagttcgaattacaaattacaaatgctaattatggtacaccaaatatgttgcaatgcagtaagcgcaaattaattacgtatactgcaaactttgcatacgtattagcaccaagcgtgcattttgtgatgattgcaagtttggtccgtggtttctctccatttgactcatctgggtagcttgacaccttaacctgagtttgtaaattttgtaacatgggggcttctaggatgtgtgtatgccaatatgtgtgtcttcaaaatactacgtatgtaatatatatgtaccatttctgaattgtaagtactgttgcagcttctggttagtattgagtggaattcagctgatggaactactaaagattccctttaagggtgtcgtcgctgatatcgaaggccgagcagcttggtacaagcatgattggcttgagggattccactctggcttcaggttaattttgtttcgaacaattaattttgcagtagatcactgtgtgtgttttcactcctcttgttgctgtcagtttcattccttaattattcatgttgcctctggatgtatcgtcaggatattggcacctactatgtatatattttttgcctctgccctcccagtcatagccttcggaacgcaactgagcagagaaacaagtaaatacctaccctcttgccactatgagccatactacagttgtgctctttttggaattgctgtccttaggctttaattacatctctaacaaagggaaagtggttcatttcagatggtatactcaccacagtagaaacactggcatctactgcaatatgtggcatcatccattccattcttggagggcagcctctgttgatagttggagttgcagagccaactataatcatgtacacgtatctctacaactttgccaagaaccagcaagctctgggggaacgactgtatttagcatgggctggatggtaacaactgaaactgaatactatcacgttagcttttcagaaaaaaaagttaatgctctcctgatttgcttactgttgacagggtctgcatctggactgcgatcatgttgtttcttctggcaatgttcaatgcttctaatgttattagcaggtttacaagggttgcaggagaacttttcgggatgttgatcactgttctgttcctgcaacaagctattaaagtatgctatttctagcgagctcagtgctttgtatcttggaagaaaatatttagaacggtgcctacttattgcagggaattatagaagaattcaaggtacctggaggtgtcgaccatagttcacctatatatcgattccagtggttgtatgtcaacggcctacttggtgtaatcttttcaattgggctgttatacactgcattaaggtcaagaagggcaaggtcatgggtgtatggtcaaggttggtcacgttttcatcttacttttatctcattgtgtccaatttagggggcaagttgagctctgggtcatcaaattagcaatagctgttccattagtcatccatccaaccgttagatttatgccaaacatttcttttgctgttttgaagtttggactgggcctactttagatcaggcgttggttgggctgggctgcaagcttgtgttgtgtcagcctgtcagctttggggcaaaccatatggactccttttttttccttattgagtggatggcttggcttgagatggtgtttagtagcccatatcgacagattcttattctgcacagtgtttttccctctttgaaatttttaacatttagaaacaaaaacaagaaattactactatcttctctattaaatacgcaaagcttttgccatctttcaagtaaaaagagaagaaattactactatgtatgctacatcagcatgcaaatgactccatgatgacattttataaccattgagaagcacatgtacatgaactgatcattgtgcgtttgagttgacacttgcagggtggctcagaggcttcatttctgattatggtgtcccacttatggtgattgtttggacagcattatcgtacgcattaccaaaggatgttccttcaggagttcctaggaggctgttcagtccacttccctgggagtcaagttcactgcatcactggaccatagcaaaggtaataaatcaaacttgcttgggatactggagatgtgaatatttatggtcttcaggtttagaattttggtatagcttattttgcatggcatcattgataatatctttgggttttttttttatttccaggacctgttttctgttcccccagcatacatatttgctgccattctgccagctttgatgattgcaggactttacttctttgatcatagcgtggcttcacaattggcgcaacaaaaggagtttaacttgaagaagccctctgcttaccattatgacattttggtcctcggattcatggtgtgtgccatggttctatgataaatttatctgcttatacccgtctaaaaaaattatctgcttatggcggcccttcttaagtttttttttctcggctaactaggaacctaacatcttttggtcctcagtgaacatttcatttctctatcacttctagcctaaaactagccaaaatcttttagtatagtcttatgaatatgaaatatttccgttcaaaaaaaatgaataagaaatattctcatatattttaaagtagagttggtatttgttacaacaattgaatgggtatgattgaaaatccaacatccataatatcttatattcttttttgcgtgattataacctggcactactgcaatctacaaggtgatggttgataggagtattggacactgattctgctttgtggtgtaatagaccaaagctgtgacatgctcctcttctcatatagtagtataaaaatgatgcaggtcctgctttgtggtttgattggcatccctccatctaatggagtacttcctcagtccccgatgcatacaagaagccttgctgtccttaaggggcaggttggtgaacttcagaccgaagtgttttgtttgctacaatatccatatttgctcatcagctcacccatcttcttcctctgtttgcttagctgctacgcaaaaagatggttcaaactgccaacgaaggcctgatgaatcgtgctagcagtttggaaatctatggcaagatgcaaggggttttcattgagatggactgtgaaaaaaatgtgagtatgtactcttcattactgatgtatgttaccatataatttcctcttccatttatttgttgcattttacttctattgtcaatgccagttcctgtcaaaattactacatcagttgtcaagaaaattagtcctaagctcatgtaattgcctgaacaccttacttttcaccttacgaggagtccccatacttttggttttctttcagtaactattcaaaatgtagatgccactgttagtcttgtatggaaaatgttcaagtaaatcaacttataggtcaaaaattgtcctgcagactgattctgttgacaaggagttaaagagcttgaa

SEQ ID NO: 1316 - DNA, 895 bp, Oryza sativa
  Intron number 6 from transcript LOC_Os01g50040.1 (locus LO C_Os01g50040) derived from phytozome v7.0 (chr-ID Chr1; po s 28747351 to 28748245)
aacttgtcttgcaagtattcagaaggcattgcaaggtatattgccttttgagtttattcttttcgacattggagtacttgcttagcttgatttagtccttttcaatccttcacatgttaacccatttcaagaaaattagttattaaccaggttactagtctgttccaagtatccttttcaatttccctcaaatttctgctgtaaatgttagaacctttgtgacttgaacttcaacttgtttagcaaacatgttagtaggtatgtggcttgcttatatgggatgtgaatgtgagactagttttctgttcccttgtttgtagatatttgatgccttacagtgttaaataatcaaatgatactatctaatcaattaagaacgatagtatcctagtgctctgctgcctcgatggcaatgctttgtctgtatatatatgctattttttaggggaaaaaaatgccaaccaagttgcagcataattgtctgagaaaagttccatcaaatctatatatgttcagttcagtcaaaaaaaaaaatctatatatgttcagaatgggggttttgtgctatacatttacattttatcagcaatactttttctgatagcctatatcatccagctacataattactgcatgataagaatatatatatttatcttagccaattgtttgttccttgtagaattgtccttatgcacaatgcgaactgattatgttctcattagattaatccaacttctaaaagttgtgtaaaactgaaaaaaaaatgaatggagttaaattgttcttatgctgaattaagacaactgttcgtatttattttggtccattaatcctacatattcttctatatgtagcactaacgattctattgaatttgacctgattgttgcag

SEQ ID NO: 1317 - DNA, 1656 bp, Oryza sativa
  Intron number 1 from transcript LOC_Os08g10400.1 (locus LO C_Os08g10400) derived from phytozome v7.0 (chr-ID Chr8; po s 6102560 to 6104215 reverse strand)
agccccttgggatctaccgttgctgtctgtatactgtgagtatatgaactaaaatttgtgatgtatactttgatttgtcatgagatgatcgatctattttgacttattagctctagaatacataatgtttcactggagaatctccttatatatatgatctagtattgtttttaggattgtatttttttacccagcagtttgagattttaaatatattttttaatcctagtctgctctagagtgtgaaatcaccatttgatatcattagtatatacttactagttaatttagaaaattggagttactagttgttctgttgtgaatcatggaacttcctaggtaccatattgcacaagtatcattcctgtatataattctatggttgtagaaaattatagggcgtattataaatgattataggatgcattatatttggagaatctgaatattactcaaactgaatattttggttacatgcggttgttgagatctgtgtattacgctgattgaaatcattcccatgcaaaagggtgtagtgcagcctgcagatcaaacaatccaacttccaatacactacaattgcctgaccaaccactgttcttgatgaatttcaaccaaaagcacgtcactatatgcaattcatctgaatctaaacaggttgacacagaaaaatgattttccatggaaaacaattgtttatgcatgaatcagaagatttattttaaaaaaatctagtattgtttgaatgcactgatacacatctacccatggtactatattctcatttgtcacactgaagcaatttgggtgttttagggggtgttatgaggttgtcctgtgctagcttgtttatgcttagtcaaataatgttcataaaatacttatttggtctcttatatttgccaaaatatttttattagttggtgaatggaactgaactgtttagcccgtggtcaaggatgctggagctccaggggaggcgagtttggtgacagtcgagtctcagtgaggaggggggggggggggctcacttctgatcggtaccaactttgatgagacaagtgtaaatcctcttaggtgctcagcggtggagacttgagttgtgaggtcttatcgatcagcgagtagtttttttgctatgtcatattgttcgtagattctagtaggaagaatagtttggacatggctggctgagtagttattactgctgtgatctccggatgtttctacctgaaaaatatgtgaacctctaatctgcttggtagcatctatgatcaatctgcagcgcagctagttaaattcatgccgctgctattctgatacagttatatgggttcttgtgttgagcatggggatgatatacccagtgccactggattcatcttggttttctgaatgcaagggtcaattagcactggttcactgtgaatgcaaatctgtgctgtgtgcatgcaaagatcaattagcatttggttaattggttccggtcagttgcatttttcattgtgatatgatgaaagcgttcctcatttaagggcgctccctggctgaaaatatgcagatgttggtttccagatcttgttatgttgatcttttcttcagaatctacacatcagctttactttgctggttgctttggtttatttcagacttcgg

SEQ ID NO: 1318 - DNA, 3970 bp, Oryza sativa
  Intron number 1 from transcript LOC_Os11g33100.1 (locus LO C_Os11g33100) derived from phytozome v7.0 (chr-ID Chr11; p os 19114336 to 19118305)
gtgctcggcgcctcgctctccttctggatcgggaggtacgggacgagttcctcctcctcctctttcttcgcttccgtttcggttgctcgtagcgctcgtggtggatgttgagcagggatttgtagacgtcgagatctagacataccgtgttcagttcgtgcgtgccctgatttgattcctgtttcgcacgatcgagaagatctgacaagaattgtgatgagagtcgtatgatcggagatgggttggaggaaaaaaaataggctggcatttgtgctttctcgtgtccttcgaggaggaacgttgcgagattctttgcttgtctgtgtagaattgttggaatttttttgctttatatggaatctggttatgatgttagagaaatactgcggccgaaggaagactgatttgtttgcacttttttttggggtgaaaggtggttggtaggttcaagaactgaaaattgcaaataaaattggaaactctcatccttagtctgttaaactgtataagaatatataaattcaggagctgctgggatgaaaagctaatcagctatgcaatcttgtgtgtacaagcgtacttttgtacactggtgatagttaatggagtagtaatgctaagtgaacttgaacatgagattcaggaggacaatttaatggttttgggaacagaaaccaagagtacgctgtaacttagcatatggcccattgattgattctggttgaaatttcctgtttggaacaaaggagttccattgaaatgctaggggatatggcctgttctgttcccaggatacattgtcatttatctttgatatcatacgatatctttgatatcatatgtttagttgcaccttgtttataactacagaacaatactaggttgatactttaatctttgatatcatacatctttggtaagattaaataagaaaatggatcctttgtgatataaacatgtgattgtcacacgtaactttaattagaataaacctttgtggtgaggaggcctctaatttggcagcccaacatctgagagctctcccgatcaacatacctttagcgatgatgctggttacatactgtcacaattatattgttgccatgctatgtataaatgatggatcaatgcttattgtttataatactaactttttagtcatattgcacttgattggtttgtataattgaattttttcataatcaaattctgaatcattgcgctccaatattgcttacatcattccttcaaacaatccaataaacaattacttagaaaacggctccaattgaacatgttaattctgagtaagttaataaactaaccaaacctgaaagttatcttaaccatagatagtagaggtcaggttggttgttgagcagcctgaagagctacaacttcacggaaaggaccttgagaggtataactgcagcttgcctaagaactttcaaatatatgtagtgctggcaaagttccaccttttttggtaactttgtggctgctcatagacatgagagaagcaaactatctctcactaaggcaatgaatgcgattagtatcgaagagccaccctgtcaaggagcaagtcaagcaaaaaaaacaaagggttaaaagtcccaaatgaacaagtttaagacaagaagcggaagaatttttccctgatcaactctacgcggtcatgctgaccatattaaggttgtgtttacaaaaggttacaaataattcgcagaatatgttcccttacaattccaatagcccccttcttgttctgggaaaagttcttacccttatttttcttaaccttgtggtccatctggcacttgtaagccttgttttgcttcacttgctccttggcatctatagctgctgtcatctcagtgatctcttcgatactaatcgcatccattagcttagtgagagatacctgcttctgtcaattggcatctatgagcagccacaaaatcactcaagatggtggcaactttgccaacacaacacatgtatgaatgctctccagaaggctgcagtcatactgtcaaggtcctccccatggagttgtatctcttcaagttgctccaagaccgacctgccctctactaaattatacttaagataactttcagatatggttagtttactatgttcaattgaaccattttaaagagagttgtttggatagttttagaggaatgctgatgaagcaatatttgagcatattaaattcagaatttgattacatacatgaaaaaaaatccaaattgtataaaccaaggaagtaaaagagacaagaacttctgctgccttataaacaaataagcactgatattatttatacaactagcatggcaacaatataattgtgataacacataacaagtattactacaggttatgttgattgggagggctattggtagctaggggaaatcctcgcaggttcctttagctccatgtgtttggcctttgaggccagctcggcccaatggcctaaagcagcccaaagggcctcatgtcagaaatcccgatggatcggtggatagaactttaaacaaacacaaaacacatactatagatgattcgaaaaacaaggatgaatttttctgtttacaaccagaattaaccgcctagagcgattttcacgttgtgcctaatgccacgtccatccccacaacgcatgtcgtttgtctcaatcatggtgagagatgcgggcagccatgagctagcctcgaatgccctccaccaaaactaacatgcacgacatctacacaatctacacatctacgcacgacatctcatcgagatgaatgacgtgcgccatggggatggacgcggcattaagcgtggtttgagaatcactctaggccgttatttccttgtaagaatctggctttaaatgcagcacaaaagttcttccttgttttttggatcatctacagttcgcgtgtgctgtgtttgttcgaagttttatccgtcgatccatcgggatttctgatagggagcaataccacccacatgaagtggctgtagttgtcgacggtcagaaggaagtatatgctgtttgtttattgccataacatttagcactaacatgatttttgcagcaaatccagacattctcatgttttgcgaagtacgtaaactttttcgggttcacttgttcctctgtccatggaagttgaatagcccattatggacatttttgacacttttgctttttatttggatcaataaatgaggtcaaatttcagctaataagaaataataatctctttactctagcccatcctaatcacactatgcaggaatctagacatctagatataaggcccactatatgttgataacttgatattatgatctgctttattttgcagattgatcatcaatatgtcctggatacttttttttttctggttaaacaaagaaagtaaaatcccattttacatgttttgaataagtgaacttggcaactaaaaattagtgttatagtttgctttgtgatgccatgcaagtgggttcttgcagttatgctggttccatattgaatattgatacagttaaaagtggccatgcagtcagcatcttcaattatactgatgctctttcaggcacaataacatcattacgtcaacccgtctagtgtataacgctgtaatgggatttggatgtacatcctattatttgtcctggatcacaatttttttacctagataaagaaagtaatttccccatctttgtgtggttaggtaaattgttttataggtcagttcatttctcagttgtccatcatcttctatatggctgtacccatgggtttgtgctgttatcattcatgcatcatatattttcccttgcaatattgtttttaaaatacttactatttcttggttagtacctttagtcttggctctctttgctaatgtatcttcttaaaattttcagggcaattttcagactctttacttcagca

SEQ ID NO: 1319 - DNA, 1896 bp, Oryza sativa
  Intron number 1 from transcript LOC_Os09g04720.1 (locus LO C_Os09g04720) derived from phytozome v7.0 (chr-ID Chr9; po s 2505012 to 2506907 reverse strand)
gcgtctggtcacatatcaagagcaacaacctccaggtacattacatcatgctcctcctttcttaaccaagatttgcatgttcttttgcctcacaaatttattaggtcgctcggtgcatggaattggttgagctcattattgtcgcaggtttttggtagcctgtagaatttgtaagtctcagatcatttcttaattagggaatccggtcaaaaattcttaattgggggaataaaactctcttcttgcatactgtgaactactgcgatgcgggttgatgtgtgcatggtgaaagaagaaatgattagttggacatgccaggttcttgtttagggtggacaaacaatctcactctgacatcctaaaagggttgcattttacagtgctatttccgtagaatttctgtgagcttttaatatagcatcaatgcccagcagacagtgttggcatatctaccacccgaggcaattgttgccactttatttgaataaagaatcgttgttatattgattttagggattgggcttgttttgatcagcccaaatgaacataacaagtctttggcaatgccaataaatttgaaatcatttcttttgttaccaatttttgggtagtgcccaaccttacaatcccagaatcttggtaacatgtacgttgatagtctagatgggctgcaaccaattaagagctcaattaatcctcctaaaccttcaattggcataacattaaattgcctagctttacaaattttttttgcaaagcctaaattttggcttaccaatatgtttatacggtttgcagtgggtcataaaccaagcaagctcgtggttttttgctcagaattcttggaatttatgtttcattatatttcttcttggccttgacgcctcaacatcccttatgccctttgaacactactcagaagatactgctggttggtttacaggatattcttaacgtaaataacaatatactgtcttttaggtgatccaatgggatggtaccattttttacttattgtcaccattttgacttaaaattagtggagaaaacagttatggtccaaatttaatttagtggagaaagaaaatagttatggtcccatcttccgtgtgaatgtttgtttacgcatgcttacacccagaaaagtgtgaagggactacggtctgagcaagactctcttttaggaaatacgcagaagacgatcttagcaggtctattgagacttagggcccgtgtgaaactccatataggagtagcatataagctgcacgtaaaaagggacggctcattagtgcatgattaattaagtattaactattataaattttaaaaatggatttatttgatttttttagaaaacttctatatgattttctttttgcgcaaaacgctccgtttagcagttcgggaagcgtgttaacaaaaaacgaggaagttgtagtttgtagttgaagtttagaactcacccttgatatgcacttttcccctgattactaaataattcgactgtatttctaaagcattgccgttgattgttcaaaatgaaaatactgaaggaaaacatctggcattatgtaatatgtattttagtctcatggtctctcagtcacataattgaatttagtctaagcagattgcagaatgacagtttcaattcaaaagtgcttcttagcctctttagctttattcttgcagttcttctctcaattgataataatagtaaacttgtttgaaatgaagtgacttgcttgaagaaaagctttgtttttatagtctttcttccttctcatatatacataattgtatcaataaatgcccacatggaattgttactagtactaaatgaaattaatcctgttttgcaggacccatctaataggaacattgtaaactgtg

SEQ ID NO: 1320 - DNA, 234 bp, Oryza sativa
  Intron number 1 from transcript LOC_Os06g44320.1 (locus LO C_Os06g44320) derived from phytozome v7.0 (chr-ID Chr6; po s 26755628 to 26755861 reverse strand)
cttcagagacgatacacgtcgtccacctctctccggtgtgttacaaattaagcactgaaactatcaaactaacctgtgattctgtgaactctcacagtctcactgcatttcgtagattcagatttgttttgtttcttgtgcatggttaatttgattccaatttcatctgttaatgatctgtttttgtatgtcttaattcggttatgtaatacgcagggattattcttggtctaa

SEQ ID NO: 1321 - DNA, 1330 bp, Oryza sativa
  Intron number 10 from transcript LOC_Os03g48000.2 (locus L OC_Os03g48000) derived from phytozome v7.0 (chr-ID Chr3; p os 27285352 to 27286681)
gaagattcaattgcggtcaacttaaggtctgtctactctcacagaccacatgatctcacaaagtttagcttcatcaatgcatgtgttcttataatttataacaatgctcacttttgtgatttttttgctcttgaatataattggacagtaaaaatatatgtgtaaatgtatgaattttaataaaaactatattttgaatttaataaacgatctaaggtgacaaccgaacataaattactagttcaaccagacaatcaaccattgttttctactcttctctctacatttatattccaaatcatgtgcatggtccataatttgtttaacaccctgaagtcactccaacttggactaaaatggtctttgatttgcaagccctgcatctaaacagacatcgcattttatttgctgcctctaaactgtttctagcagctactatttctttgtgaacccttcatccaagcgactgagtccaactgtacttatcataaagctaggctgcgtgcatctagaagatcatgtagcatggtagcttttcagcaaaaagaaagagaaacacgttctccaatatggaaatagaatttatatccatcagataactgtaaaatgatctttcacatatttgcagtacaaccaaactacaattagcatcactacaaatggacatttcagattcttaaattttatagctatattgtggcgactagcgagaaaataccaattaagagcaaacaatacactccaagtctccaacatagatgaaattaagaaagcaaatgcaagaattacttggaaatggaggacgcaccaattatgtaccggatacgtacatagtactagtctcaaaattttgcaaatgttcttttgtgggttggggccttgggggcatgacttcattatcctccatcctttactctctgtggtgtgcgggtgtccacaggccatggcggtgtgtactttgcaacataaaatgccagcattatgtttcaggtttcaattatcaaagcataaccagataaaagaaagggggactgcttgagtgcttcaaattgcattcccataattttatttttttagaactgatttaagatgaaattatgagagtgggtcttggtataaggtggtgtgttcctgcacctctgtttgtgtagcatacaatcacaataaactatttgagaattgtgggatcttgttctttttggcggatgtgaaatttatgtgaactagctcaacatcacaaacatttcataaattatgggttttcttaattcttaccacattgggcatccttacagctcccggagacttgaagtaagcagagttgagttgc

SEQ ID NO: 1322 - DNA, 1035 bp, Oryza sativa
  Intron number 1 from transcript LOC_Os06g01730.1 (locus LO C_Os06g01730) derived from phytozome v7.0 (chr-ID Chr6; po s 425262 to 426296)
aagattaagagaaacaagaaggctccagttcaaaggttagttcaaggctccagttcttaacctctattagaaattctaaatcctgaacaagaataaagagagagtttaggtcaaatatacaattcaaaagaatacaagaaattgctgaatatgtcaaatgaaacaaggtaaatgaatcagtacttaacattccactttgctggataaatacaactcagaactgaaaatttcatatgtttgctctgtaaatatgaactatgtattgttaaaagtaaaactaaattgcattcagtactacaaaactgcattctggatgattgtattattgtgtactattgatgaataccaaactaactttataaaaaaacatgacagattgattagacttccaaccttactgaattttactctgaagatatcacagttatacagttatacagaaatataacaactaggccatatagcatatcctgaattgtgatatattcaattttatcagcataatcaccatattaaactaatgacaaattcaattctcaatgtcaaccagttgtctcatacaactcaatatttcataaagctcaagatctcatacagcacaaacaaaaaagccaatttataggaactcacaaatttcttaacatgttacagtaaaaaagtaataaaattacatacaagaatcactgtaattctagtattaactcactgtagtaaaagattagttcagaaaagtttagctcacacaatcatgcacaaattcaggaacacattcaagatatgttttacactcaagactatctcagtttaatgtttctcccatcatcagacaacaaatgaagatttcagataatagatcattgttgatttgttcaatgtctcaaaatagaatataatgaaactagttacagtgaacttctattacaaatatatagagtgaacactacaatttcaattgaacatacatgtaactacaaagaaacaatgtaaaattcatacgaaatcaagatctaatgcagtttcaatctcaatttcaag

SEQ ID NO: 1323 - DNA, 1437 bp, Oryza sativa
  Intron number 1 from transcript LOC_Os06g05060.1 (locus LO C_Os06g05060) derived from phytozome v7.0 (chr-ID Chr6; po s 2236397 to 2237833 reverse strand)
cgtcggcggcgagccagagccagagccagagccaggtgactcgacgtcctgcccgtatgatcgattcgattgggggtagtgtgtgcgactgctaaattggtactagtaggcgacaattctgtgcaaatggagctaaacgccttgcaaatcgaatcgaattagaagcctaaattggtaggcaataattctgtgcaatggagctaaacttccttgcaaatcgaatagaactaaaagctgggaagataatttcgaggcacaaatggtgccctcgacgtcgacgagctaggtcagagggggcgtttcacgccttaccctttgtagttatctcggttgggatagatgaattgatgggcgaatttagtgcaacggagctaaacacatggaaaaattggataagattaaggccgagaagcccagtttgaggcacaaatgccatgttccttttgtgctgattaatctatcatgccgtcgacatgtgattcaattacttgcaaatatagtcatacaattgtggtaggagtaacatgcttgcacgttgtcatagtgtcattattgatctttctccgtgctgataactcacttgtgttgaaggcgaaagagcagaacaaaaccattatatgcagtttacatcagctcttccggtaaagttttggagacggggcataagttccttgcaaacaatatcggatattatagcttattgcaaattgtatatggccagatatgctatgattgtgtttgctgaggtctggtgtttgtaatatacaaacaaaaaggtccacatgtgaaactgcatgtagcgcaggtggcaaagagtagccgtagtgctgctcaacgtactgtgttctattctccctgacgtgctcaccttccttaaatcattgacactaggttcctccttagtgtcttgcatttttgcctgccgaaaaaaaaaggtccacgtgaaagggaatgataaaaatggtggttgatatgctttgattgtcaggcacacgttcaacctgtatgtgataaatatcaacggttttctaatactgttttcagcaaggatttaggagtggaaaatattctttagaacaaatctgcaatagcctcccacaacacatccaactaccttttgataatgggatagttatagacatgaagtgcgaatggcaaaagtccaagtcatagatttccaaatgaagaaatgtgaacaaaataagaaagaaagaagtccatttgcagtattatgtctcttttgcccttctttgggtcgaaaataaaataaaaaatcgagatcttaccatgagatacttaatctcccaccactttttctaattcaacatggaagttcttggatagtttaaatacgcttcctaccaattagcgtggaatcctcgcaatttttcactaaatctagtagtactgaaatggattttattttcttccaggttt

SEQ ID NO: 1324 - DNA, 1473 bp, Oryza sativa
  Intron number 1 from transcript LOC_Os06g12030.2 (locus LO C_Os06g12030) derived from phytozome v7.0 (chr-ID Chr6; po s 6444960 to 6446432 reverse strand)
gtcgtctcccgctcgcttcctccctcctgggttaggttaggcctccccccctctctctctggttttgtgctgatctcggagatcccggctccaggtcgagtgatccattttttatttttttattttgttttttttgggtttcgctgggtttgtgccagtgtgttgttctcgtggatggtttgtttgttgggttccaccggatttttttttttttgggggggggggggggtggggcgctggagatggggggatttatggtagggtttatcgtctcgtctcgtgcgagtcggcccgtcggtgggtgggcgggatctcgcgattccgtgttgattagttcgtcttaagcggttcgggtgatttgatgctcgtacgtgctgatgaactgtttgggggcttgtagttttttttctctctctctcttttaaagtaatcccgagtttgccggggatttgaatatcggtttcgtgtgtgatttgctctagagggtatggtttaaggtagagaaatttgatactaacatatgccatccaatccgcgtgccttgtgtgttttgccactttgatccggatgtcttggttagccatggcgttcctgcttgagctcacatggctagaggttgcgcaagtagtacttgctccgtgcgaacgattcaccatctaatggaaatctggcggaagattggatgcatttgttaagtactgtgtgcaattagaatacgtttgcaatcgtgctgtaccagtgtctgccccccattatttatctgacagtctgacagagcgtcttcagatttgtgttaattgctcctgtggttgatgagtctttatagggtgcagcatctcaactttatttctttttaattgtgggaagggtgtactccgtatggctgacagatcgctggggagtaccttaatgaatactcacgaatttattattactagcacagtatgaagcctctgagttacttgagctgtgcataatctgggttgtgtatcgatcacaaggatcaaattggctaatatgtgtagttgtatattcataaaaatgatctagcatgtattatctgttcgtcactaaataaccaaaattgttgagatttcattttcatacccatctaagttatttgtctaaactgtgtgcgccttgtgattttgtgaaaattcttgtgtgctaaaaggaaaatgaagaccataattgcaaatttattatgcatataatttctttcgattgtttaaggcacatgggaataactgccaacatgccttaatcacactattttttttttaaaaaaatggataaggtagatgatcttgagtctgttagtctttgttctacttaccatttatattctgtgtatttgtcttgctaaaataaacttcactttccactatcctggatgttttctttcagttatttctaatatgtcttgttggccatgcaggctgtgcactgaagtactgaacgttcttttgtaga

SEQ ID NO: 1325 - DNA, 3659 bp, Oryza sativa
  Intron number 5 from transcript LOC_Os02g21009.1 (locus LO C_Os02g21009) derived from phytozome v7.0 (chr-ID Chr2; po s 12443351 to 12447009)
tgaaaactcatcgtcaaatatttgagcttgaagaggtacaaaacttacttcactaagtcaagatgctgagtcgatttcacttacttcactaagggctcctttggatgcagggggatgaaacccccgggaaaaagtcccgtacagggattttcccctgcaccaaccaatccccttccaccaccaggggaatcactcctgttagggaaattttccctgctaccatttgagagtagggagagggggttgatgggggaagggggatttagagaggcaaactgctaaacagtgtttgaacaacaaaacatgtctatatgaaatattatagaaatttcaggaaaaatagaaagtatatagaaaatccatataaataggaaacaacctacaaaaattccagaaaaaatataaaaacataaaaaaatcaacaagtattagaaattcagaaaaatacaaagaaatatagatgagtttatgtggaaaccaacttcgtgacatgacataagttaaactttagaatcatccatatcatacaaaatttaaaatctttggaatcatccttgcatccacaaatatagaattgtacatcatatttatacagggttacaatgtcttgatcaagaatgagacatgggtccatttaaatctttatctcttctatcttcttcatcatctcttctacaaatctttatatgttctaataaatctgccaggatgaaaaatataatctgaaatttaagtaataaatataaaatagtgatacttcagcaatcaaatttgaaggacggccattgatactagcttaggaaaaaaaaatgcatgcacatcaaccaacatattgcaattgtcagctacatcagcgtaaacaaactcttggtgtaagcactttctttttagatcaaacaccctacatgcagatacacaccattatttttaaatcaaacacatttgaagtccatgtttttgtactgatagttttccagcaatactctatttcaagtccatatttgaaagtaagttgagcatgcaattcaaattgaatcctggcaagaggaggaatgcaagagcacaattatgaattatcattatggacatgataaggaaaaaaaagtagtagtagtagtagtagttgttgttttaattaatcagtactactaggtcactttgtttggccagtgtattgtgcagggagtgagagagagaggagattgaaatatctgtgtgtgcgtgtctttgtatataggttgctgccaaagcttgtgttttttgaatgcacaatgccaccttgctcattttctgcttgtgatacatgacatgcaactaaagtttggactaatgtataagtatagagcataaaagacttcattttgtagtaagtatgagttcctatcaaaaatatgattgttaccatttatttagtcccaacatgcatgctaaattgaccactaattctacagttcctgacagagactacaagaatggatcagactaaaaagtgcctctagaaaaaacaaaaaacttgatgctagcagctcaaccagtactgagatctacctctaggttaacagagctgacagcatccaactaaaagaactgcatctctaattaactacaaaaaaactgttactggtttgcagactaaaatttctcatatacctcactagttgaaagatcctcactgcatgtgtgataattcctcatttcttgggactggcacattgatctcacatatttagactgcactaagcatgatattacactgtaggaaaaaccagagcacaacctactccatcaaattagaacatcatcttaccaaaactctttcatgatctaaaacaagagcaccatacgcgcacccatatcccattctgaatcgcttccataacaaaatgaattgctactgcagggtacaatactacaatgtattagaaagaacaggagaacagagtacaactctcccaaaccaaatcaagaacagaccagacatacaccaagaaaactgaagtactgaacgaacccccaagaatcaagcagcagctacaagggcacaaacctagccgggcaaccgccggcgggcgtcgagcagcgaggaggaggaggcggatctgcgcctcagcgcctcctccgccggtgagtcgcgccgccttcgatccccctgtccccgcctgcttggagccgtgcgcccacgctaccggcgcgccgcctcgtcgtcattaccccggctgccgtggtgccacccgccgcgcccacgtgtcggtgcctgtgatgcaagcgctaaggccggagagcgagattgggagctaactagaggaggcggaaaccctagaggaggaggagaacggaaaccctaggaggaggagaggagaggaatgaggagaagggcttacccttctcgccggaggaggagtcccgacggtggcgggtctcgccgaagaaggaggcgcggcggcgcccgctgttgttcgcacgagagagaagggactcctgttgcgcgagcgagaagcagcggcggattgagagaggaaaaattcccgacctccgaaggtcggggtcctttccctagggtttccccgcggattgggccgggaaatccctgcctcgtgggcttccaaatggacatggaataaaacccgtgacaatttcccccgtgggcctttctcccagggaatgggctgggatcccagtgggatcctgggctgccaaaggagccctaagggtgagtttgagggataggggattaagaagattgggaagatacacaaaacaaggtgagccattagcgcatgattaattgagtataaactattttaaatttcaaaaatggattaatatgattttttaaagcaacatttctatagaatttttttgccaaaaacacactgtttagtagtttgggaagcgtgtgcgcggactacaatgtgctttctcaccctaactcaccagaacgaacgctaagtttagtaaagtttttgcatgtagcactagtatagtcgagttctgtatctcaattctcaactaaggctgcgttggcacggaaaacagagcagcgattagcgcgtgattaattaagtatttgctatttttttcaaaaatggattaatatgatttttttaagcaactttcgtatagaatttttttgtaaaatacgcaccgtttagtagtttgaaaagcgtgcgcgtggaaaatgagtgagggaagttgggaacctttggtatagaacgcagcctagggatgatataggaatggtgtcaatagttgtaattatcattgtgaacaacagaacaactgcattttctactgcaggtaggcaaacatttctttgggttgccagatagggaaaaacctacacagtaatggcattgtccacttagctgcaatttgggatcatttacccatattttaattctgtctaaaatttatactctgtttctttttgtttctttttaccagtatgttttctctgttttgaattaaaatttcagaatctttgaaatgtaggtactgtggagtttgacaaataaaaacacattaaacaagattgttatttttcttgtttttggacacggtgcaccatttcaaacttactgattaaatccatcttctcataacacttatttgggcgagcattaaattgcaggacagttcagatagcagtagcagtgaag

SEQ ID NO: 1326 - DNA, 2129 bp, Oryza sativa
  Intron number 1 from transcript LOC_Os03g15190.1 (locus LO C_Os03g15190) derived from phytozome v7.0 (chr-ID Chr3; po s 8308120 to 8310248 reverse strand)
cccggactccgtctgctacggtctccacggcacacgtatccatctctcttcgttgcctattcctgcacttgctggtgcctgatcatggggggctggctcttactgcatatttatagcctgaatcgtctgcggtctcacccaaaaacccttttgctctcaccaaaaccctctcttgctcatcgcctaatgagaagcaagtgatatacttttttttttctgttggcgaaatctgtgttggaatcattgcaaatgtccacattctgtcccagaaggaaaattgattgaaaagattaagggggtgtttgggagagaggggctaaactttagccgggacttatgttgcccctctctcccaagcaccccctaagtgtgtacaaaatgacatgacccttttgcacaagaaattcgagtctttttatgctattagaaaaatgtagtattgatcaggcggttggcctttcttacttacacattggtaatctccgaggatacatgattgcgtagtgaaagaagattactctggggggtgtagctactaaagcaagtagctgaggaagttgtggggttaaagacattgtgagaatagcacactagaacttttcgttgtggcaagttgttttttcttgtatttcctcttttttttttcctctctaatcaccgcgggtgattatgtacagttcttcctctgcttaatataaaatcagctaaggctgacttaggtttcaaaaaaaaaaaaagtagccgaggaagtgtataatgcaagacatgggtggtgttctagctccagatgtttgcaatgaagacgacacggcaggagcagagcacaacagctggaggagatgatgcctataagaagaagatagaagatgctactgatggttctttttatcatgtttagctgctgcttcctgttttacaaactactgaggctggaaaactgcttatggataactgattattctggtggtctgggaactttccttttggtcttgtagcaggttggtaagtttagtttggtggtccttttgctcttttccactttgtcagctgaaatagtgggatggcactattgcagcagctgataaagggtagaaaaaagcttttatctttatttttgagtaaagtgtacgggcggtccttaaacttgtagtggtgtgtcatctaggtccctaaactctcaaaatgcatatccaagtcctagaacttgtcatagtgtgtcatctaggtcccaaatcaccacaaccccttcaggatcctacgtggcgttgatgtggcatgccacacggaatgacgtggcatcattttgactgacaaatgggtcccgttaaaaatttttcctttttctttttttcttctctttttttccctttcttctcctttctctatgacccgagcagaagaaaggaaaaaaaaagaagaataagaagaaaacgaagaaaaataaaaagaaaagaagaaaaaaaaagaaaatggcacgtcatccatgtggcatgccacatcagcgccacgtaggatcctagaggggatgtgtcgatttgggacctagatgatacacttttacaagttctgggacctggatatgcattttgagagtttagggacctatatgagacaaccatacaagtttaaggaccgccaatgcactttactcttcattttttgccggatgaaactgtggattccgttaaacttaaatttctggtaatggaatcgggggaggggtctcctcccttgctcaaaagaaaagaaggcatagtgagataagacgtgctaaatcgtattagacaatgccctttactagcgtgtcattcaaaagaaaatgtgtataaaattgtacgacctgttattatctaggaaattggggtttgttttgtgctttatgaaaaaaaatcatgattaactgctggtgccttatcgacatgtaatggaagcttgagtgatacacagtaagataatatgttctgaggtagataatatgttctatctagtataagagaatcaaagtgggtggaattgtgcaccatctgtatctgctagatagaaaaaaaaatttaacttacattattctttcccttttcttgtctgtcatgtaagcgatatcttgtgagagggagtgcagtcgaggagaa

SEQ ID NO: 1327 - DNA, 9064 bp, Oryza sativa
  Intron number 1 from transcript LOC_Os02g37654.1 (locus LO C_Os02g37654) derived from phytozome v7.0 (chr-ID Chr2; po s 22717844 to 22726907 reverse strand)
gtacggtcgtttggcagcaaggacgtttttaacccgtaagtttcgctcctaccagccacgaatcacctgattaaaatggcatatattatactccccgttgactttttctcatatctttgaccatttgtcttattcaaaaacattacgtaattataatttattttgttatgagttgttttatcacttatagtactttaagtgtgatttatatcttatacatttgcataaaatttttgaataagacgaatggtcaaacatatgagaaaaagtcaatggcgtcatctattaaaaaacggaggtagtatatggagaacggattttaagctgtctactctttattttcatgtcacttaaataagtataaaaaaattgaaaaaaaatatgagaagatgtattaatatatgatatatttctgggttttttttttcatccgctaatctgggccgaaccccaattacctctttttctctcgttaagtcaaaccacctcaattgtttttatcccttggatggttgatctagggtctaaaatctctctctcccccccccccccccatttcttctattataaaatcatatcaccttagttttgtttttgatgattagtttgtacttcctccatttcatattataagactttctagcattgctcacattcatataaatgttaatgaatctaaacatatatatatatatatatatatatatatatatatgtctatatatgtctagattcattaacatctattcatatatgaaacggagggagtattaccttgtgtcttttgtttttaaatgatcaattcatatatgatttaaattgttataaaacacatcatcaaatggtttatatattttttttatcaatagtcgatcagagataaaaattatacaaagcgtagatacagatagatagatagatatgtgtgtgtctatatatatatatatatatatatatatatatatatatatatatatatatatatatatatatatatatatatatatatatatatatacacacacacacacacacacacacatatgtcccattaattgccatgtcggaaatattcatatcgcgaaaattgatcttaatttgcctctcattaagccaacctaaaactgagatgtgcctagtaatgagacattgaagtgaggtttacgatatagtacatatgtacacttctctcaattaaggagggtagtgaccagtgctatcattatcaacttgacgaggataacagataacaagcagatccatggtcagccacaaatcctaccaaccgcaattagttgccaagttatatggaaaccaagattggacaagcatatgcttgttagtatagttggcaaaaagctcaggacccgatggccgacccaagcacggcacggtttgactggtgttgggcctgtgttggcccggcccgacctttggaccatgcctaggcatcagcctcggcatgatgggtcggccctgcaccaagcaaaatagacgagggagcaataatagacttattcaagccatataaagcaaaatagacttattccctaaccatataagagatgcccacagagacgagaaatgcaaaatagacttgatccagcatataagacacggccaaaagaaatgagggaggtaaaataaagacttttttcaagaagagcacgatgggttttcgtgcctttgggtcaatccggtacggcatgagtcttattgtgccgtgcctgcgccgttggtgcagcaaatgggtgaactcggtccgacccggcgtgtaggtcgtcccgtgtcgtcccaactaatatcggacctgagcccggttgtgctcgagccgaacagctcatttggaaatctatacttgttagtcccaataacaaattccctacaatcacaaatattagacgtatacaaggttaaacttttaaaatattgatcatcattttctatgtgaatatcactggtggagaaagggtttttaaccccggtttgtaactgtcacgtctagaaatttagcccaaatttccagactattttgcgtattaaatccctgtctagaaccagccagggtacacaaaacgacaagtaatatatagttctaaacgtaaatacagcgtaaaatacttacaggagaggcacttagtcctcacaccgaaacagaacgacagcagcggaaaaaggcgatcctagcggggcttcagctccactccacaggcaaaactcaactggggtctgagccttggtcttctaacttcgtcttcagctcagaagcactacacttctgaaaaggggaaataattgcaaggctgagtacaaccaccgtactcagcaagccacaccaacgatgcagacgtgcaaggggatacagaaaggggtttgtggctatttgcataaaggcggttgtaaaacattttattgagaaaacagtaaaactgttgagtaattaaagtaacattaaatctccactgatcaacgctacaccacgttgaataggcccaaccaacccacctgaactacagtgcattgggtcgatatattaagtgtgagactaatcacggtgaatctggtcgaccgcccataaccgcaggcacggctattcgaatagttttactctgatcagaggtgtacaactgtacccacaagacacagccccacgacacgtttccgtgcgccggcatgccaccacgacataccggaaagaggctgtgacaggacccttcgcataaccccctccaaccaagcacaccacacctcaggtttcacccccactcctcgtaaggcagcgggcagtcccctctcgtgcctaggtgaatccgaaagccgcataggccgtcgagggcccatccaaactccatcacgcccacccttgcctggatgcgtcagctagaggaaagctacactacaagcccagccgttgcccacgctggcttgtggtaagcacgataaattcttccaaggtttcccacgaaccggtccttaattgccatgggtgcgactagcaaaaccatgcacccacagcccaccattcagtcgcattttagttggataattacgaccatgaagcatggccagatgtgtcgagcacgcagctcattctgatactaaaaaggtctaatactgtaattatcccttcaactgagctagtggtaattaagcatggctaagcatatagttctagctaggtcacataagtaacatgagctagtcgattcattacccaaggttaacaaagaacagatatcaagtaaacatggcacaagcaagcagataggtaatacccggatccaatgtaattagcaaaacatgcatatttatttgtaaacggtaaaacattagtaaattgggatcaacatgctcaagggaaatgtgtgacttgccttgcttcttcaaacaatcttccgaactcttttcctagcgaccgcggacttccgaaacgacgaaactacacgttggcacgcaaaacgaggaaaaactctaataaaaaccaaggaaacagtacataaaaagtaaacaaacatgtagagctcaattttagatgaattttgcaagttgaacggctcaattcggagttcgaatgaattaggtatgaattctagaagttttgagccatttaaatgaatttctagacgagggacggctgacgtcatcaaggggaaggggcgcgccgacaggtgggccccgcacgtcaatggcacaaggggagggcgcacggtggactcggtccaccgcggcctgggcggcaccgtggacccggaccacgggagtggtccacgggcggccaaagcacgggcgtgacgaggagccggctcggccgagcctgggagcgacggcgcgcgcggccaccagcgacggcgaccggcgggcggcgcggggagcgggcgaaggagggcgagaaggagggaggagggtgctcaccgagttggcgccgacgaggggtggccaccatggggcatggcgacggccgacggccgtcggcggcgggctccccgagatggaggcgagacggcgctccggcgacgggaagtggtggccgaggcggcgagtagaggtggtggctcgggttggcggtggaatgggaatttcggtggcggtttggggaggaaaagtggatgccggggtacagcatggcgtggtgaaactagtggcggcagcggcgtctcgcggcagtggctaggaaggcggtggtgagctgctggaggcgacggcggcggaggagagaggtggtgcgcgaggcggcgatgttccggaggcagagaggggaaatggagtaggggccgtgctgcagcacggcgccgcgaagccaacggtggtggcggattggtgcggcagtgggtggagcagcgggaaaaggcggccggtgaactccggcgagcggcggcggctcggcttggcgaggggagagcgggcaaggacgcggcgagctcgggaaatttggggaaatgggagaggagagcacggggatcgtttttatagcctcgagagtcgacggggaggccggttggcggcggatttgaagggggaaaggggcgccggcgacgtgggtgagtgggctcggggtggcggcggttttcacagggagtgggggaagaatggcgcggacgtgggcggagaccgcgcccacgcacgcgcgggaaaaggggccgcgcgggagaggcggcgacgtgggcggcgcgggcggcaatggcggttgccggcggagtggctggaggaaggagatgacaggtggggccgcgggtcccacctgtcagccagaggaagagaggagaccggttgggggggggaagcagactttgagagagagggccgaccgggccgaggaggaaaaggaggccgacctggccggatgggggggatggaggaaggggacgggccgcggggagagaaggaaaactttgggccgaaacggcccaaagggagaagagggaattttatttgtttttctttttaattaattgattaattgatctttgtgctattcaaattatttctcgagctccaaaaattcgcgggaaattccggagagtattttagagcacaaagaatattacaaaatattctcggccaatgatttttaaaggaaatttttaattccctcaataattcacttgattaaattgctttaaattttatttaatttctagaaaatgcattatttaatgatttttaatcccgaacgaaaatcggggcgttacagtaacccccttaggctgcgttcttttcaggctagtaggattagattctcctcgttttccgttagcacgcttttcaaactactaaacggtgcatttttctgcaaaaagtttctatacgaaagttgcttaaaaaatcatattagtccatttttgaaaaaaaaattagcagatacttaattaattatgtgctaatggatcgctccgttttccgtgaacactgttgagggtggggagaatctgaaaagaacgcagccttagtcccagttatgcagccgggactaaggatccaggactaaagctacttttagtcccggttgaaataaccgggattaaaaatccaattttagtcccgattgatgttatcaaccgggcctaaagatagagtggagccagggcaggtttgttttttttttttcacagcatccccaaatctatcatcacaaaacaaaattggatcatctccaaatccccaaatccatcatctctaaatacatcacaaattctaaaaaaaaaacatcacaaatacatcacatattcacatcacacacacatagtgaatacatcaaaaattctcagaaacaaactcatcacaaatccttgaaaaaaaagttcacatatattccagtctggccgccgtcgctccaccgccgccgcctccccagcccagccaccgcagaccccgcatcacccgtcgccaatgatgatggaattaaaagatattgatctaattttattttaaacatcaaataattttcataagagggattaatgactgtatatgtcgtgccacgttatattttgctaaactccctctataagcactgcattaattcaagccatcaaacctagagagacactctccacccacacccccatggcatccattccactcctgcggctgctgctccctctcccccttcgagagcacttctggccaagccaccaccggccaaacgatgtcggcgtcggcgagctccacccgattttcgttgtgcctggggctagctgcagcaacctgggggcgtggctcaccgacgcatatataccggccgtcggtggcgaggtgcggcgcggcgcgttgaaggggaagggttggttcgggctgtgggagaacagctcggacctctcgacgcaccactacagcgagtgcttcgaggagcagatgagcctcgtctaggacccacgtggccaacttcggcattgcgagagggttccgctcgaagaaccctacacacccgtaatatatacatgttttgtgataattttattactaagtttatagttctttgataaatatgattctaaatatgtagttttatatataatatagttctgtcaaagtatactagttttatggcagttttgtgatacgccatgtttgacgaaattatcacaggacaaaatatttacgatcaaacttatcaaaggattacaaatttaagacatggaatggaagaccaccaaactacagatgatgtactatttgtctacagaaatctattatctatctatccatcttctattattatatactaaaagtccattaaacttcctataaatactctcaagctgccacatggcactctaataaattagagaaaatcctataaattctaaaaaaaagcaaaacatctacccttgatttttacttaaattggtgggtccaatattatacaccgttaaatgaaattgatctaaaaacaaactaaatacgatgaatcccacctaggtcacatatgtacatgggtatgtagtacgtacgattccctccaatttttttttactttttttcttcctttttccatttatacaattgatatatattttctaaataaacataattttacaaacaaagaatataccatcatataattctttataaacacaggtaactaaattagctctacaatctttgaaaataaaatttacaccattatatgtttacccattaaatcaatatattttccacttaaaccggtgtactcgttactttgtactattattttcaaataatacactattttaaaataaattttacacaattatattgtgtacatatcaaataaacaatttaagatctatattaactaatttatacgtgtacttaaacaaatggacccattatttaaatcatcggatatattttttattactttggactattattctcaaataatgcattgttttaaaataaaatctacaccatcatatcgtgtacccattaaattaacaatttaaatatatatatatatatataactaatttatatttacactacaactggtggacccattatttaaatcaacagatctattgttaataactaaagtgtccaaagttctctttttggtccgctacacaaacacatctgcacctttgcctttcgcacgtgcgacaaagcatcgtgtctgaggcatcttaggtgatcacgaccgctgcaacgctaccgcttttgtcaataacatgaaaataaaattaaaggtgcgttgcagcgagagaagaattaagcactataggaacacttagctctgtttaagctgaaatcgagagatgattacataataattataatgtattgtgttatgttgtatttggatattgtattatttgttcgtacagttgaaagaaatcattatgatataaatttgagtacaatattaacgcatattaatagaattcctaataggacaagagtgttataagggagtttaaggctctattcttttggattttcgtttgcacgctccacgctttccaagttcctaaatggtgattttcttaaacaaccttttaactttttagaagttaatttattcgtttataatctcaaatagctatcacataaatcagataactcatcaatttcagttgtcctaaaccctaagtactacatatatttttcatgcgagtcatggtgatcagtaaattggtgatcaacgcataatcaaagtcgtaacatgaatctgtaagagctgctatgaataattgtaaataggtgtcaaaattaatttctattaattatacatctaatggcttgctagcaatatatttaatttctctctacatgtatataaatatggacaaagctagaatgaatattaacatatatcacatacatatatattacacggttcatattctaattagttaagtccattaaaatttcttaaaataccctcaagctatcacgtggtgctctaataaattagagaaaatattataaattctaagaaaaaaaaaagcaaagtatctattacttgattttcacttaaatcggtgagtccaatattataaaccattagattaaattgatcttagaagaaactagatactacgaggtcccacctctccaccttacacacctacgtacgtgggtacctatgcttcccctccctttttttttcattttttcctttcttctttttctccatgtatacgcttccctccctttcttacaatatcatgcacctaaatgagacgatttaatcacaagaattttgattatcttgctcttacatttttcatttgtagccatacttcaagcaatagtttattatttactcgagaaaaaaacataattcaaatgtcgtaagtatttaatccatctcctactcaaaagtttgtgaatggatttttaagataccttaagaaaaatagaactcttaaattattacaaaataacagtatccgaactttagtttgccattaatatatgagacaaaatttttaaacaaataataaaaatcttgcatttcaataacataagtgcccgcgcatgcgcgcgggtcaccttccagttattaaaaacaatcctgcctacgtacgctaatgctgttctcactatattaattaattctctgatctgcgtgcagaga

SEQ ID NO: 1328 - DNA, 2752 bp, Oryza sativa
  Intron number 6 from transcript LOC_Os04g35240.1 (locus LO C_Os04g35240) derived from phytozome v7.0 (chr-ID Chr4; po s 21244290 to 21247041)
cggaggtgctatcccgccgggagtacgacggcaaggtcagtcacgcccattcgcccatcacttccccttgtcatctgtggcatggtggtggggcccactggcagtggcggtagcgtggggcccacctgctcctggtcctcagcgctgagcacgtgccgtcccctgggagtccacgtatcgcggttctcaaggcaaacactaccttggaccgtagacccggcctatgggcgagctgggcagcatcggaaagtgggtcccatgtgtctgtgagtgttgggtctatgggctactatgggctagggtccatgggggggggggacaggtgcctctgggtggtggatttgggatttgtcctctaggagagcggtggagatttgcttgcctgcggccggacagacgcccactgggctgtgggcccgggattgttcttagcccgggcccacacactgcctcgtgattcgtgacagtagtagtactagtacatgctagacagtgtgtagtagtacgcgctaaacaggctgtgtgaaggggccctgagaccatatgctgctgactgtcactctcagttcagctgagtgtgttttgctcaaaaaaaatagaagaagaagaagaagaagaagaagcttgagtgtgtgtttcttgctgcagctgagctgagctgctactgtagtgcattagattcccagctaatgatgctccctccagtagtggtagtagaactccagtgttttttgttgaaaaatctcttctgtaaaagcaagggagggattattcaaaaggacaggttccttccttttgtgtgtgtgtgatgtcgatctagacattcacattctctctcggtttttttttcggtaatcaactaatcacacatcacgcttgatggggatgctcgcttcgacgaggcgtggcggctgctttaacagcacgccagacacaaaagaggagggggggagaaaagacgggttgatcgaattcgagacggttttagtggtcaagagtttgcaccctgtagcttgttacgtgcccccacttgttgctttattaaaatgtggtggcctgaggtaaagtgagattagccggtgatggcatgagattctccagggtacagatgcgagatattttgcttctcgcccgatttgggcagggttaaaagttcggattctttgtatgtttggttgtccagtgtgttttggcgagtgaagtaacggagtgtgattttgtctttagttacatgcaacgctaagaaaggaatgatttttcatcgtttgggattgaaatggaacagacgtgtagggattaggtgaattgtgacaggatccatgaggtagacgcacccctcagtctgtatttgcagttatgcatgtcattcggttggacagcttgcaatttttgttgacatctttttgggttcacctcatactttatgtccttttctgagcttttttttccatcatggttctagtgctacatattagctaattgacgttatcacaatgggccctcggacccaatccttttcaggtagacatgttagactgaacttctctttggccttttctgtggttattaattttctctctctccttggtgtcagttactgccgtcatatcttatgaacgattttcttcaggacagtgattgcattttgttccttccctatataatacatctactcaggctgcttagatttttcacgctgcaaaattggttgcttttgattgacaaagtggacactgccatagataatttgtagatggaatatcaagaaacattttatcatttgcatctagatgttctttttttacaaccataatgtgcccttgatttcaacaacctataatgcttatttccgagttatagagttatgtatttttcagctgatttgttcccgtcatctttagactgccctcaaccacctgttttttatttgaattaatgctggaataatctattgcataaagaaaaaaaaccactgttgtaccgctttccaaaagattactggatgcgtatgtcctataacagtcatggttgttagcctacttagccattaggtgagaaagcacaaagtgccccacagcaggtaaatgtctgtggggggaatatgtaattaccgaaggacatggatcctctgagatcatcttttctatgttctcatgataacgccaccaccctaataacgaatgtcaatacttatgcttaccataggtgtgttctgtcattacctgtttttatctttgctttagtacataagcgtagcactgatgcttgtctgccttttgaatttaggttcatggaagtgcacgtcatctttcctatcattcagtttattttgtacagaagttagcatccattgtgaacatagctgaaatttgcgtacttcggagagttttgatatttccacgcttctatttggaactttgagcgtactaaacataagtgacagcatgctgtgcagaaaataaaaggagccaatcaaatagatgtgctaaatggtgtaatagagcctttgatttttgtttcttggaccattttaaattacagagattattctgaaatgttttgatgatcgaaacaagcacgattaatgttctacaggctgttctgccttaatattctactagaaagaagtgtactttcatacatcctgttcttgcttgtatttatcctttcatttgtttctatcttatctcctgaattcatttacttgtctcctaacatttttggattggatggttgatgcttcagacagccg

SEQ ID NO: 1329 - DNA, 3390 bp, Oryza sativa
  Intron number 6 from transcript LOC_Os11g08569.1 (locus LO C_Os11g08569) derived from phytozome v7.0 (chr-ID Chr11; p os 4524794 to 4528183)
ttgactggaacaaagctcgtactcagtgtgcaaaggttggtacagaaaattgtgtagaataaagctcgtagtcaatgtactgtactatttttattaatgtactgtaccactagaaaactgttgtttggaaaatatattaacaaactatttgctaattacatatactacctcggttcttaaatataagacgccattgatttttttcattcatttgagttttcatctttccggcaaatatttattgaaatagacaaatatatttgtaaaccataaaatagttctgatgttagatctaatgttacccatttcactttacactaattgattaaataaatattgtgagtcatttgagtaagaagttaatggtattatacatttaagagcggaggtagtacttgacattaatgtattgtaccattaaaatattgttgaatcacgacaaactattggctaattacacatactttaaaacaaatatagctctataattagcgtcttgatcgtctcaccagaatatacaaagcaacttcatagttgcatatatactatctcctttgtaaaagtgtaaagtttaggataaggtttttagctcttttaaaactaattagcttgtcgtaaatctcatgtattaaagattgaaggtagtagaggaataattacacagaaaattatctacaagttgtatatgtattggacttgcactacaagaaaccagaatatccttagcggccaaaaacagtttgtttcggttatttttatatgactttgtttcaacagtttgaatttaaatttcaaatgatgacaacttcaaacaacgttttcaaatagtaaatgatttcaactgaaaaaatcatcaacaacaaagtggcataactcatcaagatctataacttctattttggtcatttcttcatccgacaaagtgatttgtaacattgttcacaaaatgtacatatctcctatatagttttataaactataagagagatatacaaattttgggaaaaatgttactatcattttgtcggatgaagaaatgactaaaatataagttatatatcttgatgagataacttttttagttgaaatcatttactgctttaaaatattatttaactcccatgagttaaaattttacgagttaaaattttactgggagttaaattttaactcatgagtgaatctgctgttggatggggagggaatggacggttgagattgagatcgcgggagaaggtgtggatcgatgatgtggcgtgaggcgcaaatcggtgatttggcacttggcgggaatttttgacctgcaggtgcacgtaaaaatatgaaattatcttggcggctatttccaaccgccaaggaaatatgtactaagcaaactatatatttccttggcggttggaaatagccaccaatgttttgcttagcggctaatttgaaccgccaaattaaaatataatcttggtggctgattttagaccgccaagaaaattgcatggccaccaagccaccaaggatattctgttttcttgtagtaattgtatgttgtcgatgcacagtttggtagaataagatcattggtcttcctaagaataggtgaaaaagtatcaactatctgtaaaatggaattgaaataatttatttataaaataataccatggaataaatattcttatggaaggatcattctgtgaatgatataattcacatcaatcagatgaaaatttataaaaatgcattttctatgaatacatacactactatacagagctaattatatagcagatcactgacaccttattttatcaaatgaatattgatgagccagcattcatgaactggaagtgattagccatgatctattgatgacagttcttggtagactgttggtgataaagacaatgtcactgatggttcttacttgatagtgtcattctaactccgcaaaaaaaaaagtcatacgaggattttgtaggagatattaacaaagaagtgaagtgatcttcctttgcccctatttactaacgaaagggcatgtagcctgacctgagtagtaccggtcctgaattcaaatatcctatggagcgaatttcagattgagttgtttgcggggctaagttccctatttcaatgaccgtatatatccggttggatgtataggcctggtaaaaaatacccttctctaaaaaaaaagtcacgttactaattgttgaaaaacatatagggtgtgtttcgccatgagcactcaatggaaacaatgaatatataagacatcaataattattgaacattttttccctgaaattgtaggttgcttgcaatcaagagatttaaagtttgactataaatattatttttaatatttcaaatatacctttgaaaatagcataactagattttttcttgaaaatgaatttagcaactgtcctactatatcactaatttatagtctatgtagtatgttgggttccttgtctagtaaaaatggcactctgttttaaacagatagtagttacaatgttgctgtgaattttggctaaattaacaacgaaatgtagcacaagtcaatgcagtagggtttgtctgaaattcccttgcagcctgactgcatatgaaaacaccttacactaatgtaataggattaaccaggaagtcccattttttagagtgcataggatgtaataagttagcctcgacctatctaaactttcagtgtgatccaaaatcagacaacaaaaattaacaaattaaaatgggccttgcccatggtcacctcaataaatgttaacagtcaaactattacaagtgttggcgtcactctacagtaaatagtctacacaaataatagtccttattccttttcatcaagaacacacgatattcagtgatcaatatgactatttacagattttaactggcaatatagttaagtgcatctttcatacgaatgtctcctgaagtatattttccatatcagatagtaattgagcacaaagcagttgagtgacatgagaattaattatactcccttggttccagaatataagtatttttagtatagtgacaagtcaaatatttttaactttggctattaataaaaaaataaagaatatcaatcatgtaaaattgatagtcatgtaactttgactatgataatatgcaactctttttatttaaaacattttatttctatagatattgttagtcaaaatagcatctcgaagaacgtgtcagagtcaaaaatacttatattttgggatggagggagcagtgaaaactaagaaagtatatatataagagatgtcgtattatagatgtcatatcatcttgttctgtgaccaggacttttctactgtctaaatgatcatttatatgctcacatctcaggaagat

SEQ ID NO: 1330 - DNA, 3004 bp, Oryza sativa
  Intron number 7 from transcript LOC_Os03g21914.1 (locus LO C_Os03g21914) derived from phytozome v7.0 (chr-ID Chr3; po s 12533305 to 12536308 reverse strand)
agtttggcaagttaaacaaatcgttagctgaactggtacgcatgacatgaacctgtaaattcttctgtatattgttactcctttataaaagcctatatttgtcaaaatatgtggttgccagcctgttgtcagaacctgtgactgacccggtcaggtctcaggtcattggtcactggttgaagttgaactgcaggtttttctttatacattcaggcagcacatgtatttcaaatgtctatgctttcactgctgttcccagccaagagcatggcctggtggccactacgtgcgtttatttcagtagggtagggaggccttgtgctcaaagcctaacgatcatgctatttttcctatttattctgattagttggttctcactgggcttggttctctcaccaggccacaaaaaaaaacagctgatttgataggtttttgctgtccagagtggcttggctgcagaaatgatcaaatagccttgaccagactggggaaagcactgggttccttttttttccgattcaaaccgccagtccagtctgaatctaataacactggtcatgagtgcctcaaggatgtcacagactcacaaattcataaatgccggacatatagcattatttttttaaaaaaatcgttattcctttgaagcaaattacctacattattaaggtttgctataatgtactgtagcctattctaagtatcaagaaacataccattttcatgaaatacttgtttttttcaacaacaaaataaacttaaatattgattaaacatttgttggtgtttcaagttctatcacacacttgttttgtgatacgaggtaccatgagcagctcttcttttctttagccatattgatgatttggaagggagataccaccaagtttagctgtggtgaatcaaacatgacagtatcttaacaatttttggtgcattcgttttacccatattccccttttaccttagggataattgcatctatacccccactttaaatgccaattgctgttttacccccactttttagggtttgcagttttacctccactttttgaatctgaaccagctgtctaccctcagttgtgacagccatttggtgggtcccgcgttttgagttaaagaaatacaaaagaaaattaaaaaaaggttttaggaaatatgaaattacctatgtacccctgagggaatggataggatggtgagtctgtcctcccaccccctgcatcggtttcgggcaaaaccctagcgctgggcgtgcgcgtggggtgacgcctgcgacgacgagggcgcgcgcggaggcggcggctgcgggcgagcgcaaggcgagggatgaaaacggagcggatagtttccgtccgctctggataaaaacgaatacggatacctttcggatcggataattctcggatagttcggatacggatacgaatacggatattttctctcggatacgaatacgaatatggtatcagggtttccgtcggatacggataataattcggatatccggtgaacagtgctattcggatatccgcagaagccacaagacataccccatttctttataactctatgaccttcaatatacttttttagattttaatagtagttcatctcttaacactagtccacattattaatattatttaaaattttaaaaatatttataaattatactatattttatataaaatgagctaattatatatgttgatatttgtttctattagaagttgaattggttttcgtgttccgagaaaaatttgtttccgtattcgtgtccgatcatattcgattcttattcgtattcgagatagtccgtatttgtttccgtattcgagctatccgtatttgtttccgtatccggcaaaaaatatgaaaacgaatatggtatgagcattatccgtccgtatccgctccgttttcatccctagcggccgcgcgcgaggcggcggcagcgcccgtgggcaggtgaggaagacgctgagccgctacggcctcgccgagttcgagctatgcaccagcgacgaggcctccgcactcgtcccctccctccgttccggcggcaggttcatcggcgaccccggaaaaaagaagatcgacaagatgctctgtctaatttctgcgttatctcctacctatccatgaaaaccttgttaattatcttctggagagaaggtgaatcataattagggctcatttgatttgaatgctcgttgaggtttgttcgatatcaaatcgatctaatgttttgctatgtatcagtgtataaccttcaggaggaatgtactgattcatataaacattgagtagtgagatcatgaaaaccttgaaattaagtcaatatctatctagtgacttttgaaaagaaaaaggaggtgaattggagtactgattcatataatcactttttatctagggacaattgcaccaagggtataaatgtcattttctctataactaacaccattaaaaccggctgttagaagtgagggtagacggctgtttcagattcaaaaaatgggggtaaaactgcaaaccctaaaaaatgggggtaaaacagcaattggcatcaaaagtgggggcacagatgcaattgcccctttaccttaatgctattaccattttagtttctgatctattgagttttccgacactttcatgagattatctccaccaccatctgtagtgttccttttttttttttgtgcgtgtgtggctcctaacaggaggcttagaaccatcgatttgttgtgtgagcattttgaataaaagggtatactcatgctgtttatcttttgtacatatctgaaattctgaatcaactactattagataatatatgcctgactgtctgagctgattgttacgaagttatagtaaccccatattctatcttcccattaccttatttagaatgtattcttttgttcaaagatattttgctctaatgcagtgctatcagtaatcattattaatcttaatactatcatgtaggttg

SEQ ID NO: 1331 - DNA, 3563 bp, Oryza sativa
  Intron number 1 from transcript LOC_Os02g04230.3 (locus LO C_Os02g04230) derived from phytozome v7.0 (chr-ID Chr2; po s 1854606 to 1858168 reverse strand)
cagcagaacaattccttcaaattcagtggtagcaagtaagaaccttagcttttctttgatgctattagcaattggagcaaccccttctagctcgagcaatttgtagcatgatgtggtagtgggccttgtagggaaaatatgcactttcccattcacaatgtgcaaagcttatttccggtatgattttgatgggttcttggttcgaagaatagttgtcttgtgtgtttcttcgctaaaagccacactgtttttcattcttggatacaaggatcgcgcagctctattcttatccaaaatttctctttgtttattttatgagcaattttacggtccttgaagagataccatgaggtaccttttttctattgtaaatttggtacctcttggtacctaggtactataaggtaccatgagataccaaattttacactaaaattttagtatctcatggtcctcaaggaccgtagaattgctcttattttttatataaaaacactcgccttcaagtggatttggttgatgctttattccaattttgcttcctggtggttctgtctgttaggtggcttctggtgttggtattttgcaacaggatgatcttttctcccgctctgcttgtgctttccaagtgcttgaatatattcttaccgtgccatggcaaaagaattattctgtagaattgtcaattgtggtgggctatggctattctgaccatgcaatttcacaggataggttttagctgttgcttgcttcacgaaggtgcacttctcctatttcttgtttggagctcaaacctttgtgtccctttttattatattaattcattaggtcaaatttatctcatgtgttctaagttccttccgtacacgttccatttagttttttgcttggatagttcggcagaagctctggtgtccttgtctttctgatgtcgttggcagtgacagattctactgatagcaaatcttgattgcaccttggatccaacttcttaatttattaagtttgaccttgagggtatagcatttttgtttggctgaaatctgactttatcactctgcccatgataattataaggagaagagcatagatgctggcctttgctatttttacttgctctgctgtttatctttctgttgataccatgagcattcagaaggtacctcagccactttcctgaaatgcttgggcagttgtattacttttgatcgatgcagttcaaaactctaatcgtgtacttcctttctctaatgatccttcatgtggggctcatttgttattgagcaaggtatatactagttacttctcttgtgttattgccttcacgctatttcgactagttaatttgttctttttaagcaactctgatctccatttccttacatatatgtaaattggttaccttataaatcactgcatcaaatgtgttttgatttttatgctcacaaccttctaagctgtggagcttaacatgctcaaatcatctcccttcctgtggatgaggaatgcatcctgtttcaattgttcatatgccacatcgaagctttgtggaagggggtggtgactctctgctgcaatctgattggatgactattgcttagttggtaatcagggtgtagtgttctctgctttggcagcaacaagaaacagcatttgctgttgtgtctccgtgtagggggttaggacctgggaacttaggagcttcatgaaagatgagatatttgttcatgataggtgagatatggttgcagagttggatgtaaataaggaaaggacgatagttaggaataatgcacctgccagtttctttgcatcaagaatggatgtttgccccttagttcatagtagatatctaagataaatgaaaaggcaacacatgacttttcagggggatgatgcaatagtaggtagtggcgtagtgcttgtccacttgagtgcaagtatctgtctattataactttgaattcgccaaaataaccacgagaattttggaccatgaatgaaaattgtgaagaaaagcataatttttgggcggtacagtgggctagtgataaattgcatactcatgctaactgtttggattagcaaagttcaaaattctaatattagtatcgaggatattgcataaaatccttatatagatgtattagaaaacccagattgagcaattaatttcaatttagccttgatgttctttaaaggttttgatgcactcttaataatgatctgccaattgtttgattttcttttttgcacgataattacatggtgataactatgatattgattttatgttcatgtggaacagagttgattgttataacattacaaattaaaattacttaatcttccacattttgttgtagctagaaatagtgcatcctgaccactgtatggatgttgaatcaatgcatgcagtctctttgtagacacatcttcaaagaaatccagtcttgattggtacaaactgaaacattttgcaaaactatccaatgtaaaatgtcgaaatattttagaattttattcaaattcttgtttaggtctaatgactctaacatggaggctagagatgatatgaaccaatggaattgtgcaatggttaggcacttagggttctttggatcaacgtgtgttcgccaaatcttttttatgctacatgtcttcttctgatgaaagatacatccctcttacgttacatttactctttttcatttatctaagctgcaagtttaatttaattagttctccatcaatatggtgcaaggagctagtagcgtagaagggtgcacaacatactggtgagggaaaaattgatgtgggcccacattatttttggacaaatccatcccttttgcctatccctcccctttccccactctccgaactcctaacctagtttcttcattcttcgataatcttcgaatcccccctctcctacgaccgcagctacctgttatacctagaaatccgacccctgttttttcttcccaaatcagattttgcttcctgcggtgccggacagcatttttggccttggaacactgacgacccacctaattcgaatcaccttattacatcttcgatcgttggtctgaactcgttctcgttctctttccacctgattctagttgccttattttgtaatagcttgtgaacacaattcatctatatgtagatctttttttgctttgacttaactgcattgctctgatttaactatgtttgttactgatcttgaccattgacatcgatcaataacatttttcctttcctgtttttatgttttgattatgcatgtcatttgcttgaagctacttttgccatattgatgtgtgccattacagtttccaaattatcagttgttctggttcagtttattttatgtcaacttcgattaatttgcaatgctgctttgctttctttttggtccttttgattgtcttattttactggattgttgaggactcctaaaatgttccctcacatgctctatacacattttttctattctgtgatggtctatatgattttgggaaattgtgatgttttagagaacatcggac

SEQ ID NO: 1332 - DNA, 7914 bp, Oryza sativa
  Intron number 6 from transcript LOC_Os06g28194.3 (locus LO C_Os06g28194) derived from phytozome v7.0 (chr-ID Chr6; po s 16023420 to 16031333)
gacgaagggaaacccactgcagccccgtaagtctggtgtgtattgttccatatcttttagcgttttcaaatttgttgatttttggtatactgcccaactaacaaaaatactcaaaattgacactctaagataacttaagttttaaaagataattaaaaaattcatgtatttataatatcaccattattattagcatgcgcaacgcacagatgtagctagagaactccaaaaagagttagcccttcattagttggattatataattttattatcgtagatcatattaagagtttgtgtcgtggattgtgtagattcttttccctaaaatttgaaattaataaatagggaattattcacttcgtgggctcttaatttcgcactttgctttttaaaataaagtaatacatgttcataacgtgcgtgtgatcagccctataatttgattcgtagatccagcattactaattagctaattgtagctgacatagatcattgcttcaatctaacataccgtaaagaaacaaaatatatatggagttgtccttcttcgactactaatactagtcgcctacctgtgtttgcacgggttattgttatcggcgttataaagaataaaaaaaatcataatttaattatttgtcgacattttatgtcatgttggaattttaatttagtcattttactaatttaatttgtaaatcggaaattactaagtacggagtttgaagtctcaattatcccttattcatgatctattacttttgaaattgtaattaataaatattaagcagttcctgggttttgtgtgaatttacaattttcctttgtaaaaaattatagtttccctgtcttaaaaaatacaatgttcctttcttaaagaagaatgagttttcttatgattttaattactgatcatacgcagcgcccacactcaaattaacgaagtagtcgatctattgcaatttttagactgatcatacattgtcactttgctataaaacgtaaatcacataacagaactggcctatattcagcaaatcacactgatgtgcaagaggagagaagcaacagaagaaacaaaaacattatgtgcaagctacctgcagatgcgcatagaacatgtcaaacattgtagagttttcagcttagaaaaaaataaaatcacacctcagatttagctggaaaggataatccctgataatcagcagcagttagagcccaaatcagaacgaagtgcatttagaacgtctcccatcttctctagcagaagtctcatgtgaccacgtacgtttccatttgcacacagttcgattggatcggatagagtccaaattcgtaactgatcaggatgaagcgcgatggccggagctgcttttcatgattctgtctcgcgttcctgtttgttgcgagaggctgaaatacgtacgggtatagggcaataacaggttggattatttttttcaaaacgcaaattggatgggctttcaaataggccttggattggctctgaaagaagcccataatattaaacattatgatcaatggtcgagatgttgcgatctagttaatcaagggctagatttttcttcttaatatgggagctcgtaggaagtgcccaattagggcctgtttagggcctatttggtacagctccaactcctaaatttagctccagtagttgagtctggagtggagttgtggagctgactaaacttagctccacaactctagaacattttgagagagagctccacccaactccactcccagttttggtggagctgaaatgagctccaactccagaaggggtggagctggagctggagctgtgccaaacaggcccttagtatagctctaactcctaaatttagctccaggagttgggtctagagtggagttgtggagctgcttaaacccagctccactcccagctccacaactctagatcattttttgagagagctccacccagctccactcccagttttgctggagctgaaactatttggctgagctccagctccagcaggggtggagctgaagctagaactgtgccaaacaggctcttagggcctgtttggtacagtttcaactcctaaatttagctccgggagttgggtctggagtggagttatggagctgcctaaacctagctttacaactctagttcaatttgtgagagagttccacccagctccactcccagttttggtggagctgaaactgtttggctgagctccagctccaggaggggtggagctagagctggagctgtgccaaacaggctcttagtataggtatggataaatagatatatatatatatatatatatatatatatatatatatatatatatatatatatatatatatatatatatatatatagatagatagatagatagataactttttttaaatttagttctggaaataaaaaaatcataattaacaagttaatgcttatctaaggtgctatacgtttcaaaactaagcaccatatttagctaccaccaacaggaggaacgacagtctgtgcaatgcacgggctgacaactagttcccctaattacacaaatctaactagacaaaattaaaataggcacgagagagctcctaggctctggtaaactaaataaaaaaaatgaatagggttgaattacacctcacaaatccaatttgtagggcgcgacccatagtgagaaaaaagttttgttgtgacaaggtccaaagtgtgcagcctcagttgcaaattcctactgatcatcgtgctattgtattaaagacaggtcccaagccaattggtacacatgaatataatccacaaaggactaaccatcttccttttattaaaaaattatcgttacggcttaaacgaaactgaccaatataaagcacaacaatatgtttaaattttggtcttgagatttctttttgtttgttttgcctcaaaccaattaccaaacataagaccattgtgccattgttgtttgaggctggatgtaatgtaaatagctattcctccgtttcatattataagttactttagctttttttctcctaaatttatattactagccatattcatttttttcataagtttataaaaataagtttgactaaatttatagaaaactagaaaaatattttcaattcaaatgaaacatattatcaaaatatattaaatgttacatttaataaaaatgatatgatgttgtaaatattcacaactatttttttataagcctcatcaaacataaagaagtttgactaggaaaaaaatcaatacaacttatatataaattgggggaagtatctacaaaaatttgagcaataaggctttcgaacaataccaattttgtttaaaaatacttaggtttcaatattgagaattcaagatagtaataaatatccaggtcaattgctcttttgacccagttttagaacctaattattattttgacagtttactcattcgaccctcatttttaaaaatgaaatgattgattggccctatattaacagcactgttaagaataaattaggaatgaaatagaaaatgaatttatagaagggaaaagaatgaactacccctatggttctagtaaggaaaaagtacgaattaccccccgaactatcgtgccagtacgaattacccccctaaaccacaaaatcggacattttaaaccctaaactacttataccagacgaattacccccctaactcactccaaagcggttttagtccgatgtttggcacacacatgacaatccagttagcaataccaaataaaaaaatttgtagggcccacatgtcatatggctttctagttcctcaatcctcaccctatcctcgttgaagcatgcgtcggtggcgagggcagtctccatgagcactcgtgctagaggaaggcagggctggctgggcgtaggcgggaacgagctagatgcggcaacgatggtcgcacttgacccctcaagccgtgcttccacaagctggcgacagcggtggaaggggcttccatcgagctcgacgcagcgaccatggtcacgcttaacccctcaagccgcgtttccacaagctggcgacggcggtggcggcggctgcttccatcgagctagcagcctgaagatggtgacggaagctgggataaggcaagagctcgctgagggcgcaccagccgcacgagctctagtaggcatggatctagagcgagttggtcctgagccgtgttgtcctcggctccggctccccctccgccactgcctccaaccccaccggccgccttcctcggttccccctccgtcaccagcagctgcacgtcgccatcctcggctctagccaccgtcctcgaagttcccctccgttgcccacaggtgcgcgtcgtcattatcggctccggctcctcctctgtcacccgcagctgcctccgcccctccagttggcgtcctcagctcccccttgatacgtcacccgcaactgcctctttccccgccggacaccgtcctctactccccctccaccgctgcagctgtctccgccttctgcggccgccgtcctcgactctccgcccgccgcccgcagctgccttcgcccccgcccccgcccccgcccgccgcccgccgctgcctccacccccgctcaccgccatcctaagtgattcttgtgagtgatgcaggtgagggaagggagaacagggagggggaatagggaaagagatagactagaaagagatggagactatgagaaaatgataggcgggacccactgaattttagggaaaaatattgctgactagactgccacgtaggattaaaactatctcggattgagctggtggggggggagttattttgtccggtttgcatagttgggggtgaaaaatgtctggtttggtggtaattcatactttttccttatagtaaatgcttgttagtccggttcaagttccaacagcaaggacgcatacgtgcggctcgggtttacacgggcagtggcagaggcgcgggaggtcgctgccgccgggtctgtcggaggcgtgggaggctacgacgctcgccgtagctcgtctacggagcttgactcgggctagagttagggcgcgactcggctgcagatctccatcgtccacccgctgattgctcgttcggccttttcctgcccactgctcctgcttatcctcccatgctgttcgactactgcttccgtacgggaactgctttgtgattgcttgtgacattaactacatattgatatgtgttttgtgtttttccttcgatatatgcactttgggatgcagttaaaaaatatatgcaaattgggatggatgctgagatgctgtcaatttttttagtatcttcagtaatttttttcaaatctaattcaaatatgtcaaaaatatatcaaactaattcaaattggtcaaaatatgtcaaatctacgtcaaatttctcaaaattcttccatatgtaagtcaaacctaagttaaatttgtcatacctagtttaaatttgtcacatatgttagacaaaattttaaatcagcataaaactaggtcaaacaaaaacactaagaaaatagggtcaaataagtaagagcacaaacgttattttttacataagttaacaccgttatgttgacataactaataaggttataccttctcttcgtttttgaaaaaagatagtcaaatgagcaaacttaaaaaaatagcatcaaattggtagcatattggtcaaaatcataattgcccctaaatatctatatgctggcatatgtcacactgatgcgtgtgttttgtacgtcactttggtgtgtaaatgtcttgtacgatgtttattggttttatgaatggatagattacccaataaataattcttttgttgcagcatactaattagaaagactaaattaggcagatagtatataaacttgtgaggtgggactgggagtagtatagggtgcaggtttgtagaactctagttgcattgcaccaacttgggtggtatatgtttgaaccaacatcgaaagggcacacttggcaatttttttgaagttagacattgagaacaatatgccacagggacacttatggttagtatcctagttctagggctgcaaattgaaatcatgtttgtgctttactaatgttgccatgtttgttgagattttcatcatgtcgagggtttacttttaaaaaactttgaattaattatgtattgttaagacttgtgttacacatacaaccaactcacgctctctctcacactcaattaaattggactgtatgtttacaatcatcaaccaaaatcgaagtaataaaacctggagcaatagagagccaaatataaaaactaatcgaagacactacttcctgcgctaatctataagcagctatattcactaatctcctaacccaaacaatactaacgctatcgcaaagaatcaactttatcttcagatctttgtaccaagcacccataaatcgatctgttaacttcactctgcgcaaccatcctcgttactttcaaataatcaatctcaataattagtttagagtaaagtgcattggcggtccttaaacttgtagggttgtgtcatataggtccctaaactcaaaatgcatatccaggttccagaacttgtcaaagtgtatcatctaggtccaaatttacacatcccctctaggattctacgtggtgctgatgtggcaataccacatggacgtgacgtgtcttttttcttttttttttctttttcgttttcttctcattcttcttttttttccttttttctgcactggtcatagagaaaggagaagaaagggaaaaagagaaaaaaaaagaaaaaggaaaaaaaataaatgggtcccattcgccagtcaatataatgccatgtcatgtctgtgtggcatgccacatcaacgccatataggatcctgaaggggttgtggcgatttgggacctaaatgacacactatgataagtattaggatttggatatgcattttgagagcttagggacctaaatgacatacctctacaagtttaaggaccgcccgtacactttactcaatagtttagaaactcctaactctcctgcaagatcagctgccccgcgacaagctagaatttccccgtggtagcatcttgaatccttggatgataatgtgctacggccgccataaaacctccggtgtcattttgcatgaccactcccggccagtgctccaaacttatgtgcctcataagtgagacaacagaatagaagtagaagccaccggattcacacccgctaagaaaacctcttcttctttagatcgtgaaaaaaatgaaaccatcacaaaagctccatcagtatttaacttcacccagtcgattggcagtctttgccaagtctgtgctagatagtgaagagggccattgttccggaacggcaagttcacccattcatccaattggaagatgattttgcttgccaccacatcctatatggcacctaactttgcaatgttagctatggtgtgtcgttttggacttcactcatactacataaatttgtgtacttaaatgagtactaactccgtcccaaaatataagttttaaagttggacatggttattaagaaactaggtagaattaaatagggtgaggttgtgattggttgagaagtgaaggtgggtgggaaaagtgaatggtggagggtcatgattggttgggatgggaatgttggtggagaagttgttatattttgggataaatcctaagtactaaaaaatgttagattttgggatggagggagtattttagaaggtcgtgtttacaaattgtataccattaatgcaaatttactgaattataaacatttagcatgcatgattattttattttgctaaaacagggctaaattttttg

SEQ ID NO: 1333 - DNA, 3392 bp, Oryza sativa
  Intron number 1 from transcript LOC_Os06g05359.1 (locus LO C_Os06g05359) derived from phytozome v7.0 (chr-ID Chr6; po s 2409419 to 2412810)
ctgatcggtgtacaaaacgacatctggtacacacactcatctctactactacctccgtccatcaatgtggatctgaattgtttgctatagactgcttgcaacacacagctaataaagtagagtcagttaactagttgctacaaacatatcaaaaagagcaaattaattatattagagctaaaatatataataagttagctataacgttatctatgtttttttttctattatcccttttttatctcacctatgtgttataatgtatctctcttggtccaatctaccattatatttgctcgatctaaggttgcaaggcaatatgaagtgcgtgcagcagtgcctccatgcatctattgtgctaaatcagtctaaagtagattcccctgcttcatacgataggaacttaggaagcaggcagtccaagggatcgataataatgaaactatacctaattaaggacgtaactacactgctagtgatagcgggttaccactccatctataagaggcaccatccatctatactaatacaattttttcttaaactactcatccgatctacgatccaattataccgttgtgttcgtaacaattaaatctttacaacaaaatatcacatgattatattttgatgaaaaatcacaaattacttttatgatatgtctaaattacttttaaatttcactaagttacttcttagatatataaaagtaaattcagtaaagcctaaaagtaatttacatatattatagaagtaacttagaacaaaacgaaggtaactttggcataccatttgaagtaaatccgttgtagagataaaaaaatgactctatctaaaaattaaattaatcaacacaaattatggaattaacttaaaaaataataaaagtaatcacctcagagtattatgaatatataggaagtattttaatccaatctaaaagtaacttttaaacaaataaataaataaataaataaataaataaataaatatttatttatttatttaaaagttacttttagattttatatatatatatatatataatatgataatttgttcaatgaaaaaaggcattaattaaagttactttctttttgttataagttacttctataatatatgtaaattacttttaggctttactgaatttacttttatatgtctaagaagtaacctagtgaaatctaaaagtaatttagacatatcataaaagtaatttgtgatttttcatcaaaatataatcatgtgagatcttgttgtaaagatttaattattacgaacacaacggtgtaatttgtaaatcggatgagtaatttaagagaaaattttatttgaagcatagatgatatgaatatttcccctacttgctcaatggattaatagcaaccaaaacttctaaagtactagcacgtgggtgtctctggttaagactaattggagaggcctctccagttagatttaccgcctaattaaatgatactatatacaattaagggtattgctagattttaggcttttagcttcctgaagatttataaatttcagttacctaaattgaatattcctaagtctaagcgtaagcaatgtgcaattttacttctttttttactacaattttgttgtttatatatggatttactttatttttatcttaagtttgaaaaaaaaaatttcatgtaatttagtttatttcttgtaaagttgtaattttgtatgttcaaatatatggtttaaccttttataaggaaaaaatggaggggcattaagaaccactagattacctgacatctagacactccctataattaaatgctactccctctatttcaggttataagatattttaactttggtcaaagtaaaactcactagtacaaaaaagctcataaagatcggcactataggtgccggaacaactaaaatcggcacctataatgcttttcccttttccgtgggctgaaaacacataaaaccataagcaactataggtgtcggttctaaagaagaaccggcacctatagtataggtatcggtttttctttagaaaacccgacaccttttaatataatataggtgccagttttctaaagaaaaactgacacctgacacctatactacaccaataataaattataggtgtcggtttttttttaaaaaaaacggcacctatccaagcttttttttttgcggggggcacctatccaagctaccgagtcgagccaagccaagccgaccaaggccaaccattagccttatcctatatgagaaccttatcgcctcgtcttctctcgttctctctcgcccctctctcttgcttctcgcctctctgtgtcgcgcgcggcggcggcggcgcacctcgacgacgagcggcgcgcgacagcggaggcggcaccctcccctccgccgaatctggcgggaggggaggcggcgggcggcggcaaaagtggggctcgccggcgacaaagccgatggtggagcatgaagtgggctctcctccctcgtttcttgtagatttattttagatgttttggtagatttgtggatgatttttttagatgttttggtagatttatggattggagtatgttcatactgtgatgtcaattgattttgatggcaatttgtggatgatttggggatttgggaattttggtgctgatttgtggatgatttggagatttggggattttaatttgatttgggagcaactcgggcgatgacacagtgacggtgctcagtgagctcggcttgatttgagccgagctggtccttttttttttttggctcgagcaaagctaaaggtgccggttttattttcttcataggtgccggttgctagtattagtgccgaccaataggtgtcggttaggaaaccgacacctataaccggttgggaaccagcacctatggtcatttctgtagtagtgactgcttcaagtttgattaagtttatagacaaatataataatatttatattaccaaattagtttttatcaaattaatgattaaatatatttttataataaatttatcttggttcaaaaatattactatttttttatataaacttggtcaaaattgaagcagtttgactttgactaaagtcaaaacatcttataacctgaagcagagggagtagatatttgtttttctagaagttatggccatttatctgattttttagcgtatctaaaaatctttcacctatctttaatactgataatagatagattttcacgagcgtcaagcttttgtagtatcagtttcacttggcataagatttttcgtactgcactccatgtgtggttacaataattagcagctgatttggaataagatattctttgaactcatggctgccaggtacataaaagacgagctcaagact

SEQ ID NO: 1334 - DNA, 910 bp, Oryza sativa
  Intron number 4 from transcript LOC_Os10g30951.2 (locus LO C_Os10g30951) derived from phytozome v7.0 (chr-ID Chr10; p os 16086239 to 16087148 reverse strand)
ccacgacatccgaaaacacagaggaccaggttggttagccatatttcatactcgttgccctctgaacaatcaatagagaatcacttctagcaatctgttatgattcatttccagatgcattaatctattctctttcttagtacttttcttggtattttaggttttcttggggcttagttatagaatagggttttggagtgtgtttgtggaaaaatttagaagcttcacatactggatgaatttttttagtagttagcgtattggttattggcagtcaaatttttttagtacaactggtaggaggatgagcttatatttggcactactattcagaagatgttaatctcaatctcccattttactgtacttaatgttttcttaaatgttactccctccatctacttttgatagtcatatttcatcttgacacacagaccaaggataagtaattttacttatcattcatttaagcatgctactagtcattccttgtaaacaagcgattcattaatatttacatttctcaaagcccatgtagccaatcatgtgtggaagaatggagagtcacgcattaaattcgagaaaatcattaagatgataggttgttggattgaaatatgcctatcaaaaataaaattttcagatttggaaatatgactatcaaaagtagatggagggagtaaatacttaaaatgggactgcagttggtcactgatggttgcttgatagccataaggaaaagagagacaaaaataatgaattcatgcagaggtttcagtcaattgcaaataatatgagattggttgacttaaaattgaggatggtgtggtatgatgagcctctgttgatctgatcattttcctttttcatgtcaggtttgacaactttggattgcataccagaattttcc

SEQ ID NO: 1335 - DNA, 4336 bp, Oryza sativa
  Intron number 1 from transcript LOC_Os06g43044.1 (locus LO C_Os06g43044) derived from phytozome v7.0 (chr-ID Chr6; po s 25870525 to 25874860 reverse strand)
gcaccggcctcgacaacgccaccgccggcgtcctggtacgcaacgcccctacccagcgcacattgcaacctatactcgttgtctcactaagctcgcactagtaattactatctccgtgctataaaaattgaatttataagaaattaaggacatattataaggatatacaaatgactacaataaccctaattaataaacacagtacatgcacatattccatatataaacttgattaaaaggaatgttgagacaatggttagatatggatggaaggaaagaagattacacgaaaatgtaatcagtttaatgggtcccacatcagtagaaatataatttttatgggacaaaggtttaaaggtaaaaatttaatttttataggacggagagagtagtatactaaactgtaaaataatcttacgctaattaataattacaaggttttcaccgagctagagtatatagtatatgagagctgaagatactccgtcggtaaaaaacaatctcatactagatatgacacgttctaatactagaatacaacacagtctaatacaaacgaatcactgagtatgtcagattagttgtagttaactaagggagtatgtgttaattccttgttgtggaaatttttacccatttttcttactccattaaattttctagtaatttctttttttttcggggattttctagtaatttctgaccgtacgacgttagaatttggtcatgtgactaccgctagcccggtccctaaggacaagtgtcacgttctcctattttcaaactatagaccggcagaacaactgccagttgtatttcagaaatatttaatagaaaattcgcctttcagttgagattggaccacacagtataagattttgaatgaattttagccaaaatcaacatagcctcgctgaatttcgattttgagttctagtcggtgaaaaggtggggggcagtgttcgttgtgcacgattgcgctcgtactcttttagtactgtgatccaggcatagtggggggcacatcattcatcatctgtgccccatccaattgaagcacaaaagacacaataatagagacgtacatccaagagacatggccttaattatttcttattgctctaaaaaatagggagtgatcactttaagataacatactactttatccgttctaaaatataagagattttaaagaaacgtgatacattatagtactacgaatctggacatctcatgttcagattatggacggacggagtagtaactattactccctctgtttaacaatgtaagtcattctagtatttctcacattcatattgatgttaatggatctagacatatatatctatctagattcattaccatcaatatgaatgtgggaaatgatagaatgacttacattatgaaacggaggaagtatttcgcatcgcatcaaattttcatggaaaaatatgtaatataatcacaaatgtaatataaatctgaaaactatagtaagatattaaaatagattataagatttgtacaaattttagacgtttattttctatcatacgatagttcgtaagttttcactgtaaatgtggctttcacagaatatttttccaaaatcagtgagaaaacaaaaactcaaatcaatatgtttgcaagcggatgggggacatgtactgtcatctcgatatggtctttttggaggcacacatctgacaacggcaaagcttgcagccatagacttttgttgcggcgtgccgagatgacaaggaaagcaatcaggtactcgcagaagagatcccgtgagctatgtgcagtagtgtcccgtctagtaacaagccaacaaccagtcaaaactgttttgctctttttactatggctagcaggacaccggtagaaaattggaagatagcacgggaggagagtagaaaatatagcaccaccaagccaagagtctgacagtgcgattcaggatttcaggtttaccacttcaccttgcgataaagtattaaatataggttaaaaaaactaattatacatattgcgactaatttgcgagatgaatcttttaaggctaattgctctatgatttgacaatgtggtgatacagtaaacatttgctaatgatagattaattaggtttaataaattcatctagcggtttactgatagactctgtaattagttttttattcgtgcccgaatatcccatgcaataccctatacaatacccgatgtgacacaccaaaactttacacctctgaaaagtccttccaccggtttgcccaaaaccaaacaaaaattggtaaaaactataacttttaagtcaacttcaaagtgggctcatttaacttgtaaaaaaaggggtcatttttgttaacctggtgtggctccttcaattcatgaattgaaggcagtatttcaaataatgggctcatttagattggagccattttttgttctaccaatttttttaacaactttaacagaaccacattaatgtttggtttaataccaatctttacacacactagacactagtaccaactctatctagcaaatttggtagcgctcaacttatcaaggttatttggtagtgtacaaactgtctctaattcgaacttgccgaatgttcttctgtaaacctgattagatggtgcaaattattgtctggtggttgttgattcaggattagagttccgcgaggtggcacattccggtgccaaactgtaggggcattaaaaccttttgcacttagtgcttggagtcgctgtgtgtgcaccactgcacatgctttctaggctataattcttcagaaactctggtgttcttgagatttattcgaacggttggttcaactaccggtagcaagatcactgtgttcttccctgctctagaggagctcatgttcggtgcattggatttatcatggtacagtttttcatcagaaaacttccattaatcacttcatttgaacctagtgagtagctttcgtttgaatgtgcatacatcttctttccttctcaacctttcccctttttcatttccttcatctgtccaaaatcaatgttcatatgttcaagagacacacatttatgctcggcacaattgctaagttgatgacagttgttggctgatgtagcacttatttaaggtggtgcccagctagttttcctagaattaactctcccttttcaacaaaatttggttgcccagaaaaggtgttcttgtgtaggagtaatttgggccatgatctaccaaccaccggaagtgatctgccaattgaatggaacaatgcacagtacagattcagagccattgaacctcagcatctactagtactcagaaggactggtaccactgttcaatgttcagacttcagagattaggcttctagaacatttcattcactgaccgcatttggattcaaggggccagtttggtttgcgacctaaattggccttaccaatttttggcaatgccaaattttggcaagttttggcatgacaaattttgggaaggcaaagttgtatttggattgaagctaaaatagcctaagttaactattgaaatggtatattttcataggcatgccaaaatttggcttcaaaccaaatagacactaaacactattaaaattgccaaatattggtaagccaaatttaggcctcaaaccaaaccagcccaagatcttctatgattaaattgcaagaactctcttcattctttgcatttcattagatttttggataactgaaaagtataacacacccctggctctgcatggccaaatattagacatcttgatatattagtgaataaaaaatctctgacatctataggactaaaattcacaaaaaaaaaataaaatgagcataactgcattgcaaaaataatactccaccctttttaatagatgtcgccgttgatttttaaacacatgtttgactattcatcttatttaaaaattttatgtaaatgtataaaatataaatcatgcttaaaatactttgagtgataaaataactcataacaaaaacaaattataattatgtattttttttaaatatgaatggtaaaatgtatgataaaaagttaagaaggtatagcacacgggtattaagaaggtagatagaattaaatagaaaaaaatgtgattggttgagagagaatgttggtaaagaagttgttatattttgggacaaaacttgaacgttagaagttttatattccgagatggatggaatagtaattctcaacggtcaacactgacatgacaagtgaactcattctttgtgtggttgaaggcagtgatcccgctgtggaaggaggtggagtactt

SEQ ID NO: 1336 - DNA, 1645 bp, Oryza sativa
  Intron number 20 from transcript LOC_Os04g21110.1 (locus L OC_Os04g21110) derived from phytozome v7.0 (chr-ID Chr4; p os 11872849 to 11874493)
agtgccagcactgtcgcaggacttcttaagcttgggtaagtgatatgctttatgatgttaattattaatttagctgattttctagaggtctttttattgagattgtatgttttatcaaaatgtgtaagtcattctagcatttcccacattcatattgatgtctatctagattcattaacatcaatatgaatgtgggaaatgctagaatgacttacattgtgaaacggagggagtacatggcaacttctgtcttccaacacattgtcctcactcaggctggattcagcaatggattacaactgatgctttatcatgattgattcttgctaaaatcatactaaatcatgtcagaagcatatcgcctgataaaagtttctccttgcatcatcaatctgcaattcagaatagaattcatgagttgacttttgaagccttggattagcaaaatatcatcaatattatgctcaactcatggtcttctgttcataagaacaacctcgaggagaatcatgcatgtcaactagtgttctaccccctgtcccaaaatgcaagggattataccatttttttttaacaaataagtaggaaaaggacaaacacattcctcaaacccatgaaaaggtggtacaaacgttggtagctggggaaatacactagtacaaaggttggcatatggagaataaacgactaaacaagtacaaaagctagtaggtgaggattaaactacaaaaagctattgtattatatgcctcgggatctcaaaatcccctttttggacaaatgaaatgggcattatccattatattttgggatggagggagtaataaataagcaccaagaaggcaagtgcacataccagagcacaaagcattgtattttctcctaaaaacctgcattagtgtctaatcaagcctggcatcgttggttaacttcacagaagagatattaagcttcttgtgctacatgattttagttgcttactgactgggctacactgcttcaacctctctagcactgaacctgatccctcctgttaagttgtgacacaatttgaatattttttcaagcttatgtggtccatctagaaaactctgaagtatagggatttatgtggtatctccactctaagtttatgcgcaatttactcatcattaagttttaccattgttacaactatttaatcctcctgatgggcaactctatctcaatacttctgtgtccaacactaaatgatgaagtccctaacattcttttcatgaagtccctaacattacgtgtccaacactaaatgatcaaagaagttacctagttggatcaagtaggaactaattagttctgtataaatccctagcatttttttgatgaagtccctaacatttttttttatttatgaaatccctaacaactttacaaaacataatattgtggtttaactaatgtttgggcgaccctccaagaaacatcaaacttgataaataggtgtgattgtagattagtcattagtgactgtctgctgatactctgaaagataactttgatatataagaaaattttcatgcactagggcatatcttgaaatttgctcatatgcttacttccttttctaatagttaccgagctgtggcatatattgaagcttctgcaa

SEQ ID NO: 1337 - DNA, 1975 bp, Oryza sativa
  Intron number 3 from transcript LOC_Os12g07390.1 (locus LO C_Os12g07390) derived from phytozome v7.0 (chr-ID Chr12; p os 3641729 to 3643703)
ctgtggactcagagtatgcatgtcatgtccggttcccattggttgtcccgtatctgcagttggagctgtataacaggggtcaactgcaggcacttcagttgggacatttattctaacttctaagctatccaagttcctcaatttatgaggtatattactgtttttatcaatcacctactttttaattgcatttttgctgattatatgttcgttgccgcatctatggaacgctaaagtctagtttcatgaaatgatatacacaaaatcgtctctatgttattactgtttttatctatcacctactttttagatgcatttttgctggttgtaagttcattgccgcatctatggaacctaaaagtctagtatatttaatttcatggaatgatatacagaaaatcgtctctattttgcagcggaagtccttatcaagccattgctggacatgatgcaacttcaatgcaagaagattggctggctagggcctaacttttggttaattttgcttctgttctagtttccttcctgaacccctagaggttgatgatgtcccagggtgtatgtatcccctgtgttttttgtcgctgtaaaactacacatgcttgaatttctgtcagcagaaaaaagctacatctgactgcagttgacagttttatttcatgtttatgggacgcaactccattattgctgttattttttttttctctttacatggtagttataacacatttaagctatatatgcctgtatcttttgttaactgttctgaatgcctatgaagctatatgcctgtatcacaatacatgttttctctgggtgctctttagctgtcaactgttgaatgaatattattttcctgtgttctttagctgactatatgcgtataaaaactatgagctgtgaatttgaagctatagaggattaagctttttgtgctgtaagatactgtatttcttagttgtggagcataagaacttgactaataggctgttgattttttttagagtgaaaatacttgtctgaaacaagcatggtgattcatctttgtattcctagtgcatttgtacaattgctgagttttactcttaactcttttcatagtttcattgcttcaatttcatatcccttttctatggtgcctccaaaagcccttgaaactattaacaacatgaacgatagcagctaaagatgaggcgcttactattttcctgtctatacattgtattgtggtaacagtgcttacttatatcgtgtattgtggtaacagtacttacgtcgtgtccgatgatgcttgcaatcttcagttgagaagcatcataatatactagttggcaattgtgccactcagtaatcgttattataccttgaaatctcttccaaggggaaatgagatgaatttaggcttactgttaagcatccttctattggaccaccaagcttaactgctgggatggtttgtacatgcacacatgtcaagtcatgaatataattaatattaccataaatgattatacagaataagcaagtgtgccatgctgattctctgatacgatcgagcacaaattgaactgagtctgatgatttgctaacatgagcttgctacaagtctgcatatgaatttgctatgattgtctttctatgatgcggctgtgaaggaattgaagcagcgcagccaacaagaagaagcaatagcagcatttagtcgtgtgaaatcaaggcgatatatttgattgtttatatggcttattgataaaaaaaacccccaaggattaagccattaagggcctgcatgggagtatatttgtaattcttttccggttgctttaagattggtgggatgggctgaaaaggcttgaaaacggttgtgggctgacacgagttgggtcgttggccgttccttccgatccgcttgccgccattgttgcctgcctgttttcttcttcttgaagagaactgcctccatcgcgcgcgggcg

SEQ ID NO: 1338 - DNA, 1318 bp, Oryza sativa
  Intron number 2 from transcript LOC_Os09g25260.1 (locus LO C_Os09g25260) derived from phytozome v7.0 (chr-ID Chr9; po s 15126329 to 15127646)
caggtaatctgtttatgtaactccatattttggtttgtgtccctcctaaaattaagagaatggatgacaccaggacaaaaaggctgaatagagttacaaattggtgtcctctgttcatgtacactgaagagatgaggcaatcttttcgctattatagtggttagaaaaagaataatggctcaagcataatgattgcagaatatattagaatctttgctatactttacacatgtcaaatcaaattttgtgaataacttccatttctccatctttagatagttttgttggtgacgttgatgttagctaattggcagtacatgtttaaagagttcacgtaagtcatagtgcaccatcattacatatttggaagagtacatagtacctttggagtgttataatggaaatagcaagtctgtagctttgcttaggtttagtagtgttttggtgaatgctatctactgggtcaggattttactggtatggttagtagcagttttggttactgaccttatgctcaagatttttcttaataattgctgttctcataggtcaatgccgggatatactcccagccattgtaggttttaaccatgcagacacttcaaaactgctgtcaattcaacagcaaaatagggaaatgattgagcgcatgtttggtttgttggctgaatcaaccttacaaattttgacaatgccaaattttggtgttaccaaaatttggtaaggttaaaatggtagaattgtttggtttgtgaccttatcaaattttggcttagttttctgaatggaagattccagaatcaccaaattttggtagagttaggcaatgtaaggttgtgatggtaagagtttgttaggttcgttaccctaccaaaatttgttaccttacctaaatttgataaagtttatttcagtaacaaactaacggccctaaatttcccccttgtatgggcatgaaactgttgactacagccagcagtttttgtttttgttgtgcataaattttgtttttttcatagttccaactagaagcttgtggttttggtttggttatcagtagatttctgctgcacagtttgctgcaccattcttttcactatgaatctggaaatttggtctacctgccatttctggtttcttagatatgtcacaaaacttaagggaaaaatattttaccttatttgtctcgtaaacactgaattctaaagatgtactgtataatgttatttatgcattttcagtcttcgtcatttcactaacacgttttcatgtttgtcttgaaggtgtaaacagtatttctgttactactgtgctgccc

SEQ ID NO: 1339 - DNA, 6558 bp, Oryza sativa
  Intron number 2 from transcript LOC_Os05g39540.1 (locus LO C_Os05g39540) derived from phytozome v7.0 (chr-ID Chr5; po s 23143381 to 23149938)
cattgttcaggtatgtgttttcctttcactaccacacgacactaattcagtgtcggttccaaaagggccaacagtgctagatttggatctggcaccgtggctctatgttctcggcactgaaaagggctcatctgtgacgaacgagtaaaaaaaggctgagctctcgaaaaaaaaaacaggctgagccggatttgagttagaggattatagaaactataaactctgtaaattacatgcagtctttatgtgcttcatgtgggagtgtgggactactcacaaaacggaaatgcttcaagacaaaagaatatctaccatgacaaattaaaagacaaaagacatatctgaatcacaaatctcatggaatcacgtatctaccattcacatcacataacgtgtataccttcaaatgaaaaggatctaagtttcaaacaaaaaaggaaagagagaatctactctataccactgagtttattcaagtttaatgattttccatcgatattatctttttctacaatataccgacgactttatcaattgttctacaatgtgtcattgggctgggccttcttttcaaaaatacccaaaatacccttagaaatatacaagattaacaattgatttatctcattagaagtttcaaaaaaaatgaaaatttttaaatggcatccttacacaacatggaagtttgtatacaagtttcaagtttttttctggtatatttagtttttagaaaaaatatttttatgtggtatgtgaaagagaatttgcttatataagacataatagaataaaaatatcttatgtagtgtatgaaagatgatttatattaaaaacaatagtaaaaaagtatttttatatagcatataacaaataagttatatattttttaaaaaatagaaatgtaaaaaacttaaaacttctatacaaatttccatgttgtataagaaggccacatgaaagttttcatttttttttgaaacttcaaattagataaatcaattgttaacctcatatatccataggggtattttaggtatttttgaaaagaatacttagcccaatggcgtattgtagaacaattaataaagtcgtcggtatattatagaaaacgacaatgttgatggcaaattgttgaacttgagcaagctcagtggtataaaatagattctctcaaaaagaaacaacaagaaaaaaagaattgaatcacatcataaatccgatatggtgaacttattctcatacttttttcttctcgtcgtcgatggggtcagcagcagtgatgggaaaatgggacatgaatacaaccaggtacatgggttatcgatggtaagacttgatggcatcatgatgggatctggatggatccaacctcgccaccgctaactcgatcggtaaggtgacgacaaatctaacgtcaccaagctcaaccgatggcccccaagctccaagtggcatgatccgacaacccccgagctctagggagctcgatctagtggccgatgtgctagggaggggtagagagtcgtcaccgcactggggagaggtggatcctgcggtgccacttgccggtgtgggtcaagtgacagggatcgagggaagggagagtggacatagagaggcagggctgctggggagagacgaagagacgaagggaggttgggagaggggaagcatatgccctctaggatcagtcggtcgtgtaatgggacttaaccactcggttgatcggctcagttttttgtggttccctaaaaccagcacacatagtagttttggggtgtcggttttctaaaatgctactattgataattattattgatatcgattatttattagtatctttttatatggaaccaacactaataattgttatcagtgctcttcttttttacctgtacagagtgcatgtgtggccgggtttttgtccaatggtgccatactaggtgccatccatttaaaattctatggtagtgtttccaacaacacgaaatgtgagaaatctgcaaaaatattattgttgtagtgactagtgagtaagggcgtacaaacgtgagtatcccattcacttcataatgtttgtatgctcatcctcaatggtagtcggaatcgagattgctaaggggcgatcgatcgcccctagcgatcgcgatcagattcggatcccccctctccctccacctggttttcttttttttttggcaccgcattactttactattttaataaatttatgcacctaaagtttgtacacctcaaatttacacatctaaagtttagagagacctaaagtttataaatcaaatgtttatatatccgattcaaatttgaatttaaattcaaatattttttatatatagtatttctatacatctaaagtttatacacctaaagtttgacccaaagattataagtcaaaagtttatatacccgatttaaatttctatttgaattatattcgattcaaatttgaatttgaattcaaatattttttatatatagtatttctatacatctaaagtttatagacctaaagtttatagacccaaagtttataagtcaaaagtttacatccccgattcaaatttgaaattgaattatatccgatacaaatttgaatttgaattcaaatattttttatatatagtatttctatacatccaaagtttatacacccaaagtttataagtcaaaagtttacatacccgattcaaatttgaatttgaattcaaatattaatttatagacccaaagtttataagtcaaaagtttatatacccgtttcaaatttaaatttgaatttaaatattttttatatatagtatttctatacataaatttttctaactttgtttttttatttttttttaaaatttatggtgtagtaggaagagaagaaggggagggggaagggaggtgaggagcgaaactcctaatgggcgattgatcgctaggggacgccaggggagatcggatctggtctccccctctcctccacgtggtttccttttttggcaccgcattactttcctattttagtaaatttatgcacctaaagtttgtacacctcgagtttacacatctaaaatttagagacccaaagtttataagtcaaaagtttatatatcctattcaaaattttttatatatagtatttctatacatctaaagtttatatacctaaagtttatagacccaaagtttataaatcaaaagtttacatacccgattcaaatttaaatttgaattatatttattcaaatttaaatttgaatttaaatatttttttatacggaaatgctaaacaccggtatcccgtttgggcacggttgggatgggacagattttctaggaatcacagaaatcatcacgagcttatccgagtcccactctcaacagagacacaacgtttcttgtgcttatccaagtcccccactcacagttctctcaccgtgggcatggcgcgtgagatctcgctggcgccgacggcggcggttgcggcggcgaagccggtggcggcacctgctcgcgtccgccgacggcggcagctccacctcttcagtgtcgccaccgatgcacacgaggtcagtgcgggagagcggcgtgagcgtggtggtggtagttccacctcttcagtgtcgccgccgatgcacacgaggtcagtgcgggagagcggcgtgagcgtggtggtggcagctccacctcttcagtgtcgccgccgatgcacatgaggtcaatgcgggagagcggcgtgagcgtggtggtggcgccgacgccgacacccaccgcgttttctttggttgacggtctccatcaacaggaggttcttcattttcttgctctaagcagtgtcagacgatacatcgatcgaatcaaatgatatgaacttatccatgtccactccatgtacatatatttgatctggaagttgacggaagcaaaaatcatttccccatatatgaacaaatgaagtgtattacatgggtgtagactttttgtggagtaaataccagccatgataccgaggaggatcatggcacctcccaagtatcacatgatcgtacttagttataatctgtgaaacccacagaaaccatgataccagtcatgatattgagcagaatcatgatacatctcatgtatcacatgatccttctaaggtatcatctataaaacctgatgataccagacatgatatctgagaagaatcatgatacctcccatgtatcatatgatccttctaaggtatcatctatgaaacttgatgataccagacatgatatctgagcagaatcatgatacctcccatgtatcatatgatcctcctaaggtatcatcggtgaaacctgataataccatccatgatactgaggaggatcatgatacctcctaggtatcacataatcatcctcaagtatcatacgtgaaacccgcaggaaccatgataccatgcatgatatctaagtaggatcatgtgatacatcataagtatcacacataatgatacttttgatgtatcatgtatgaaaccttcaggtatcacacaagatgatatatacctagcgagggatcatgcgtgaaaccttcaggttttatgataccgagaaggatcgtgaaacctcccaagtatcacatgattctactaatgtatcatcaatgaaacccgcaggcaccatgatagcagtcaagatactcacagtcttgatggtattactctcattcacatatttttactgcctatcacctcgattcttaaaccgggccttctcagcatgttgtcctcccactggtgtcaagttcattgatgcaagctttctctgtcaaaccttgtactattttgattgtaagatcatatccttgcaaaacacgattctgaggatgtttcacaaggaagcagaagagccggcggacgacgagggtgccgctggaaagaagcaaggaatggcgcgcgattccgatgaggtttcaccgggatgcagaggagctgatggacgatgctcgcggcggtggaaggaagcgaggaatcgcgcgctttctaggaggattcgccatgatggggagaagccggtggacggcgcgcgcgccggcgggaggaagcgagtaatcgcgcgcggaggcgagcgcttccgaggaggtttcgccgagatgccgggaagccggcgtttggcaagcgctggtcgtcattctcattttgctgcaatgcatgcaggtggtgacagttgctcagagcgatgtcatatcggtatcagaatcgtcctgtttttgaacgggattccggtatatagcatcccctttttatatatagtatttctatacatctaaagtttatacacctaaagtttatagacccaaagtttataagtcaaaagtttacatacctgattcaaatttgaatttgaattcaaatattagtttatagacccaaagtttataagtaaaaagtttacatacccgtttcaaatttgaatttgaattcaaatattttttaatatagtatttctatacataaatttttccaactttgtttttttattttttttaaatttatagtgtattaggaagagaagaaggggagggggaagggaggagaggtgtgtacgggggcataggaagagaagaaggggagggggaagggaggagaggtgtgtacgggggcatggggaccaagtgatctatcgctcattagccacacctggagaggagtgtataggggcggatggggatcgatcgctccattagccaggccggtgggaacgtgggatcgagcctaggaaagtacagatatacagcatggtaagtggtcagccttcattcttgtcagctcgctagcttaccaaggtgcaacatttatctacagacttcagctcttcggtgtatggttaactggttctgtaccactttatttttctctaaaagatgacactactataataacatctcatatgagacgtcctaccagtgccagttagacaaaaatccgtcccgatgggtctcctccccgcacaacactgtgcacactcaaatagagcaaaaaccggcattgatgacatgtataggtgccggttcgagaaacaaaccaagactgacgtgatggtctaaaactagcatttataaggtatcctatagcagtgtgatatcatggatggtgtgagtgtgtgatcttgctagctttgtcaagagaaacccatttaactaggtcgaaggaataaattatcaacctttttactatatttgttaaagaataactaggttatgaaacttagaaacataagtaacggatttttccacacaattttgtctatgactcttagttttattcataacctttaaaacttaacatgtagaaagaaaaaaaacacttgtaagtaaaagatgttagatacattaaaagaaaatacgagaattttagattccaaaaaaaaaaatatcagtagtgagactcctttcaaacgtagaaatatcattttatacaaatgcacgctgatcgatatatagggcggtgaaatttacccacttaatatataattgcaggctaggttccatcttaagtctgcagtgaca

SEQ ID NO: 1340 - DNA, 3408 bp, Oryza sativa
  Intron number 2 from transcript LOC_Os01g05820.1 (locus LO C_Os01g05820) derived from phytozome v7.0 (chr-ID Chr1; po s 2783767 to 2787174)
gcatttgacagctattaaggctgtgtttggaggtatgacacgcaaaacgatgaaacattttagcctataatttattatgtattagctataaagagcttaaaaatgattagtatgattttgtaaagcaatttttttatatatttttttaaaaacgataaataagaagttggtgacttgcacaaaataacacaacctaaattgaaccccgcttcatttagtttagcaacagcatgtaagtcaccatatctagaaacatgattggcatttgactttgatttttttttttggctcattgcaaattccattccattcatggagaggcatgccactgtacaagcgtgcgatgtgcattgtcgactaccccgtggtccatgatcctaaaaccacattaaacaaaaacaacacattgtaggtcgcttagtaggtagtcctttttttttttagagtaaagtgtatgttaaatttgtagttgtgtgtcatctaagtccctaaactcttaaaatgcatatccaaattacagaacttattacagggtgtcatttaggcctcaaatcgccacaaccccttcaggatcttacatggcgttgacgtgatatgtcacacggaatgacgtgacatcattttgactgacaaatgggtcacatttaaaacttttcttttttttcttctctttttttccctttcttctcctttctctgtgacccgagcagaagaaaggaaaaaaagaagaatgagaagaaaacgaagaaaaagaaaaagaaaaagaaaagaagaaaagaaaatgaaaatgacacgtcacgtccatgtggcatgccacatcagcatcacgtaggatcttagaggggatgtgccgatttgggacctatatgatacactttgataaattctaggacctgaatatgcattttgagagtttaggaacctatataacacaaccctacaagtttaagaatcgctaatacactttactctttttttaatcaagctgtgattttgtaattcagaattattcaagctacaactctgcttcagtcttcagaactattcagaaatggacattgattatattattgaaataattgtagatcgcttcagaaaatgtccatttctgtaagactctctatttcacacgtgcaatcagcatgggctaattcattggttgcttcaaggtggtctttatagtttttctgcacttcgcgattaccatactgcagttgccagtttgggaaaatgagttcagtttctttaagataataaaatatgggttcagttgttcacactgaataaaaaagatgaaatttgtccagattcgatctagatttataattttcttcttctcacatgtttcacgcgttggtaattcctattaggcgggtgatcgctcctccatccgcccagcgatcacccccctgcctctctcctatactatgtactcctccctcctctcccccccttcctcctccctttcttctctttctaccaaagtacaccacacaattttttttaaaaaacaaaagttagaacaatttatgtatagaaatactctctctctctctctctctatatatatatatatatatatatatatatatataaattgaatttaaattcaaatttgaattgggcatgtaaacttttgacttataaactttggatctataaactttaggtgtataaactttatatgtatataaatactatatatatagaaaatatttgaattcaaattcaaatttgaatcgggtatataaactttaggtctataaactttaggtgtataaactttaaatgtatagaaatactatatatgaaaaatatttgaatttaaattcaaatttgaatcagatatataaatttttgacttataaactttagttctataaactttaggtatataaactttatatgtatagaaatactatatatataaaaaatatttgaattcaaattcaaatttgaatcggatatataaacttttgacttataaacttttggtctctaaactttagatgtgtaaacttgagatgtataaactttagatgcataaatttattaaaataggaaaataatgcggtgccaaaaaaggaaaccaggtggagggggctacctgatcgctactaggtaggtagggtgatcgatcgcccattagaactagcatatctccgggaaatgttttcggtatatataacagtataaggtcgccatttgtgtatagtttgttataatatggttcatcaactccattgtttagtactttctatggtccctgtcattatttggacttttggagccttggagggacatagcacctttgatatatagcaatgatcatgttactaatacaaagctgtagttttacgaggaaaccatgtatgatgttttttcttcttttgaaaaccatagctaaaaggataggaaaccaatagatttgggaaaaaatatctgaaattacttaaagaaaatagttgtgctcatgatgtatgatcttgtaaaattggtgtaattcggtacaacaacttgcataacattaactatatactcttcccgtttcaaattatttgtcattttaaatttgttctaagttaaacactttaatcattgactataaatttatataaagttgtgtagctaaacatcaaaaatttatatttttggattcaccataagaatatttttataatatagaattcatatattgttatttgttaactttcacggattcttaaaaattaatggttaaggataaacatgtttaacttagaacaaacctggaacagtaatttgaaacagagatagcaacaccttgggggatttgtgtgaaccagagctgaaattgtccattaggaaatttctttcaagtgagaatttgcattaaaagaactgaacagatcagttccacaataacaacgcattttgtcgatagcacatttgcaagtgtttatgaagcaaaacattttttgataatgcaccatgcgcgcgttgcaagtgctaattctatcgatagcattatgaagcaaaatctgagagcatctgaatttgccattatttgggcagttcttatggttacactgaatttgcttgtgtaaacttgctaagaaaaaagacgcgaatattagggaatgatctaatatcaaataattaaaaggggtgaggcttcgaatctaggttatttagcctaccaccttgtagagctagccggaaaacctctggacgtttctcaattgtgtaaacttgctgctagctgagtttgctggtccaaataaaggtagattatgttcttaattcgatcgaagtgagaggcatccgaaaaaggatgctcgaatcaaaattcaaaatatatatgaatttgttacatttgaattcccaaacatgacaagctgaaatggtggtttttgtgtctgacaggac

SEQ ID NO: 1341 - DNA, 5676 bp, Oryza sativa
  Intron number 1 from transcript LOC_Os02g10920.4 (locus LO C_Os02g10920) derived from phytozome v7.0 (chr-ID Chr2; po s 5800579 to 5806254 reverse strand)
aggtgcgaggacgccgacgagtctccagagagcaggtgcgtgcgcgttctccctccccttcttcttctcccgctcggtttgtttcgttcgtttcgggtgatgcgctttaatttgcatgtttgatcgattcctgttcgtggagacgggttggattgggtgatcggtgcgggaggaggggggcggattcacggaatcgagggtagatttgtgcaatttttgcgggcgatgatggcgtgtctccctcccctggctatctcctccgtgtgtcgaattttttttcttgcgagcattagcaacgtctcgttcgcgcgcggtagggtttgtggggggagaggtccccggcgtcgagattcgtgccgccgttgatcgttcgacagctgttgcatccgattcgatgtgggtgcgcgccgcaggggaggggtggggcagagctggtggtggttttttgctcttggagccttggatgagtgggggcatgatccttgttgtagagtatagggacttacagctatgggtttgtggattttttactggtacatatcttctttagttgcaagagaaaagtgatagctatgttggctgtgggtttgttgtgtgctctgaatttttttttaggcttttgtagtttgtcttatgtgattacctttgactgtcactcattttaaacttttcttgtttgtcatactaagtaaggtataagtcatgcttagatgaaagtatgaaaccatgtctagtcatcgatgttatgtgctattaagaaataaataggatttagcacggtgagcgcgtctggatatgtgtgcggggctgtggctgccaacgcgcaacgctcggttatgatgtgctatcatgctgtgcactgttcatgatacggtccatctgctgactggggctttgatgccctgaaggactaaacctaaagaggatttagatctttttgttcatctccatgatgcattgcagtgcaccacatcgaatgtatacaagaaagctggtcagccaaactgggtggtggctaactttcaccttgtcaaggccagattacgtcatcctgaaactatagtagtgcatgcaagtgtggtgaatcaatacagcacacatgccatggaatctattgtacccatggtgtgcgcaactgcgcatccaacttataacaatatataattaaaggtttgtgtactgtagtgttgctctgttttgggtagatgccttcatcctagcccatacgtgtgccttcccattgctatgtgggtaatggcgcaagacacttagttaaaccagatctatgctcgtgcaattgttctcagtgaggaattagtgcatgaacgactaggaaacagatgtgctctgcagtctgtctttggaatctacaggccaagatactccatgcaagatttcaagtgcaactaatcattcaatttctaggaataagagcatactttaagtcttaaaccaatgtttgcaaaagtgaggacagcgtatgattgtttatgactgtttgactattctgtgagctccaatgaggtccgggtaggtgccgcatggcatgaatttttgttgtttatatcaagttcaactggtgttcatatatatcgttcatatatccatgacacgctttcctcacccacataggggactagtgctttacattgtggaatctgtatccctgtgatcacaagcaatttaattttttagtgaaatcagaagcagtttaatacctcaagtttatataaatggtgatttgatcccacaattgactatctaccaagatttaaaatcatattctgctacatatagtcgaacgctaacatggatttttagtttgcactttgtagtttattaatgtatacctagtaatttcccatgtagaactcaggtacttagaagcttagtcatgttttagccgcaccagtcaaacagatacttttgacagtgggactattgctgaagatttttggtgttctatcagtagtactcatactggttttagtacgcttattaacacaaaagctaaaaggcttgagctgttcttcttggttgtgcaaaagcagagaatcaaagcatgttaggttatcaagtgatcgcttcctttggagtttggtcatggtcatgcatggaagcacttccctaggagagaatccaagctagcttttggcccctcagtttttttcccaaggactccatgatttgtatttgcttctgctttcacttcacccaagagaatggaatggaagagaaggcatatcatcctatggttttgaaacctacatatcccctcctggcatctactatcagtctaccaccagtgctagtgctagcaaatatagtacagtgacataatagaaaaaatagatagatgaaaagcaaaagtaaatccactgatgtaaagcctcaacctcaaggatgagcacaagtaaaggggcaaggaaacaacagaagagatgcaaaacacaaccggaaataaaaggaggtgaaaaagaattctaaagaggatggtcactggcacccttgaagactactgcctcttgatttctctatctttattgaaattcatgcattattatcagttatgcatcaggccatctctatttgctttctgccatcatgttcatcttgggttgtgaaatgaaggttaatttaagatgatgggatctttctctgttttcggaaattccttctcaatgtttcctcttataaaaaaggataaagccaattgctcaccacttacagctcagcaatccattatgtctgtcttgatttcaagtggttccttttctttcacttacccctgtcagcagtattaactccctgtcagtatgctttgggtttgcattagacaaaattgcacaactctattatggatatgactagagggctagaggctactatttttagttaatatgaacaaagttgtgtttccgtagcaccttattgttgataagagagggaacacaaggggcccaaagaggtgcttgaatttctgaaaggttccgaggatgtccttccaaacaaataagctcaggcaatgactgagcaaaagtgcatcaagtaactgatagttatcaaacttttatttgttactcttgtcaacataagaactatattaattaatcccaatctcagaataaatcttattcactgtgagatattctctctgaagaaaaaagagtttcgttcggtagatttaactttagttgagatgatacttctttcatggttttaaactagtgtaagttttgctttgtaacttgcacatcatgtcatttccatgtagatgttcaccttgtaggtatgttgacaaaagttttatgcccctttctatccttgcatctcgaatattcacatggtctacaagatcatggatcaattcatgcttgttccttcctatccaaaattttagccagtctatttgtaatctataaaaaagtcacacttcatttgagctctgcttgatatctattttttttggtctatactgatttatttctgccatcttaattagtgacaaaaaatgctttagccggttaattatgcttacaccagagtcatgggatttttcctagtttagataaactgttctatgttacactaacggatggttgatttgctattttggcggataattcaccggacatagttttaggcttgagccgatgtgaccgtttgttggaatggatgccatggaatttcctcaattattgctagtgaaagaaggcaaagttagcatcgaatataagggatgagaatagctttttatagttgcaagaatggatagttatatagcaatagatatagcataagttcagaatgataaccaccattcttgtcacctcatagacttgctcttttgagacctcacagattaactcatttaggtctatatccattttctcgtagaatcaataataagtgctgcttttacactctgcttctcttcttttcataagtttggtgtaatgcttgaaatagttgtgcaaatgcagtattctggttccatcacacgtgtgtggatagctctggagcaccggtagcacaattgcacaattcagtgtgatacgctgcattattaggcataactaattagattttgcactcttttagaatagatatggtttgccttgccattttggaatctgctaaagaagagggtgatgtgttggcccttggaaaattggaatgtcaggaattctgtctcacaacagttaacacagcaggcctcaactgcatgtctaaccaaatatgtacctattcttgatgtgaaactatacattcgctgtccataaagttcctgatatgtcagtctcgggtgaacacagattaaatatcatgtggtcctgactcgtctcagttatcctcatttgattggaacatttgaactagatacaatcaaatcaaaaccctcaggatcacccttttattctctgagacttaatctgaaactatttgtatctctcttatcaaaagcagaaaaaggtcagtcaatactcaaattagaatctttgccatttttagacatgaaacacttcttgattcagccatgcttgtccaaaattaaatatcgacctaagcacaataattcaggacctaatttcgagtcttttctttttcctcttgaaaccatgatgtgtcagtttcaagaatattggttatcactagctccaacactgtgaatcagtcttttacttgacctgaagatgtacaatccttttcatgtggaaatttgggaaatgtcaaacgcaccagtcttgcaaaactgttttctcatgagaccaataacttttgactcaagctgtacttaaagaacaaaaggagatatctaattgagtgtagatttatttctaaaaatttccagtctgatctaaagtcccctcttattgttggtccataatgctccctgaaaacagaaatagtggataatacttgtactaaccattagctccatttttctgaaatgattttctgttcttcctctgacattccatattagctttggtggctttggttctatatgtattttgctaaaaatattctggtcgaataaccactgttacataactaattgcatcttaatttcctaagcacaagaatattgcgcactagtgccatccctccaccccatgtctcaaaagatgttgccaaggcaggcagagatgcagggtaaaggaagcattcaaactccccatatttcttttgccctttaatggctttctcttcttttctttaactcccctcttctttctagttttacgtgattctcttgttcttcgcgggccaaagtgcaccaaagaaccaaaggcacaaagataacccgcccctcggtttcagcaacccctgccaccgcactataaatacccctgcacattagcacctcgctgcatcaccctttcacctcacagcattttccaccttagagctcaccaacacagcagctgatacttgtttaggtaactgagcttcctgttagtgtttgttcatttgttttgtatgcatgtaagcatgttggttgtggttttcctatttcttgaatgcaaaaggttttgcaaagagagaacagctgggttatcttataagtcaagtgtgcttctgggcttcagtttgatcattttttcttcgcccttgctctgatccaataatctttaatgagtggtacattgttgatgtgcagggtaagacaag

SEQ ID NO: 1342 - DNA, 910 bp, Oryza sativa
  Intron number 3 from transcript LOC_Os12g40200.1 (locus LO C_Os12g40200) derived from phytozome v7.0 (chr-ID Chr12; p os 24849522 to 24850431 reverse strand)
ctggtgaagatccgtcagcacctacactgtaactgcccaaaagaaaacgaaagctgctatccaaatgacttcggaaatatgtaaaatacctcctttttggtatgcttttctagattttcagcgcattgaaaagtgcctggccatgcattccacttgacttgagcctaagaatatgtactactcaatgtgtgccgaaagggtaagttattaaaaaaatcaccaaatcctgcaacaaagcttctctgaactgggtacatgctaatattcatagatgaatttgatacaacagttgaatctagtttgaatgaaattcacaatttagcgaggaagaggaaggaaatagtgcggggagagagaaatgatgatgattctgttaaaggataggtagggtgtatgatagtgtgtcaaggatattttggtcattccacattgtactcatctcatattagccctaagggccaactcaatagatcaactcttcattccccaaattccccccccccccaaattgtggcagattctacaaggaaaaagagacaacggtacttggtcagggagcatctctcttattaatagattgttgtgcgttgcaacgggatatttggttactaggagctactacctacatcccaaaatataaatgagatacattctatgattacgaatctagacatgatctagacataaagcatactcatgtttagatccgtagtcttaggatatgttctatctaatcctagtttttatattttgggacggatgaagtattctgtattttattggtccaaatgagtcgagttaagtaaaaacatttgatacaactttttttaaatcgtttgctattttttcgttactccttttttttctatttttctcacatgtgacaggtggcagtgatagtgcattgcac

SEQ ID NO: 1343 - DNA, 2016 bp, Oryza sativa
  Intron number 7 from transcript LOC_Os02g43594.3 (locus LO C_Os02g43594) derived from phytozome v7.0 (chr-ID Chr2; po s 26303799 to 26305814 reverse strand)
caagcattgaagaggtaatgcaactgatcctaaaggcatctctcattttatcagggaactacacctaaataatatcacaataaatatctctccattgaaggaaaatttctgatttccggacatgttttcggaaatagaaaacgtcgatcggaatttttttcggaaattttcagaaacaaaaacaaatttggattttttttttctcggaaacagaatcgaatatgcaaaggctactgtccgtcggaaaccagaatcggtcggaaacttttcggagacgaatttattcctggaaacaaatttagatttttttttcgagatcagaaacggaatatttttatatgctgttgatttgtttcagccttctctactctaagatattcagattttaatgaatattgaggtcgttagttcaatggagatatatttttttagtccggtgctttagatttgttttgttttgtttttgttaggccatgccatattagataaatatagttcttgttctctttacaactagtcgtgttattgttaattgataaaaagttagaaatgtcgatttgttgttttagaaaaaataatgagctacaccttttcattgatttcagaagtttaatttgaggggggttttatactccgataaatatccgttatcatattctctatgttcgcattcgattttattttcatatttggggtttccaattttaatttattatttaaaaaaaaacattgaaatgaaaactacatagggtggtttccgtctgttctgagcctttttcatccctaattctggcaagaaattatcatgctattttgggcattaccatgattcattgctttgtaatgttaccttatgttcctctacagttataaacgcctttttaatgagaaaaacatgatcatctgaaagtgtaagtgttggaatttggaaaactagcagaatgccagtactttgttacaggattaaaagaaaaatcaaatgttgtggaaaaattatattgcttatcgttgtaatttttaattaaatatagagtatatgagtattaattagatgtatgtaaaaataataatcactgtgactttatcgtgggtgtgacgattgattattttaatcattctcatcactccaaagacccaagtttggaaaagaaaagatcagtctatctacctacggttggaaaaaaaaaggctctatgatagttagcccaaatctctctatctctcagctctgatagcaagaggcaaggaggtttaaatttttcactgccaaagaggagttcacatgtcagtgataagagtggtatgtcgccaccagcactaccaacatttaaaatagtatagaaaaatgaagcaacgatataagatggttgaaatgatcataaagttgaacttgagaaaaactatccataattgagggtagaaccacagaagtgaggccctagaggcctatgagcaggttgcctttgcatttcttaacagtgcactgggaccagaacgtaggctctgttcgttatgggaagataggggagattgattctcgttttccgcgtgcacgtttttcaaactactaaacggtgctttttttgcaaaaaatttctataggaaagttgctttaaaaaattatattaatccatttttaaatattaaaatagttaatactcaattaatcatgagctaatggctcatctcgttttgcgtatctccccaatctcctcaatccccttctccttaaacacacccttagaatccattgtcctttcgtccattatgaaagtaatagttttctttatcttgactgacatattccaaaatccaaataaagaatttggataatttttttggtttcctaaagagtttgcctcattaaatgtgccctagctgatggtaattctatacaattttaactaaatttgcctgaacaaagaaacatctttgtgatatgttctgttatcgtttttttcttaattagcacctcattttcttctattcagatacagacaatacaacgcttgaaag

SEQ ID NO: 1344 - DNA, 1854 bp, Oryza sativa
  Intron number 1 from transcript LOC_Os03g15880.4 (locus LO C_Os03g15880) derived from phytozome v7.0 (chr-ID Chr3; po s 8760704 to 8762557)
aacatatatatatccctccttcctccatatccaaggttagttctacatttcacatctcttcattttctttggctcttcagagttttgtccatctctatcttcagagttcttcagagtttgcttaccatatgatcgtgatcaggtttgtagccagccaaatcttaattcataagaatgcaagatattcatgccttgacatgtgatttctttatttgtctatccttttcaggtatcggaattctctttatttataactacaatgcaatcgctcattttacccgtaacaattaccaagagcttgtttagttgacaatagagatatcaagtcaaataaggttgtttgtgttacacaagataccgatgaattttgtagtgttgcccttctattgggaattcataaatgttgccttgatgagatactacagtaccaataagttttttttaatgcctagaggttaatgaaacgtatagcatatggtccgcaaggctaaccaacagtggatcatcccaaacgaaaaaaaaaaactatgcatgtctctcccacgcgcattatttttcaaggtaacatacatgagccttttatgcacaagtgcatagaattgcaactataagatttttttataatagctttgatatatttaaaattttattacacatgtcctatgctaagtttcaaatgtaagttgaaaaagttggtagataaattcatggcctaataatgatacctacatgaagaggaacacttctacaagcgtcatcaatgttatatctagctatctgcaagttgagggttttcgtcaaagtatggcatcactcaagtcacacctacttaattcaagcatggcgaaccaatgaaataggactaaaaccataaatgctagataaatcatgctagaaactcctatcataatatattgctactaaatcacttattaccatcattagaaagagaatatcattggtactagctattaagagccatgtcagccaagtcacgttctacttgtgacggggcaatgaaggacaagtataaaggtgtgtgtgttgtgtgtgtttggggggttgggggggggggcaatggaccaacatccggtacttttacatgtaaaaactaataaatatttcatattagtgttagctatgtccgatctcattcgagacaacttgttgatacttgctaccccaagtctacatatagattgttgacatgtcagatcaaaactatcattattaaaagctcttctaaatgcaatttgagcttaactcagtttttttcagcctattccttttatccctcatgcctaaaattgtacaatggttagccctactgcaaacgaccttgcacaataaaaaaatcatgcataattgcatattcgagtgtaaattctttttgcatatgtcttttggacagtacacctgatatgtactcactccatttttaagaaagactaatttttaactataaatatggatataaactatctttagatttgtgttaaatggtgtgaagttaaaaataaatgtggcatcctaaatcgatccatacacactattttgtctattggatgtgcacttctgattttttttcttaaaagtttaacttgtctagtactatcgtaaaactatgttgttaaaagttaccattgtatatacattaaataacttgccctcacgtctttacaatgatgcttttgtagctttccctcatttttaagattgaaggtttttatgttggattaattttgccatcggatatcaattgacagcgtattacattgatgcaatttttcttttagctatttcttatcataccctacaggtaattctcaaaatcggagagatttacaaggacac

SEQ ID NO: 1345 - DNA, 4906 bp, Oryza sativa
  Intron number 1 from transcript LOC_Os01g60520.1 (locus LO C_Os01g60520) derived from phytozome v7.0 (chr-ID Chr1; po s 34995878 to 35000783)
ccggagtcctcgccgcgcgacggccggaagagaaggtactatactacacgagctagctaagctagcacacacagatgttaatttgttaattagtacctgtatctccttgattgcttcgtgtttaatttcgtcgattcgttcatatattttgcctctctccaaccacttcttgtttacctctcttgctgtcttgaatggattaatttctggagccgctgatcctaactgcgctttgctgatttgagttgtgtgtacctgtttgccctttctttttcttcgtttcttgagtctgccaaaattaaggagaatgggaattatagtttctggcttctgtgtggtatgccaatatggggaaatttttggggaaattaaggaggaggaagaaacattaacatggtcataaacaggcaatgttaggatctatatgtggggttggtagatagtatgtactatattgcaacttgaatttaatggtttaattactactaaaaagaatgacgaaaccttgtacgattgagggtgataacgctagctcgtctgcactattaaaacaaacagattgaaaaattaaaccaattaaatggatgcatactaccccaactatcaaggtttttctttcctccatcgatcttaatttcttcctttgagttgtcctacttttgagtgagctagctatatttcatgagctgaggtgaaagcggaaaattaatacgctttttttttttggggggggggcataatgttttgctcaagtttggattgagattctgcactacagtaaaaggacatgccattaataaattaaaatcatcaaacatcacatatatgctaatagccattttcagcattcttcataattcaccaagaagatgcatattctcctcctttgaatgaagaccatttctttttgacacttaggaacccgaagtgatcatatgttgttccattttcttaacatatgtccatgcatctttgccatagtggagggctccattaattgcttgagaaccctaccttactactagttctagattggagctcttcctgcacattttaagcatgctagcttataacaagaaaacaaagaatgcacatagagaagtctcgaatcttctttgttatatatatatatcgaattaccaactgatcgaaccaacctttgtttctttccttagcagtaatagtccacaattagtagtattttatgactcacaagcatatacttttcttctaaaagaggtaaaaattaaaggaaacaagaaagtaacaagcacatgcatgtcggcagtccatcttcatcacttcatgcatgcagcatccataaagttccactaaccatttctccttcctagttaagtttaagatatatccatgaacttattcatacttgtgattctcattctcatacactcccatccccctaactatacagtgttatcctgatcaacttgtgtagtattgtgtgttagtgttttgacttattcttactattgacctatgtatccttgatacagtttttcttctgttgtcctcaagcctcaacctcaattaatgcaatggcaaattgaaactccttagttctaaacaaaatgttttgatccttcatttatatatatattcctatgctggtaaacttctttcttttttggacatgaacattattaatcgggaattaggacccttcatagtgtgagttgactacaagtcttccaggggggagtgtacacggtcagagaccaagcgcatacgtatgaactagtgcgtagacttgatcaaattaactcatagtattagataaggacatattgatcagttatgtggaacactaagccatttattatttacgggagacgtttaactctttctctatccactcagattaatcctgtctcgaactacacctatttgtaagtgaacactagagcttattcaattctggccatttttcattttaagaatgagaaaagggcatttctgacggcattgcttcattgatcataatatttttgcatgtgacaatctgaagtgcgtacgttgcacacacattatttcacaaagattcatgaatagtgtttagccactatatattcacaccaacaattaaattttgatcttgatatatagattgaaatctagatattagtacagcaagatatcagtgacatttgtcagaagatcagagcatacacacacacacacacaggaaccatactcttatattttcagataattaatgaatatatcaacccggtctctacatccttcaaagaaggatgtacatcggcaacaaaataaaaacgagttctagactctagccctcacacgaggaagcattaaacataattaacaaaagttcagattctcaaacaccaaacttaacaccaagctacaattcttttttctaaaattccatccgacgaacctgcaaacaactccatagctgcaattccaagatcactacatggctacaccatgaccacctttcgccaacacatgaatatgtaggggaaaagcatgattaccttctaagcagttcctcagctctcggcccctctcttttaatttctaagcagttgcaacctatattttgcctagtatatatatgttgccttgaaaatcatatgtaagtaagaaataatgaattaattaatttgcttccatattaaggatcacaaaatttctattcaaacaacaaaccgcccagcttattgtagcaactcccacaaaaaaaatgatgcttgcaacatgcaatatcaagatcaatgtgatgaatttgttgagattaaaataaagaaagaaagggtgatatatatagccatgccattgcatagtaaaaccgaccaaaaatttctaaaggacaacatcaaaagattagtcgctatttttcacaagttataccccattatttgaacgttttgacagtacacttgaaaccgttgcctttcatccttataaaagaatcgagagcgtcagtaaaactaccatgcatatataagtgtattttcagctgatctagctaattaacctattgtccaaacaaattcaagttcgaatatcaacttaactgttgataaaaaggttgggagagcatgtatttcattgttcctcggtcgtgtctaggctccattattatacaagtcatgaatttggctgaaattattctatcttaaaatcatataaatttgtgtactgttaggaatgttaagaacagtgttaattagcactgctttgcgccccttcttattagattatttttgtggtcctggctcatccactattctcaacatgtcaataaaaagtgggcaccactaatatatatactcacattccagctagtttccatagatccacagtactatggatcacatgaaaagctagagaagcatttctgaatctgtctgatgaaaaaagaatctttaattattctagattcttcatgtctcatatggcatgcgttcgggggaggtggtaacccatttagaaggggtacgtatttaatttaccaacttatcaacagattcagatccatttccctttaaataagctaatgacccagacattgacataagcatgcatgcaaataacggagatcaagcaactactactagctaggcccccttcaacatgcatgtctcgtgtacatgtcctactctgatggaggccatccaactcacccatatgcatgcttctttttaacaatggataaaaaatcggggatatacacagtacttaaaggataaagaatacttaaattttaaatctcataactaagaaacaagagaaaaaaaaactaaaagactaagcttcgaacttactccattcgtttcacaacgtaagtcattttagcatttccaacattcatattaatgttaatgaatctagacatatatatctatctagattcattaacatcaatatgaatacgggaaatgcattcatattaatgttaatgaatctagacatatatatctatctaaattcattaacatcaatatgaatgcgggaaatgctagaatgacttacattgtgaaacggtggtagtactaccgttgcgtcataagattgcactgagtcgattttgatatagaggccatgctaacacgaaacaactaacacagtacttcaatctcgctaagttcagatatagtacgtggtaaatacaccctggatactacatacatatatatacatatatagtacacataattaatttgttatatgttgtacttataatgcgactttgtttgcaagtagtcattagtgttgtacaacaactaactgacaaggttatgtttttcaaatatatataagcgtgcatgttgcaatatctggccacataattaattaggccagcaattatatatgtaatggtgcttgtttttaacttcatgtaaacatcgatcgttcattattaatttagtcctgtagaactatttctgtactcgaggtatctttttcttgtatattatcagtcatgtgcgattctttgcatattattcatgtatattggaacatttttttctatattacctcctccgatcataaatatttgacacatttgacattaatcatttgtcttatttaaaaaatatatattatattttattttcttgtgacttgttttattattaaagttactttaaacgtaacatatatttttatatatttgtactaaaattctgaataagatgaatggttaaattttatgggcaaatcaattgcatgaaataaatatttatgatccgaggaagtatatattgtcacttttgatgtatcctaattaatatagcaggttttattattttcataacattgtaaaattacttgctaactttttctatttgaactgtatacacggagtattgctgcaggaaggatagaccatcattggtgaaacatacgttca

SEQ ID NO: 1346 - DNA, 1231 bp, Oryza sativa
  Intron number 4 from transcript LOC_Os06g33680.1 (locus LO C_Os06g33680) derived from phytozome v7.0 (chr-ID Chr6; po s 19599783 to 19601013)
ttttctcgcattacacactttctgagaaaaggtttgaaaagttgtggttgatcaaacctcctcaccagtgacctaaacctgcataatcatgaagaggttgaatggtatcaaataaaaatataaatagtatcatgagtagctttcatagaagttgcaaaagataatattagtttgagtggtttccacaagtatggcaaaggagaattagctagcttcaaagtaaacgcttttatgtgagggaaaaatttaaagtctacgttagatgcaacacacacaaactgcctatccaagagtgtgtgtgtgtgtgagagagagagagagagagagtgtgtgtgtgtgtagggttttgaagtaagccaatatatagtgtactctaaaatgatattatataatgaataaatattgaaaacaaattaatcctgctgttaatacttcatgtaattctaaaatcaacttaattattggtatcagttcaaatatatctgaaataaaattatacatatattcacatgatacatacaatttgaacatcaatgtgcattgtacatttgacacattgaattcattaaggtatgtttcatgaatccctttctttcgaattgtatataaagacaaataagtgacgttttggaatacatgtaatcaacgtgtttaaaatttcacaaaaaatatcgctttgagtatttcaaattcaaccttttaatttgatatgggtagatgtttctttgaaaatagattcagaatattaaaaccatcctacattttccatagatttttatactagtaattagtaatcaaacaattgtcttgttgaccgtgtcaccatcccaaagatggcttatttgtcataggaaggagaatttagacaattttcttaagatggcagtttggcatgctaatccgccaacacaaaatctacaaagctaaaactcgggcattatcaaattgcatgtgaatcataattattctcctaaattgaattgtgcgatgaaatcgtatatatcgaccacccaaaataattaataataaaattcagttattccatatcatgattatatatagctacgtaatcacacacacaaaaccagatgattattgctattattatcactacttagagtttggtgggcgccctgacgtgcttggtgacaaaggggttgtattggttgctaccgggttcgtggctgtggaactactgcatgtactccatctcctcctcccagatctcaca

SEQ ID NO: 1347 - DNA, 4829 bp, Oryza sativa
  Intron number 2 from transcript LOC_Os03g25869.1 (locus LO C_Os03g25869) derived from phytozome v7.0 (chr-ID Chr3; po s 14789646 to 14794474 reverse strand)
acaagtattccactctaccaaaactacaattcactgtacgttgtgtttcccttcaaactttcaacttgtttgtcatataaaatgtttcgacagtacatacatggagcattaaatgtagacgaaaaaaaaaaccaattgtacagtttgcatgtaaattgcgagatgaattttttaagactaattacgccatgatttgataatgtggtgctacagtgaatatttgctaatgatagactaattaggtgtaaatatttgctaatgatggactaattaggattaataaattcgtctcactgttcacacacgaaatctgtaattcgatggttcgaatatgtgtttccattatccatacagtatacagtagcagtatatcgcaaatatcaaggcaacaccacagtagagggcaacaaccaacgagtcaatgccaaaatgggtaaagaacaaacagtaaattctactagcacggaactattccttctgttctgaagcgaccctatttgacgctgtatgttagactttttaaaatacttttgaccgttcgtcttattaaaaacttttacgaatattattaaaaaaaacttgaatagtagtagtatatttaacaatgaatcaatgattggaaaagaattaataattacttaatttttttaaaataagatgaatggtcaaacatgtttaaaaaaatcaacagcgtcaaatatttagggacgaagggagtaaatcataaggagtaggggtatatatttttgcatgaccttaaataacatactttgaacattcatttatttcatattatgtcatcgataactataaaattagtatcacataaaagtatttttaaaaatattaatctaatgatataatatacataatacttgactagatattattagtataactagctaggtgggccgcgcaattgcgcgtctagtacccaaataaaatcatatatttttcagtatgattttacttaaaatttattaaatagatatctcgttctcttaagactttaaaagaccaaaccttatcatcctcgtatttctaattatatagtttttaaaagtcacatcagctgctatgctaccccttacttcagtcatatccttctttatttgcttgctcgatctaccactatttctattcattctctttgaaacctttaaaaattggatcatatagttcttagagtttattgtctcattggtttcgtttttataatttttagaaatcccgtcaaacactgcaattatactcctctatgacccatccactgtcttttctctttattgtcattaggattttaaattttgaacataattatcattcgggtttatttttttactttctagaagtcccgccaaaccgtcagcgactttgccattgtactcctttatggcttgtccgctgcctcccttatttattgtcattaagattttaaaatcgaacatgattatcattagattttttttttactttttagaagttctggacctttaaaaattggaccttgtagtttgtagagattatgatcttattgggttttattttttataatttttagaagtctcgtcaaacgatgccactatacccgcctactgtttattgtcattgggattctaaaaatcgaacataactatcgttggaattcatttttttttattttatagaagtcccccaaccgtcggctgttctactactcctatacaccccgcccgctgcttctcttttttattatcattgagattttaaaaatcgaatatggttatcaatgaggtttatttttttactttctagaagtcccgacaactgccttacccatttgcttcacgacttgcctatcgttcctccttttaatcgtcattaggattctatttgatgttttattaacagtttttatatatcgtatcaaccgccaccgctctactcctttataggcctgttacttgaattatctcatcatgtgttttaggtgatcttttctttcaatagtatttattttttttcacgaattttagttatttataaattgtattcctaattgaaatatttcctattttttttcaaatttcagaatttatttttttcagattttaattaataccatatagtgttcttttaatattttttttaattttagttgtttcaaaattgtattcctacttaaactctcttttagtttttctaattttggatattattttatttttattttgaatattaatcaatctcgtattgggttcttatatagattcttctttcaatattgcttatattaaatttcgaattttaattaattttaaattgtatttctacttgaactcttcttttaattttgctaatttcggattttatttttatttttattccgaatattaattaatctcgtattgggttcttatatggacccttctctcaatattccttatttttaattcatattgaaatttatataaatattcatattgtattttatgtacgtgttagttattaattatttttaatatcaacttttagttatttctaaattatattcctatatggactctagactcgtctttcaatattttttttaaattccatatttccgttatctgtaaattgtatttctatatagactctaggctcttattgcaatattatttatttttaattctgaatttttattatttctaattgtatttctatgtggactctaaactcgtctttcaatattctttaatttttaatttcgaatttcagttacttctaaattgtattcctatattgattttagactcttcttcccatgttttttttaatttcgaattttagttatttgtaaattgtatttttatacaaactctaaactctacttttaattttattatgtttattccgaattttagttagttttaaaacttttattatgtttatttcgaattttagttagttttaaattcctatatggattctatactctacttctaatattccttatttttaattatgaatttctataatctcttaattgtatttatatatggactttatactctacttctaatatttcttatttttaattccgaatttatattatttcttaattgtattctatacagactttatactctacttataatatttcttatttttaattccgaatttctattatttcttaattgtatttttatatggactctagtctcctcttttaatattccttatttttaattccgattttcagttatttctaaattatatttctatatagactctgtttttttttctccgattaatatgagaatttctagaccgtgggagcgaacatggagacttttttttatttctttaataagttaatagattaggtgcacgaaccgattgccgcatgagatttttgaggttgtgtgcgagctgacaactctgttctgtcatgtaagcgcgttgctcgagtggaccaaacccaccacacattctcaaacccgttagccagagatcaaaatctaacataccctgcatcttaaaatggtttttgttaaaatatacaaggagaaattgaagaattgcggtattatttcagtacagcacgtaaatagtaagaccccttcccactttatatgttgtgcgcaatccgactgggctgggccggagataaatgtgcaattgatggctgatttggcccaaggatagcattatcaacaggaataagttcatatgagatctcttaacttgttagcgaatccgattttcgtccttcaaccggaaaaccggatacaacaattcctcagctgtcaaaaccggtgcaaaataagtccaaggaggtttggatggcgattacagttgatgtagctgctatgtggttaattttactcggtcatcctctaacgtggcattgacatgacgcttacgtggcaatttgatttggaaaataataaaaaccctgggcccacatgtcagtacccaaggggggtgggcgaagcatgcaggggcagcaggcgagagcggcggtggtagacgagagtggtggcggcgaacgagagcggcggcagcagctgctggcgccccgtcgccacccaactccggtgacgcctgccccctgctccgcttcgtgaggagatccacattgacctgctccgcttcccggggcggcgcgaacactacacgagcgtcggccgcgcgtgcccaccattttgcgcgtcatcccctccgcctctcgccgccagcgatgtcatcgtgccagccacctctcttccctctcccacgacaacgacgacatggggccagataaatggaggagcgcgaccggcatcctctccccccctctcccacgacgaccacggtgacatcgacgagaaggcgctggggcagcagggggatgacaccgatgagcaccctgatcccggtgctgccttgtcgccccgccacccctgcctgcttcgcctgccacacgctcgctcgtcgtgctcgcccgctgcccctgcttgcttcgcccgtcgtgcgcttgcccgccgccgccgccatatacatgtgggccccgcatactttattttttttttatttttctgactgggatgccacgtcagcgaaatcaggtgtctatactcttatagacctaaattggacgcttttatacagtctagggatgaagatttttgatattgaggataagggatgtaaaaaaaaaaactcggtgtaaagttgagggacggacttattccccgtaaaatatgaacatgttaggctcgatttaatctcagcccagcccatgtaagttttacagattggccgtctgatttgacgtgattttcgatgcaggcatcatcggcgggcggtggctcaagtactggacg

SEQ ID NO: 1348 - DNA, 15159 bp, Oryza sativa
  Intron number 2 from transcript LOC_Os01g38359.2 (locus LO C_Os01g38359) derived from phytozome v7.0 (chr-ID Chr1; po s 21525067 to 21540225)
ccgtatactgcgtcgaggcccaaggtaacaacatattggtgatatgttaacatactcattccatactcgtattagaagtcgtttaggacaatatttaagtcaaaccttagaaatataaatcttgaataactctcaaattgttgagtttgaaaatataaaaattatatcaataaatttatcttgaaaaatactttcataaaagtatacatatattattttttaataaatatttttatagaaataagaagttaaagttgtgttttagaaaccgtgtcgctttctacaaacgacttcctttagtaggacggagggagtacactcgtaagattaccacacatgcccaatctattatccatgcacagattatttttgtctgattttttttggagaggattatatttctgactgattattcatggcagtgtagtcgcagctcatattccattaccttaccttattgatctctactactttaataaattataaatttgtaattcctgtttccatcgtccgttaatctaaaacgcgtgctagtcgcgcgtggcacgactacgaccggtccatggcacgactctccaatcgcgccatctcgtttgtatcagcgcgactctccgattcttttccattaggagagtataatatagagttctaacaagggtaagaagggtaaatgctgagatagataagagaaaagagaagacagatgagaaacgggttgtaagatgtataggaaaaaaaatctatgtgatagacagatggaccatatatttatgatgaagagctaatcatatatgagtgagctgaaaaataagttataaagatctataaagtaaataactcgctgaattattagccttaccctaagatgcggataatttcgatcttgtttcccaccacttcatccttgatacgctgccgtcgtttcatgcacaatcttctccgcgtcctcgatttcttcaacaaaaccaacgcctcattttcttccaaaacactaaaaacgaaatccccatgtttagataaacacataatgctcttttgcttcaatccgtttctagaccacagtcattttatttgttccatcactactatagacactatttttcctgtgcgtttgggtttattatctcgtgcggtggatcggcccgcttgcagcgccgtatctgggaaaatcgatatatttgtgtgtgggcgggctgatcgtacgaaataatcgattatcccgtgtcaaggatcgttgtggcttcaggtctagactggcgttttattcagtacatgtaccccctttgaaatcaataactagctaggaaggaaaccagcgcagatacgtgcgcaattttatgaaaataatgctaaaacaaagtcatatctcatcatttataagctgggaaatagattatagactttaatatagttatgtaataaggttttctcctagattaaataaaattactttgcccctgttatatataaatttccttgttgtcacttcaatatattatcactgtttaaaagccaagtaactattcatagatgaactacataaagtaccaataaaataagcctaaaatatcgactacacgtaagtgtttcatgcctcaccaattttaaaatctatatataaatattgtaaaaataccacttgtataaattaatgggtgtttctctaatgagcaatgctacacgtactaaatttttcttgctaaacttttactaataatcatctcaaccgtttgatttaagtagatggaagttataaaaaaaatctagatgcactcatagcatgacacatcagtgttagtaagaatttagtaagaaaatgttagtacgtatagcctttaagtgaaactgattgtaacgactttctttgtctgttactttgaaaatgggtcccatatcgatgcagttgtaccctcccccagaccaacctggagcataattttaatctctaatttactaacacgtccttatggagtagtgcatcgctaagtagtaagttgagcattattggtgtgacggtggtctccactgggaccgcattaactcgagtatatgtttatgcttatagcaacgtagcaaactacattattcatgcttggtgccctttatggaagaaaaaagagaagatggaggaatcaaaatgtttttttttaattttgagtagattcattgtatagagtagacacctattgtttatggtgttaaacattacaaatactgcaatttgaaaatgagcgaagttataattcgacaatactaaaaaaattataactaaatagacataccactatgataattatcatagcaccatattgttatttatattttgacaaatatatattatagcgtttggtttattttcaacccttattgttaataatcacgtgagacacctttactcattagaagaatgtatttattgtttttccaaatttattaacaataactaatttgtgggagtatatggtagaatttaatttatttttttatatgatactatatatgtatattttttttggtttcatcttttttgacacgtggctttattcttttaccatacgtatgtgggaatgttttttttctccttccaggcgaaccctacgtaaagctttatcgttctttttcaatcttacgtacttacttttttttttttgcgaacctattctctctcgtatgtataggtggaatgtattagtacaacacacacagatatatatatatatataggacactcatatggggcaccatggtgtccgggcaccatggtatctaatgcacaaaattactcaaatttttcaaaattttcaaattgtgagtatatacctagttataataatttgattcatacctatacttatcaacaaaacaactcaaatttaactttatttcacaatccatgattacatacctaactaattatatgtatggatgctatatacctagaatcaaaatctaacaaaaacaagttcaaattcagttcaaacttgctttaaactagttagtaaagtagttaatgttaatacctaagtaattgaaaaagtttcatactcatttgaattgggtatatactcaatttcaacaatggtgcccgggcaccattgttgaaattgagtatatacccaattcaaatgagtatgaaatatatatatatatatatatatatatatacacacacacacacatatatatatatatatatatatatatgatccatcaatttaattaagtgaaaatgaatggtacagaccaccaatttaaatgaaaatcgtcggtgagattaaatagtaccgcatgacggtttaaaagcgtttatataggaacgccacgtgacgtattgggagtgtttgtacaatatttaatggaattttaatatataatagataaatatcattgacttgacctcacagcactcgagaatatttttttgctcataacgttccgatggttcctgtaggatcgaatcaaaagaactaagccaatcaaagggggtgaatggttggtataccaaaaaccaaaacttttagcggaaataaaagttaccctcaaattaaatggatcgtagtcttacagaagtagatgcgccggtctgaccgcctgatgaaagtcggtctgaccgatgtagatcgattggttgaaccgccgaaatcacctgccactgcctgtcgccgccgccggtctgaccgcctacatgccgccagtctgaccgccggtgagttgccagttagatcgccgcacccgggaaaacacaaatcgaataactcttaaagtggatgacaactttattgattctctctgtgtttacaaagtgcaccaacagcactccttacaaaagtctcgactaaactcgaaaccctaactaaactatcaactcaatgctctcaaaagcgataccaggaagcctcacgctccctctctatttatacatgagatagtcagcctaaaaccacgaaccaaactcatattagaagttctaatccccataggaaaccttctcgtacaagaaacaaactttacataaccaatcataccaaatttggactccttccaaattcgactccgcatctcatacgcacacaatatcaccatcgtatgccatagggaatcttcaccaaccacttgcattgaactctagcccaagtatcccgcatgatatctgaccaccacggacatcgccttaccaccaagtcgactcccggtccatcaccgcaaatactctcccgagacatcaagtcacctacacatgtaacaaacaaagaaaccatattccgagaccaagctattcccaacttgactcattagttgcaacatacgtatagtatccatctagaagtcataatcatgaaacaatcacggatatccaaataaacaacccgaaaccaaaatcgacacagagttggccgatcagaccataggctgcgtcgatctgaccgtgcaatacacgctggtcagaccggcaacacctgcccggtctgaccggaccacatccagtagtacctgcagatcacctgtaaaatccaatcatctccaaaaccactttgcaaataaattccaaatatcaaaaccaataatctccaatgccaattgttcatcacagaataataatcaaaaacacctttgattttacaatcttccccttgatgaacacattggtaaacccatcaaaattgttttgttatttggaaaaataaaaacaaaagtggtaaaaagcacacttcatacaaacgtatacatcatactcgaaaatccaaaagacttctctcacttttgaaaagaaagaaattcccaattgaagcaaaaacatgctcttctcaaaaactcatttgctttcctttcaaaaacacattgcttctcccccttttgacaatgatttcatcaagcataggaattatgttcattaatgttcaattttcaagagcttagcatatatatagcatatcatgtcatgtattgcaataaaaagaagatgaacacatctataatatagcaagaatgcattaaagtataattatgaaccaaagattttacaattaagctggaatcaacaatcaaaattcatgatttcaaacgatttataatgcaacatattaacaagcacatatgttgaagaataaacactaaacacatatacctattgcatttatcactctttctcaaataagctttagcacaaaacaaccaagaaaatttttaactttttctttacttgagcctttttctcattttttcttgattattctgggtacgtccttgtcgtcaagaccgtttccaaggattcggcacccattattttgctcacatcaaatacatcgttgtcgtcaaaactgtttctaaggattcggtattaatttttttcatattttttattctctttgcacaatgagaaattacaaagctatttgaggaataacaatttaattaagtatatatataaagcatttacaaatcaaaccatatgctagcatcaatattgcatatttgcttaattcaagtatagaatttaaatgccaagcatgtaggatcgtaaagggcctttcccaacccaaaagctagccattgaggtgaggggctcctccacttacatcttaggtccttcgcccttccacaaccaatgtgggactattcaacaatttcccacttcacacattggtgtccctcagccccttcaccgtatccgggtcccaccggcccacggtccatcaagtatacgggccccgcaggcacccacggtccatcaagtcttcacacactatgtccatcgggccagagatgttaacctagctaggctctgataccaggtgtaggatcgtaaagggcctttcccaccccaaaagctagcaattgaggtgaggggctcccccacttatatcttaagtcctttgtccttccacaaccaatgtgggactattcaacagttccagcatcgtagctcacatccatctccacagttcccttctctgatccattgtctcgtcaatgtgcatgattggtgcacttgtggtttgatcgaactaagtgcctgaacccaaagggaactactgttccgtacagtttgaccaagccaacttaacgaatcgggacatttaacattttatcacttttaagatctggcaattaaaaatgtatcactcgttatctattacatgtggacccttatatgtctgtgcactactggagaagtgggctttagtcccggtttacaacccctttactcccaggttgtaaaccgggtccccgaatccgggactagtcccggttgacataaccgggattaaagatccatctttagtcctggttggggttaccaaccgggagtaaaaatattagcgccacatgactgttgctccttttcttttcttttttttaattgttttttgtacttgcatattgattttgcaccgaactcaacaacaaaatcattcacacagaaacatcacaaaatcatgcatgaattgacataacaaattcatctgtaacttcaccgaaacatctaaaatcatctagaaatttacatctcaaaatcatcaacaaattcacaaaaccatctaaaaatcattcacaaatttacatcacaaaatcatccccaaaatcaacacaaaaatcatcccaaaaatcatcacaaaatcatccccaaaatcatcacaaaatcatcgatcccctccggctaacttgcccgccgccggctgcctcccatccaggcacgcccacagccggctgcctccctccggccgggtcgccgcccgcaggcatccaggcgcgccgctgcccgcacctcccttcggtgccctccggcgcgttcgccgcacgccgcctcccttcagcgcgtccgccgcctgccgccgccccacgcacttccccggccgtctaccacccgcatgcgccgacgaagaaaagatagtaagaaagaagataagaaaagaagaaagagaggagtggataagagaggaggaagtggagtggagtagtagaaagaagatagagaggaggctgagcgtgcggatacgagtagataaagagagagagcgcgcgtaatatttactcccgatcatcaaccgggattaaagatttatctttactcccgattggtaataccaactaggattaaagctcattaggacctgccaagtatcgaaccaggactcattagaactaggacttattagggacctgccaagtatcgaaccaggactcacggttggtgtcaaaaaatgattaaagctcattagacacctgccaagtatcgaaccaggactcattagggacctgccaagtatcgaaccaggactcacggttggtgtcaaaaaaaaatacccgtggagattaaagctcattagggacctgccaagtatcgaaccaggactcattagggagctgccaagtttcgaaccaggactcacgaaaatacccgtggggattaaagctcattagggacctgccaagtatcgaaccaggactcattagggagctgtgtcaaaaaatatccatgggctttaaaaccggaagataaccaaggctattgtaatttttgcctgacccagcaaagatcacttctcgtccagtaataaattttaaaaccagaagataaccaagactattcgtccagtagtaaattttaaaaccggaagataaccaagactactgtaatttttttgcctgacccagcaaagattacttctcgtccagtaataaattctttatcaccacatataagagtggtaaataattaattattcctaacgaactacttcaatagtaactcatgccgatgaatgctacgtaacacttcaatagtaactcataccgatggatgctacataccagttgacacgttactttgaaaaacagcttaatgtttatttggtatttttaatcattttgtcttattttgaataaatgtgtactgctcactttcagatatttaatagatgataccccgcgcgttgttgcggaattttgtaaatagattctgagagatacatgaggggatataagataaatataatagacagcacataggaaatgtctgttttattatattcagcaaacaatgacatttttcatacgatgaaatttattaaccgaagcaacaaaagtgatgtttgatcacaaatttgtttttttacctcctcttcaattgtacttagctgcatgtgaggtaatccatttttcatgtatgagtaggaacatgagtgtcttgaagcttcggtttgctgtggtctctgcctgtggatttgcccgtgacagactgacagctatagaaactgttggcatcgtagaagaattcatttgaacaattgcatgccttcacttgtggaatatggacaaaacagaaatgaacatcaccatacaaaggtttgggtagattcatgacaggaaataatagtagtttatgctatgaagtataaaaatgtgaaaataatgcaaaggtcataaaagataatttgaggcccctaaacacagaattgaaggtaataacattactaattgaggattagagaaaacctgttggctggttgttcatggtccatgtgtggggatgagtatagtgctgttgagtataggaggaatgggaaagataagctattgttgggagaaaccaagtgaggtgtccctgatagttatataagttgagtggtaatggtggattgagttaattgtggagattataggtataataatgtttgccatgtggagattataagtattatattacaattaaacactacttttggaggagttatttggtagtaaaacacatgcatgaaacatcaatgaaaatttgtaaactttgaaagaataaatgtgaacaaatctgaatgaagaaaaaatgaagccgagaagatggcatagttgttttgaggaaatttgttgcgtgcaccatagcctagtgtgtagtgattttaaaactaaataactatgtcttgtcatctggaaagtaaaaaatcatctattttatttaaattcttatctgttggtataaatatgtgaagagagcaccagaaactccccatctttagtttctttgtcatgagaatattaatggacagttgtttgtttggtgataagcgtgcgccaatagaaacaaaatcacttgtagcatttttggactgaaagatctatacaactcaagataaatagttgcactaacctgatgaatctcccttttgtcaattgatttattttattctaccattatgaagaacatcctctgtagtccaatcagaaagaacagaaacctggaaagcatcaatcacaaaaccatagcttatagacctgaatacaaattagggggaaaaggatcctctaactttggctggaaagccacggtgttgcagttcgcttcatccctgccgaccactgcatccaatggcacacatccatctttcctcctttgcttgcatgctgtgcggcccagttcagcatgcagcggccatcggcgcccatctggccacaataactttgttgtatgctgtcgcctgctactacatgcatgaatgcaaagtttcaactttcaacagaacctgaactgctgaagcataaaacagatataaaccatttagaataattcaaaataagacctaagtttcaactttcaagtagcatcattcatgcactgcaaaccaacaaatgagttttggacagcactataaggccatggatattgtgactaaaacagtaggattataagcaagatctccgttaatagttgagtgtaactattaatgaccctatattcctcagaatcttttgtgttgcccatcaaagcaatatctgtttgctctgcttcctaaccatcattcttagccttgaaagattcagagtaaaaattagtccagttagattacattgatttctaaatgatatttagacgtccatagcaacactcaaaatccatgacctcatatcaccaatgacaacttagattagtactattcacctgttggattcgtggtgctctctttgagcctcttcttccatttcttcaccaaagcagaaattgaccgatggtggaagatggatattcaattgattgcttcttgctttccctgtacttcattacttcgttttcttttagaacccagaaagaaaggatcaaaacccagagtgttctatactttggcactaaaactgagcgagggctgcctttttccctccactacctaccgctgcacccctgttttttccacgccggccgtgctgtgattttgggccgaactggatcgcacagtatgcaagcaaacgagggaagatggatgtgtgccgttagatgtagtggtcggcagggatgaagcgaactgcaacaccgtgactttccaagccaaagtcagaggatccgtttccaaattagggatatcttatagcaaaggaggattaatatggcgcaatatgtgcctcaattttaatgtcaacactgaactaatgacagtttaaattttagccaaagatagtttacactggaaatatctggaagtgctgttgtggaagaaatttcttgtatttcttgcgaagctagtaccctgggatgaacatatatattattttctggaaatcaggtgaacatagatgaatatgaagcgaattgaatcatatgtatttcagatagaaaaggtttttacattttctttttttgaccaggaaggtttttacattttcttgaaggacaaagtaccttatgtagcaactattttagacaggaatgtgaagggaagctgggaaccaggcataacctctgctgcagcctgtaggtggtagcagtacgacccagtagaaggctatctatctgttgataagaagtaaaactcaaagcaagaagtaaaaccaatagatgctgcaatagtgtaaaattaggaataggtacctctgatcttatagttctatcataattggaggctcctagtatacaaaatattgatgaatagaaagaaagcaacaacctgaagaacaacagaaaccaaatcttttttttattatttttataaacggagggtgtgtaggaacaaatcaacaacttgaatgaaagcttgaaatggctataagaagagagggccgacatatcaccaattagatgagcatacttacagagggaaacaggtcgttttttggcgtgcttagggtctaggcagtagtatgcgcgtgccaaccgatgaggtcctctaatggtgcccattccattttaatggagtcgagggggaggccgacggcactggagacgaatgaagcggatgttttcccacaagcaggtttatggagcgatgggagaggaaggtaggcgagcagatcaggagggccacaggcaagagaggaagcgtcgtgagaagaccgaggggcagcggtggggcgagttggggcacctgcacgggaaggcctgccacctggggaagggagaggggcagggggagggggaggagaagcgccggagtgggggagtggaggagaagcgccggggggagggggttggaggagaagcggcgcggctgggatgcgtgatgcgagcgcgtcgcgcgggctggtggggaagggaggagtcgcgcgcacggtgagaggaacgcgcccggcggcggcggcggagaatctggtgcgctcggtggagggaggcagcgcttagggatggaacggatcgaaccgtttgcagcagctgatcgaacggctggtattaaaagagtgacgtggcttcaccagatctcagcaaaatcctaataactacactaagtaaggatcacttgtatagaatgccaattggatttatacgttgtaggatcgtaaagagtcttacatttatgccaattggatttttaggtgtaggatcctaaagaatcttttccatcttaaaagctaatcaataaagtgaggaaccagagatgctgaactagctaagttttgataccaattatagtattgtaaagggtttttcctatcgtaaaagctgccaatggggtgtggctaaatgggcgataaatcacccgccccctccccctatacgctctcccccttcctccttcccttcttctcttcctactacagtataccataaaattttttaaaaaaataaaaaaaacaaagttggaaaaaattatgtatagaaatactatatataaaaaatatttgaatttaaattcaaattgaaacgggtatgtaaacttttgacttataaactttgggtctataaactaatatttgaattcaaattcaaatttcaacgggtatgtaaacttctgacttataaactttgggtctataaactaatatttgaattcaaattcaaatttgaaacggctatgtaaacttttgacttataaactttggtctataaactaatatttgaattcaaattcagctttgaaactgctatgtaaacttttgacttataaactttgggtctataaactttaagtgtataaactttagatgtatagaaatactatatataaaaaatatttgaattcaaattcaaatttgaatcggatatataaacttttgacttataaaccttgggtctttaaactttagatgtgtaaacttgatgtgtataaattttaggtgcataaattcactaaaataggaaagtaattcgatgccaaaaaaggaaaccacgtggagggagagaagggggaccccctgatcggtgctcactaggggcgatcgatcaccccttagcattctcgtagccaatgaggtgagaggctctcccacttatatattatatcccttacccttctagcaactattcaacaatagatagtgctacggtctttccagtgcggcatatttttcattaaaaaattgcaaacacacttgatcttagatctgcttcattcataaatatattggttattagtatttttcattaaaaacataaaccaaatgttcacgatgtttgctagatactcagaagtactgagaggtaggataatgtgtatcgttgattaagagaggggtaagctatggaataaaattatcgtaaacgatggcagtggggttattagctaggaaaatgagattttttactgtccagcaggtaccttggtacctaccggtacctaccggtacatgcaatttgagccatcgatttcgtttgatccaatgggtgagaaagagttgtacctagtagtactgtccacgtgattttacagagcatagagaggtactaaagaagcaagggtagttaagtaatttcacatgtatcttcttcatcttcctcctgtcttttctctctccaaaagatgctgcatgcctgcatcgatcgatgcctctcaccagggatggacaggctagccgtagtggaggtggagggggccgacgagcctccgtgcatcacttcccccaagctcgccggtgacatacgcctactgcggcccttcccctaatctcgctgttggattcgagcacatcagcgaccgacgcaagtcctcgtcgcctccgccgccgcgttagcagcctccgacgcaggcgccgccgtccaacaccaccagcgccgagcacccctcctgctccgccagcgcccaacgcgccgccgtccaacaccccgccgacgacgcccccggcaccaccggcgccgaccacccctcgtcccgctcccaccacgcccttgctcttggtttggacttgctcagttgctcttggagtcttcgttgacagtcactcagtcagagagaaggagcatcacgagctgcttagcgtgtgagattttcaatcttaccctccgtgaatgaacggccggatttaaattggtacctcaaggtaccggtacctcgaggtacaatatgctggactggagcaatgctctaggaaaatacagtgtttttctgtgaattgagaataggtagctgcctgtgatcggtatcgttcaataggaaatggagtaaatcttccaaagatttagtgaactatctgcacgggatttagtggttattagtatatcgtttggttgaaacaaagtaaatcttccgtacatttagtggattgaattgatctgcaagggagaaaaaacaaagattgatgtctcctttgttctcctccaccgctttgttcttgtccatggccatgcctccgccctgccatcatgctccaccgccactaaccactcccacaccactttcgtcgacaagttcaggaaaatagattccctatcatctgggacgcatgatgacgcccttaggtggccaaataccaactaaagctcgctaccagccattctttctttccctgagtcaaaccctaaagcgctcgcgttctgagcgctctggttgtcatttgtgccttcctccacttctcgtgggtgcgcggtgccgtgagacatgtcttaccaccatcatcgtcatcatacaaccaccaaaatctcgacgcccttagcctcctcctcctgtttgcccaaggcttggacaggaggaagaagacgaatagtgataggattgacactgttctttctcggttgggtccaacaaactcacccaaggccccaaatagagttggaccatgttgttagatatcaaatgtaaatcaaaaaaaaacacataaataacacagtgcaagattatagaagatgaagtaccgatgcggtacctatgtacctagagctaatattgagagacaattatggccttctccatctccaaaaaaaaatattctttcatgtttctcacctaaatacctataacagtacttaaattggtatttaagtggtaccttttattatggagcgttagatgtttaccctttttggaatgcaaacaccgtaaaagttctcaaagctctcatatttttaataaatgtgtatctattatatactgccgatggtggtaaaagaaaacacacttactattaatttgcaaaagtcgtttacatatacatcatgctctagatgtcatttaaacctatatcatctgtccaattttgatacgaagatatcgtcgatcagcaaatgtcaattaggataacatcactttatttgggtacatgataattatatagagagatttgatttacttatcataatttttagcttctttctcatgcaatgtacagagacactttgctattaactagagaaataaaataattcttatgaaaaagaaccaaaatttttatcctttctctccttcatcttattcaccacctggttaatcccgtgcagttcacttcattggagaacaacttgacggtaccgag

SEQ ID NO: 1349 - DNA, 1750 bp, Oryza sativa
  Intron number 5 from transcript LOC_Os10g10244.1 (locus LO C_Os10g10244) derived from phytozome v7.0 (chr-ID Chr10; p os 5651476 to 5653225)
gttctcaacctggtaagtgtgtactgtttagcatgtgtttgattcaagggtcgggataggtcgggttgtgttgaacccatttttcaggatgtttggtttggggacaggtgggatgggatggaccctgatagggaatattcccctaagatccaatccaacccacttttttctctcactgacatgtgggcgtgggccatcccttaaatagtaggaccattccatccctcgtgccaaacagatagatggtccctcaaaaactgcggaccaatccaacccacttttttctcgctgacatgtgggccatcccttaaaaagtaggaccatcccatccctcatgccaaacagatagatgggaccatcccatcccaaaaatagggaagagtccaacccatcccacctcgtccccaaaccaaacacatgcacgcaaatggcttgttgaggaataaacatcttgctcccttgcattctaaactatgatattcttcaagcatatgtgtttggtttagggatgaggtgggatgggttaggtccatcccagatttttgggatagggtggtcctattttctgtttgaaaggatggagtttagccctgttttttgtttggtttgagggatagaaggggatggaatggtcctattacttgtttggttagagggatggagaagagatagttgatagagatacctcatgtaaagttcatgaggttacctctcttgtatacagatcaaatacatgttaaacatataggaaaaaatatagtgcattttttttttaaaagccatgcatatatgaaactatttataaagactatcgacagaagtaaaccatgaaccaaatttgtcatgattaactcatcaaaacatacaaagcacacaaatttttgaggaaaacgagtcctgctccttgctgctcttgctctgggaggaaatcacaaatctacataaacaaatcaaacaatggaatcatggggcttgaactttcgagctgttggattgctgtaacattgccgcctgcaatatcactgcagagccactcaaaaaatcttatcgttttggatcaatctgcaactcagccgaggagacagaggatgtgaggagggaggaggcctcgggcgctgccgtaggttgcagccgctggctttgcttccttccgctgtcgccagctttgatgaggatgagcagccggcgagagagatgcaaggagggaggaggctatgggcgacctggctcctgcgcaccgtgtcgccgctgccactgcgagcgcacgccaccgttgcctctcgctctctcgatctggatggggaaaaatgggagaggggaatggtgaatccaggggtaaaggatatggttaccgcgcgtgcggctcatatgaggcacaccagcggaggtgggtcaacgcaatccgccagtttttgcatggatcaaccaacctggatatatgcagaatattccctttcggacccaacccaacccagagagtccttcaaccttacctataaaaatgggatggccccaacccaacccaccaaatccatccaaccaaaacacatgccaaaatttctactacctgttatcaatacaccatctaggtcaacctttgtgctaaggatggtgaagtactaaaaagaacatcagttccaaactgccaaacccataacttctatatttttctatgtatttgttagtgtcaaccatcactttgtcgcacaattatatttatttgtttctaatatgattacttcttcaggaa

SEQ ID NO: 1350 - DNA, 4238 bp, Oryza sativa
  Intron number 1 from transcript LOC_Os08g17294.1 (locus LO C_Os08g17294) derived from phytozome v7.0 (chr-ID Chr8; po s 10566728 to 10570965)
catcacagcaaccgagcattcgagcaactgcaacggtgagtcgccgagtcggtgaactgaagtgtattgattattttagcttcatagtttatgaatgactatctagattactagattaggatttaggaaccaccgaacctgtgctgcttttctagtttgctcaattgctctttgatattgttgtttgtaggtttgaaacatgaagagaaaaaaagggtcccatggttaatttaaagagttttttagaaaaagttgctaaaaaaaagaaatcaagaaccaactggttctttgctcgcggtttgtcaataagacgggacaaccagttgaacggtttcttggtcttggttttgtatgctcaataaattaacgcattcaatttatggtcaattctattcatttataactttatgaaaacatgtttatacctttacatattatacaactattagaccttgggtttgaaaattttctctctctcttacaatttcgaatacccaagttgaaaaacctgggcccgatctcgtcgcaactccggttcgtgtagttcggcgcatcgccatcgtcggcgggggcggcaggcacccactgccgtggaagatgtcgcagtctccacttacgagctgcccacgagccaaacaaggtagagccctacaaggagtacaattggaagcctgcgggtgcgcagtccatcaaaagattcaaaaccatggccatagcagccgcaacatccctcggcccatgtcatagcctcaaagagacaaatacgtgcgcatcaggaataagttcactttgtgaccctcaggagtgatcgaaatctaatccgtgaccctaaaccacaaaaccggatatctcgacccccaaactcttaaaaccaatacaaatttactccctcggcggttttgtagagcggtttcactgacgtggtgcctacgttgcgatattgaccgagtcttcgttccacgtggcattgacgtggcacttacgtggcattagaattaaaaaatatgcgtgggacctgtttgtcattcacacaaaaagaaatgtgggcccactaacatgtggggcccatatgtcagtcctcccttcttcctcctccctctctcccttctctctcgttctctcccttcttccccttcggcaggcggcggggcatgggccgcggtgtggtggcggcggcggtgggctggagctgatacgggttctggagcagggagctcatcctcccggtcgacggcgacggcgatgatgtagacaagggagcggatgaggctgggtagtcggtgccgcgatggggctgaggctgaggctgcggggggagctcgtccggcgggtctatggccgtggatctcggctcgatgaagaggcggtcgccacccccctctggcggtggtgccacggtccccggagtggagtcgacgatgctgaggccagcgctcggcgagatgggatctgcgtgttggacatcaggttggccaacgccggcaggtacgccggcaacatcctcacctgcagagacaaacaaggccatggcctctccctggttccaatcgaccatggatactgtcttcctgagagtgtaagcactgacgctgacagattttcttctagctaattgacttccattttgttcgttggtgatcatgcatcgatcacgcatgtgcagtttgaggattgcatattcgagtggttctactagccgcagtgtcgggagccattcagcgaggagacggtggagtacataaggtcactggacgccgaggaggacatcgccattctgaggttccatggctgggagatgccagccaagtgcgagcgcgtcctgcgcgtcaccaccatgctgctcaagaaaggcgtggacacgggcctcgccgcgttcgacgtggggagcatcgtgtgcagggatggggccaggcagtcccgggagtggaggagtcgacgatggcgaggccagcactcggcgagatggggtcagcgtcgtggaggaagtcgaccggcgggggttgtccttggcatcgtcgatggcccacgacggaggcggaggttgaaggcagcggcccacgcactagcctcgctcgccggccaacacggaggagccagtgtcgtccttgttcgccgccgccgctgccgctccggccctcgccaaatggaagaggggaggaagaagaaagagagatgagttagtgcgccccacaaatttttgtgtgtgaatgacaaacgggtcccacacatattttttaattctcatgccacgtaagtgccacgtcaacgccacatggaacaaagactcggtcaatatcgccatgtaggagccacatcagtgaaaccgtcctccaaaaccgctgagggagtcaaattgcactggttttagaagtttgggggtcgagatatccggttttgtggtttaggatcacaaattagatttcaatcacttttgagggtcacaaagtgaacttatttctgcgcatcaaccagcgcgagtgcgtgactgcgagagcccaagcagatcgcgaacgctctcatcaactagggccacatcgtgcagccaatgcccaccaagccctacgcctgccttaacatcttcacgacctagtgaagctgatttgcttcattcacttcgccttatttgcttcacttgattatctgtttgcttctgatttgctggtgcacatcgcttgattcacttctccccttcggcctcaccctcatgcaaggttgtcatatcatgatccatattctagtttcttacgatattatgatcctgtcaaattgtaacgataccgatcccgtctagtaccctatctttcatagtgtctcgatcctattgtttactttcacatgatcgtatgaaatcttaggtgctatcctgattctatggtgtctacgatcctataaattattatttaaaataaggtggattgataataatatgaataaatatgctcaagtttacaataaaaaccaattaaatttatcaaaatcattattatatgctttaatttatataatgtattattatattttatataaaaatacgtaatttctaaaatattatagtatctcgatcatcctatggtagtatcttataatactataatactacaaatcgaaaaattatcctacggctccattcgcttcttctgtaaatgaagattaaaagcgggtacgtaaaacaaggaaaccattaacatgtaattaattaagttttagttattacaaacttgagaaatggatttatctaatattttaaagcaacttctatatatataaagttttcgtataaaatatattgtttagcagtttgaaaaacgtgccaacgaaaaacgaggaaagatatgaatctttcattttaatgaaagttagaacggggcctatatctaaatactgattatcttgcccttacgtagctaaacgagcctagctcgttatgttggcacgagccaaccggagctggctcggctctactctactcgtttttgtttgagcgggaaagccgaaagaaacccgcgaagccaaaattccccaccgccgccgcggcggaaacaactccgatcttggacaccgacaccgcaccccgacggaaatccacgcggagaacggaaatcgcctccccccctcccctcctctttgatcctctctaagcacgactgcattgcacgaggttggttgttgcgagttctggcggcggggcgctgcccgcgtagtcggggcggctcgtgcagtcgcagttgagcggggcgagggcactggccgctggggcgagcaggaggcggctggcaacgggcggcgacgcgctgcgcctgtgcggatctggcgcgtggaagcaggcggtcggtggtgaggcaggaggttggggggagggcgtggcaggaggcgcgcttctccgcagagctggtctgctctctgctgcatgcattcttttgttgtattgttgaatttcaatgagattttattggatttatgagaaattgagccctatgtttcagagttttgatagatttgcaattggggaagaaaacaaaattggttatttgttttacaagcaattctagtaatactcacccaattgatgagggaacaaatcaaccaaatgtcattagctactttgagcccattccccttttttttggtcctggattcgtgcatttactgctgcttttcatcaatgtgcaacctatttatacagtgtagctgcttatgccaaagggtgacagaaatcaagaataagcaatagtattctg

SEQ ID NO: 1351 - DNA, 3775 bp, Oryza sativa
  Intron number 1 from transcript LOC_Os02g12939.1 (locus LO C_Os02g12939) derived from phytozome v7.0 (chr-ID Chr2; po s 6831751 to 6835525 reverse strand)
ctccgttctgtaatccgcgcggaaccatcgggccggtaagctacctgtgaactcctccacgcttttgtttccatgttggatgaaatcacgagtacgaccggtaggtatgccaaaatattttggtttagatttcgggctccagtgtagtagtacatttttttgttctttgtgactgtaaattgttagaatcaattcagataccctctctttttcctaaataaccgggagtttcgtctcctctgaaaaagaagggcatctacttattgaaggctcactagttagatgcttggagtaacctatgcacattatattttcgtttctgtcgatgtaatggggccctgtttgtctccagaaattaagggaatttctgcagtacctattttttcaattaacacacgttgtaatatgaagctaatttaaacatgctggccaaaagaattcaagaaatttcatagtcaactatggcaacatgccaacatccatgctatctgtgtgcttattctgggaaaaaaatgtagtctttgttatgatctgaagataacttcaggtgctgccatttagtttgcaagttaaacagtagttagtgactgcatcaacatttcacatgctttatgtcaacataaaacagctgcagttactatccttttgcaacagcatcattagattgctggatgaagcagacgaatcacctacagcatttgaaacatgcattgtcatgatcatcgcacttcttcaaccaaaaaactgttatttcatctctttatctatgattcaagaagagctgtttcgtcacagatatcatcttgcaagattcccccattggatttacggtcaaatcggagaagcacatgcagcacatctttcattgatggccgcattgaaggatgctccccagtacaaatcacagcaagtgtaaacacctccaatgcgtcctcaacatgggttgggtctctgatcccctcatcgagaagatcaactgacaaaccatattcttggtactgcctccatgcccattgtgccaagcaatagtactctccaccatcatttgccactcgaccagttatgatttccagaaggaccacaccaaagctgtagacatcgatcttctcgtttaccttgagccgatgtccgtattctgcaaagtgtaaacaatttagtgtttcaggtaatatgcaagtatatactcatcaaagttactctttttctctctgacctggtgccatgtagccaaaagttccagctatagcagaaaatgactcgtcgtctccagctttgagaagaatctttgcaagcccaaaatctgccatctttgctctgaagttgtgatccagaaggatgttggcacacttgacatctcgatgcactatgggaggcgagcaatggtgatgcatgtagcaaagacctctcgctgagtcgatggcaatttgcaatcttgttggccaatccagaggtcctggcgcaccaattctttccctctggtgaagccattgatgtaggctgccgttttccatgtactcatagacaagaagctttgcatctgaacttgagatgcagcagagcagcttgacaatgtttgtgtgcctgatctctcccaatatctgagcctctgcaaggaagtccttctccagtttgtcatcaagattcggtgtgttccatatctttttgacggccaccatccttccaccacttgctctatccccagcataaacccggtacaccttgccagacctgccacttccaatccaattctgctcgtagagcccagaaagaatgttagttgtggtgaaatgcaatatgtggaatggtgttagcttccatgacaagtggtcttgaagcttttttctccttaagagcatgataccaagcactgctgaacccaaaagcatgatgctggcaacagcagaaaagagggctataagcctcctaaatagatcattgccgtttgttcttgccctgcagatagggaaattatgaactgaattgtttgatgatacacagaggcctgggttgaatagaaagctttgttcatatgcttcgttttgcagtgatatcggaatttccccgatgagttggttcatagagagattcagaaaattgagcctcagcttattaaaatcctttgggatttcacctgataatttattcgacgagagatcaaggatggttagtactgtcataaacccaaacgccgctgggatattaccagatatctgatttccacttaggttaagtgtgtttagcctcgccagcactccaattgtcatgggtagtgagccactaatttgattcctagagaggtcaacttctgtgacctgagaaatgcctgtcagatcccagggaatttcaccagacagcaagttgtttgctgctatgaatactttcatttttcctgccaatgttggaataggacctgagaatttgttgttgctgatgtcaagacgtgtaaagttccatgggagctgtttggggaatgtgccagagaacctgttgttttgtatcataactgtacttagctgatttgtcaccactgaccaaagactcttggggaactctccagaaaaattgttgttgtacatcatcaaattgttcaacagatagcagccgtccaatgacgatggaagttttccagaaaagctgttattgaacacaacaatgtcatatagcttcctgttgaagcagaggccttctggtagcttcccagagaggttattattggagacctcaagattggccagtggtgagtgcttaccaagctctggtgggagtgatccagagagcatgttaccgaataaccgaatgtcagtaagctttggcagcagcccaacgcttggtggtattgatccactcagcttgttaaagtagagaaacagtaaggtaaggttggtaagcttaccaaatccatttggtatggttcctattaattcgtttgaagaaacatcaatctccaccaagttcaaggcactgacattgggttcaatctcaccggtgaatccgtttgcatacaggtacaaattctgaagtttcttatgttgccagatccacgttggaatttttccttgcagcttgtttgatgaaaaatccaagaggttgagctctctgaggctggacaagttttcagggatttcaccggtaatattcatatttgacagccacaagtaagtcagacgtgtcaacctaccaaactccactggaaagggagccggtacaaatggattgactgctagtgtcagcctctcaaggtcagcaagattgctgatatcctcagctgggtacctcccatcaaactgattggtgtcaaggagcagtgacttcagccttgggaacagtccaattgatggtggaattctgcctgtgaagtgattagatgataggttgagatgctcgagcagtgctgatagatgatttaagtcacttgggagttgtccatcaaatgcgttgttggaaagatctaggaacttgagattggagcaattgtagagcatggtagggaatgaagtggagaaattgttgtaggaaaggtccaagcgggtgaggttctttaggagacaaatggagggaggaattggtttgatgaaggtttgatttggtagagagatgccaatcaccgcaccatttgtgcatgtaattccttcccagttgcagtgagcagtagtagtggagttccatctacctagcgcaggtgagctcccccaatggttcttgagctcaaggaggatttggtgttcttcattagattgatttgtggactttgggtaggatttgtgcagcagagaaa

SEQ ID NO: 1352 - DNA, 3037 bp, Oryza sativa
  Intron number 3 from transcript LOC_Os03g36560.1 (locus LO C_Os03g36560) derived from phytozome v7.0 (chr-ID Chr3; po s 20264494 to 20267530)
gggcctcagcctcaaggatctggctgttctgtcaggtacgtagccacatatttaatctccattcagcctagctttcaggcgtcacacatacagtttcttgcagaccaaaagtgttcaaacttcacctgatgagatattgaggatatgtttagttcacgtcaaaattggaagtttcgttaaaattggaactatatgacggaaaagtttgaagtttgtatgtgtaggaaagttttgatgtgatgaaaaagttggaagtttgaaaaaaaaaattagaactatactcggtctgaaataacatatatagtaaaaattttgaattggcttcatgtgaaaacattaaaagattctagtggattcaccacgatagcattccaatagtggcaaaattagaccatgagtagtttcctgttcaggacaacatgtagttgccgatatatcacccgtgcacttccaatcattacttatacaaatatgcaaggaaaaaaatataaaggagatagtatgacatcatctcagtgaaaacataatgataccgttttcacaccactgaatttttttagaaaaatatagcaatatttttaatccaaaacaaacatattatcgtaatatatacaatattaaatttagtaaaactaatttattttgtgttatagatgttgctatatttctctacaaacttagttaaattttagaaaaatgattaaaaaaatcaaaacgtcttataatataaaatggattgagtagttttttacgcggttgttgggcatccagttctgcggcaatggctgcagcagtcaggtagcttacttgtgcctgtgtactcatagtggttgcagctgctccgttgtctggcaacatgaatagggcctatactaagagtgaaatattccaaaatgtaacaaattgacaacgaagtggtcagtactggtgatatgtatttaattactttccaatatttttgattgaattatttcaggtctaaaccccctgttcagttaaaaattttgaataacaaccatgtatatgtaatttttgtcatgaggtcgatatgatgccctacttgaaacccattgtagttttgtatgacaatgtcgaccgtcaaagctagtatcagacagagcatgaagtcacatgtctcttttactactggcctattgatgtcgcgtgtaggagaaactattacgatttgagaaagggcctgtagagcatgaagtcacatgtctcttttactactggcctattgatgtcgcgtgtaggagaaactattacgatttgcgaaagggcctgtagtctgtagcctagtgtttacgagagcctcagtagcatctaaggttctaggttcgactctctatgagagcgaattttctaggatttaacggtgttgtgctttcagtggtaggcgacgtacccgtcgacagcgaggcgcctgtggtgacttcgtcaatatcaaggattcgccggcctagtcttcgaagatgctcataggggtagggtttacgtgcgtacgttcataggagtaagtgcacgtgcgttgtgagtgtctgtgttgtactgtgtaatttcaaaaaaaaaaagaaactattacgatttgttcaaagtatagaacaacatcacacatttcaaggaataatcaattactaataaggggataaacggaatatggtcggtctcaaaattgccaaaatgaaaatcagacgcagaaaatataaaaaatcaaagaatgctgcagtacagacgtaaagtaccactggtggagaaatgctttttagtcctagttcgtaaccccctgtagtcccggtttttcaaccgggactacgaatccgggactaaagatcgctatctttagtcccggttcaaataaccgggactaaaaatcaatctttagtcccggttgatgttaccaaccgggactaaagatggaagaatctttagtcccggttgataacaccaaccgggactaaagatattttttcttttttttttctgcttttaatattgaatattgatttcacaccatcccctcccatatccaaatcatcacatattacagaacatctccaaatcctcaaacaaatcatctccaaatacatcacaaactcttaaaaaaattacatcacagggttctaaaaaattcatcacagattcacatctcacacaaaaatacatcacagattcacatctcaaaaaaaaaaagaaaaaaaatccggccggcggccactgccgcctcccctcctcgcatccgcgccggccggccagcgccgcgtcggtcgccgccgagcggccgcccaccgcagccgccgcctccgcgcggcccccggcaccgccgcgcggcctcccgcgccgccgcgccggccgcccaccgccgccgccgcgcggccccccgcgctgccgcaccggccgccgcgcaggccgcctccgcgccgtcccccgcgtcgccgcctccgcgccgaccgcctgcactgtggtgaaggaaaaaaggaaggagaggaggggagttagagataaggaaagagataagaagttagagaggaaaaaaagagatagagggaggagtttgttgtgtggacgggaaaagaggatcggtactatggattatatagtgtgttttgatttttattctcggttagtaacaccaaccgggactaaaaataggtttttagtcccggttggtgttactaaccgggactaaagatcatagggccctgacacagcctgacatggaatcaaccgggactaaaaatgaactttagtcccggttggagttaccaaccgggagtaaagatgatttttagtcccggttggtaacaacaaccgggactaaagatcttcctcttattaaccgggactaaaaatcatttttagtcccggtttttaatggaaccgggactattgtggatatgggtcgaccgaccaaagatggtttctctaccagtgtaccctagcattcttaaagattatttaactttgtttatattcttatgcatgacactttgaactttcaggcgcccacgcgctgggcaacacgcactgcccatcg

SEQ ID NO: 1353 - DNA, 2604 bp, Oryza sativa
  Intron number 2 from transcript LOC_Os11g12560.1 (locus LO C_Os11g12560) derived from phytozome v7.0 (chr-ID Chr11; p os 7053771 to 7056374 reverse strand)
gcctttgaaattgtggattcatcttgccaaggaatgtgagtatacaaaaagtagtgtcaaatcttgtcgcaatttggagagatttacaaccggtcgtgcatccagatgaacacgcaggtatttcggagtggtggcaagctggtgggagaaccagacatcataattaaggatgaagaaaaaaagaaatttgtggggggcttactcgccactcggggaacatttgagtatttgactcgaaagaaacagaagagtcttccattaggtggaaagaaatgaagaaccagttgcgtatctgactagtgcaatacttgaatcgacacttgttagtttcctagctggctgtggaggtttattaagtcgtgtttttgataatcacgggtaaaatcctacctccttttaaaatgtatatgtatgtatatgtatgacgccattgaattttcacacaacgtttaaccatctatcttatttaaaaatttagtacaaatatatatttaaaattataagttatgattatacttcatttgatgataaaataagtcataacaagattaacaatatttatatatttttttaataacacgaatggtaaaacattatgtgaaaagtcaacgacgtcatacatttcgaaatggagggagcagctcgtaaccccttctcgaagccactgtgatatcgatgttgttattggtgaagaactcttttcttcttaatattggactagcagaactcctgccttttggttaaaaaattataaaaaaattgacaacataaatcaatatgtagtatacatctttataaatacacaagtttaaattcaacctatagaaattgagaaaaagtcaaatatgattatgaatagtacgtgtaacattcacaatcatatttgaattgtataggtcaaatttaaacatgcatcatcgtggagtgacatatcatatattgatatataatattaaatatttttttaaaaaatcataactattttgatgcatggaagaaacgagcgggacattcttttaagggaaaaaaaaagctatccacactagaggactaactggtaaagcatatcccactaaaattgcccttaccatattttcttcccagactctctatgtcatcattaaacccccattacattctgcaatgagtgctcaggcaattttgacccattacttgactaattaatgattaattcagtactcccctgtttcatattataagtcattttaacttcggtcaaactgtttcaagtttaaccaagtttatctctactattataaatattaaagatgtttttaccggtactttggtacatcattcgtgtataagtcggtttctaagttcgtttgcctttggaaatacatatccatatttgagtcagtttctaaatctgtttgcttttggaaatatagaaggattcgtataagaaatctcttaaaacaacttgcatgctaacttgagacgatcggattcctaattgcagctcatgattttctaaaaacagaatatatatccaagcgaattcccacaatatatttcactttaactaaattgtataacaataataataatattaaaataacattcacccattgcaacgcacgagcattttttctagtagaaaaataaatattttcaacccaagacaaatatattatggaaatatattaaattattgatttaatgacactaattcgtgttgtaaatattagtatatttatttacaaatctaatcaaatttagagtagtttgcctttgaccaaagtcaaaacgacttgtcgacaatggtgagaattgtcggtgacgtaaatatgggatatatctttaaagttgactaactatgcgtatggttaaagtgttctatttatatacagctttccatgtttgggttgacatctttaatctgaataggaagcaaaagagtaaagaccgggatggatataatgccgagcataccaatctctgcatgtccaagatgataatgatgtgtttatacggatataaaatccggatgccccaaatctcactgaagacccgctctatccccaagtctatagattgttgaccttttgtttcatagaatctttactccacgtatcaataacatggggagttgattttgatccctcgagggatattccctcgttatttgcatgttataaaaaatagttcaaatagttataaaaaattaaaaaaaattgagaagatgtaataatatgtgatatatcactccacaaacatgcgagtttaaatccaacttctatatctcgcaacgaaaaaaacaaatttgagtgtgaatatacattaactagttgtagttaaatttgtttttttcgttgcgagaagtagaagttgaatttgaagtgatatatcacatgttcatatatcttcttaatttttttcatattttttcataactatttaagtgacatacaaacaacgaggagatatcctctcgaggtatcaaaatagtttctacaatgacatgatgatgtagggctaccaaatagcaccataaattagttgtatcctaaactgataagtagcctctcttcttcattcacatcagctgagctgaaccaacagcaggacaatcctgaacac

SEQ ID NO: 1354 - DNA, 640 bp, Oryza sativa
  Intron number 15 from transcript LOC_Os01g39310.1 (locus L OC_Os01g39310) derived from phytozome v7.0 (chr-ID Chr1; p os 22124729 to 22125368)
ggttttcttggagaagtttgacaaaggatccgaaggtatgttttcagaatgttacttgcatgatattttaatctggagaatactgatccactgttctagctatgttggttaccggtaagttaaccccgggtacttttggttttattgccctgaacaagtggaagctagctaggtcattataacataaaaaacaatccagttgacatctttcaatgctaaaaagtcacaaagtgaactctccaaaagcaatatatgtttcgattcagtcatctgctgagagcccaattcattactagctactcaatattttcctgatggatccaatttcattatgaaacctagttttggtatctaaaaaaggaccaggtacaattcttgtttttgcatgtgaattgcacccagcttaggcagggatgaagctaggattatgaagaaggtggttaactaccaaatgaaataataacgatttgctgcgttgatgtttctgctttttaaactataatattagctggtaatgaacatgaatttatgagaaaactcttttgttcagatggtatatgttgcactccactcctttttctgcacaaatgaatatatggagtatctgatgacaatgatatatttgtgtatccattgacag

SEQ ID NO: 1355 - DNA, 1749 bp, Oryza sativa
  Intron number 4 from transcript LOC_Os07g05870.1 (locus LO C_Os07g05870) derived from phytozome v7.0 (chr-ID Chr7; po s 2818626 to 2820374 reverse strand)
tgccccataaagttgctgcagggatatactgggaggtaagtgtcctgtacttgttcttaccattccaataccacacttgcaaaagcattttaagttttgtatagatggtatcttgaaactctagcagttagcgtctgaggactacaaactagaataactcgatggctactttttccttttaattcttgttaatttggttttagaataaattgaattgatagtacaaactgaattaacatatgagcaaattatgattattaagagtttacatttgactaaccaagttttaagttgaaaatgcaagaaaagcttcgaggcttaattcatggtctccatgattagcttttgtttgaattatgtttaaaactcttatgtcagtattcactaggaatcagatcaacattgattccttttatgcctgatttctttttaataaaaccaaaaggggtacattggaaaccgcaataacagattccatgacatcattctcacaaacctaacacaacattaaacagttgaaaaatgaaatccacacaataatcacgataacatccgacatacgcaaggaagttgacatggtacaatcagattggtacaaatattcagaatagcctaacttggacaagtacaaaagataataatgtgcttgttagacagagatgtcaggatctgacttaacctcaacaatcaccatcagtgcatatttcaataaatattcaccaaatgtccctttcattgctagacacatcttcccacatcgtccagcttcattccatgaaattatcttgttataatgcatttttcgtatgttagtcagcaaggcaccatgtttttgttggcagtgtcaagctcattttgtactttagtcccttgttgtggcaacccttgctatcgatatactggataccatggactgacactttttgtaaaagctttattaactattccaacatatccttatctccgctcatcttactgcaatctatcagagtcccacttcgcataagctcttagtctgataagagaatctttgatgcgatgcaagtttagtctttctgtcaaaaactgcagtcacttgagtgaaaaataagtttgtaccatgtccatagtccataccctttattgacatcttaactttggtagttctgttcaattagatgcttctatgcttatcaccttttcacagtcatgaaattcataggagcataaccaggcccaaattacatgagacataagtaaagcttgttacttctcttcaggccatgtcataaattcacatcttgaggtagcatgtcttcgtactgaccattcaagacatggaaagcatctcatttctgctactttatcaaagccaaaaaaaaaatgaatcttctattatatttagcgttttgatttttgttgagaaagaatattctgagctagcaaactaggatctggagcttatcttgaaaacttgtaataggatacttgcaacttgtaatgtgtctgcatcaactcatcaagttattctaagcaactaagcaattcatggcatggtgatttctgtcagaatcacggttgctaagagcatataataaattcagataattctagtgactacaaagtagtaggacccagcttgattcacacctaaactggcattttcctctcaaacatgccgtttcatttccttcctggtcttaataactggtatgctctgctactccttctctaggccatcagactttggctgaagaacgtcaaattcct

SEQ ID NO: 1356 - DNA, 4525 bp, Oryza sativa
  Intron number 1 from transcript LOC_Os05g37170.3 (locus LO C_Os05g37170) derived from phytozome v7.0 (chr-ID Chr5; po s 21653351 to 21657875)
ccggcggcgttcggctccatcgatcgcacggcaaggtacggctccctttcccgcaaaccccaatttccgttgcagttttctcgtttatcgagactcggatgaatcattgtgagtcctcttactgtacgtacgcgatcacggatgctgcttgttgagattttttttttttttgggggggggttgtttttctcccgcttctgctttgtacaattttttttctccgtttgcgagattaatactccatattcaggcggaaataggagtgctacattagtagtgtagtctccgcttggtcatgaatttaccaaattgtaggttaagcatggagatttcccgttgggtctgtttgcactgtgaaaaccgcgtcctgatatttgtctgtgtcctgctgaacctgatgtgtgtgtggtaaattggcctaacatttaaagcagtcgatgaaatacaacttttgttagggagtaggtgcatgtgagcaactttgaaacgatttaggcctgcaagggtactttctgcatttgagaatttggcagaactatgccggatggcagggcgagtacctcatagtctcacagcctcacactgtcacactatgcagccagtctcacagcctcacactgtcacacactatgcggccttggaatgattgcaagttaccatgggtccgtatatcacaaagaagcatgccattcatggtgctcgttgagtctagcaagcatttgaatagcacaagatggtactcactccgtttcaaaatatatggtgtattttgattcgttaggataatactttgaccaacaactactctattagaatatcatttatgtgatataaaattataatcataagtaattttgaatatgaatctaataaatttaattttagagtaatcgttggtcaaagtcttatcctaatgaaacaaaatgcaccttatattttgaaatggagaaaatagcaagctaccaggcttaaccacattttaagatatctgaaaccgttgttatttcatcaacttcaattaaaccatgccttacttcagttgaggttctttctatgctgtaaggttttcgttttggaattcacgcttgcttttaagcttgactagttatttacagttcaatttctgcaacattttcccaacaagattactatattatgcagccctgcaggcatgcaaatccactccttttgggccctttttctcttgtttgtttccattgtcgctcatgtccttctgactgctaccttctctctggtcactagctttcagttttattgaggtgaatctcactgttcactagggctgcaaattttggccatgtatggaccacaatagttatagctctacaaaactacttattttctttatggtaaaaagaaactacttgttttcttgtctagttatatttttctaactcttcaatgtcttatatttctttgaggaatagtaactgtattaattgtttgagacttcgagttcatttacattgttttaatttttcgcaacttcgcctcagaaaattttgttgaggctcttaatcccatgacagaagggccaggtatttttgtttggttattctccaataaaatcttatacatactagctttgtgctccttattgctaccgatgacaaataaatataagttaaaatttctaacgtgattaattcagataaagccaatgacataaacacatgcaaagattgccgttttttcaaataaattatttaaacaacatttacatgtttagccatagaatttttatgagtagtaggtgtagaaatatattgtaagccccaactccttttataagatggaaaataatttggaagagtaaaaatatctgatcaccatgtcacaattcccaaaaattatttaccgacatcaaactatacaagaaaaggacaatatatcatcaagttaacatttactaagcttgtaagcccattttctgatgctaaaacagagcccaatgaacatttaatataaagtatatcataaagaaaagagtatatctttaagaaaagtatataaaaaagtatatcattttcttttcctttaaacccattcttttgcttttaatataggatatgtctctcatgccctcatgccatcctttggctttatctttatcagtccttgtcaagaaaataagttactgacataataaggaattcagtctgcaaaagcaggttagaagtagttgaaattatacttttctgttaatgtgttactacctctggacgttaatttgacactttggacaaagaaaatgacttgcgcttaataggttttggctgtcggaaacgtcaaataatcttgactggagggagtattatgcatgacgatcccttctatcttttctggtttacgtttttgaagactcatgttttaccatttaatgacgaaacgcatcctgcagctctgaaatctgaaccctgtgattagatgaggattgtgttggctttctaaaatcatattccgatcttaacgcccacaacttcagtttcagtaatgttgatctaccagtgtccagatatcaatgcagtttacaggctgagatgaacttcaaatttctacaacttcgtgtgaagtgaaatggttaagatgcaaggtttgatctcttgtgttacctttttgtcgaaaagaatatcttatctttgtgcatagatacacatgcacattgttaggtacttaggtatgtccatgagaaattttggctggaagtgtttgggaatctatagaactttacaaaagtttaccacctcttatgctgtatttaaatatcaaaagtattgtgtctgaacacaattggctggtctgcattatacatttgctgttattatgctcaggttattcatcattatccacaaatatgttttttcttctttgcaaatattctccttttcccagagccgcattggactccaatacaagagtcagagggtggaagcaaagaaatcgtagtaaatgatctctactggcctctgtagccaaaggattcagcaaatctgcgaagacctcacgagtcaggagctttccagtgagtataaatgcatcttcgtttcaccgcaccacactatctctcatatatatactcgaggccctactttatccaaaaggtcaagcactaataagttaattaagaggcaacttggtcactacacatattctcataatcgatagtgatccatagcatttccaaacagagaaacaaggccattctggaatgaagcttccttttgacaggaaaaacttcagtatttggtgcatgacaaggtggagatgcatggatcctcatggacaatttgttcttaggaaaaggaagcaagctcctaggcctctcatccccccccccccccctctcttcctttcctttcttcaatgatcattttgctgagagtacttgctgtctcagagggaaggccagagagggcagccagcgagaaatgaaaggtggttacaagcggtagagtaggagacagaaatcctgacagagaaaaggcctacaacgctactagctaggctatcacacatctcacttctttctctctcagtgtagcctgtgaaaactgaaaagatagagaggcaggctcgtagggcatgttcaaaaggacacaaaatcttctttgtggtacagtagtagatgaaactccaagggggattcgatttgccagtgtgggagaagacaaacaggaaacgaagcaacatcctatcatgtggtacttatatatgctcttcccttcctccatctcccttctcttgagtatactagcacacttgaatgcatggtgcatgcatgtgtgaacctagttcactagtctctactgctgctactagcctcttctttgtaaagttgagagttgtgctcattggcatggtgcaaggtgaggggagttcttggaggatggcaaatgatcatgatagagcagtaccacacagccaagcggttgcatatggaatccaaggccatgctgttcttgctgcaccacctgccaacttcctgtactgccgcttccctctctagtctccatctccctatctacactgttcttctctttcaactaatagtacatgcaaagacaacacagctaaagttctttttcaactaggcactagtagttttcaagccctgcagttgctttaaagtatcgtttctccttgcctctttttaactatctttataactaactcccctgctatatatatatatatccaagctaccgctcattggattacacctcttctcgcaatccaaatagtttcttaatgcctaaggcctggatcctgtaagtgatttgcttaccctcatcctacatatcctttttagctctcatccttatctgccttcctctaacctcagaggctcacaccctcagtgcttgcctttacattcctgaaaagttcagtttttatctgttcgtccatatattgcatatggctattgactaccacaggtgttgaatgctgtgctctactgcttggtccagggagttgcaacctgcagctgctgcttactttggtg

SEQ ID NO: 1357 - DNA, 9497 bp, Oryza sativa
  Intron number 3 from transcript LOC_Os02g50174.1 (locus LO C_Os02g50174) derived from phytozome v7.0 (chr-ID Chr2; po s 30637196 to 30646692)
gcgtactttcactcaagaccagacctgtacgatcagtatctctctctctctctctctctctctctctctctctctctccggctcaaaaaactatctgaagtttttatcgttttatttactgaatttaaggtgcctcactagtcactacaatgacgtgccgttttgagagttgttatcatcgcttaactactgatgacaaatactccctctgtccctaaaaaacgaatctaaaactgaatatgacatattttagtactatgaatctggacatatgtatgtccacatatatctagatttgtagtattaggatttatcattcagtactaagttgatttttatgggacggagggggtagttgtgtagtgttaggctatcaacttcagtagtggcttagtatagttcgtgtgccaattttttttagtatacggatacatatttgaagtattaaacgtagattaataacaaaacaaattacagattccgcctataaactacgaaatgaatttattaagcctaattaatccatcattagcaaatgtttattgtagcatcacattgtaaaatcatagcgtaaaagattcgtctcgtaatttacagtcggactgtgcaattgtttttttttcatccatatttgatgctctatacatgtgtgtaaatatttgatctgatgaaaaagttgaaaatttgaaggaaaaagttagaatctaaacacggccagtattgaaaatctaacccttccatgtacttcactgctactgtcctgatcagacctcaattctggacagccgcttttcttctacagtaatgttctataattattatttttttctctaagatcgttagaacgtctctccatgtactcgttttaggttataagatgttttgactttggttaaaatcaaactgctttaagttttaccaagtttatagaaaaaaatagtaatattttttaccaaagataaatttattataaaaatatatttaattattaatttaataaaactaatttagtaatgtaaattactatgtttgtatataaacttagtcaaacttatagaagtttgactttgaccaaagttaaaatatcttataacctaaaataaaaggagtatgtttttaagtgaaccatttccaatgaatgacacattacatacaaaaaaaaaaggcgtcaaattaatcgttggatcatgttgaattcacgcaggacaatgcaacatcaccacgcttagataatgggaatttataaaacccggcttctacaccaacggggatgtatacagccacagaaaatccgaccaaacaagctcagttcatacacacatgttcacaaacaaaaggagcacaaaggctcaagcacaccttacataaaactaaaagagcacaaagacttccaacgcctttcaaagtgaaaagaccttccaaataaactaatgaccacattactcctttaaccgctttctcatgttccatccatctttaccaaagaagtgcatgacagatgtctctaacagtttgcatccttccttcatcacatcgcgctcatcttctttaagcagcaaggaccattgtcgagcccaatacgtccccctgaaaataacctgcaagtaagagttaaaattggagccattgaagaccacatcatttctacaaatccacattgcccacaacaacgccacaatccctataaagatttggtgctttagcctagattgtaaaccctttagccaaatcccaaacatattagcaacactgttaggcggatttatcccaaatgttataaaaagggtactccaaacaaatctagccacatgacaatcaaaaaagagatgttgtatcgtttcattgtggttacaaaaacaacacttagtgatgcccttccaatttctttttgctagattgtccttcgtgagaatcactcccttctttaaataccagaggaagattttgtttttcaaaggaattctaagcttccaaattaaatccttccttggcactacattctcatacataatcattttatacatggaactaaccgaaaatattctggttttgttaactttccaaataagcttgtctctatggtttgagagcctaacaagaaccactttagccactaggttaaaccatgcaaccaaattctcccccaccaaagcccttctgaactcaacatttaacggcactttatctataacatccgcaacaatagcattcttattccttacaagattgtataaattagggtacaacttttcaaaaggtaaatcaccaatccagcaatcctcctagaatcttatctgagaaccatcccccaccttaaaggcaccgcctttaaaaaagacatccctcatccccattagcctagcccagaaatgtgaatctccagggcgtttctcgacttgtgtgatggttttcttagtcaagtatttattcctaagaatgtcctgccaaaccccttcttcattgatgagtttgtacaactatttgctaagcaagcatttgttttgtatctctaagttccgtatacccaagccaccacattcctttggtttgcacaatacactccatcttgctaacctatacttcttcttatgttcatcacattgccagaaaaatctagatctataatagtctagctttttgagaatacccttagggatctcaaagaaggacaacatgaacatcgctaaactacttaacactgaattgataaggaccaaccttcctcctaccaagagaaattttcctttccaactactcagtttcttttgaatcctctcctccacaccctgccaatccttattgttgattctcttgtgatgcattggaatccctaagtatttaaaagggtaatccccggtatcacacccaaataatttgacgtactcatgctccacatcttttgccttgccatagcaaaataactcactcttatggaaattaatctttaagccagataatttctcaaatgcacttagtacaagcttgagatctctggcttcatcaagatcatgatccataaaaagaatagtatcatcagcgtattgtaaaatagaaagaccattatcaactaaatgaggtaccactactttgaatctgccttgatctttcgctctttgtattaaaatggctaacatatctgcaacaagattgaacagaataggtgacaaaggatcaccttgcctcaaacctttccttgtttgaaaataactcccaatctcatcatttactttgactgccacactcccacccctaacaatcgagtcaatccaatcgcaccacttagaagagaaacctttcattcacaatgactgttgtagaaacttccaatcaactttgtcatatgctttctcaaagtcttgctttagaatcacccattcttctttttcttgtgcaattcatgaagtgtttcatgcaaaattaccactccttccataatgttccttcctggcaggaaagctgtctgcgaaggtttaatgaccttctgagccactagggctattcgattggccattatcttcgtaaaaattttaaaactaacattcaacagacaaatgggcctatactgttgaattctactagcgtccttttgtttgggaaggagagtaatgattccaaaatttaatctgtgcagtggcaaagttccttcataaaaatcgtgaaagagggccataagatcatccttgattacatcccagaacacttggtaaaactctgctgggaaaccatcaagtcccggagctttgttgtgttccatttgaaaatttgcttctttaacttccaactccttgaagctttcactcaacaactcattctcaacatccgtgacttgtgtaatatcatctctttgggattccaccatagaaaaattattttccttcggcgctccaaaaagatttttataatacttggatatgtatttctttaattgcacatcacccttaatcacaccctcctcttgctctaattgaaagattctcgtcttcctatgcttgccattggccactaaatgataatatttcatgttacggtctccttctattatgtgcttagtttttgccctttggtaccattttatttcttcttccctcaacaattgggccaatctattttttacaaagagtttcaaatctaactcctgattagacaacagttggacttcagccttcttttctagcttgtctgcttttgctatcaaaagaaccttctccctcttgttcgccccgctaacattcttcgcccaccctctcaaaaactgtcagagcctacgaatcttaaattgccatttttccaacatattagaccctctactttcctttctccaaatgtctgctactagatccacaaagccatctcttagcaaccatccaagctcaaacttgaacaacagttgtttattagcatgtgtcccagcccccgtatccagcaacaaaggagtatggtcagagagttctctattaagagccctgacagttgctaacggatacttttgttcccattcagtactcattagcactctatccaacttctcaaaagttggattgtgcaacgagttggcccatgtaaattttcgaccagagagttctagttctctcaaatccaggctgtctatgacagcgttgaacaaaaaaggccactttacattaaagttattattattcttttcactagccttccttatgatattgaagtctcctcccataagaataggtatagactctttattacaagcattaacaagctctacaaggaaagcctccttatattcttcttgtgttgccccatacactgccagaacgcaccattggaagccatctaccttattttgcacatggaactttacatagaaatctccctcatctatacttgcaacctcaaagaattccaaattaacccccaaaagaatacccccaggtctccccttcggtcttgtccaatgccacataaaatctttaccaccacaaatattttttagactagaatatgaaaaatcatgttttccagtttccaaaagagtaatgaagtctagcttccactccttggaagtctctgaaaggaatctaaatttagccaagtcacctagatctctgctattccaaaaaattcctttcatgacatacttttcttatttttcaagatcactttcaccttttgtcccttgtttcttttgaagaatgacttggacttataaaccttgaaacccttttttaagtcacaacttaggtgatcgggttcttcgtccataacttcgtccactaagccaccacataagtgaccaaggactaagttatccaccatctcatcctcctctgactcaagttctccttctatgtttccaactaaatcagctttaggtgcaacataatttctaagtctagtctcttcaacatttttcaaactaattattgaacctaaaatttcagcactagagctaccaagattaatacctatgttgcataggttatcaataatagaaggacaagacaaagacaaaaatgaaccattaacatcattacctgactttatctatctacatagagaacatccataaggcgattcatggaagtgatttaggagcttatgattctgaaagaaggcgattaagcctgcaatctatagattgcagactgcttatgatggaagcctgtttgcgaagctggtgaaggcgaggagataggagcaaaaccaggcatgattgttgacagctgacgagagcttctgcattgatcctcctaattaagcatctcagattatgtgccactgtgctatgtgaacggctgactgtgtattcttttactccctctctaccaatatacgagacaaagcttttgccctcctttaaaaaaaagagaacaattgagattatgtccttttttttcttttcgagaatacgaggagacgatttgtaccggattttaaagatgagggaggccctatacttggttgtgtgattgatgcttgatgaggttattcaaccagcagatagaaatcagggatgctaaatagacttattcagcaaatatacgcttggatgggttgttatcgtattacaatccgttggaaaaggcccattaccaccgggaaaactacctcggagcccacgcaaaaattacgacagaaatccgacccacactgcgctcctagtcttccactcttcctcgcttcatccgctctgcgcctctacccctctgatacatgtctgggaggtctttacctgtataccattaagggctcgttcggattataggataggaaaaacttaggataggaaatttataggaataggaaaggaatttaagtgtaaaatagaggaatgaaaaacaaaggaatacaaaagttgagagcattcagatcacaggaaattgattgcctaggatttgcatgcagaaagcgaaaaaaaagagctcgaggtggatggattttcctgtacttttcctgtgaaattagcatcaaaggaaactttcctttggatttcctacaaccagttttcatgatccgaatgacaggaaaggaacaaaatcctatatacagtattcctccaaaaatcctgtgaagttcctctaatccgaataagccctaagaaagatggtgcctgcctctgtgccactaaaaagtttgaaccttcctctatgccatcgtcgaactttatcacgccctccacaccattccgtcgctattctgtgtgagtttaaccgtttggcagctctgacatgtgggcccgggcaggaaatgtcgctcttgcccttttagtgtctgcttcgtttcagagagaggccaggcggcgtggcggacaagcagccaagcgcggcattgaggcaagcgaccggtgtggcgggcggcaaccagccgagggacggggtggtgtggcggccaaccgacacgagcagcgaggcagcggatgaggaggtgaagaggcccgtcccggaggagaagtcgaagcccgtcatcgtaagtagggtgctggtgcagacctcgatctacacaaaggaagaggtgaatgccatcctgatccagtgcggccggctcagccggagctcgtcatcgtcggggatgcgcctcgtcgtcgaccgtcgatcccatcgtcgtggcgcaggttggggctgacgctggtaggagggtcgtcgtcggggatgcgccggctcctcgccaccatgggggccgccgaggaggccgcggcgtccgcggccgccgccgccgccgtcctggcgctctttgtcggtggcgcccccgtcggcgggatcgatggtctcatgggcctccacctcagtggccgtctcgtcccgcgcttcaaggaggtaggctagcgcgcgcgctctctctctctcaaccctaagggcaacaaagtcatttggttgcgctgttacccgccgttgggacaaaaacggacggaatggtgtggatggcgcgataaagttcgatgatgacataggagaggctcgaactttttagtagcacggagacaatactatcttttttaatggtatataggtaataaaaacctcccagtctggcagtctcctccgccttgggctcgtgtctccgtgcagcgcgccgcctctccccaccgccgccgcctacacacctccccacaccaatacaccatcatcccgtcgccgccaccatgctccgctagttcgctctggcctaaggctgctcggctcctctcgacatccccgtcgcggcagcctcaactgccctcgccactgtcgaggcggcttcagtccatgccaccgccgtatagacggccttgatctgcaatgttcaaacgaggtctcccgcccccgcctcatctgtgataatggcatcggtgtgatgaccacagaggatggtcgctggtcggcatcggcggcatggctggacagcatcggcggcaagactggaagctgcccacgcccaggatacatggtggcatgctgatctatggctctaagaatgaaattggcagtagctttgatttttggtctgcaattcgatgagatgttcttgattttcgattaccaatgttcttgatttccagatgcttgatattatccacccaaacggtatatacgaggggttcttttactttaccggtaattatgagtaacacaaagttaaacttatatttggattacaagggtataaaggtccctatcctgctagagtgtttgtctgtttgagaagcaaggaaaaacagggctgaaatgaatgatccatatttaccaaggaaatcctcggaagtcatatgcatttgcgtggggacagaaacttagaaaccgttcaccaaacggtggaaaagcagcggcacgtaagaacaacgtggttatggccttttctggcttcctcacacgaacaacctggctcatttgtatttaagccgttgttgttttctcgctgtcacggagcccaatcagtaattgttactctcctcaaacagccagtcaaaatagtaaacctttttccaaccatttaatttcgcgtagccagtcatgcacactatacaaattttacaggtttcctattcagcgagaaaaacccagtcatctgatagacaggttcatcaattgaaacataacaatctgacgagaaatctgtgacagatacagaatgacagcgattctcgccaattgattccattcctaagattaatggatagatgaatggctagattggtgggaggctaccgtaaacatacaagagacacctaagaaggcactccgcactttgatgttgttggtcgcctgggagatatggaacgaaaggaatcgcagaaccttccaacagaatgagctttcagctacctcccttttagccaagaacaagaaagaggccaaaacttgggccttaacaggagcgagaagttttaatagctggctttcttttagttagctcggaccaaaggtcctagctcctttctttttttcttttactttataaagttccccttctctattcaataaaattggcgctcgtccattcgttcaagaaaaaaaattgagcactgtctcgagagtacacggcacgcagcaatgttgtttaagagtgtgggcattatcctcttccaaatcgtggttaaggcctggtgtcaaaaaaaaatcgaggttaaggcagtgtttagttccttcaaactacaaaaaattccgtcaaatcaaatgtttggacatatacatgaagcattaaatgtgaacgaataaaaaactaattgcacagtttgcatgtaaattacgagacgaatcttttaaagcctaattacgtcatgatttgacaatgtaatgctacggtaaatatttactaataatagattaattaggcttaataaattcgtctcgtggtttatagacgaaatctataatttattttgttattagtctacgtttaatacttcaaatatacgtcgatatatatattttggtacacgaagtaaacccggcctaagctggcgagttagggacctgacatatctatcatgttgctcgctatatatagcgcggatatctggacacagaggccacacgccgtcg

SEQ ID NO: 1358 - DNA, 2382 bp, Oryza sativa
  Intron number 2 from transcript LOC_Os01g60120.3 (locus LO C_Os01g60120) derived from phytozome v7.0 (chr-ID Chr1; po s 34776909 to 34779290 reverse strand)
tgcgccgcggtaagatgtccacttaacccgttaaccctctttctttttctggcttagttttcagcacttcaatcgctcagttttagtctgctagtaggggtgaaaacggtaacggtaattaccggccgaccggagttcattttcgactttctaccggccgagccatatggaaatggtaatcgaccgaaacaaaaatagaaatggtaaaaaatatggaaatgaaaacggaaatggttttgctgttataccgatcgtttccgtatttaccgtattcttgcggaaattaccgtttcttataatatggtaattaccgtattctaaatatgtcaatattataggacatgtttatacttgacccacagcttatagattgaatgactcttcaataaaatctctaacttttgtacatggctaaaatgaagttaatttataatttatatagtataagcttgaatttatgtatatatataacatacttatgtaaagttaaatatatgtttttatagtttaatgtttccgtatttgttaccggtttccgatctgtaccgacatgtttccgtccgtattgttccgtttccggttttccgatatttccgatatcgttttcatttccgactttaccgtttccgatttcgtttccgagaaaaatatggttacggaaatggttgaggctgttttccgatcgtttccgaccgttttcatccctatctgctagtttgatgccatgttcatgcttttctcggttttttgtttttgagtaaatttcacaaaactacatattttgtggtccaagttacagaaaaccacacgcactttgacacttggcacttgagtacatatattttggtcgtgtagtttcacaaaactacactatcgatgtatagattcacccgcgagatgatgtggttgtttcacctaggacgaggacatgacattctattatcagccatcgcacgaaattaatatgatgccacgtcctcatactagatgaaacaaccacgtcgtcatatcacaagtgaatccatttatcgatagtgtggttttgtgaaactaaactaccaaaatatatgtacttaagtgccaagtgtcaaaatatgtgtggttttctgcaacttgaaccataaaaaaaatatgtagttttgtgaaatttactctttgttttttttctctatgaaattagttgtgcatgttgctttctgtgttgcatggaggttgtccaaatactactgttaaagtgtcaatatcgttaggaagataagaggttagtagctggtgaaattaatgcgggtggccacagctctggaagtctggatgatggtgcttatacttgtcaattggtgataactgattcatgatgtgtggctgcctggtattgataggccgtaggttcaatgcaagaatgtgacattcaaccgtgctgagctgagcaagacagtgttgattgttgaatagttttcgcttaagcgaaatatctcattttcgtgtaattactgctctcctgttggaatttctctagttagtgcagtcagtataactcgtgtgctctggcaaaggttctctagttattttggagtagtctgcactgtttctcgtcatttgtcgtgttctgttctgtttctctgcactgtacttcatagaaggaaaagaaggaaacattggccgggcacattcagttctgttaggaataaggatttttttttgcacgaaaaggaataagtatttgtttttctcaatgtgcctaataccaatatcatgaaaacttatgctgcaatttatttatgcaaggtagtatgtttccctcaattagacatgcatcctccaatgtgaggttagttggagatacattcacgcattaacaaaagaaatctgctcaagatatatgcatgtatcgatttatttaaccaagttgagcattgtcctttgtgttgttgagatttacagatctcaatgtaagttctatgaagcatataaacgagtacatgccatctgcaaaggggaatatttatccgtatgcagaagttgcggagtttgttccctagatcacatggtagtgctaatttatttttaaaagtacagattgctgaaattagacgtgatatcctcttcatagtatacgccatcctccttcacatcaaaggtgtgtgaaaaatatgctctgttatgggttatgtcttatgtgaataagagtggtacttaggttacatatcatatattcaatagtcaatggtggcaatagctgcctcttattttcgttaactactgtctcctaaactgaaaatgatattctatatcttgctaccaatgttgaagcagatagttttatctcttttagaattcattgtatcttgctaccaacactcatcattttgcccttccaggtat

SEQ ID NO: 1359 - DNA, 3906 bp, Oryza sativa
  Intron number 1 from transcript LOC_Os05g15520.1 (locus LO C_Os05g15520) derived from phytozome v7.0 (chr-ID Chr5; po s 8778257 to 8782162 reverse strand)
cggggtcatcgtcttcaccgcccgcaacgagcaaggtgatgttgcctttttgactttgcgtttctacgagtttatttgatttttgcaatgtttgttatttgttaaattttgcaatgtttgttattttgcggatctaacaagagccgtcaaatatgttttcagtttaataattagtgaattaccatcgctttttagagtcaactggataacatgttgactcatgactactacggagtacttgatatgaccaatcgcctgtagtcgaccaatccagactatgacattacgcaaattgacatttggaatatcacaagtattggtgagtcaccaaatattgatttgtagttgaccaaccttgcagcttcaggactcataggtggctgccattgcgcattttaagagaactctattcataccatagctagggttcgattcgagaaatgcaacaactcctcttcttttatctagtacggaacacgacaagagagagtgctctttccttcgaaaaataccaaactgttcagtcttttgaagaaatgagcaggtggagggtgggaaattttttgtatttcatggatttgggtcgaaaggtgttgtattgatggaaattttcttacgttttattcttaagagtcaacctggcagtaatcaatttagggaaacgggtgtatgaatagatgttagagaaaagtgagaagaaaatgggcatcacactacccttctgaccatgatagcgtaataaatcactcatgtggctatccttattgcagattgtcatttgctgcatcatcatacatgaaccttccgttagtggcataatttggctaatagtaaattcatgcgggcatgccaaattatttggattagctgttacaatgttaagtagtttaattgaaagatgactaaatgtatgtgtgcagtgacatactggtcatgtgtgcaaactactagggagctgtaatatttgacccaggatgggtattgcatcgatgcaactgggtagagagctgtagtatttgacctagcataggtattgtatcgatgcaggctgcatcgattcaatacatatgctaggtgcatactacagctccctagtagtttgcacacatgaccagtggtctctgcacacatacatttagccatctttcaattaaaccaatcaatgtaacagctaatccaaataatttgacctgcccgcatgacctaactattagccaaattattccactaacacattcatttcatatttactactcccactgttccataacataagggattttgggtggatgtgacacatcctagtacaatgaatttggccagaacgtctttccagattcattgtaataggatgtgtcacatccacccaaaatcccttatattatgggacggagggagtactgttcagattgtaagtattggcaacttatattccctctcttgtctcaaacggagatggagggaggcactcatccttagcgtaaggacttccagtgtctggctcctttgggactgcctccacccaccagcagtgggaccctccttgccatgttcctactaacctttcctccagtgttttttctagatttgattttattttcttcaaaatcaaagccactagagagggagatgggcatgcacagtgagcaccagtacctagtactgttgtatagtgagcctgtccctcctctcatctccctcctgttcagctatgaacttttaaaggctgattatcagcttatcacctttctctgtcccagttacttgacttacttcatgtcttcaccagatgacggtggtggtagcaactgcttatttattgtctctttccccaactatttttttagatattatctcttattattgcctccctcatcgagggctttgatggatgcttgagcatactgtctaccaactggccatgttctggctagatatgagtgtcatccacaatgtcaactgatcaaactgaattcacgaagggaaaacactgccagggaaaatagccatgcaatgtcggctgctagagaaagcagtatagcacaaagaattagactgggaggaagagcattggaaagggaaaattgataaattctttcttcattgctctgcaatatcaactctatggcatgctttatagactagttgctagcactcagtaacaactcatatgaatagcaaagataattagccaactgacagataactgaactaactaacaactcaattatactcttctctataaccctaatctcccaattctgtggttgcatacatgggtcttggaggcattgatgttggtaatcgatcagatggttgggtatgccgaggtgttccatgccttggttagatgaatgctggagatttcaatcaaaacattcagcacaaaccagcaagcccagttgcttggtgttggtggtggtgattaccaaggactgacagcatgctttcaacgttggctcaagattcatcttttgtcttgtacttttagagactgctgtccctgttgtaatgtgctctctggtctgtgtgatgtgtgtacttgtgctgctattgttatcctagttccttttagggatctctctccccttgtttagttttaaaaacacttccattgtttctatggtctgattttgaggtttctctctaatttctacttggtcaagtatattgttgaacaacgtgtagtgggcctttggctgttaggcaaactagatctttttggcagtgtgggctgccgatttagtgttttcacattgcctattcctaggacacggtctaaattctctgtgtaggcctgtagggaaccttggtcatataattcttgtggctgcagtgcgcacagcctagattaatcataacttaatataactataaatggttagtatttactttggcagtatcgggtattaattgagtatttgagttagctacctaaaggataccttggctttatagctcattttaattaaaaggtggggatgaaaattcaagttgttctgaaattgatttatttgatataccatttggaactcgttccattcgtatggtgctcaacttttaatctctttcctttagtgttgggggtatgtataatgacctgaccctttcaggctgtatatttggacaaattccttttggcattccactcatgagaagttttccattcttattgttttctgaatttttagtgtctaatttgagacacatggttttttattcatttctcagcataccatagtaggcctttttaaccgttttaagggcaaatgaaaaaaaagttaacctctctttccaagaaagcctatcttttaaggcaaaatggaaaaaaaaagggtaccatctattttccaactccctctctacggtgtggtgtaagaacaaaaatagggttctgaaaaaaaagatattaaaagaaaaggttgactttcaaaatcaattttgtgtgtagcggaaaggagttgctgtttcttctttttcctatggaacatctactgataagaatatgaaattgttaatagcaagtaattattgccttgcatggtctaagtctatggatataccaaaaaaaacgcttatacaatttcatctacttggctgaaatgtggatcaaaattggtgtttttctcacttgcataagcacaagttaaaactaaatgctgaccttaacagatgctggacacttatcccttttttttccaaagtaattggatggcatgtattttggtgctacagaagtacttaaaagaacactaagatgaactacaattgcactgtataggggaagcagatttggagatttttcgtgcttttaaattttagtcactaatctctctttcgagatatgaagttttgaagtgcttgagctcatttttttgtgcttttggttctacttttgcagtggac

SEQ ID NO: 1360 - DNA, 463 bp, Oryza sativa
  Intron number 8 from transcript LOC_Os03g01590.1 (locus LO C_Os03g01590) derived from phytozome v7.0 (chr-ID Chr3; po s 370306 to 370768 reverse strand)
aaccaattacctgaaacaaaagtgtaattttctgctcttggctccttacatagttcagtcattagctatgtatttatcactactatagtatggagaattgaactgaaagacctcttgatggaatcaaattcaaatcggttttaaatccttgagatcctatttaaaatcaagtgttagaagcaattcaaaagaatgattaatattccattggtttcgttacgaagctggttaaatactgccagtttaaatctactagatagtaattattctaaattttgtataatggaacattatctcattttattggaaggaattgtgtcggtgcattccttcgagttgtgttactagcaagacttaagctaccaactgttcttcttcggatctttgttggattttctattctgacgaggattgtttgttaatgtcaggctttctgcacatttggtttatcctgcaaaggtga

SEQ ID NO: 1361 - DNA, 1655 bp, Oryza sativa
  Intron number 4 from transcript LOC_Os08g23160.1 (locus LO C_Os08g23160) derived from phytozome v7.0 (chr-ID Chr8; po s 13966554 to 13968208)
agagaggtaactatacgcttttaacaattattcattcccaaattgtgcttatctaattactttatttttcaagtattgagatgattaacaaacaactcaaagaattcactgtgaattaactgaacattgggtttttgaccaccttgaattgctttagcatgatcactggtttccaacagttggaaatggaaaatgaaaaaagatttgacctggaatttagaagctacttatctagttcccagtttaaaacaatacatttatttagtattttttactgctttgacttgttttcacatccaatcgatctgttttatcgagcatgttcattaagtgcatatcaagagtgtgaattggcgaacaaaagcttacgttcgcctttagttttaacttttgtccccaagtaccacttgatgagttgtaagaccatgtggagatgatctaggtttttgtgatgaataattggcaatgctagatattcagtccagcatgaggttgcacttcttgtgtgtgctaaaagaaatactttttttgtctctaaatactgcagcaattgccaggcttgggctaggtgcctgtctgcaatccatgcatatgactgcacactggagcagttggaccttgattctgctcaatcaaagtttggctgtgtttagttcttgaaattggggagaagtttagagaaagttggtagtttggaaaaaaaagttggaagtttatgtgtgtacgtaggaaagttttggatgtgatgtgatggaaagttaggagttggggggaagcttgggtggaactaaacacggcctttgatgacattctgaattcttcttccctggatgatgcatgtgacaagattaaaagcttagccaagactaaagaactcgattcatccttaattcttctaataaacagagcgtgggctgctgcaaaagactctacaactatgaagaatgaggttggtctttgtgaaatttaaacaaagctctatatttattctatgttttgatcatgatttcttgtttccccacctgagttttggggatacttaggcaactcgacctaccttaaacaatatggatcgtttcgctgaatatatgtatacttcaatctccaacagtttatataagttggtaggaaaaaagtgttccaattctacatagatatgaaatgaaaaatgttctattctgttctgcatttttttcttttccatgctaataatcatcctgcgaattcaatctttactatcactagcccatctctggactagttcatctgacagctccattcatttcagatgacatggcccaatgatgttgcgtgaaaccttaatgctttcattgctttatatattgtgcatcatagatgaagtagctggaatatttatattcccttcttccaccaaataatttataaagtactacatattaccaccaggttcaacttgtcaggcaggttgaagtgcgtcatagaggtgtattttgcccaaatcaaacgacttcttgaagtgtgcatagcaagtcacaaaaacacacgggcaaacggggcactagcttggtatcatacaccatattttttgcattctactacccctagttctcaaagtattttttatctcctattccatctctaacctgccaaagactacacaagctctgtcaatt

SEQ ID NO: 1362 - DNA, 9344 bp, Oryza sativa
  Intron number 5 from transcript LOC_Os01g58240.1 (locus LO C_Os01g58240) derived from phytozome v7.0 (chr-ID Chr1; po s 33659749 to 33669092)
ggccggtgccggcacggtggaagggcgtgtgtcaggtcggagaaggatggggcagcaacaactgcagccgcaagatcatcggcgcgcggttctaccacgccggggtggacgaggacgacctcaagatcgactacctctcgccccgtgacgtgaacggccacggcacgcacacggcgtccaccgcggcgggctccgtcgtggaggcggtcagcttccacgggctggccgcgggcaccgcccgcggcggcgcgccccgggcgcgcatcgcggtgtacaagtccgtctggggcaggggcggcgccgggtcagggaactccgccaccgtgcttgccgccatcgatgacgcgatccacgacggcgtggacgtgctgtcgctgtccctgggtaccctggagaactcgttcggcgcgctgcacgccgtccagaaggggatcaccgttgtgtacgcagccacgaactttgggcctgcgccgcaggtagtcaggaacactgctccctgggtcatcaccgtcgcggcaagcaagattgaccggtcgttcccgaccgtgatcactctgggggacaagcgccagattgtggtacgacgcacaaacgtgatccattaatcaccacacgatgtgtgctcattggtcaacggcttatcttgtccaaaaatctggctattttgcagggacagtccatgtactactacgaagggaataactcatcaggcagcagcttcagacttctagcatatggaggcctgtaagaccaaaaaaaaaaaaaaagccttcgccaatgtttttgtgcttaatttctatcaataaatcagggaatatgaagctaatgggttgttaccgttttcttgtggatagatgcaccaaggatgatctgaacggcacggatgtgaaggggagaattgtgctgtgcatctccatcgagatatcaccacttacactttttccactagcattgaaaaccgtcctgggtgccggggcttctggcctaatctttgctcagtacacgactgatctcctgggcatcacaacggcctgcaacggcactgcctgtgttctcgtggaccttgaaagtgcaaatctgatcggctcgtacatcagcgaagcaaggtagaacaaactgcaaagatacacaatgattacaatcttatgtaatgagttctaacacttcctagaacaaaatttatgatcgtgtttaagcagctcaccaatggcaaagatcgaaccggcacgcactatcacaggagaaggagtattggcgccaaaagtagcagcattctcctcgagaggtccatcggttgattaccctgatattatcaaggtacgtaactccaacttaggagaaaaacttagcctccggtagaaagccacggtgtttcctcatcttaccaatggtcttgttgctgttgcgtctatgacagcctgacatagctgcaccaggatccaacattttagcagccatgaaagatcactaccaacttggcacaggaacatcaatggcaacgccacatgtagcaggtgttgtcgcgctgctgaaagccctccatccagactggtccccagcggcaataaaatcggccattgtcaccacgggtaaccatgctagtggaaatttaaagtgtggtctgtaaatgtgattttctgcattttttcttacctctgtttcattttgtatatcgaagcatctgtaactgacgaacgaggcatgccaatactggcagaaggagtgcctcggaagattgctgatccatttgactatggaggtggaaacattaacccaaacagggcagctgatccaggcctcatttatgacatcgatccaagcgattataacaagttttttgggtgcatcatcaagacatctgtcagctgtaatgcaacaacgctacctgggtatcacctgaatctaccatcaatcgctcttcctgatctcaggaatccaaccacagtatctagaacagtgacaaatgtaggcgaggttaatgcagtttaccacgctgaaatccagagcccgcctggagttaaaatggttgttgagccatctgttcttgtctttgatgctgcaaacaaagttcataccttcaaggttagtttttcacctctatggaaattgcaaggggactatacatttggcagccttacttggcacaatgaaaagaagtcggtgagaattccaatagcagtccggattaccattcaagatttctatgcagatgttgcataacctgggtccagggtgaaacatgcaggaaataacacagcgctcatagaaacaatagagtctacaggagataccaatttccacagaactacagaagtattggttttgtgtatttctttattaccagaatacaaaaatgttcaggtctatgtttgccaacttttgaaatatcatgtacctgcccctcccacctaacgcagcatgacaatgactacagatagtttcagttttggtttcacaatgcttacatgcaatacacctattctctttgtcccacaaaaaaccaacctagtaccggatgtgacatgttctagtactacaaatctagacatacatatgtccagattcatcgtactagaatatgttacatctggtcctagattcgttttttatgggacggagggagtacacgatagagatgtgacaacaagaagatgctccaacacattttgcaagcttatttgcaatcaaaagtcaaagtcccatagatgattttacttgatggaaattccagctgtttgaccagtaagctgtaaaaagaagggaagatgacacaaatcgtgtattatttaaagttttatagcttgacttcacctatcagatatgtattaacgtttcagttttttatcacatcaacaagttgcaactgcaagagtgtatcatcaaagcacacgactatttctaggaccaaaaactacaacacagtcttcttcctatcccattcatgttaaatgttaagatattgtatccaaagcattagcaatttagtcatcttacaaaagtcaatgccatcatatctaagaaaattcaacttgactagtataacgtagccaagatggcctcatagtatgatgtactttgataagggaaagaaaaggtctatgcgcaaaaggaacataacagaagaagataatggaactactaatccccaaatggttacacctttacactgatgaaacatatgacctgtgaacgaaggatagtattgcctgttaaaactgagatgattaaaaaaaatactggagatgggctatttgcgcattgtaatacagtgatctgagttattgtctctgtagcttggaactgaaatgaaaaaaaaataaaataagtcgtacatatttaacctgatatttactacatttttgggtactgttttatctcaaacaataacattttaaaaggaacccgataggggcctggtggaacgtaagcctaaaacacatcaaaattccagcagtaatacacaggatatggacaggcaaatagaatttatgatttcagcaaaaaatgcaagttatcccacaggaactgtttttttttccatttgcatgctatgcttctgtcatttctcaagctgccgaagagaaacttgcctctataatttgtactgtacaatagcctttcactcttcctataaacaatggcctttcactcttcctaaccagcttatcagcttgtcacgcaaacctgcattattatccaattaaagtgtgcgaaaagtcactgaaggattgctcggttaatccaataataaagaaggggttgaaggggagtgagggggattaattccgcatctcaacaggtgtgaaattaatcccctccaaatcccttcaatcctatagagattaacctgacaagcccttaatctatgtgagaatactcgaggcagtccataatccagcagtactcaccaggacccaaaatcggcatcaatccaccgctccctcgctccctgccttcaacgcctaaggagagccatatgagcaccatgcagtgaagatcaaaactgctgtccagattacggttcagaacttctacggcgatgtagcctagcaccgcgaaaattgcaaaatcaagggagacaattccaagagagagaaacgatctgaacaccgtaagagagaagtaatagttgtttggtgtttgcgatgctgttacctttcatcactcgtcgtcaatcgggacggccgtggagggagacgagaccggcaaggagggatgaacttgcgggttgtccctccggcgggcgacgccttggtggcggcgctgggccagctggctcggacgctgggaacttggggtggcatttgccggcggccgcccgccgatgaagaccggaggcgacgaggaaggctgtggccggagtgggctcgccggatggcctaagctgatcgcgatggacacgggctggcctctttatggcgcgccaaatgggccagttttgtgcgtagacatgaaatctgggtgaattgaggcttccgttccgtggccaatcctgggcctctacttcgtggatttgcttgccgttaggcctatgaataattgcgctgtgttaattggaaaaagtacacggaaggtctctcaacttgtcatcgggataaaaaacatcctcgaaccgcaaaaccagatacgcgagtttccttaactatataaaaccgttcacccgaggtccttaggtggttttgaccccggttttatcctatgtggctgtggctgttgagtcagcgtgggacccacgtgggtcccacatgtcgggaagccacatcatcaccttccctctttctcctcttctctctttctgggcggcttctcgcgaacggttttgtatagttaacttaagggacctcgcgtatcaggttttgcggttcgaggacgtttttgtatcctgataacaagttaagggaccttcggtgtactttttccatgttaattagcccacaatcctgatgagcctgaggcgagcgaggaccatgtcaagcattcaacaacttgtaaaatttgtaataaccagatagctttctgaaggatcagtttcatctgaaaactcactgaggctacctgttccactagctggatcgaatcaatttttaagaatgacctgacattaacatctgcaaagaaaagtacaacaaaagagagggtgcagttgagttgacggccggtgaactttcaaaatatgcgttttcacccatccgcgtcgtgctgtcacattggatgagttaatttacatggattatgaggttccatgctccgattagtcaaacgcggctgcagcctggtaatgtaagtcgtggcatgaatcatgatctgtttcatattgtcacgtccaggaattggacagctgaaccgtcttctaaattgtgttcacggaaatgcatttcgtcgttttttttataacagataaattgtttcctcttggacacttgaaaaagttatctctaattttcttctcaaatctcttcctctcacctactccgtccatatcaaaatataaacatttttgaacttcgacacgatcattgagatactaatttgactaaaaatatttaaaaaataagatattttttttaaaaacagttgcatagtatgatagttttttaataataaatcaaacaacattattcttacgtgattgatagtttttattttttagttgttaatagttaaagttaaaaagtttgatttagcgttattctagaagtgtttatattttaagatgaatggagtatgtatttaatgtatttactttggacaatatgaaaagatagctcttgtatgaaacctaacacttcctatttttcttattctctcattcacataagcttatatagttggttataacctactattaaacttgctttaagaagaggaaatgacatatgtgtcggtgcagacatctagatccaatgggcatgccaaacggctactggcatgatagccatagcgagcaacctcctcttgcaatcggtcatccccattaccaagagcaagtggcactaacattagttgttgagtatcatttggtggacgcgacattccttatgcttgaggcctcctaccgtgtgtgttgccaatctggctatgtatacgtggcagccaaaaatccacgatgtggtcctcatcctcgatagtgcggatggagccaatatctatgagcttattagcgtgtactcaaagcaagttttataataaagataatactcacctctaattttgtcaacattatctactcattaatttagaactaacatatataatagattgcctcaatttacactaaccctagtacactcactaccaatccactactctctttctcttatttcttgaaatttgtctagagattgctccttacatgagaagtggctcgtcctctctcctatcttctattctctgcgccacatcatcgtatgagtctacacggtatctttggctagtgataagagacttatagtactggctcttagcgagcacgatgtgaaacctagtagtcatgtggagatggtggtgtcggctagacattgacgcatccaccatgtgttcctctttaaccaaagccatgaggagctatgtgtcccctcttcaaccaaagccataaggagttggggcaatgactgcatagggaagctcaaaagcaagagagccaacccgctacaacacgcaaccaccttcgcggggggtatactgctgatggagttgctaccaccgcttctatcgccacgtgtctagggtttgggttttgatacgaagggcgtgaggtggtctagtcgaatgaggaacgggtttggtttaagggcattatggtcattttatgaatttctctctccaaaatagtttaaataataataataaaatagtgggtgctctgtctacgggaaaaataaacatgtttttcaggtatccacaagctaagccacattttgcctttttcaaaaggaatatgcattgtagccttgaagcttgaaggtgcaaaatgattagaagaccaagagagtagactcggtcatcagaaatactgcaagttggaaattctcagcaccatacggtgtttgcaaggccttgcaagttattataagatgtgaaaggaagattatagggagattgagttagaaaatttaaaagaaaagaggcgcttgagaaaaaaaaaaactttgttgacccgaagaatatgacaccttcaattcgggcatctataagttggccttttcgcttcacagtcactcactacctaaagaaaataaaaatggaagtccattcttgtcagcaccgtttggtttcattgctgctactttgtttttggatgctgttcatcagagcgcatggatcacgcaaggttagcaacttagcatgccttcttcaagaattgtttctcactcgagataatttaactcactcagaaatgtctcaatgccctctgttatagctgtacatagcgtatctcggtgacagaaagcatgcacgcccagacgacgttgttgcttctcaccatgatacgctctcgagtgttcttggaaggtgacctagctccgtcagttactcaatttaattacttcatattttgcaccctttcacctttctggttttgcacaaacggttccttggcgaaccatatgtactttcaaattcaagtgcataacaaaccgtttcttgaattcttgccaaccaaatgttgaactttcagtaaagacgaatccttatcttccatcatctataactacaagcatgggttctcaggctttgctgccatgctgacagctgagcaggcagaacagcttgcaggtcagttaatcctacctagaattaggttcacatcctctaccataatgatactaccattatagacactgatgtgtggaataataggagggtagaacccacatgttagtgattgtaatggtagtgccattatggtagaggatcaggataatcttggtctgcacaccaatcatagatacttcacacaaattctgattctgatgtgcggtttgcttgatgtacattgtatctccagagttaccagaagtcatcagcgttcagcgaagcaggaggtacaggacggcgaccacacggagctgggacttcctggggctggattaccaaaagcccagtgaattactcagaaggagcaaccacggacaagagataatcatcgggattattgacaccggttagtctagggggcatgttttaatttttttttgcgaggtttaaacgtttatggtggcgccatttctggtgcaatctagtaaataaactaggtgaaaccccgcgcattgttgcgggaatttagtatgataacaataaaaaataatgtgtaagatagttagataatatcagattaagtaaattaatatggtttatgataatttaaatttaaatagtatgtagaatgatgattcaaacgtaaaaagtaagctggtatgactttatggaaaaagaaaagtagggagatagtttggaccgtagattaatcatttaaaggttgtgatatgacttaattcgaggaaaaaaggagaaagataatttgaaccatagattaatcattgagtaaatttcacaaaactacagatactatggctaaattatcacaaaactacagttttaactcagtatatcacaaaactacacatttaagatgaagtgtcacaaaactacatgtttggtaactaaattatcataaaactataggtttaaaaccaatttaatcacaaagtaataatgcttatagctccaccataacaatagtgctagggatttaaactacaaaagttgtagttttgtgataagttcaatattaaatatgcatttttgtgatacttaacctaaaatctgtagttttgtgataaatttggtgctaaatgtgtagttttgtgatacaactccttaaatctgtagttttgtgataatttagtcaaaatacctgtagttttgtgaaatttactcttaatcatttaaacaattactaagtgaggataaactatataagtatataggatgtcataaaagataataaagatatacattgaaacattatgtgaattatattggatgataatttaacatgtttgtatttgaaaaactcttaaattataaaaactataaagatatagtatatttgcatgatgtttaaatgtaatgattgttgttggatgatgatgtgacatcttgttagtagatgatgatatggcatctttgcatgtcaagtttaagaagttagtgggggataactttatagtaagataggatgcacttgccacagggatatggccggagtcaagaagtttcagcgacgaaggatacgggccggtgccggcacggtggaagggcgtgtgccaggtcggagaagg

SEQ ID NO: 1363 - DNA, 3382 bp, Oryza sativa
  Intron number 1 from transcript LOC_Os10g02380.1 (locus LO C_Os10g02380) derived from phytozome v7.0 (chr-ID Chr10; p os 866121 to 869502)
agatcgccggagccaagggcaagacgcttgctcaggttggttgatatacttattttctaaattttgtaggagaaaaattcataccatatatactactccctccaattccattattcttaaaatttttaacaaggaaaaaagtccaaatacccctctaaactttggatgcaaatccacctagcaccctaaactttaaaaccgaacatctaaccccctaaactttgcaataccatctatattactccctaagatagttttggagagtggttttgcatattttggatgtttaaaagaacaactctaaataactaatataacatatttacatatcatcagttgtaagccatcaatttatccttatactgtgataccatactattattatgtttttacttgtttgtaagtgaaagctagtaaccggtaaaaagaaaactttaagtgaatatttcaatatatatgtctaatgtttatatctcgtgatcaaactcaaccaacttatatacaaattacataaaaaatcactatgataaaataaataaataattttttatttttattataggattttgtaagacaaatctaaatatgttgttgtagtgcttttaaaataaatatttaaaaattatcgatagttaaaattataaaagtttgacccaaccatgtttaaaacgtcaaaaattatggaatcaaaggatgtatatcaaaagtgatcaaaacacgaaagtttagaaattaaatgaatataaaatatttaattaaaccaaacaaaaaatcaggtcaaataaagtttcactatataattactctgtcgtgcagatttgtttgaggtggttgtacgagcaaggtgatgttttattggtgaagacatataatgagaagagaatgaaggaaaatctggacattttcaactgggagctcacagatgaagagagggagaggatcagtcagctgccccaactgaggggcctgcctggattggaattcatctctgaccatgggccttacaaatcagttgaagatttgtgggatggtgacgtctagcaagctacttagatacagtggagtatatatctaaataatcatgatggatcatgatgtggatctatcttaattatgtgcggcaggcatgggcacggcaccattcccgtacacgttctgcgatcaattaatgtatggaccatacatgtatattaattgctgtatacctatccacttatttaaaacacgtcgacacgttcacgaaaaatggttactcccctggtatacatatataggtccatagatgatgcattgcaaatttaattagctacctagaaatttatttaggatgctaaatttaagatggtagatttagtttaaatgtatacgactcttgatctatttttgttggatttcactccacccgtggttgggaactattaattaattccctgggtctataatgattttggatgcattcccgacgagctaatttcatttcactatttttgttgtgattttagatacatgtttaaaattttgggtttatttttaaaccacctatctcctttacttgcagttatttatcattcaattagtgaagcataaactcattcgatattctgatattaatcaaaattaatattatttaatttcctttagaaagaaaacatttctcatttaggaaaattcttgtttttttctatttctacctactcaaggtattcattatttcggtacaactgttggagcagaataacaattgattcgtatacagggagcttgcgcgttcgaaaaaacaaatagccatgactgttagaaccatccacatcttaggtatgagtggagtccccagaccccatctcactagccgatggcgaggatcgcatatcgtggacgaacagcatcctgatcgttgccatcccggttggtgcgattgtcgaaatttctaggttgtcagagggaaatcgaatcattatttatatatttcttgataagatactaaaagatttatatatatttcttgataagacaataacagatctcgtcttggtcacagccttgtgtacaaatcactttgcacgtgacatagctttgggcattacatgtacagtttgtaattaatcattttgcaagatttgcatgactagtaaactaataataatagtacaatgtaaatcagaaaaactgaattattgttgataattcaacgtgatcaactactcagctacgaaaaatcaagccgatcgaatttctctttcattatttctccttcattatcgtcccatgtgttgtctgcattgcggcatgcgttgaacagaatccattttttctttatatatagccacacacgtccttgtctagtccactacactacactgcaatacggcaatggcaatggcgaccatcccggaggtgcctgcgagcgcgctgctcccgaccatgccgcgcatcggcatgggcacggcggcgttccccttcacctcctccgaggaaaccacggcggcgctgctccgcgccatcgagctcggctaccgccacttcgacacggcgaggctgtacgcgacggagggctgcgtcagcgaggccgtcgcggaggccgtccggcgcggcctcgtcgcctcccgcgccgacgtgttcgtcacctccaagctctggtgcagcgacctgcacgccggccgcgtcgtgccggcggcgagggagacgctccgcaacctcggaatggactacgtcgacctgctcctcgtccactggccggcgaccgtggcgccgggcagctacgacttcccgttccccaaggaggagatggcgccggcgttcgacatggagggcgtgtggcgcggcatggaggagtgccaccggctgggcctcgcgcgcgccatcggcgtcagtaacttctccgccaagaagctggagcagctgctgtcgttcgccgtggttcggccggcggcgaaccaggtggagatgaacccgatgtggcagcagaggacgctgcgggaggtgtgccggcgagagggggtgcagctgtgcgggtactcgccgctgggggcgaagggcacgccgtggggcagcgccgcggtgatggactccggcgtcctgcacgacatcgcccaaaccaagggcaagacgcttgctcaggttggttccacttgaaacattcacttttttcttctcacgtatgaaacactatttcaaaacgtcaaacacatatatgttttattagaatattatattatgaaattttgttaagaggatttaatattaacggtgcaatcagatcttcaatcagataaataatttagaaaacagttgttcacagaatttaaggtaagagattaaatgggcataccatgttaattgagacttcaatatttaatttgcggtgcagatttgtttgaggtgg

SEQ ID NO: 1364 - DNA, 7514 bp, Oryza sativa
  Intron number 1 from transcript LOC_Os12g38051.1 (locus LO C_Os12g38051) derived from phytozome v7.0 (chr-ID Chr12; p os 23350264 to 23357777 reverse strand)
aactgcggttcttgcggctgcggcggtggctgtgggtatgtatgctcttcaggcttcagttactgattctgaatctgaaaatatgttgcctatatacatggtcattcaagctaaactgacacaaactttcagagatagcacccatttattttgagtgattttggtatgtttcgcatgttgaaaatcatactattgctgctcctatgtttctgcttccccatttatctgaagttatattcagatgaagccatccataagaggacaagagatttttcatttctggttactgaatttcattgtttctactatgtttttcttggttcagaaagatgtaccctgacctggctgagaagatcaacaccaccatcactactgcaaccactgtcctcggtgttgcacctgagaaggggtatgaatgatatcgaagaatctttgcccagaaaagctaaccagaagaaaatcctgattgagcttcatgcctgaaactcttatttgctgaatttggcttgtttctttgcaggcattttgaggtgatggttggcaaggcaggtgagtctggtgaggctgcccatggctgcagctgtggctccagctgcaagtgcaacccctgcaactgctaaggccaagatgatctatgactgaattgccaatgcaccagcctgtctacatgatgaataaataaagagtccatccagtgtgatggctcatgcctgtgtgtgtgtgtgtttgtctcaaccatgtgcgaatcaggtgtcaaaagtccgtggctggaaatcaatgtggtttctggctttatgtaaatgttgtttgtgaaatataaatattggtttgtctatgaattttactcttactctgtgaaatataaatattggtttgtctatgaattttactcttctgattgtttttcatggaactttaatcagaatggacggttctctgtaaggtcaatgtatctagctttgatttataatggttatattgaaagaaataagataatttagaagcttaagatgtcacttaagattaaggtttttaggtggtacctgcttaaaggggtagtgttgactaaggataatttagcaagacggaattggaatgttagcttaagatgttgtttctgtatgaagaattagtcaatacaacatctttttatggattgtcatcatgcaaagtttttatggagactgtacaattctcttttggtctatacccccctattaacatatctcatattttttatgggtggctgttgggggtggataagaaaaagagtaaattaatattggtgagagcttctgcaatttgttgggctctatggttgtgtaggaatgatatggtttttaacaaatcaccatatgttacatatatgcaggaaattttcagggcaacctattagctccggttttgggcacaactacaaaggtgtgatgaagacggtgagcttttaaaagctgcatgttgtaagcttgagacgacggttatgcagctttttgccaattatggatgaaaatttacaaatagacttcaataatgtgttcttctgatcttgttttggttaaatttacctttgtgtggtcattttttctatcatttctgaactacactcgttttagagtgctaaattgtaataatgggatgtagctctctttgagcaaaggccgggatgactattccattatcaaaaaaaactctcaccattctacgatattaatttttctttttttttggtttgcaataattcattgagttatacacaaccttgtggaattccatcccaaatgggcctcaaactctgatactgggcttaatttcgaagcccatagggccctccaattaaaacaagcccattaaattacatcaaaaaggaaaggaaaaagtacacccaagggccctcaacttgtcatcgagatacaaaatcgtcctcaaaccgtaaaaccagatatttcatatcccttaactaattaaaactggtcataaaaggtcccggttttgatccggttttagcctatgtggcggatgagtcagcatgagatccatgtggaccccacatgtcagcgtgtccacgtctctctctctctttcccttcttctctcccttcctcatctctctctctctcgattactcttctctccgaggctctctcggcaggggagcaaggcggcagcggcgacggctggcggagcggagcggcggcctcaccgtgcccatcaatctcgacttctgcggtggccctgcacacgtcatggacatggagttagctgtaatcttggaaggctttagacgagtaagagtaacaatgccgctgcgacacttgcctgccttggcggcggcgacgacctcgtgccgcctctccggtcaagcagcggccggctcgacgccgacgccgacgcgtccgtcgctgtcgtcgtcgtgctggacccgccgctgacgctgtcatctccacacagcgagttgccatcgctgccggagtcggagctcctgtccctgcacgcgttgctcttgtccctctccataacgagcccaacgcgacgcagataggtgtgtgcaattctcgaacggcacgtcggcgacaccgttcccctcccactccgggaacctcctcagtagctgcgcctccatgtcgaggtagtccactgccggtccagccgcgtcgccgcgacggcccgggtgaggcgggagggcggcgtcgcgatggccgccggcggaggcggcgtgcgagcgcgacgtacccgccgccgtgcaccgcgcgtactaccccacccagtacagactcgagttgtagctcggtcgctgcccgtacctcctcccccgccgcgcgctcctcatccccacgccaccgctgccatcgccgtccttttcccgctccgccctcgccgccgccgccgccttctttgccacctttgtggcgccgtctaccattgccgcatccccaccagcaccttcttccaccgctaccaccgccaccgccatcgcctcccccacctcctccgccgccaatgctcccgccaccgctgttgtcagtgccccagccccacccccatccagagctccaagaactccccccgctgcttccccctccaccaccaccaccgtcaccatccttccggccggccacagtcaccacaccggccacaccgcgctcgtacgccgcctccgccggcggccgtcgtggcgccgccctcccgcctcatcccggccagcttgcccagaagtgtgagagagagagatgaggaagggagagaagaggggaaagagagagggtgacgtggacacctgacacgtggggcccacatgggtccacgctgactcatctgccacgtagactaaaaccggggtcaaaaccaccgaaggacctcgggtgaccggttttatatagttaaggaaccctgcatatctggttttgcggttcaaggacgattttatatcccgatgacaagttgagggaccttcagtgcactttttccaaaagaaaaaggaataagtccactttgattcccttaaaagaaacccgaatatattctgtgaccctcaaccgtaaaaccggataggatgactccccgaactgttcaaactagtgcaatttgactccctcagcgggtttggacgacagttttgctgacacggcgatgtaaaaactacatgtgggtcccaaatatattttgtgtatgaatgacagatgggtcccacagaattttttcaattctaatgccacataagcaccacgtgggatgaagaccaggtcaacaccgcaacgtcagcgctacatatgcaaaaccgccctccaaaactgctgtaggagtcaaattgaactggtttcaatagttcggggagtcgtcctatatggtttctagttgaggggtacgaattagatttggcctacttttaagggactcaaagtggacttttcccaaaagaaaataaaaggaatttctttcccaaggtttttgtcatggttatggatagcacatacctaatagtagttgactaaatctcggtaggacccaccacatactatgtcttatacggaaactgacctcgagggagttccggataaggaaagacaaccagagttctacatggaaacgacaaggactactcggattgtatccatattggtttccctagttctacttggacaaggggacacctatgggtataaatacaagcccccctaggaggacagggggacaaccatgatgagacgatcaacacgatcaacacccaccatgacgagacaatcaacacaatacacgggacaacatacaagccaacatacgccaaaacaagctgccggatatcgacatcagagatacgcctggatcgaccctatccggtaccttcagaggccggccgtagggatctagcactgtctctgattccgtcgggcgtgagctcgaggaggaaggctaccctgttgtcgactacgagtcagaccttcagaccgccatgtcgacaacagttagataggctaccccacatattgtactggtgtgattatggtgaataaaaagcaacatcggctccggccaacaggatgtagggctattacctgaccgctcagggacccgaacctgtataaaaatccatgtctccatctcttttacctcagtctcgcatatatcctagcaccgacgatccccatactgtccaaataccgtagtcgagacatcaaacgtcgacagttttagatctcgactcctctcctctcctctcctctgctccccgaaccccaaaaccctagccttcctcctcctcccccggcggtggcagcgatggacaagaacatgcttggcgacctcgacggcctcctggaggaggacaagatgcgcatggtgatggcagccatggtcgaccagctccagatccatgataggtccacctcgccccacacgccccgtctctccctccttgctaattgatttttcacactagcatcaggaaacctaccagagggaccaaaattccgaaatatcagaaatttcaaatgaataacattgaaaattactaaatttgaagggtggcaagcttggcaaagataaccctctcccgctttcgtcttggtagcgctgtggtagccagggttgtcgtagttggcagggagagagagctggcgcgaatgtcctgctcgatcttgggctagagtcaacgatgtcgacgcttgtgggtgtcgttttccttcttgaaggcatcattactttgctctccccgtttcttcgggtgaaaaccttgttccgattttcagaggacgttgtttgcgtttcaatgctatcttcctccttggagactttgtcttgaagacactgccttacgttgtctgtggtctgttcataagaagtcggagctgttcttttgagctaggcaacgatgacctgtgttttaacctccaattgtatcgttgcaagtttttagtttgttcttcgtgtggatttagcctggttttccacaacaaaccgtgcttatgtgagggttttggatccggtttcccctcaaaaactgggccaaatctcaaaataggcactccctatccttttttgaggttgtcttaaaaaatttttactaaatttgattttgtgtgctaaattaaaaaaaaatccgtccggaagaacctcctacagacacccactggtaataacgaaattttgaaaatttagatccgaaattgtaaaccctgagagcacccgcaatggtaaagtaaggtgctatctataaaacatgtacatctcagcaatagactaaattaatagtaaaccacttcaatggtatgtctacatgggtatctatagctctctaatccattgcctcgtttttctctatagactatctccagattagtagatagctttgctctctcttcatttaatctcttccaagtaggaaaatatgctgacatggatctcttgtagagagtctatagataaccattgcgggtgccctgatacgatgccgtgcgatatcgatcccaacaatacttcaaattcagtgaggtatatgtattcgtgaagaagatgatccgatcgactacttcagtgatgtgtatttagttgtttgattaaaggcaacgtatttcaaatttagttaatacatgaacatgttcagagcaggtttgatttggtcatagaatcatcaaacacaaatgcagtctagctcatgcattaaatttaaattgaattcgtacagcaagttaatagaattcgatgtgtacaagataagtttaagtacgtgtctggtgtagctcgcgccatggatttgaaggagggatgatttggtcagtagcttgagggatttgaattcttggcgtatgataaacttaagttcaaaaaatataagacacatcagttttatatttcaattcgtgtaaaccattgaattcaattcttgcaagaaatctgaatttgcatatttcaattcatactcttagctcattcaaattgacatttgcacgatgatgagtgtgccttttggggtggaactggtataagtttgacttttggggaatttaatctaatccagcgtggttgaagcaagaaatttgaattcaactcgtacaagaaacgtattcaatttcaagctgtgcactaatgcatctatcttaagcaaagagtctgcatcatagtactgatgcatgattgaaacagctaagaactttatcaaattctgtttttcgtgatgaaagtttaaatccagttcatacaaattcagattgtttgctttaaatatgagcaacaattcgtctatcttaagcaaaggttgacatcatggtgtgaaagcaaatttgaacctggccaaaacttggattacatttgcccagaaacttggttcagattaacagtaattaaaataatgcaaccgtggtgcgtaagcaactacataaaaatcgtcaatatttttatatttttcggcacttatcaatactatattcaactaggaatgacacaattgcaccccaaacaaatatgctttttttaaaactccaagaaatgcatatagaaaactgacgtcaatgaatgataatgatttttcaaggccatttcaaccagctacatctttctggcaagataatgctttgacataattccgcagcttcttctcaagggtactactactataaataggagggcatatctgaactgagttcatatcaagctttcaatctctcatttcatccaactacacaagttcctgaagagtttacaagagacccagaagatcaagatgtcgtgcggtggaagttgtaactgcggttcctgcggatgcggcggtggctgcgggtacgttcaatcttcagctactgatcctgaatatgtttgctatgtatttgtcaacataaactgtcacaaggtttgatgattttgatgtactttccatgatagaagaatactatgttagccccaatgtttctgcttacaattgatttgaagttatattcagatgaagccatccataagacaaaaaaaaaagttgtcatttctagttactgaatttagtgttctgtttttttttcttggttcagaaag

SEQ ID NO: 1365 - DNA, 602 bp, Oryza sativa
  Intron number 4 from transcript LOC_Os11g34950.1 (locus LO C_Os11g34950) derived from phytozome v7.0 (chr-ID Chr11; p os 20018376 to 20018977 reverse strand)
gctctgcgcttaatgtatggtaacatcctgttgtcttttgaattaataagggtagttgattacctttttttctttaaatgtttaagatttgagtgtatcgaagacataactgccaaccttttcacagctcatttcagtttttaaactcttcaatagcatgttgtagtgctagtgtacacgaggtagtgctccgctagtgtcctgcataccatggataatggctggctgcttcagtgaattagattttatatttttgatatgaatggactgtaagatattgtggatatattccacgttgaattcttactccgagacctaaaacatacacaacaagcatccataggaaagataacttatttttttgctccaaaattgattcacttatttcgtatatttttgcaaatttgcctgagcatggtgtttctcctatattgctactagtcacagtcacgttaaaagcagtttattactatatatccactagttatttaacacagtttcattctgtattatattctccgtgttgaaaaatcttcttgatagaatttaatcaagttacaatgactacacagctagaagaacttcgtcatcaaatccgcagt

SEQ ID NO: 1366 - DNA, 1902 bp, Oryza sativa
  Intron number 1 from transcript LOC_Os03g06090.1 (locus LO C_Os03g06090) derived from phytozome v7.0 (chr-ID Chr3; po s 3048519 to 3050420 reverse strand)
ctccgtggaagttgctgtggagtctgctccccaaggtgactgccccaattttgggttttcttttttttcatctactggaattgcaatgtttggctcgaaaatgatgcgcgcggtagaattgccatggtaggttctcaactagtgctagtcgtagtacttaattgtggtaattatgccccttgagaaagttcgttcagcttgacaaatgacaaccttctgtttgagatcgaatagcatgacacatgcctcgactgggctttgacaatgccacggctgtgtatgggatgagaagagtagtatgctttgtagcaaatgaaagagatctccaaatgaaatgctgtttttgtgttggctctacctctataaatgattaagctggtgttttctggcgcttccatatacttcatatggaaaaatacaaagccaatgcacaagaaaatctttattttagcagaacagaggggaacatgtgagcactcttaatttgtgctccattatgtacaatcatgtttatgatttaagatactgtatactagatgggtatgaaaaagaaccgatatgcggtctttgtggaattgtgagacctgtatacaggggcgaagctagcatcaaaacaaggggggtgcactaccattgagaatctagaaaatttcagtacaacattgtatattctagtctttttaagtgagaaattaggaatttcgggggttcatgtgcaccccccaaacactatatagcttcgccactgcctgtatatagcaagttacaaaacggaattttgttgtaggtaaacatctgaagtatagtatttcacttgaaactaagtgatgatttggtatgttttggggagagatgattttagtgcttcattatcaaaactaacccagaatgttgtgagaactccaagatacctgtgatcgtagttagggttttgggcaactaacaaggtgtgttgtaagatcgtttaatgtccatgcggtctttagtttttgagtgatacatttggtagttaatattgatgctaaattggtaacatctgattagatctcactcctcacagttcttccgttcccaaagaaactgtatctcatagccttagccaaattgaaaagtagaccttgtttttatcatttttgtagtgagcactgtaccatattggggttccattgcggacacaatttttaatcataaatgtgtcaggctcactatgtgatagttcttgcaactgtgaacaaagtgagagatgatatcatgaattagtgtctttaatttttgcactgttttataacatatttgcatcattttctctcgcaacatcatggctattatgttatttaactcaggtcataaaaatgttcgactgtgtgtcaaccgtcaactgtgaaaatgccatgataatcagttgcattcatcattccctagcccaatgttctcttcatgatttattggaagaatgcgttgctattttaatgttttcttaactgacatgtttttatggtactttagataacttgctatgcagcacatgtttaaaagtgtagtagttgatctagttaggtatggaatgtggcttcggatggattatgagatatgcgtatacgaaatggaccttgtctagtagcatttgtgagtatctgatgctagatgggattgcatttactgatttacatgtgtaatgtttttgagattttactaaagctcttcaaatatagctaaggtgttgtggaggtgactacattatttttcatcagaagcaagggcattatgcttgttttctggtttggttttgtgcatatatgctttggttttttaaaatcgtatttccccatcattattctgatttagtcaacattttgctatatcacaggcttccagagctgctcttttcctattggtggcgct

SEQ ID NO: 1367 - DNA, 7613 bp, Oryza sativa
  Intron number 13 from transcript LOC_Os02g28074.2 (locus L OC_Os02g28074) derived from phytozome v7.0 (chr-ID Chr2; p os 16617237 to 16624849)
gcagttttaccactacgaaggcatgcactttcaccattcttactgctgtactcactaccacaatacccatttttccgggcagttgggttgattatcccgtacggtcacccggcccgcctgtagctcctcatctggaaaaatcattattttcgcgtgcgggcgggccgaccgcacgggataatcgattatcccgtgcggtcgggttatatggaccgcatgggataatcgattatcccgtgcgatgcaataaaaccgaccgcacgggataataggttatcccccacagctagcatgtgctagggcgactgcacgggataattcgtgccgtcgccctagcacatgctagccgtctgggataacctattatcccatgcggtcggtataatttgaccgcacgggagaatagatgcgaaaattgaccgagctcagttacaaacatcaaattaaataaaattacatagaatatatagtgtttgtatattacaagtatcccccgcgacaaataaaccttttagtccactacatgttccctctcccactcccataggttcctgaatgtggggtccgtagcaagttcgctatgaggatcatggaactctcctagatggttactgatgtcgcgacgaatgaaccggcacaagtccgcgcacaagttgataagcgttttctgatcgaaccagcttgcgttataagggatgctcaggagctatggaaagtaaaagaaaattgatttgagttacaatcaacttaaatgaaatatgtgcaataccttaggagcatgaaaacttacatctgtaaactcagttctgtatctcccacagaccctgagcatctcgcacacgtaataaccgcataggttcgtcaagcttggttgcttataacactgcatacatatgtggatacgtcagtagtaagaagtgacaatcgtgatgtatataccgaataaatgctgacataccggccatcatccccttatgtacagtttctctctacttgtattctttacatacccgccgcgtttcttataatggctgtgtgctctacaaagataaaagtaattatttatgataaatcgacttattacaaatgatctttacgtaatgttggggggtttctttcgaacttacaagttaagcaagcataggaactccatgtacgcgtccttgtcatagtctgccggatcaagaactaggacggtttggtccgttggatagacgaggaatagtatatagtgttggctgcgaaaacagattatgaaattacgtaagatatattttcatgtgcggttattaatctatgaacggaaagatgtggaagttgcttacccaaagtgataggggatcatgatgactcatttgtcggagtgtgtgagaaatgaggtggccaagtaatttcccacatcggccatctttctcttatgcagacgttcaatgtactcttttttcttcttgggtgcttattctttagtaacgcactatcctccgatatccgcacagcgtgggccgcgttgcaaaccatcattggatttacgtaagcgattgaggcccccgttctttgagcgtctacccattgtgaccagaggaaatttgaaagttagaataactaacatttttattggcacacattgggtaataacgaactacatagaaagcttacaggcagcacgcgccgatgagattgatatctattttatccatcttaaagaatgcgtggaggtccttgaaactgatggcgaagtttgcgttaggtccatccttgaaagcgtcttccgggacatgcaccgtaatcatcccgagacctaactcacttgccctcaagtaccagtcacttagacataactcacttgccctcattgaccatggtagttcacacatcaagttgtacggcaagaacggcttgccatattcatactcatttggcacttcatcggaggtccaagattgcattttgtcagcaagacctactacgctcttctatgcgtccaaatactgatcaggttcaactggctttagcggactgcctcgacccttgaaagactgcaaaaccatccgcgtctcatactttgccattttctccttgttgtatgtggaaaccataacaggtataagcttgcgggctcataggtacttggctgctcctttgatgtatctggccggggaggtggcagatgctcctcatggggtggagcaagagacgattgccgagcaggggacggctgccgaggttggggagttaggtgcggcatgttgtggaggtggagaaggacctctaagtggtgatatttgtgggagtggagatccgggtggggtaggggagatcggaggggatggcggtgcaggaggtgcagccgtatttggcactgatggagttggggtcgtggacgtgcactgtcccgtgaggatgatgtctcgacgatgccagagtatgaactggttaaccgcatccccgagaagttcaatcccctttggtgttgggatatcaagctccaacgacatctggtcgccattaacacgtgccacctggacccttgcgtagtccgccggaattgggctattatggaactgtctacccggtatcgccaattcggacacaacctcctttgtttttcccgctctccctatcggaacgacaaggctgcatggtgtcggaccagttatactatctaccgggtaggttgtattttctaccgacccgacagagcttgggatctgcgtcgactgcgatccttgaggaaccaggtttgggaaggcttgaggatgttgtgcggcaagacagtagaactgttgggtgacttgttgtgtgacttgatctgtgatttcctggcgcatcttcaccttataggcggcacgcttcttgtaattttttgcttttgtggaaaccctgccttccaattcgtcttgcacgactgtcctctaaccctaccggagtgttatgcagttcccaaagcttcggttagctcgtcatgctgccatcgagggacaaactctccggtctgctccttctggatgatctgttgaagagacgtggtcaagttctggatgtcaagacagtccaacagcatctcaccctcttctgtcacttgctgcgatgcccacacccaatttctagttcatttatttaggggctgcaccatcaaaggtttgctttcagccacaaacttatccttcgtagcttgccatttcttctcatgaccggcgtatccacttgaccctaacctgtgtggatatatgttcttcttcgccaggtccgacatcttctttctcctatctagggcttcagacgttgtcattctggccacgaccctatcccactcgaccatcgaaatggtgccccattcttcaaatggattcttattcttctgaacataatgggtgttcatgtctgacttccactgtcgctagcgatgggaaattttttgcagtgcaaatttcctgccaagtgcctctgaccccggcggataaatgaggtgctcctgcagaccttcccacattaagttcttgacgtatatgctaatgttcttccactcatgcacgttgagaggcccatgaagtcttgccagcgtgtcgcatgcggtgctaaacttcgtcctgacatgttgcggctcgacgggtttgccatcatcgttgagagcaacaatatagtacgtctccttcggcattaggttcctgctcctctcgccactttttttctttggacgtgctccagcactcgtcgtcgtgtcagttggctgtggtttcgaggtcgcggtgtccgactcaagtttagccctgatggcatttcgtttcgaccgacgacgggtagccatctgcacagttcaatttggcagctcttttgggtgaagctcatgccttatgtccagcgattcacccaacgccagatctttctccttcaaccattcaagaaattttcgtttctgttcattacaaatccaaatggccgttcttctagggttgcgggctcttatctcgttcatgtgttcctgaatgtaccgctcgatgatggcgagctattgcaaaacgctgctatgtgcttccgctacatctttgaagtcctcatcatagaaccttttcttgcctacaatccctgtcccagctaactggccctcgtgtaaagggggggttacaccgatgtgttcagcgtccttcatataatcaatgcagcattctaccacctcctcagttgtgtacccctctatcattgatccctccggatgagctcagttatggacataccctttcaggacggacatgtacctctcgtacgcccacatctggtgcaggtataggggaccaatctcaataatctgaggtacgatgtggacaatcatatgctccatcatgttgaagtaagctggagggaaaaacatctcaagctgacaagctgtctcgattgcaaatttttaaaggggtcctaactcttcaggatcaaaaaccttctgtgatacacgattgaaaaagtagcatatcttggttatcactaactgagtgtgaactggcttgaccgctcttatagcaatcggtaggaaggctgttaacatcttgtgacagtcatgagcattgtacccagagatggttaaatctttcagagatacaagttttctgacgttcgctgagaaaccagtcgggaatttcacactatgcaagcatctacataattttttttctcttccggtattagtgagtagcaagccggaggaatatcgatcttcccatttggcagctcttttgggtgaagcaaatgccttatgtccaaattgacgaggtcagtccgggacttcaacccatctttcgtcttactcgggatgtccagtaaagtgccaatggtgctatcaaacacattcttctcaagatgcattacgtcgatggcatgacgaacctccaggtctttccagtaatccagatacctgaaaatattgagtgcttcttaaaaggcaggttactttcctctacaggtgcatcagtattttcttgatccgtccgtttcttcctcttgacgggcttcttctttggcttgtcgaacacaaccttaatgttctttgtcagctcgaagacagagccaccagttcgtgtttccggagctagatcgttctctactgtattgtcgaataatctggccttcgcacgccacctatgcctctgaggtaataaccgacgatgacgcatgtacacacccttggttgacgaggtgaggtacttgtacgacgtcttgtcgatacatatgagacatccaaacttcccttaaactagcccaagagcgaaaagtttgccagtaagtcgttgatcgtaatgaatatgatggcatgcagagtaaaatgttccctacggtactcgtcccacattcgtaacccttcctcccacagttcttgcatgtcctccatcaatggttccagaaacacatctatgttaatcccaggctatcttcgaccttgtataaggatagacaaaagaatatactttcgcttctgacaaatccatgtaggcaagttatacatggttagcagcactggccaggtgctgtgtgtgctgcttaagtcaccgaacgggttcattactgtccatgctcaatgcaaacttacatttctctggtcctttgcaaattccaggtgtagtgcatcaaagttcttccactgtcgagcatcggcggggtgtcggatcttaccgtcatttttcctaccctcctggtgccatctcatcaactcggcatcgccacggttggaatatagccgctttaggcgatctttcacaggcaggtaccacatcaccatcctagaaatgtttttgttcttaaccaccggcgcatcatctttgtcgaccacctctccatcggaggctccgttgcccgtcttgtaccgactcgtcccacatgttgggcaagagtctaagtccgcgaattccttgcggtgcaatatacaatgattttcacatgcatggatcttctaaacacctagagacaatggacatatcaatttcttcgcttcatatctgtcgtcggtaacaggttcggcttaggaagcataactctcaaaagatccatcaaatcattgaagctagtgtccggccatatccatgtctggccttcaatctaagaagttcaagcaccgagcgcagcaccgaatagtccttgtcgcatcctttcgcttcgtcgtacagaagctccttcgctgctttttccaacgcttcccaattgtctaaccctcatcttgtactagttaggacctctggttcaacgtgccgcaacatatcttccagatcaaaatcaataccttcattctctatactagagctaccgcattccgagatgtttccctgtgacatgtcttcgattataaaattttctacaccatcaaagcagaaatcatccgtcactttgttacgaccgccgacttccccttgaaaagtccatatctcgtagcccttcttaaatctttactctacgatgtgcgacaatacttcattcggattttgcagcaaaaattcgttctacaaactttgcatgggcaaaaattgctcctcaaattctccctcacagcatatgcctttgcgagctaaacgaatttggctgcttccttcaagaacgttggatgagctcttttcttgttgtacatccatgtccgatccatgacctacaataaagtttgttagtaatatatccatgcccgattcaaacacgaatgtacttaaattggagggaactaatcacatagtaaattaaagttttacagactatttaaacagccgcacaacaattttaagcattaataaaatattgtccatttctaaaaaatgaaaaaaaaatcgtcctttcatccgaatgaaaataaatttaatagaagcaaacccaacttttcaatttaggtactaaatacttttataaacatctaacggaatcattatgtatttgctaaaaaaataaaaaaaagtgcctacactactccatttataaaagtgcaagtttcttcgtattgcaccgatgaaaactgacaaaaatggaagcaaatgaaggaggagaacaacctctacaccttttatatggaactcaatcaaagatttgaggtcgaaaaccttcccccctaatttgtggaggtttaggagagagaaaatgctggaaatcctcccaacggtcgagttgggggcttatatgccccccgaccatcgcaagcggtcgccttaagtgggccgcacgggataatcgattatcccgtgtggtccgcttaaggcaaccgcacgggataatttccatcgtcggcatcacccaaaacccataatcgattatcccgtgcggtccacagcccgacaccagcattcgcctggttccaggcggagacactgggccaaaaggggccggcgtctaggaaaatcacttatgtagtagtgtactgcatgttgcttgttgggatttttatataatatatatactctccctctgccccataatataagggatttggggaggatgtgacatatcctaatataatgaatctagacaaacagtttgtccagattaattgtcctaagatgtatcatatccacctaaaatcccttatatcatgggacagatggagtaagagttaattaaccattccctctttttttcagttcgtgtgctctcccaga

SEQ ID NO: 1368 - DNA, 1426 bp, Oryza sativa
  Intron number 3 from transcript LOC_Os09g07380.1 (locus LO C_Os09g07380) derived from phytozome v7.0 (chr-ID Chr9; po s 3669702 to 3671127 reverse strand)
tctccgggagtacaggtacacttttttcatttcaattttcagagttcaagatccaagtcgggagctgagtaaccctggtctactttggtttaacaaaaagtgcattatttaatttggatccaaaaattatcattcagaatttcgaaacttgaaattctgtaaaaacttagtattaaatcattgtaagtctctccttgaaaattgaagttgaagcgtcttaaagacaagattacttgtagcttgtagcaattctgttcgatagatcagttggcatgccacttatttagtattcgttgccaagcatataatatccattaatacaataaaagaagatttttgtgcaaatcattataatattgcactggagcaataaattcgttcactatattctagtgttttcatgctcatttttcctgtagcaccatgacatcctgccatgatgatccatgaaatgctccttatgctgcatacctcaaaatggcagccaaaattaggataaggagattgtgccataacttcctgttcctgggattgactagtttggatgggattttgcctagatccagggaaaggaatcttgcgtattactaattaaatttgtaccaattctcttaaggagatctgaactacatgaaagttcattttcttcagctctgcattcctttcccaccataaccaaggtttatccagattttttttaacagggaagctaatcgttagattatgttttaatagtttgctcagtgtacttcttaatttccttattctggaatactacctccgtcccagaatataagaatttttagggttgaacacggttattaagaaagtaggtagaattaaatgggagaaagttgtgattggatgagaagtggaggttggtgaggaagttgaatggtggatggttgtgatttgttgggaaaaaaatattggtagataagttgttattttttgggacggagggagtaaagttagcaaattatttagacgccaatcagcttcagtatagaagcttgaatgtcattctgaagaacttgaataataataatatctcgacccttaggggagagacatcctgaaggcatctcatttgaggtcgagaaaaggccctgaaagctggctaacccatatggggactttttgttgtcttgacccgtgctttaggggaacatgcagagggcctttttttggagccctggttggtagcctcacaactggaggacttaccatgttttcaagaacttgaacaataaagagctatcttatcttgcaagatattaagctagttgcctgctaattttactttctcgagtggcgtaattaatattctctcttcttgctggtatgtgcattcttgagcatatctgcatgcattcctaattgttatgttttgtattacatctgatgaattatcatataatgcaga

SEQ ID NO: 1369 - DNA, 1826 bp, Oryza sativa
  Intron number 1 from transcript LOC_Os11g35050.1 (locus LO C_Os11g35050) derived from phytozome v7.0 (chr-ID Chr11; p os 20069805 to 20071630 reverse strand)
gcaagaactggaggattgtctctgctaaggtaatgctaaaatctatatgtaacctgtgcttgctagttttctttgtttcagtttgcttgctgttgtgagcttgtggctgatgttgatactgtgtgcttcactgctaatgcatggatcaggatgaattatgattggttttgtaatttttggagttaaataaatgaaaagaatcgcatgtgagttacatgccatctaaatattctgtgttagttcatttaaatgggatgattaaaataacttactatgtgttcctttaattacatcaaaccttcagcccactattcttgaaatatgtatcttttgagttttaggacatgaaactctctggcttctaagctatttattgaagaactgttgagtaggtatatgtaggtttgcttgaatattgaaccatcaatttgatcagggtgattattggatttttttcccacttgttgacttgttccatgtttattcactaggagtcctgctaaatacgttttcacattcttgactagatacttttaagaaaaattcatggtacagcccccccccccccacttttttctttttttttttttgaaaaaaaatcaccctctttgaacaatgctcataacctcttgaaaacatgatgccttgttgttttaggcctgacatagtgcagcaagaagtttcaagcaaacttatgtttaacgagtgattgaacagcaagcattttgtcgaatgcttcacccttgtactgaaaaacatgctcaatttttgttgtattgtctccacaactttgttcttcaccattgtaattttcatctgggatagttggggtacgatgggtctgtgtaccatatggctaaggtcagcgcgatgttttgtgggctgttgttaaagtcctggatacttgtgaaatctgctttggtatatcggattaagcaagctgttgttttcatatttcagaattatttttaaattgtacctggtagttgtgcagaattcccacatagtttggagacgttttgtctgaacttaggaaacaatatctcttgtatgcatgcatgattgaattcagacaattgttggtttcacagttggtttgaaatgtttggtccatcgttatcttgtagatatttgtttttgcattaattttctgtattcgtaaactaaaataatttcagctaaaaccggaaaacctattatacagagaaaatcatatagaactgaaaaactctcatctacatatcaagaaaatttcacaataagacaaaactttcaacagagatacaaatgggcaacttttaaaataatagtaaaactttctatcagcaataaaattcttccttttaacaaaaacgaatctgtggatattgccattcaatgatctaaaaaattgtaccagtgggcccatagccaaacaagtaacagaaaaaacataaaaactgggatcatatgctaaacatgggaaaaggggggaaaaaagaaagctgcatttaatggggaaaatgggattgcatgtcacggtggaatgtgaaaagctcatttcgatgtaatggtgagagcagaagaaaggaaacacatataggctagagaactgtttgttggccacgaatgtgcagccatgacatattatgattatgtttacagtacccaaatacatggattagcagtcatacacattgatctgttcattcatgttcatatttttgctattgttcttacatgcattggtttctctatgattgttgtttcaatagcttgtacgtcaacttgcatgatccactcatgatgtttctttacctgtacagagacacttgaggcagcagtct

SEQ ID NO: 1370 - DNA, 2415 bp, Oryza sativa
  Intron number 2 from transcript LOC_Os05g13330.1 (locus LO C_Os05g13330) derived from phytozome v7.0 (chr-ID Chr5; po s 7400309 to 7402723 reverse strand)
ttgatccgcagtacaggtgagttgtgggagcatgcttgtgcttccttgtcttcttcattcgtctcatcgagttaatacaagtattcgtagttatcgttaattgacttaattctactccaagtggggctatgctggataagtaggctcttgatttttcagtactaagtggtttatctcctaggaaaatgcttgcttacttgggctgttattgatggctaaaccctgtagttagtaaatctcaggtattaggacatagtagcaagtgtagcattgtttggccctctaatatttcaagatgtcctattggttgaattgtggtttgttatcctattcctacctatttgtggaaatatctaaaatacagcttttttttccactctcgaaataagtgttgcttaagtcttattattaaaccttttctgaaaaaaaatacttactagtaatcatgcacatcggatcatgttaatgtgatactgtgtaattattcttatctgaaactggaaattgagcatgatggtcaaatatggttgttttgtgtggatatgcctgacgggaaaagcaacgaaacgatacaacctgaaagttcataaatgattgtgggtatacggcagacattgtcgtagtgaattctgtttatattcttcactgtcagctagacaagattggctattgttgtcaactgtatatctagtcgcacaaaaaacgttgaattcttagttaatgccatagtacctaatgtttcacatttctttgttagtgaaatctttatagagtacacttattattgcagcaggagcagtacatccaatggattatctttagctaaccattgtgacattgtcataggctgatagttgcatcacttcatgtttgaagtttctactctcattattcttgattggtgccatgctgtgagaatattctaagttctaaattagttttaaaaaattaccaaaacaaagctatcagttatatatgtattagtggctcatcagtggtatttcctgaagaaccaactttaactttggtcctttcatgaggctgtcatttgcattgccatcctagtcaaactctttgacaagaatggttgttttcaaagagtcccgtattagtgtacaagtgaaatcgaagttccaagctgatatttaatggcatcaatcgaaatttacaatttcactctcttactctggagtatggacatttattcttcggagtgtaaccaatacacactattccagtattcctagctgtaggctgatttaaacttggttattaagtacatcatgtcttcggtggcttagttatgtaaatttgtaaagaaccaaatctaaagaaactgaccaataagatcatcatttgatgtcaaggaattacagaacttttgttgcagtaatgtttcctgaatatctaaatttattaccgctttttttttttggtatcagattcagagtgaaatatggttaaaaggacaattttaattaccattgccttttattgcacagttgcatgatttcatgggttcacagctgtacgtggcagattggcagtgggatgcctggagacagtcagaaaaattgaaatacaaataaccaataataaatcgtttgaaagatacctgctaaacttaccacatatgccagcaaattaaccaaatttcagagaccaaactcaacagtaaatcgattactaatcctagaagcaggtctcttttttgactgataaacaggagggagtaaggttctcaaagtgattaagtgatagtcatgataaatcgatggtttagtagtgcatgagaaccatatagcttaaaattatcatattgaattatcaaattcacacatcatctaactcatctagtaccatggcatgacataggaactccagggacttgctgcttccagtcaaggcgaatgttcctgctggctcatcttgctgacaggactccctgttgtggactctgatactcgacatatataatctgtgaatgtttaacctactaaaataaatacattttttagttttcttatttttcttgcgccccatacattcaatataatttttcgcgcagttcattgcatttcatttatggtagcaccagtgatatcttctgtttgttcctcttttcctttttctcgaagggtttgcaaagtgacattagtaatttttcacaagattttatttcatgaaccaatgagtgtgtccaacatatttttttgggctttatgaactgaaatttttttgttgctttgttgatctgcgaacccttgttcagtttttatcattctgatgttacccttttgtgttgtatgtattatttgaagttacttctatttctatttagaagtttttggtaattttagctctgtttgtgaactttcagaacttgcgtggaggagtgtcatactacagggatta

SEQ ID NO: 1371 - DNA, 797 bp, Oryza sativa
  Intron number 2 from transcript LOC_Os12g39640.1 (locus LO C_Os12g39640) derived from phytozome v7.0 (chr-ID Chr12; p os 24442157 to 24442953)
gcggcagcgtcaagaagcagcagcacaaggtatttttgtttggttaagttttgtagtttttttttttataaaacaaatcaagtttatactagtttgaagggaagatatgggaaaaacatgaatattttgtttggttaagttttgtcaagtttgtcctagtttgaagggagattgttttggaagggaagagaaggagtaatgctactcctactagattttttttgaagaaacttaatttgcaaatttatgcgatactactactactagtctagtgctactaaaaaaaatggagaaaattgtaatattgggactgcaaacacgtgggcttcgctgttttgacactccgagtggatgacaaatgggtccatctgtgtgtatgaaatgtgggtccagtgtcattatagcaaagtttaatgtttgccgtgttataattgcaaatccccaaaaaaaaaaaataggaatctttacaattcaggtgttcaatgaaaaattctctctctttttttggtttctactagaaagaggagaaactttttccccatatcaccatgtagaatagaaatggaaaaatacagaataaaacaaaaaaaaaacaaagattcattttgttcgatttcttgtaatttgtcaattttttctatgttattccaccaagaaaatattaacacatgttgagcatgcatagctttgttgtcaatctcatgcatatttgtctgtattttcgctaacttttttctcaaaagagtatattttttcctaactagttctgtcaatttcaaatcatgatcaggtgtcca

SEQ ID NO: 1372 - DNA, 1854 bp, Oryza sativa
  Intron number 6 from transcript LOC_Os01g64970.1 (locus LO C_Os01g64970) derived from phytozome v7.0 (chr-ID Chr1; po s 37711001 to 37712854)
gaaaggtgagttattttgaccccttgttggtttctgacatgcatttcattttgtttcttttgaatgattatttgttgatggaaaggtgaaaagaacccctagtaggtagtgaaatagagcgtttatttgtttggtgtctgaaacagaactccttatctggacatgttatgtgcaaataatgcaagttgaactaaaaagtgttttttggtcaaactgtgagagtagcgaggcataatattatcggttctccaagcttttttaggtgaataaagtagccaatgcctctattatagtttaacttctccatcaaatccacataatagatgcacctcttccaatgattgtgacattccatatattcagctcctaaatggctaaattcgttagaaatcgggttgaatgatccttcacaaaatgaatgggttccttcatacaatttacatgatcactgagagtatcttaataaatatcctacttgttagttactcattaacttggttaatgttcactagctaatcaaaccatactatttattattgttttttattttttgattattagtggttagtctgcagatctagtactagtatatatgcaaaacctcttttgcaactgttggtggacagccttgtttggtctaattaggtggaattcacagctattctttgatagtgcatttcataattagctacagtcacaaatattggaccagtagaggatctgaaatcgagtgatgcttctgatttggatgagtagtcattgtctgcatgaggtgctcaaacatcttctgtttggtttgttgaggcttaatgtaccacaaaggatgtagaacctttgattcaatagttccacatgttattgcctccttaattggtccacaggaatatatagagaatgtttcactgtgcttcatgataaagccaaaaatgacattttgattcaacacacatgttcaattcagtaagttttcacttgaaatattaccccttgaatatttgggtaacttcaactttttttttatccctgggaagtgggaacccatgtgctaaaacaccagttttcaaggtcaaactcgagatcattttgtacatttgctgagtttttaaaaggtgaaatagaaacattaccctgaaactgacctacaattttttttcttcttctttttattcttctttttttttctttttttttggggtggtgacttctcaattttgaagcaactaagttttcttagttttacttgaacaaggtcaaccaaaatgcatcattttgtataactaaactgtcctttttatattattgtacctgactaactgcttggctgactattgggtttcatgcatgtcatcctacactggatgtgctccacatgttctttagtattatcgcactgacatcgattataaatagtctaaaccacccatcagaacttattggctgctctcaattcattactatactgtatatcattcttactacaatacaaggaacctgtgtatcattctaaacttcaatgcgacagcagaacagaactgcaacaaataaaggtgatctggtcaaacaagcatactcctaagtccactgaacactggtgttggcacctcactaccctgaagcctagcaaccttgtgataaaaccttttaacataaatggcattaagcccaaactgtgctttactgtcacaacatgacctattcatcactgagttctgataaaatcctagtagttctgaaccttttcacttattttctcctgaagcatttcacttcattctactgaatgttagtagaattacgatcagagagtatggtcctactcattggcaacaatgggcttgttgatgtagcttgcag

SEQ ID NO: 1373 - DNA, 2298 bp, Oryza sativa
  Intron number 5 from transcript LOC_Os11g39530.1 (locus LO C_Os11g39530) derived from phytozome v7.0 (chr-ID Chr11; p os 23074496 to 23076793 reverse strand)
agccaccaattgatccattgtcatctggagaccaggtatgatcagagtcattgcaggccagatctattttcgccaagattcgtaactttacttgcttaaggtgtgttgtgaaaaatgtaaatgcctaaacttgcattttctaactttaaatttgtctaagaaaaatctagtgtgagatgccttatatttagataatgtttacaatagtctatattggtattagaattaatatagacatttcatttttgttttcatccattgaaacatctattaacctattaaaggaatagaaaaatgagactccacgttcgctctcacggcctagaaattctcatattaatcggagaaaaagaaaaacagagtccatatagaaatacaatttagaaatagttgaaaatcggaattaaaaaataaggaatattacaagaggagactagagactatatagaaatacaattgagaaacaatagaaattcggaaataaaaataagaaatattagaagtagagtatagagtccatatagaaatacaattaagaaataatagaaattcggaattaaaaataagaaatattagaagtagtgtatagagtccatatagaaatataattaagaaataatagaaattcggaattaaaaataaggaatattagaagtagagtatagagtccatataagaatttaaaactaactaaaattcggaataaacataataaaattaaaagtagagtttagatttcgtataaaaatacaatttaaaaataactaaaatttgaaattaaaaaaatatgggaagaagagtctaaagtcaatataagaatacaatttagaagtaactgaaattcgaaattaaaaattaaagaatattgaaagatgagtttagagtcgacataggaatacaattagaaataataaaaattcagaattaaaaataaataatattggaagaagtgcctagagtctatatagaaatataatttacagataacaaaaattcgaaattaaaaaaaatattaaaagacgagtctagagtctatataggaatataatttacaaataactaaaatttgatattaaaaataattaattaataaataacacgtatataaaatacaatatgaatattaaaaataattaataaataaaataacacgtatataaaatacaatatgaatattatacattaatagtttcgtaaaggtagtacaaaatttaaaattatgttgtcattttaatatatttgaataatacattgagaaaatatatatgctattgtatgagaataaaatataatgatgctagccgtgcaatctgcacgggtcaccatactgctatctcaacgggaaactattttaatcccttaataaggtgatgtcccctcatttcaaatatcatccacgtagttataagaaattctaaaaaatgtaaaaaatgtgttgtgtacaacatgcatataccacttcactaaaaggtatatgagaggatattcttcgaaggattagaatccataattgttttttactagtggtggaacttataagacaatggcttagattgttttgtttgacgataatattggtagtagaacactggcaatacttgttatctactttttctatactttttataatagtttatactagtagtagaataaatctagacatatcgatatcatattttcttatccaacatgtatatatctatttagaccaccatcctagtagtcgacatcagtggcggatccagaaaatcgattcgttggtgtcataacatgcctatcggtgtcatagtatgctaattcgctataggttttgatgaaagtcgtcggtgtcgcctgacaccgctcatactactgtagatccgccccttgtagtcgtagaaaataacttagattgtttccgctattattaatacttttactagaacccctacaagtacaaaccatcgtacatgtagtctttttttatatatcccctcccaatataagtcaatatacaacatatgcacaaaccagtgagatgcactgtgaatctaagacatctctcgattcgatacgcctatgtatagagcgcaagcacctcaaaatatagtgcggcgacgacactggaggcaaggtataagctgaaaccaaagaaagaagaaaaaagagggggaggaaatgaccaggaggtgctaattcttgtacaagatttaattgtttattaattgcacattgtctctactatgtttctaattctttttcttggttgatctatgctggccaggctgtgcttgcaaagattgggccctggggaggaaa

SEQ ID NO: 1374 - DNA, 3385 bp, Oryza sativa
  Intron number 1 from transcript LOC_Os11g47453.2 (locus LO C_Os11g47453) derived from phytozome v7.0 (chr-ID Chr11; p os 28012635 to 28016019 reverse strand)
ccgtccaagctttgctagcattgtcaggcccctcggtgagaacccttgaacctctagcactcacatgcatgcacgcatttagcgagtacatggccgtagacacacatgcaccgtcacccaaagataccttccgctcggactcgccgctagcgcaactccggtcaccaacgaccgagaaaagtagaggaatggaatcgcagtaacattctcttcattttgtcttttggtcgcacccccaaccaagtcaccgtttgtcgccggcgccggcgagcagaggtgccgctcatggcggctctactgctggatcgatagagaaggaatcaggacttcactttgaaaatttaacaaattatagggtctgtaatgcaaagatacaatacacacaacactgtagcaggacctactcgtaattatataagaatatgaagtactcttaacgaaaactgaattaaacatgtgctgaattgttgaaaactactataaacttcaaaaatgcataacaaattcatcttaactccttaaaatcaatttctatggattcacaaaatgatgaactttcatgttataacataaaaagtggcacttatagtacaagatctaccactaaatattatctaagaaaaaggaaacataaaacaagtaagaaattataaaatgcatataaaatccaatttaactcattttgcggtaaaatcaaattctacagaatcaccaacatattctctatgcaaaagtaaaataaaaagacatacttactttgcattaaaagcctctaaaagtattatctactaaataactagttttagacaagctgaactttggaaattcatataacatttattttaactcattttttagtaaactcaagttctgtagaatcaccaaataatgcactttaaagttataaaataaaaatacacacttacagtacatgaatagcccctaaatatttatataaggaaatatgaacctagtgtacagttcaaattgtaaaatttgtagaaatttcatctttagtccaaatggagtgaaccaaacttctatagaaccatcaaatgtgcccttccctaatataaaataaaatgtggcaccctctgtacttaaaacttctctaaaccttgaattagtaaagtagatagtaatcacatactaatgattaagtcaaatctatatgtataatgcatacaaacttcaaataaaacaaataaagctaaatggaccagaaaagataaagttccacttcctttcatcaaaacttaacacacttaactcatatagttaatccatagttgatatatatatatatatatcaagttactaacataagtcacatctagttagcatatatgaaacaaatataatgtaagccctaaatcttgtgaattaaaggtaggttaaataataaaatcattcactttacttagccaaatcataaattaacatgttctggatatgaaacatatagatcaagcatatatagggactataaacatacaacacgttataacttccaaaatacattagaaattcatattaactctaaaaattgtgaaaccaattgtgttaatcttagaagacacatatcgtcacctcagcaaactcaaacttaataaaaaaatcaccttacaaaagcatttcatagcagtacctaagtaaatactacactatatcgaagcaaacttctaaaattcataactctcaaatggagtgagataaagtgaaattcacctaaattcaccttagaccagcacctactcactgtgcacaaaccatgcattttagagcattttggatttttcacatattttggtgtttaattgcataacatgtactttatatagatgattgcataaacggtgaagaagtgaattaggtgctgatatttcccggtaacaaggcaagtcccacctccctctctctttgaacaagttgaacttatattttggaggttattgaaaatgtttgcaaatcttgcatgtcgattgtacactaatccattaaaatttgtaaaacttgttagacaaacacctattacttgcattatcaccataactccacatatagccatatccctctctcctaaccataggaatattatatccataccactttaaatatgagttttgatgtcaccatgacactatattgcttaccatgcttagattggaaatacttgtcattatgagctcattacaaacatgaaaaatggttttatgataatctgaacagaacttgatcattgatgtttttaacaaataaaattatggaaaacatggatttaaggtttgggcctcaagtggtacacatatggtgattagttgtgtaccgatagggggagagtgtgcccaaaccgatctaaggatttcactcgatgtcagttcattatgtttaccgtacatccatatatgtttttatggggagaccttggcctattaagttaagcacttgtctaaccttgtattcaggaggccgttgtagtataggtaggggccacgagtgtaccgtgggctacctataggaactacccatgtgtgtgttgaattttagagctagccaatattattagctgtgtgtatttctgtgaagggacgagtgtactgtttcacctcacagcatgggcgtctaagtctgtccaatacaacgataacgtgcctcgtgggggaacggatgtgttcgccgccacagcgttagatttaaggcgtgtgcccgccacctaaaggttctaggacttaagcctaggatggattcacacttatcgtgctcatgcaaggttagacaatacttaatgtaaaagcctcgttgtgacctctagatcgcactcaatgtgtagagttagatcgcactcaatgtgtagagtgtggtggtaccgacgggtaccagacaaactagagcgattcacatcttgtgggtaaagctgtccaaactttgcagagttataaaaactaatcgattagccatactcacggtctactcacggtcatgagcggcatgtaaatatctattgagtatagacttgcatttattcttctaaatgctgaaattaccttcaaattatgtagagatttgagaattagttccttgctgccatggatggcactgaggtgcatatttatacttgattaatgcctactttgatgcccatatgctaagtacttgcttgctgaattttattcaaaagcaaatctgtttggaaatgttttatgtaactaaaacttgctttatgctaaaatttaactacatatggtcttccttgattatatgccttgcatgtagtttgttaggcttgtcttgtgcttgccagtacattattagaaataatgtactgactcttgctactgaaataatcatttgcttgcaggttatagacttagtctaattttgagtg

SEQ ID NO: 1375 - DNA, 6083 bp, Oryza sativa
  Intron number 2 from transcript LOC_Os09g08120.1 (locus LO C_Os09g08120) derived from phytozome v7.0 (chr-ID Chr9; po s 4190195 to 4196277)
ccgatcgagcagatccgagtacgctctctgcaattctgcatctcttcttgttcccctcccttctctgattacttgtagtctctgcttaattcttctgtaaaagaattgcataaattacatgctttcttggttacggatctccagtagtgaacactcaacattgaattgcaaaaactgtaaaagatgatccttatgagcttatcctgttaagcatatagcattgtatctctcgtatatagcatgctattgtatatttcctttggccgttccttcctaatccctcccgggtgtgtttctataaaccggtagagctggatatggaaggttctgcgcctacttgtactccgtgctatgcatcaatggaatacacgttgagtctatcaatccaccatggcgcccagcagcccgggccttctttcttcctcctcagtggctctcggctgaggcgcggcggcgccgaaccttctctctcctcccctccaaaaaatcgaaaaaatctccactaaatcatcacaatttggaggggaaattgttggaggacatagtggcaaggtattctcctccgaatctctcgtcatttcgcattttttttgcttggattgctcattgatggatgaaccctagaatcgtgatttggggttattttccctaattagttggttctctactctgtggttgtagttgttgttggtgatgcaatgcttagatgttcatagaaccctaatttttagtggagatttttggcacttagggaagaaccctaatttttcccccaaattagtgaagaacacttcttttttttttaattttcatcacaatgcgagagttcaaatttaggatggatcgttacaaatggaagtttgtgtatgtttagatatttatggacaatttcgttgggggacatagttgtaggttagatttctttttattgcaaattcaagtttttaaaaaatgcaatatgctaatatgtcggttaatgttgtagatggatagattagtacgattgcactatggtggttcggtggtagagcaaagtaacagtggtagcaatttcgaggggatgagtgttaagcaacttatatttggtggaaaacctagttttgaggagttagtttgtcatacaaaggatgtgctggggtggagcaatcagtctatagctatacaaggtagatatgatgttggagcaggacccatttcacacaagtacatgctagatttgaatggggagttggagtggaacacatatgtggatatagtgttgggctcccaattcaagtcgcttgaggtggttgcttcgaagcttgatcgtactgactgcagagataattcttttgacctcaatcgcacactgttttatgatgaaccaaactatgaagcatttgatgatgaaggagctatgaaaagtcagtcggttaagtctttgacagttgaggaagtcatagaatctcaagggatgggggtggatgttaacatgcaaaagaaggaagcagttgatgcgaatgagggaaggagtcaggaatctgaaagggtggagataaatgtggagttgcagaaggaggaagcagttgaggctaataaggcaagcaggcttgaatcagaaggcgtggaggtaaatgtggaattgcagaaggaggaagcaatagaggtgaatgaggcaaggagtcaggcagttccgatagttggaaatcatgttgatgatgataatgaattggcagatggatcaatgggggcaggtggagaagagcgtacaacggatgctcaattagcatccatggtgcggttctattttcaagacaaaatatatactcggagggagtgtgaggagactttgttgatgaatggattgagtgttgatttgctgcacaaacattcagaggagtatgatgacacacatgaggaggagggatatgaggttgagtatgccgtagacttagatgacgatcgtccagtagccaagatgtcttaggaagaaagggaggtgtttgagaaattagttggacgcaatccagaggttgttcagttcgaggatgttagcaattctaagctagcagttgttgatggaggagtaacatacaatggcatcatcgatgcaatgggtgaggagccaaagaaggatgagcacatagggatcgacatcaacgccatgtgctacataccggaggatatgaagtttctcaggtgccccttgatttgcttctacgccgttgagtggcagctcatccatcgcgtgctaaggcagttcggcttgcgtcaacccataccaaaaccattcccgacggggctcgacctccacaagtaagatttgcattgtgcatatcattttcaaactttctcttcggcattggctactcaagttctaaccaaattatttgttttgttgaatgactgtaggttggacaacaagaagaacaagaagattacggactggcatgctcatcatctccatcttattgagcggtgggacaacacagcagctaacgtagtgcctcacggagtggagcacaacaagacatacttcgacgagtacctagcttggctcctaaggaactaccgccttttcctttggccggcatggactctagctgacatagctacagatcccgaggatgttgaggagatgaacgagtatgacacccacacttgagcaggggcgacggtcgagtatgggcctgtacgtgaccgagtggtaagtattaaggctcagagttgttcatttcacatacacctacatgttctcacaatattaaatccacttgcaggcacgtgagctgatgaggtccgtgaacgacgcgggtgttgcccttggcacacctgctgggtcagagaatgaagttgggatacttcggagcgcacttcaggtaattaaccaattagttcaatccatgaatcatttcacttgcctctaactaatttgttttgttcttgcagaggctaaaacaacgaagttggatgttagcggcaagacttggttgtaggtccacagacgcagtcgacccacaaccaagactaacacggacacaggccggagaaacaagtcaacaaagagctaaagaggaaggggaggaagaacatgatgaaggggaggaagaacatgaggaaggggaagaaggagatggacagagtgacgaagaggaagaggaacaacccgaagaaatcgggtcatctcagcttgcaggtgccccgcagccatcgcaaccttcccagggtcgcccgcagagaaagagggtaccggtggaccggtacacaccttccactagtggccggaggggtcggcactagtggattactttgtacttaacactctaggcagcgttagacttatatcaaactctagatgatggttgatggatgtgttgaactctatattttctgatggttgatggatgtgatgaactctaaatactgtgatggttgatggatgttcagttgctgtgatgtgttaaatactatgtggctgtcaattttgtgatgctaaatacttgtgtgatgctgtcaatttctgtgtggctggctgcgctttgccagctactgcttgacctcagcgccaaatagaatggcgctgagattgtacaccgaaggaaacggccgtcacgcactcagcgccgatgcggtcggcgctgagatgttcaacctcagcgccatcggccctggcgctgaggtcggggtccagatctggtgatagtttttgccagggaccaaatttgcaaatagttttcaaaaagggccaaattgtcaaattttcgggaattcttgtgtggctagcaattgtagggtagattggtatgacaagtgtacttgctagttggcatgcttttgattggacttgtgcgtacttgcactaattggccttgaactgaaaaagaacatcttgatcgaatttagtccacagaataattctagttcccaatttcaagcctgccagttgagaaaattgttcagttcaagttctgtgggtttctgtcagaccacaattttgcttccttgcagtaacattctgcattttgattagcaaggcaggatctatttaacagaattacatctcttacataatcgaaatatttccagccgacattttctgtaattttaaacctgtacgagaaaatactttcactcaaatatttccatctatttctaatttagtttgaaatatttgctgagatggacgaaaaatttgcatatctctctaatttcatcctgctctgaattcttcaataaaaaaagaaaccttgctaaccattgggttaatttggtactctcgccgtttgagaatataagatattttggttttaacctaagtcaaactttcgaagttccaccaagtttataggtaaaatagcaacatgtctcgcatgaccaatgatattataaaagtataatccatttttgtatttaatgaaattaatttggtgccgtatatgatgtttcatttttctataaacttgatcaaatttaaaagcaatttaagttaggataaatagagaacatttcgtatgtgcccatcagttttcgctgaattctttctatgttgaattttagttttatcctctacgtgcacatgagtttttattttgatccccactatacccatgccgttagttgaatgtaacttgaccgttaaatttttcaaaaattgactatattgcccttcttatacctactttaaaaacataaatcccaatgtgaaagaaatctataataaaataaaaaaggaacaaaattatatgacaccggatttaaaaacataaatctcaatgttataaacaaaatttaaaatttcagaaaattattttaaaaaggatgaaatccatataaagggttcagtaggaaattgaaaaaccaaaactttctcttatttgggattaattttgagttaaaattttgaaaaaaaaaccctcatcaattctggtatgtaacttcttgaaaatatttaaattttagttttcaaatttatgatccagtaattatgtacgatttgtttttataaatgaatcaacttttacattggaggccaccttttttaaatcaactagcacacgctccaagtaagagaaaagagtaatgttttactcttttaaactttccttgtagcggtggcgatgagtcttcctcaccgccatcacctattgatacttggaccccacaaagtgagccccacatagctagttttttttataaaatctaatggtcagctaatcgttaactcacggaatggcctttgagggatcaaatttgaaacttagggtatgtaggagatgaggcaaaatttagaagcgcgaagggataggcaaaaatttatgagtacacaagagacttaaaactgtcgacattttggaactttgactatggtataacttataatgtaactaacctacaactacattgtgaattttatataacttgtttgtaagttttatataatttgtattacactataactataattatagtttagttaaaatatagtaatactctctatattttaattttaaaatataatgtgtattttgttttgttagaaaaaactttaaccaataattattttattagaatatcatttatgtgacaaaaatttaaaatgataatcaagtacttttgaatatggaggtaataaatttaatttcgtgccatcaaaattatatcatagtagagtttttaaagccttgtctgaacaaaacaaaaaaataccgtgtattttgaaatggtgagagtatatttgaaaaaagaacttagaacaaatttgtggcagtttttttaacaattttattaaataaaaagggagtcctccgggttaataatacttgtcgttttggacaagagcacagtcttaaaaaacaactttaaccactattttctattataatatactatatagaagtgttaacaaatatatgattttattgaaggatttttttaatactaatctatacatataatcatcatatttcgaagataaatattttaaaaattatccataataaaaataaaatttaactatatctttatctaaaacgacaagcattgtaggaagctctatgttgacagttattcattttatacgtgcagggcctttgtaccataacggt

SEQ ID NO: 1376 - DNA, 8314 bp, Oryza sativa
  Intron number 8 from transcript LOC_Os10g01044.1 (locus LO C_Os10g01044) derived from phytozome v7.0 (chr-ID Chr10; p os 45832 to 54145 reverse strand)
cagcaaagccaacgaccactctcaccctacacggcgtaagtataacgtgcacctacatatacagtacattctactccctaaattaatcctattttttctataaaaaaactagtgtagaaactttttcccttttagagatggttgccaagagcatgctcataatcaggactgaaacaaaatatctatctatctatctatctatctatctattatctattatctatcttctattatataagtccattaactttctacaaatgctcctaaatcgccacgtgacactttaaaatttaaaaaaattctttaaaattctgaaaaaaaaacatctaaccattgatttttattaaatctggtggacccattatttataaccattagatttatctttgagaaaaaaaacatctcctaacccgggtccacctggcatgtaggtacgtacattcctgtacgtacgtctccccatgttccctcaaatccttggttcctcctcttttttatcacaaaatataacctgagaagttaggcttaaccagtgacacatgtgtgagggaagtactactatacatgcatggcttttttgctattagacatgcatgtcttttttctctcttcttataaagttttctcacaaattacttgtccgatcaacaattagattacaccatcgtattcgttgcaattaaatctttacatcaaagatcttacacgattatattacgatgaaaaaatatttatgtttgtaaattaattttattatatacgtaagttacttttatcatatatataaattacttttagatttgactaaattacttcttatacattcataatactctaaattgattatttttattattgttttaagttaatttaataatttatggactttaaatttaatttttacatagaccatatttttctctctacagcaaatttacttctaatgttgtaacaacttattttcattttgtgctaagttatttttatgattgatgtaaattacttttagactttattaaatttatttttagactttattaaatttactttcataaatgcatttacttaaaaatattctctacgctttacttgtgaatttactctacttactgtttcatttcaactcagtcacaaatgtaattacttctactacaaaaagttactcctgttagatagctaagttatttctacaatttcaatgaattgcttttaaattaataaattgtttgaatatattcaacgtgcatcttgttttctcacatgttttatatagagtacaatgatgcaaatagatcttgaaaacaatatgtgatttaaaatatataagttattaaagaggttaaatctaaaagtaatttatatatatgataaacgtaacctacatatatattaaaattaatttacaatatagatatttttttcagaatataatcatgtaaaatcttattgtaaagatttaattataacaacacaacggtataatcgaattatggatcggataagtaatttgagagaaaattctataagaagaaaaagaaaagcatgcactattgagtctagtagtagcaactaaagtgaggtcgcagaatattatgcctaactagcgatggttttgtcatagtcacgtcccttttttttatctaatcattctcttatttttatgccttactctctccgtttcaggttataagatgttttgactttggtcaaaattaaactgcttcaaatttgacaaagtttatagacaaatatagtaatatttacattaccaaattagttttcttaaattaataattaaatatattttataataactttatcttggttcgaaaatattactattcttttctataaatttgattaaacttaaagcagtttgactttgactaaagtcaaaacatcttataagttgaaatgtagggagtattagttagaaaaccaaaaattttgcgattttgctaaatatttatttacagatttttttttggctaaaaatcactcggtattttttaccgtccgattcattgatgatttctgtgcttcgttattagccgcacagtttctttgcgtgtcctctttccttttccctgtgttgtatgcacatatttattcgttcactacccgtgattggttggctatcgtttgagagatagaagatgcatattctctatttactagctgctatatgactatgcgaatggcttctgctgttcttttgtgagactagcatactacttttatatatatatatatatatatatatatatatatatatatatatatatatatatatatatatatataaagttacatatcagttacactataattatattatatttctaccttagttgcatttgtatgattttagtggaaaaatctgtcgagcgatacatagatagaccaaaaattttgtgttaaataattgagcaactataacatataaatcataaaactaatttttatctacttacatctttaaattatttatgaataaatttagacttgaagaccaaacttcactataattcaactttgaatgtcattttgggttatactttttgatttttgagtgccatcaagcaattattaaaaaaataaaatataataataataacaatatagatttcattatcgtaaacaacttcataatagtcaaattagatctataatcattaaagtaaaatgataactatgagtaatgttcccaaagtatattagttagaaatcataagttatggctggaaataagcaactataacatctaaaccatacaactgatattttatatcatctaaatcatacatataatatttgatccacttatgtctttagattattttacgttcaaagactcatatccagtgtaatttaactttgaaaagaattatgtcactttcgggaggtgtattttctgaattctgtgtgccattcaaacaatttaaaattataaaaagatagtgatttagattttatcatcctacataactttataattattaaattagacctatagtgataaaatttgaattaacctaactctgagtaataatgaaaaattactcccaaattctaacattataataagtcaaaataatattattagatttgtagtgttcatattttgaatatctactatgaatatgaatataccataagaatagatgagtaaaaacttttattctatttttatttaataaagtaatagcaactaagatactattacccgtgaaaaaaatataattatctgcaagcgtacattctccccttcggctctctcttcctctcctctctcattcaattcctccgtgttctaatttttaactaattaataaaagctatcaatatttagaaagaaaaatgattataattcttaagtgatatcctatttttattttgtgaattattgttttatttatagttaagtaaataatttaagatccacattaccacttatttctgcataaaataaaaacacgtcatttgaacatagacacctatgcttttgcatggtaaccaaatagcaaaaagaacataacattatcacaagtacatgctctgtagcgcacttaaaatgtcacgtttccgtcttaaacaaaaataaaatcatagatattgtaaagaaaaaatcatctgccttgtgttatgtcttaaaaattaaaaaaaagatattagaaatgtgagaaaaaagttggatcatcggttttcacttaatatcatttagagaaaaaaaccacccctccgcttcagcctcccccacacatggacacaatacaatactacatgtctcctccctgtccttttatagtttgcaataataaaaaatattaaaatatgcataatttttaagatactcatatgatttctaatctaactattgttgtattcacaattaaaccaacgatatgaagatccataacgcctaaattttgaactggtataaaataaaataggaaacaaaaaatgtcaataaggactaaattgaactatttggagaaaatttaataagttcgtaaaagcatttgtgcttaatttttactaaaattggaccaaccattgcatgtcccatttttataacaatttgtaaatgcttagtttctcgatatactattgcatatataagccacgctaaggttgttgtatatagtttgttgaaaagttatatttcttactattaaatttaattttttggattcatgttaacaaggtattttctttgaaaaagagaaagtatataccgcaaatatcacaaggaaggaggtatacgacatctctttgttaatttatatgcatgtatgtaacaacttgtgtcaatctgaaccaactaagtaggactagcttacaaataatacacattattaacaataatagttctttagggttttaaaaaaagcccctatgaatttaattaaacaagataaaacaccttagttttaagtgcatttacacttagtttgttagacacgtttatcaaatgttatatattttaaatgctaacaaatagtttggaaaaattatctaagcaataccaatgaagaaaattcatagagaaataatacttttgaaatatggcatcttacaatgggttgatattccgcctatataaatttttcaaacacaatcaataatatacatgtccgcacgaatgcacgggctatcttcctagttgcaattaatagttaaaaaaatgttttttacaaaacatatttagggtgaaacattgtctgacttttaatataattttgattgaaccattattatgaatgtttgcatgcgggtgattttttttcttgaaatattctttgattctactctaaacctgtttctgtcaataatttatttgggattgttttcatagtggttatgattttcttctaattacccttctaacatataaattgtaaagtagaaatacttgaaatcgtacagtcctgaatttatgagaatttattgtagtggaataatggagtttctaaactttaaatactatttgttttttttgtatatatagtattttctctgttttttaatatataacaccattgattttttagactattcatcttattaaacacaattaactaatgctatgagagagtatatgtatgaagagtgccgccatttatagatggatttgttcggtttgtttggtttgtttgcacatatgtggattaatttagttttgaatatttgtaaagttgtatatttgatttcataatatatacgaagatttttagaaatttctaaggttgtttggatcacgtgtaaatgatgtaaatgaggtagatatttgaactaatgacataattgtaagcacatattattttacatgtaagaacatataattggatcatgccactacaaatatgccattttagataaataccattactattcacaatatcggctcatggcactgaaacatggggaaattggaatagtgccactccatcatgttttccgtcaaaaatttccgttagccctaactgcacattggacctagctagctgtcagttccatcttcccctcactcccctctcttctctttcccccttcctctctcttcaccaccgtcgtcgaccaccactgtcgcaaccaccatcatcgactacctctgctgtgggaggcctcgggagccgccacaaccaccaccacggtccttgatgccatccgcgacaggaggcttgggagcagccatcctcgaccccatccatgcaggagggctcgggagctgccaccgccatcatcgtcgttgtcctcgtagtagttgcggggatgcatggaggaagagatagggaagaaagaagagggaggatggtggaagatggaagtgatatgtgctccccacgtctaggggtctgacggaaaacatgatggagtggcactgttccaattttccccaatttcactggcatgtagccgatatcgtgaatagtagtgtcatttatctaaaataacatatttgtagcggcatgatccaattaaccctagtcaatatatggatgtaaaaactattaatttaattgtgaagctagactacaaccattcaaatggatcttatcaaggtgtttaaaagtgtgcatacaaattatattagccgttttttgacttgaagtccagcaaaggaaaaacaggctaagtgccctagctagattacttaacattttctatcatcaatcataccatcaaccctcttatggcctctaaatataggattaggcttattggtttcaagttttaagttaaagttttagcttatatatgatttataattagtggatttaaagttctaagtttaacggtggagtcatacatctgtcttacataagctaaaaaaagtttctccaaccaagcttttgatttaatagtataagtttggcttatggctttaaaaaaaccaaaataattgcttgtttgtttaggtttaaactttttggctcataataaattggcttataaatctaaacaataggcccttagctaggaccaagcatccattgagtttatagattttgattgcacatgtgatctctgttcacaccaagtcgatgagatgcacggatgcatgcaagcgcctcaaacatttatgccataatttttatggaaggatatgtttaacctataactcatcaatagagataatctatgctctaattggttcacacgatgctaccatttgcacatataccgagcaagacatctaccccttccagtccacattttggacaatgatatgatatctaaaatatataatatatacaataaattattttttctctttttattatagttcgctgtaagataaatctatatatatattgttctaataactctaaattaaatattatttgagttattgatagtaaaagatatgaaagttacctaacctttttcaaaatttcagagggagtaaaatgctaaattaaattatttactataaatttgtcatagtagcttgtgattataaatgcctcacacagtcacatgattgcaatgaatactgaattaagcattgattacaatttacaagtttggtagtttcttcacacttctttccctaataattcctaccgtttcttatttttcttctctaattgtaagatcatttatggatttttggtgtgcatatgtacgcatatagatcattcacaactgtgtggctatctaactagcataaaaaacgatgcatgatttgcttggagagagttgggcatgtacgggaggcagtcaggaggcggtacgtacagactcatacatatataatatactaggtgaaacccagcgcattgctgcgggaatttagtataataacaataaaaaaaataatatgtaaaatagctagataatattagattaagtaaattaatgtggtttatgataatttaaatttaaatagtatgtagaatggtgattcaaacgtaaaaagtaaggtagaatgactttatggaagaagaaaaataggaagatagtttggaccgtagattaatcatctaaagactaaaaacaattgatataatatgacttaattagagggaaaaaggagaaagataatttgtaccatagattaatcatttaagcactaacaagtaaggatgaactatataagtatataggatatcataaaacataataaagatatactttgaaacattatgtgaattatgttggatgataatttaacatgtttgtatttgaaaagctcttaaattataaaaactataaagatatagcatgtttacatgatgtttaaatgtgatgattgttagtggatgatgatgtgacatcttgttaattagtggactagtggatgatatgcgatatctttgcatgttaagcttaaggagttagtggaggataacttagtaagataggatacctacaggaggcagggtttaaggaatttattttttaagattgatctaatggttgatactaatgggtccaccgatttaaatgaaaatcaatggttagattctttagttgccacatgacagtttgagagtgttttgaggagtaccatgtgacggcttgagagcgtttttaggaagtttaatggatttttagtatataataataggtagattggggtgctaatagatagatagatatattaattatattatactctctctccactgttcacagagaaaacgttcgatcgcttcaatatcgaaatcctaactcattagctttgtactgattttgccataacttcagattacctgttggcaatatatagctttgtgctgatgattttggccggtctggcatggctacagatttgtggacctgaagcctccaagctcgccatcgc

SEQ ID NO: 1377 - DNA, 1536 bp, Oryza sativa
  Intron number 1 from transcript LOC_Os07g35580.1 (locus LO C_Os07g35580) derived from phytozome v7.0 (chr-ID Chr7; po s 21296131 to 21297666 reverse strand)
agggaagccacctgctgtgccgggcactacaggaggtgagcttagctgactttactactatgcatattaattaggagtactctgcttccatcttttgttccctgaaaattattgtacctagtgtgatgctggacgtatgatagcttaactaatgccattataattttgcaaagtttgagatataccatcggtatctcaatgacatgtaggatccacatgagtcaatgacatgtgggtcaggacggcatggttttaattttgcaaaattataatggcatggtttcaattttcccttttaggttaagtacagttcagaattttcatcacgccaactaatccatagtttaagcaagaaacgtccgaatttctcttggtattaactagatgaatgcctagattttccatgattcgatccagacctgttgctgtcatgctagttagcgtatagttcactactattccgtactagtgtatactagtactcctatcatacagttgactaagtctactttttccaccgactaatttcttagagacatttttatttagggaatataatatcgaaatcaacctaatccacaagacaaaattgtgcaatatgatactagtaatacgtgtggtttctctgtatgtgattcaattatctgtcagtcgcctaactttcagttgtttgatcagctagtagttaagtgaatgcacggaaaaaaaaaggcactctcttcttactctgaaaatttacaccatcttttctgagaagaatcttgtgtcatgtatttttctgtttgtttgggaacagttgtctatcttttcgtcttctgcttactgttctagattcagtaactgcaggcagcaccacatgtgcaatggcaatctagaagctatgacttgtagtcatgtttatatatggggatataaacacaggcatacagctgttaccaactttagattgtcaaattggtagtttgtagtttcgactagatattgttattaacattagttagtttatgcatttcactcaagcaatgggagttagagtggagcactagtcaagaaaagctaacagtgagtgttatgaccataatgcataacattgataggccataatgcataacattgataggccagtgccaaactgccaatgtgatatcatgattcattacctatctggaatgccattttagacccaaaataaaaataggcgtgcaataatgatcttgcagaatgctgggttagcttatctgaaaggctatccttgctagttgcttactgttcaacaccaaatggcagtttttacacaaaatttgagttttcggaggcaaatatttcacacaatctctatcacatggaaaatttcaaagaatctgcaatcgctatcttacttttcaagtgtgaactcatcatcagttcctcctggtttgctttctgctaaccgtgtcttgagaatctttcaccacaaccatactacttttttcccatgtgtaatacggagtataatctacagggaaaaggagaaacggagcaggtaaagttcttgca

SEQ ID NO: 1378 - DNA, 1377 bp, Oryza sativa
  Intron number 1 from transcript LOC_Os03g55389.1 (locus LO C_Os03g55389) derived from phytozome v7.0 (chr-ID Chr3; po s 31505595 to 31506971 reverse strand)
ggggtaggtagcacagccagccagctgacgtcaccttcctgagccccctgatcagcggccgtagcttgtattctccagatttagttcgcgatccgtatcccgtacacctgggctgggtttgcttattgggattaggttggattattgggttatgcgtaggtttgcttgtgcctgtagattttggttttggtcagggaattgggaatttattgtagcttgaaggttagattgaattgcttctgtttctattaggacgaactcaataccgaagactgctttggtagttttacatgtttgtactataggagtaggggacacatgtttaccgaatggttgaagaaattgttatgaatttgcaaggttatgattttaattttggaatcaatctcactatatcttccttttaaagttgatactagtgttgttcagttaagagcctttgtttgattgtgaatggcaagctgtaggtattgatcctatttttgttggggataaaatctaagttaaggcaaaattaggcagttttatgtttaatcattggaacaaagtaagttggtgatgggtttctgggtgtttcttttgcatcatctgataaccaagattgatgagtaaagcataacttggtagtatagtgctttgggcctaatcttctttagcactgaacattcaccaagttctatgcttttatgtaatctcaaatttaacattgtgttttccttcactcaccctagaatatactacctgaaagcaatcaatgaaatcaaatataacttcgtttctacctatatgattgtaacatgctgagtaatatggtgccaaacaactcaacacatataatactgtccttaacaacccatcttcttttccctgtagaagttacagccctagtatattctgtacatgtcatgctacctagatgacagttgaggcctggtaggagtgtgcttgtttaattttggtactccaaaagtgcactgtttttctcaatctgactctgttaccagttgtgtttcctctagatgtattccttatctatggtgaattattaaataagttgtctggtgacaaaaaaaaaagaaaaataaaagaagagatgaacaatatgtagctcattgatgatcccttgtctgcttgaactttatgagaaactatagaaagcagtggtgttttccctgacctgatgttaaatacttgttaagaattgagctttcttcgaagtttgttcagtttacacaccaacactaagaattgccatatatctcccatcttttgtccatttaattcttgttacctcaagtcattgagggacctggcagcatgttatgacttacacaatacctcgctaactattatggtgcatctttaacagtgagcagg

SEQ ID NO: 1379 - DNA, 976 bp, Oryza sativa
  Intron number 3 from transcript LOC_Os01g37980.1 (locus LO C_Os01g37980) derived from phytozome v7.0 (chr-ID Chr1; po s 21275472 to 21276447)
gctgaaacgttgggggtatgctgcttattctgaatagatatcattcctactatgcaggcgaataaaattcagggggtgttaggtggagcgtgattcacatgttttttttttcttgcgtttgaactttaggctttaatgtctgatatgataacatgaaacacctttgtgttctatgctaattacggtggttggtgataacatgaaacacctttttgatctatgctaattctgattggttcttgtcaaaattgtcccatgaatcaggataccagcacactttatggctctgttttaatagaatgattgatgtattgaaacgctcaatctatagctaaaccagggaggttagggaaaacaatagatggggcttaatttgcccccaaatgttcaggacatatactgatgtaatttcttttgattttctttttgtgcaaatttgaaaggaatgccaagtgaattatgttagtgtgagcttatagagtgcttcatgatgacttggtgagcagacgcatcatatatatactgactctgaatgaaaacatgcataatggccatgccattggtcagatgtatgtactatcatattaagttgcatctgacttatcacgagaatattactgtattgcatcgataagtcaatttttcttttcaaccagtatgaatgtctagggaatgttagtagatttatacatattttacatagtgctaatatatatctgtcaaaaggaaggctgagaacataatctaaagaatcatatcatcttgtaaaatccatactttcaatcaagcctgattctattgtactaataatctcatacacatgttgagctattcatctaagtttatttgacttattagtaacataagtttatccctttgccagtcaatagctatccatctaatgaaagcacgatcatgtattttgatgttcaatcatgcaggtatctgctgatcaaaagtcaagattgctcaggat

SEQ ID NO: 1380 - DNA, 9373 bp, Oryza sativa
  Intron number 1 from transcript LOC_Os08g19694.1 (locus LO C_Os08g19694) derived from phytozome v7.0 (chr-ID Chr8; po s 11787211 to 11796583 reverse strand)
gcctccgccgcctcctcgagtgaatcaatcctctggttagtcaaacacagtccttacacgatcgaaacgctctattcacttcatacgtcctccttccatactcgtaaagaaaatcgacaatatttaacaatataaattataaataactcagtcaaatcttgagaatataaattataaataactcttaagttattgtgtttaaaaatataaaaattatataaatagatttgtcttgaaaaaaactttcataaaaagtatacatatatcatttttcaataaatatttttatagaaacaagaagtcaaaattatattttgaagaccgtgttaatatcctaaacgacttcctttacgagtacgaatagagtactcgtacggggatacaagcgagctaagcggcgaacccgcttataaacaaaactagtgcataacccacgaattgactcataggttaccttctaagggtttgttcggcacctccttttcccaacccctctatctcgttttccgcgcacacgcttttttaaactgctaaaaggtgtattttttgcaaaaaatttatatacaaaagttgctaaacggaggaagtactcggttaattataattacatgctaatgcttcatgtctttgtatacgccattcaaaattccagtgaaagattcatatctcggggctgtgtttttttgggaggttgggaaccctcccatctgcacggaaatcggagcgatagattaacacgtgattaattaagtattagctattaaaaacttgaaaaatggattaatatgatttttaaagcaactttccattataaacttttgcaaaatgcgtaccttttagcagtttaaaaagcgtgcacgcgataaataaggaagatgagttagagttcatgggaaagaacacagctaggcttttccttggtttcaacgattaggcttagattttcgacacgggcgtgaaacgtgaaaaaccgttagcatatactctatgctaattattgaaaaaccactagagtaactaatctagtagcattaatttttttaaacttgaaaaaagttatttatttgatttttaaagatactccatagaaaaattttacaagaaacatatcgtttaatagttagaagcgtgcttacgaagaatatgaaaagtttataagaactcacacaagagtggttttctggatggcatggtaatatatatgtagtgaaacgttttctttatttttgtaaatccaaataaaggaaattatctttagacagttttttccccaaatacagtatagaatctcatgtgtacacacagagcttatgatcacatacacgcaacctaccaagtatttctgagaaattgagctgtcatatacacttaaaatataataacccataaatactaacatatcagtattgagtcggttacaacaatgcatggtagatcatttgtgatcatatggacaaatttggtatgatttaaatagaaatatgtaaatatcatcagttcattttttttatattacatgaagtcatttctcacatgagaaaaacttatttcactatatacagatgttaacacagatactctatacagcaattgtgtgtatgttcataatgcatgtatatagaagtcagtactttaaaaaaattgagaagaagtcgcttactacttaattaagattccaaattaaagtggttttagcattgtcacgcattagtaaagctacagtaaaattgtgcaaagttaattaggctcccatcggatggcctaatcagctaaagaaaaagccaaattttaaatttcatacttaattttgagattgattttcagatgttttcaacgtagtttctttttcaaccttggcttttaaatcacccagaacacatatataaaagttttacctacaaattcatttgtattccctaataagccgttttggcttattagagaaaaagccaaacgatggggaccttagtttagtactcccatccgttcccaagtagttattattataaattgtttagcatatattaatgtgttgggcaagaaataaccatagtaccttaatatttgattcatgtgttgttgggagtgagagggtggttaaaggtaggaaggaaaaactatatattgaggataactgaggtaacaaaaattactctgaagtaagttactctaaagtgataagtctttttagataaattacgaatccttaaacgacgaccagctatataggacggaaagagtatgataaaaaacagacttgttccgttttaaacgaacgtcgataagacctctttaattaatttgtttttatatcgattcttttgaactttttcttctgcaaagcttccggaattattattcaatctcttgcggggaattattattcgatctcttgcggggtacgggttgtttgcgatttggctgcatcactccgttgactgaccacaaaagtctcgtcaaatcacgtgtctggccagtaaggggatagcacatacttgcattcaaataaccttgttattaagacaaaacgaaataggaaaacttgccacttggactaaatgatatgcaccacttgtacttaaaagaacgacttacgtacctttagtctcaaattaaactttggtttcttttatgtcatctattcttcaacaagcaacttataagaatattctaaacacaacatcatctaactatcgcaacagtacgcatgatttacacccctaaacttctatactgaatattttacaccctccaaattttcaaattgaacgaattaccctctaaccaagccaagagcagtttgatgccaagtgatatacgcgtggtaaccgagccaggggattttttttttcaagaaaagtttaactagcccacgtgtatattcttcctcccaatccacttcctttctttctcccctttctctatttcttgtctcagttgcttcgagcacatgcctagctgttaaaaaaccggtcccaaaatcaccattggaaaccgaacatggaagaaacgccataggagatccaagcacgatgagaacaacgagacacgatatttgttaacgaggttcagccgaagcctacatccccggggcgctgattacaagcgctatttcccgatccagcatattaaaacgtatcagagttacaacgaccctcggccggacgccgcaggcggccgctccctctcgctatattaagtcatcatatggttacaacaggtctgactctctatttaagagagatcctaagatagagtccgactcttactctagacctaatgcctattacaactccaattcctaaattgtaacctactttgtacacatattcgacacaaaacactaacaaattccacatcggtgaatatgccacgtcaacctgaatttgtcccatgtatgaacctctgcttacccagacttgagttggttcctttttgccgttcatgttgagccgcccccgacgaaccttcacccggctcaccgttaacgagagaccttgctatccccgtaaattatctctcttgactccacccgcaacagggctccaccttctctcatatcactatagtcgtcttgccaagtgaaattaaatttcttcttagctggcacacagcagactccgcaaagaccttgttcaccttcactttccattttaagtttgagttgatctaatccatgatgtgataatacacgtatcaccaaaatagataaatcaaatacactagaaatgaagagaaccctttatgtatcctaaatatatcatgtactgtcaaacagtccgttgacactctcaatgatattcatctgctgctgcctgggtcctactcgcatgctgcttgacaggtcgagtctccctgcactgcttttctgcccgaaccaatactttgacttaatatgacaccgttgcatagccaatgcaagaaattccttacacatggtctgaattgtagcatgcgggattatgatgaagatacatgcatgcaaatgtatttaccgtccaggagtacaataattgtgttataatcctgaccaagtacctatgcgtgtaatattcttgcatgcagtgcagacacctcggtttcaacgcctaagccaccttgacccaagcccaagtaccaaacaaccatctcagagcaggtacaatgacagacagacaactataaacacatatagaagagagaagagagaagagagaaaagaaacgggctacagatttgtagccagctgcagcacatattccaagacgttatgtgtatatgataggcaagaccaattattaatgatgtagtatatatttgtagttaactattgtatgaattggctattagattgcttatagatgatttggagctagtagttggttatacttgctctcacggtaaaaaaaaaaaaagtcaatggctcctcagtcaccaaccggctaccttctcatccgaaatccgatacatttgctaggagcctgggacccccccccccaccgcccactgcagccaatccacatgcgaacaagcgtcgaaacgacctgttcccacactacccaggtccgctgcctcatcgcgcgcgcatatgcctgccaggagatgccacctctatacgtgagtctcaacctttgctcatcacgcccgcatggactgccatgtgtcctcccgcctcaaattctgttcattgccaccatgctccaccttgcatccatgaccatccttggacatccgtgtagtcgtcgcagcgtgtagcacctccctcgtacctttactatggatctcccgcaagttctgataccacttgttataaaaccggtctgaaatcaccatcgagaaccaaacacggaagaaacgccataggagatcataacacaatggcgacactgaggcacgatatttgttaacgaggttcagccgaagcctacatccctggagcacttattacagacgctccttgatctagcatattacagcgtattagagttacagcgactcacggcaggacaccaccaaaccactggtggatgataaggcttgctagaggtgaggatgctagtcataatcatcccatcttgctccaccaccaccttagcccactcccaacgtaacggtaacctgaaggtcgccccaaaagaaaacatatagatatttatgatttttttgcttggtcaatattgttctccggataaaggattttgtcacccacataatgaagtgttaaccgaccatcaattaacaaggccaacatatcttctttctttaaaaatagggccaacacatgtaataaaaataacaatataaagtgatactgtcgttccacagatagagtaaaatattaaaaagatgcttcctatggttttaaaaaatataacatttagaataacatttggttaaacatttaaaactttgatcatcaatagtttttcaaattctaagtttaaaaagaaaaaaaaggaatgtgtaggtttccctaacaagtataatcataatgccataagcatattaaattttatgaacttattatcatacaaaattgatggtcagcttaaccgaaatgtgttctaatcagatatttatgactggtgtgactaaaacagtgaaataaggaagagaagcaactgcaatgttgaataggtacaccaacaacaggaaaaatataattcaaatggaacatgattaagaaaagtaaaagctgcacacaatttatagaaaattcttgatgtgaacaggtgccctatcttccgataggttcgatttggtgacattaggatatcgttttgaggcttccgatcagccgatcatcactttgcaatcactacacccacaagtcttgccgttatcgactatgctctcataatcgacctaaccacaagggttatgtttatgcaaacaatcgaaggaattcagaacaacaaggataacacaatctaaattgcagatgaatatgaagctcacgaagttggcattacacaaaccgatctaagcaaaacccaaatcttaactatgatgaaggctatctatttatgagttacatgggatggtaggttgtccataacataggccaaccaagcaagagtcaattataaggcccaaagtagattcagactagaaaaaggtacttgacttttctaagattctaaacatgaggaattttaacgttggactaaaaccatttgaaagtagacttcattaacttttccacaagtatgcatagctcaaaaaatccttctggaccaacggctaggtccattctatgttggtgctattaggagggctaaatccgaatctaaaacaaacataacattagttcttgtcttgtgtggcccaaaagtgatatggtgatattggagtggacttcggtgaggccatggtttggtccccaatcaactttatgcaaataaaagcacacaaaactcattgtgcaatgatgttttttcaaataaataatatgtaaatcttacatagaaaacatggttatatccaagctgatgatgtccttatcaatactatttaccttttttaaaaatctaggctttttaatttgtttgttagtatttaacacaaaattactaacaaaaaagtttgtccattatacaattattgtagaaatttatagtaagtacttgttcggctaatccctctgtcataggtactgaaggggatttgaagaggtgtgcaattaatcctcttcaattccctccaatatcttcctcatgggggcttaaccacacaagccttatatgacctagttattgcaaaagttctataaagtttcggtggtagtatacacatatataaactaacaagcacggcaactggctcgctgattttctagtttggtaaaattctattcggaatcggccatttgggctttgatgtcgaatggtgttccatttgaataaagctgcttttatttttattccaacatgcttgtaaggaaaaaatatttattaatgtacacaaagacatcattgataatattgttagttattaaacatttacattagtttatcctaacattttgtttctccaaaaatggtgttatgttactccaagaaaaacctttattgtggcacttttctaaaggaaattttcaattttcctttaaaatttggagatttattgtgtagagacactttttagaactttaaaaattgcctaggatacttttatcctagaggcactattagcaaattttgttagttttatctactagaggtattgtataggcacttaaaaatttccttatgtaaaggcatttgcttggttgcattccaacttctatagaggcattttttagaggtgtacattgaaggtgtgaatgattttttcgagaattgttaagttcaaggattggtagaataagggaatctctcatttttcatagtggtttcttatgtttgtcacacaattgaatgcctctagaatatgcctttaacatctgttcaaaaatgacacaaagtatacattttataaaatgcctctatagccttgtaaatacatttagaaaatatcctacaatattagaaaaatgtgtctacaagttatttttgttgtagcgtgtgtcactgtcttggattgaagacaaaggaggctagcagttggttgtctagataagatattgttgaagaaattttgatgatttgatatggatctaatggttgaaatatgttagttagggtgtgtgtgattcactaattaaagtagtttgcaacacttgagttagtcatatttgatacttgatgaaacccgtgctgcaggagttttgtatcatttaagatagctagatgacaactttatatactttatacaatattcatctttgatcgactatttaaaaaaaactatgaacggtagtttataacaaaactaaggtggtgtggctcaatgagaaagaaaagaagggagataatatacatttatcatccaaaagcaaaactaagttgataggagaaaaaggagggaataatttatatatttttttatctttggttgactattgaaagaaaaaacctaaacattataagatgatatggtttataacaaaactaaggtgatgcggtgcaatgagaaaagaaaaataagggagataatatagatttatcatccaaaagcaaaattaaggtgatataatttaataacaagaaataaagaggaaaataaatttggaccgtagatcaatcatccatgtggcttcatgacgaaagagagaaatagcattaactacacttagtggggatgaactggtgtttagtacctagaaacaaaataatattcacttttagatgacttgagctaaaatgaaaagaaatacacattaaaggaatcaagatactatttataatatttagaatttcttatgatagttttaatttttctttgttttttttaaaaaatagatggttaggacaaaaatatgttgatgattagttatgcagatgttttaatattgtgagaacatcgtcaaatattgttggtaccatcctaatcacaataatgtatttttaccaacacaaattcaagccacaacaatagtatgatacattcataatgaatatcttaacctttgtggaccatggttgctcaaaggaattgacacatgcatggggaggtaacattttagggtcataaatagaaatacttaaaggaatttaatttcttagttacacaggaagataagagtcatctctctcctaaacaatccaatagatatcatgagctacatgtgcatttcaagaatgatccaattgttaaggtttaaacggtgacgtgggtcaatgtatgttgatgagcttgcttagatgaattgacacatgcattgggaggtaacattataaggtcatgaatagaaataattaaaggaatttaattcctcagttacacaagaagataacagtcatctctctcctaaacaatccaacagatatcatgagctacatgtgcatatcaagaattaatgatacaatggttaagatttaaagggtgatgtggctttatgtatgttgagcttttggtcccaactatataggatatatagatatataatttgtagctagtgttttaatcatttactacaggttggggtttgccataatttcttaattttgatctgactcgtcacatattgtttgccttgtttttttatgaaatattgtttagcttgttttaccacaagtgtggccaccaattttggtgccacaatccatatataacttaaacatgtcgtggttttgctacaaaattgtggcaacttctggaagtgaccaaacaaagccccaaaattaggctatttggggctaatgttctgttgatggccatacactaacctgtagattgtcatcttgttggaaatgcaggggtacatccaagccaccaattatcgggcgtgacg

SEQ ID NO: 1381 - DNA, 3312 bp, Oryza sativa
  Intron number 4 from transcript LOC_Os07g19494.1 (locus LO C_Os07g19494) derived from phytozome v7.0 (chr-ID Chr7; po s 11528009 to 11531320)
tgcagggatttaaggatctttcctaccggcttaaggttcggcatttagattggataccttctatctgaactcagtgaagaaattatattttaagataaatcgcttattttctttatcctcagtatatggctacagaatgtatgcaagttttaaccagtgaagttgattaaaaatgctaacatgtgatttataattgcgttgcattttttttttaataccgcagtagggtaagattttttctcggagatgtcaagttgcgttgacaagctgaccacatttgactatttcgcctagaaaatgtttgtgtttttcagttttttttccatttaaattcatttcctacccaacttctggatcaaaccttgatttctttctgtgggaggtgactttgaacaaaatggtaatgcctgctaggctgctgaactatttcagaaacaaaacattttgttttatcatactggctgcgttataccctccttgaaatgtatggtgaactggtgacctgaattaaatcaactaataaatgtcatgcatgttgatgtattgcatacatgcatatctgtagtattttgtttactgatatattttctgagcatatacatacttttctaataggggatggtttccactagctaaaatttagatgttcaattctccagatttaattttgaagtatggcaagggacttgtggatcacaagtgcacaagatatttttttatgtcaactttttcatgcaagtggttggctctgtatctaggttaccagatgacaccctgcatgttcttgtgggatatttatgtatacactgcagttgcaaaacaacaatatatggattgaaacttgtaaatttgttgagaagtacctaaaatcgaacatccaaacattgattaatatgggctaggaagattaggtgataatctgaagcttgaaaagcacaatctaagggtgagaaagattagtgatggtgcaatttcaagtggtagctttatagcaataactaccactaagtgggtttcaactgtatagtatatatagatagatgtgtttacatacacttctgctgctatctagttatcatcctacaagtggtaggggttgggagtgaaaaaaaagtgaagtataaaaaattatagcattttaaatagcttaaagctttatgtatccgagtcataatgttaggggacttatacttcgggcatctgcactggctagagaactagcgcgcatgtcccgctcggccctgtcgctatacacattagttagccccgataagcaacatggctggtatggacacgatcaactaagcgaccaattcggccacggcccaagtgacaacatatgtaaatgcatggttggcatggctaaaaatttagtcaaaattttcaaatttaaaattcaatgttatgttaaaaaagcttggtcaaacttgttgacggtaaaaaaatacacacatacactacatcatggttattaaggcgtcgctatagcgtcgtggcgttcccagaagggcatggcgtccttccgccataggctacctccgccttacaggcataaactgaaggaaagagggtaagagcagaggggaaaagtctgttgtcttgctgctggtcctccctactcccttgcatcgccctctccctttcttgtgctgatggggagtacagggagatcaagagaggcaccacctgcggctgctgtgccacatgagagagaaaaggtggaggagaggaggctgctggctgcaatagaggagagaaagggtaggatgatggtgtatgtggtgtatgcttgctgcatcgtgcacaaggagagagaagaaaggtggaggagaggagcctgcagtagtgctgcacaatgggggagagagatctagatgaaggtgaggtgacggctgttgggagggaagctgttgggtagggttaaaatgttgtttgctaggttaagagagtaaagtatttggactaggctaggtaagtgctactattgggctgggctgtggtgaatagagtaccccattagtatttttagggcccatattacttaatactttctattttttcaatgcacttaaggcgtcgtcacgccatacgccttatcattatggcagtaaggcggtggtgggtcgccatacttcgccataccgccttaataacactgcactacatgcatgcatgcacgtaccgtgtcaattcttaaactgcaattagcaactaattacctcaatataacttgagtccttgcaagttcgctgttcgtgacacatacaacagcacacatggcctagtaggcccatcctcgtatgcatcagcccgtgctggaattgtgtgccacgaacgcatctagcgcgtccgcaccgattagtcttttcgataattttatccctcttattattgaatttgtaacttctcttcaagtctacatgtccttttgacaaactgatgtaactccttactggcacatgacgtgttgcattcatcaaattgttgaaatgctggtgtatcccttggaaataacaaaaatgtagcaagcataatgctctgcaataattgttttagcacattttctttgtgattaatttcaattgtttggcctgaactcaagtgattcagggtagtcctgacatcaattcatttttgctcatttgtgtgtgcagcattatagttctcataaatcgtttgatggtggtaaaactggactgctttaaagtgtctgtgcaatatctttacattgaagttgggctttgcatggtttttaaatttgaatcaatatctgtgtttccgtgctatattttattttataggatgcttgtaaaaacctttaccaagatgaaaatatggtgctgtactggatgacttctttataccacatgcaaatatgacgtgtggttggagataaacctatattttataattcaaatgaccaacaatttatccgctaccagcagtagataaaagatctattggccgactctttttggtggttgcactccctggagacataagattgtacttcgtatgcatttgttgtatgtcaagccatagattgttgtccgttcctgttttatttgggtacttttagccacctccatttgcatttcttgtttgaaaaaaatatatgaaaagatgtcagtaatagtcatcgttctacactagtccatttgcttttattgtttgcaaagaaaaaaggaaaaagatttagtaacaatcaccactctacagtagttgtgcatttgtcagtccatgaaatacataattctcattgaccagacctgttgactctacagcccttgtttttctgtgcacagcttcaag

SEQ ID NO: 1382 - DNA, 1856 bp, Oryza sativa
  Intron number 2 from transcript LOC_Os07g15959.1 (locus LO C_Os07g15959) derived from phytozome v7.0 (chr-ID Chr7; po s 9279513 to 9281368 reverse strand)
tctaccatctcggtgagcacccttcagcctatagaacatacatgcatgcacccaattaaccaatacatgattgtagaagcacatgcatcaccacccgaaaacatcctcctttcggactcgccgccggcgttactccgatgtccactgaccgagaaaagtagaggaatggaatcgcaataacatgatcttcattttgtattttggttgcacccccaaacgagccatcgtttgtcgccggtgagctcgagatcgagctcagccatggctgttctgcctctgtgcgtgagaaaagaagtcagggaccttgtttcgagaatttaaacaactataaggtttaatgtgcaacttttcaactcactgacatatgaggctaggtctgcgggttgattcttagaaacctcagggatcattttgtatattgatctttcactgacagtggaccccttggaaacaaaaatctgaaattataaaagaaaagtacctaaaacttgtaaaatccatataaaattaaatatagctcattttaagatgatacaaatttctgtgaactcaccaaattgtgaactttagtgttatggaataaaaacttgcactcacagtacaaatttagcctctaaaatttatccaagttaaatcacacataaagcatgcacaaacttataaaatgcatacaaaattcatttgaactcattttggagcaaactcagtttctacagatcaaccaacttatgttctcctataaagcaaaatgaaatagtatacatactatacatcgaatgcctctaaaactattacctttaaaatgactagttttacataagctgaactttagaagtttatataaaattcatcttagatcctttttgagtaaacccaaattcagtagaatcatagggttgtgcacttcaatgttataaaataaaaagacatacttacagtataacgaaaacccctaagtatttaagtaaggaataagcaacatggagcataccttaaattgtaacatttgtagaaaattcatctatagtcaaaatgaagtgaaccaaattttctatagaactagcaagtaatatacttcaacctagtagagtgaattatagcaccctctttagagaccatagctctgaaccttaatttggtagaataggtactaaacacatagtagtggttaaaacaatacatatgaaaaagtatatatatatgcatggtagctccaaataaatccaaataaaacttgttgaaccagtgaaggcatagatccatccccttccaccaaaacttagtatccttaactcatataatactctctagattgatatgttaagtttctaacatagaacatcccctagcttataaaatgtgaagtaaagtaatctgaacactaaaattttataaactaagattatattagttaactaaaatactcattttatacaacactagcaagttagagcaagttctggacctaaatctccaaagccatgtacacatagggaatatatgcctagaacacgttaaaacttgtaaaatacataaataattcatattaactctaaaaattatgaaaccaaatgtgttagtcttagaaaacaaatatcttcaccccagcaaacataaacttaataagaatcaccttacaacagcatttcacaatagtacctaagtaaatcctacactataccgacgaaacttctaaaattcataactcccaaataaaatgagataaaatagaaattctttcacctaaattcattttataccagtacctattctctctgcacaaatcatgcattttagaacattttggatttttcgcatatttcggtgtttaattgcataacgtgtactttgtatag

SEQ ID NO: 1383 - DNA, 2458 bp, Oryza sativa
  Intron number 4 from transcript LOC_Os03g06950.1 (locus LO C_Os03g06950) derived from phytozome v7.0 (chr-ID Chr3; po s 3544114 to 3546571 reverse strand)
ccagatagtgtagacgaggagacatcagagcaatcgtaagtaatgcttttactctccttttgctgataaaatcgcactatctaaaatgaatctgaatgcaatgtgttgcgcatgttttctcaaacgtgcatggaatgccttcttttttcatgttcccttttctctatgtatcctcagttacttagtaatgctaaagtgctaatctaaatcacaatcagtgtaaggatttttggttagaaagaactcatttcatatgctgtctgtgttgttttcttgttaaatctagttagcaattaaattaactagttataacttataaggaaattgagaaactagtcagacagctcacagctgagagctgacctttgaaagcaagctggaacctgcttacaatattggagaaagtaaattttgtgcatataatcttcttgacatcatgtgaacacatgtgttggagtttacttgatctcaatctttcttttggtaaaccgtttcaaccatgtaaacctgctcaatgtttgtgcatctgttttgaataccgtcttatagtgcttctattaacgtggcacgttcctttcactattacagcttgtttagttgagtggttatcaaatgttgatggttgagtaatcctttattgagccctcactagttgtttcgctctttagcgaagaggaccaattactatactgtcatactgtttttcgtttcctttctcttttgcactggctgctgcatcaatgaatcataagagctccagcccttcctttagggaaaaacaatcctagcaatagtgcccatgcattgtttctgatcaaatagatataaggccagtaccgaactaaaaaatgcataacattatcctcaactttacataattacatattttgcatcacatcaatcaaccagcatgatgcaatccttttaaaaagtgtttatcgtacaaataaaacatgcatacttgcttatatctattcacaacatgaattatgaactgaaaccttgaaggaggtatgtcagaacatatcatcacaaccaccagctccataaaaaggagtaaagaggcatgtcagaacacatcatcacaaccaccagctccataaaaggagtaaaggactgtcatttatcttgagatgtcaaccaccacacattttagaattctccagcaggcggtcagggacatgaaaatattttcgatcttgtggaattcattgctttgaatcattgtttattatctgctgtgggcttcattggaacatactgcagatgttttctaccttccgttaatggctgcattggtttttagtcatgtgcagcttgaattaaaaaaagagaggcagtaatagaatcgtgaaatgcatctcccttttattctatcctattctgcacatgcactatatcacgggtgaggctagtatgcaagaactcgctggtcgtgagggtgcaaatgcattccgaaaaatcttcagcgagggcgcgccgcaacacactcgtgtaccattgtgtaattagcatgctgccgcttaattaatgcaccaccatgtgattagcatataattagggtgcagttatttgaaaatctcggccgcatgcatatgcatttggctgataaaatccacaaagtaattaagtgttattgtggtgtaggttaaaaaaaagatagcaataccttccaatcaataaatttttatccattttttaaaacttcccattgtgataaacacctattcaaattttaaaatctctactcataagttttgtgcaatataaaaagtttgtattcataaactttctatagatcaatattaccaggagacttttgcagtaatttaaatgatctactgatgggattttaaaaaatgcaaactgtaagattcaacaatctctacttataaactttctatatgataaaagttctatttgaaaacttttacagtaattaaaaaaaaactagtgatggaattttttttacaattacaaattgtaataactcagcgagtagaaattttaacaatgattgcatctacatgcaaaagtattctatatatgcaaacatgcatgcacatatagagctgagcgtgggcccacccacgtgcgcatttgtgctatctcggctcgcatgagcgtcgcagagtagccttttcgctatatctcccatctggtgattcaggactcatgcaacaccatttcttgatatacaatatttggttgttttgtttgaattttgggagtctgtcattctttaggttcatgtaatggtggtcatagtgcatgcccctgtgaaaaaaccattcttgaatagaagtgtaatctttatcaacattgatattattatttgctttggaactttcatgtttggatgagttcaattttattgaccatgtacactattgcagtcagactcttgttgattgtgatgactttgtctgcagactttcaacaagtgataattacttaa

SEQ ID NO: 1384 - DNA, 910 bp, Oryza sativa
  Intron number 1 from transcript LOC_Os01g55880.1 (locus LO C_Os01g55880) derived from phytozome v7.0 (chr-ID Chr1; po s 32179376 to 32180285 reverse strand)
caattgccccaaaattgtaaccaaatcttgatgaagggaagggaaggagaaggcgaggtcagagaatcctaaacgttcgctggttcttggacggtcagtttcacccaagtgcttaacctgcagtcgatgcactcctgatccaggtcacacattctatccggtatcccgtcgacgaccgccacactttgagccagtggtagttacggccgagaagcgcgcggccctccccctttcttccccgttcgccgagactcgtcgacgcttccccgcctcctcctcccaccgaagcgcgcgccgcctcggccagaaaaggtatctatccttctctccacgctcgctacatggccggcggcgtagaccggagtcccattaggatttcttccttctgaaaagggttggattggtttcgtttcttcggttggtgatgaactgtggcttctttgattggtttcgtagcttttttttttttctggcgttttatcttgctgcgggcaaccccttacctctcccgtataacccattagtttttgaggattttgtttttttgcgtgatagtagagagcactgatagatattactcgaaacaaagcgtactggtaggttctagcactttattatttccaaagagtttgagggtttctttgcttactcgcctggaccacgttaggtgcgatttaccttcaataattcagaatagattgatcagtatctacggacaaaaaaaaaagaagatagtaaaatgtttattgcacatttacgatatggtagggttccaggcactacttgttagtttgttagttaatagtagtttgtaattatttagatgccacaattcaaagcctttcttagttacctagtgcattttgtactagttttaagcaaaatgtttttgttctctgcgcagctggag

SEQ ID NO: 1385 - DNA, 3080 bp, Oryza sativa
  Intron number 1 from transcript LOC_Os02g18820.1 (locus LO C_Os02g18820) derived from phytozome v7.0 (chr-ID Chr2; po s 10983576 to 10986655 reverse strand)
agatccgcccggtttccaggcatcccctcgtcgtggtaagccctagcttctgattgtttggttccgccgcgtgtgccccgctgagaaatggaatacttgttttgggatcccgtgcgattcgttgtcggagtgcgctgttggattggattagattggattggtcccccggatttgttcgatgctaggatgcaatccgtccgtagggttcgtggcagatatgttctgttttgggcgtgcggagggttcctgaatttcctatgatcctagcctcctagatgcatccgccagccccaagcggacaagctcgaggtagaaggcgaggcgagatcgggttacatggtgattgggttcttgtggagctgttttgacttgtaagctgggtatttttggcatgttggcagttggcatatgatgttaactaactgtaggggtttgatcttggtggttcgccgctagactctttcacccctataggaatctatacggtagttttttggtgtgtggcaatgcatctaacttttttgttttcatcggtctggttgttttagcatattgtattactgtatcaattttcctttcatgtgcatatcagatatgaaccatattggtagtcttaggggctctttggttgcctggatctaccctggctcgcatgggagatgcagacgcgtccgcttgtttggttaactgcatgccctttggagcctggctgagttcatgcaaaagtaggttagccaggcccgagagaaacggccgatttcttcttcgctcctcagcctggctcactcgatgcaaggtggatgcagcgcgggtgcaagcgttgcatcagtgcgtgcacgtgcgtggcaggggtctagcatccgctcacctcctccctctcattttcatcttcccattctcaattgctctcctcttcccctctctcccttgccgctgccgccaccaaatcccctgcggtcaccgctcgtttggcgtcttctccggtggtggactggcagctgacctcgagctccctcggccgaccccagtggagaagctactgccgctattacatcccttgccatctccatcgcgtcgatgcgctgcctctcttttctgtcgccacaactgccttctccgaccgccaggccaccagatccggtgaccatggtggcgttgagcagctgggagcgccgatgaagcaagtcaacgatgagattgagggtttttttttttgttttctctgttctattttctactgagagaagagcagaggagcgcgcatgtcagatcaggatgagaggccagcgaggagcatggtactggccggcgacagaggagctgggaacggctggcggcgatgaggcaagaactcatctcctcgacaacaaggaggaggacaaacgcttctctctctttttttttcttttttttttccagcgctttgctatcaaatggtggaggaagttttgttgactttttattttttgagaactcaagaaatttcacttttggtgcagagaatgccgggtgatttttgatgccaatattattctttgtatgtgaaaaattgtttatacctattgtctagatttgaaatttttgtaggtaacctcacccaactaaatgaagaggtaactagactcaaatctatccaaccaaccaaacaaaatcttttccaaaccgcatctctcatgcactcaaccaaacaaaatctcatcccaaccgggctaaactgatgcaaacaaccaaacagttgcatgtgtatctcttcatccaggctagactcaaccaggatgagagagatgagccaggctaggaaaatgcaagcaaccaaacacacccttaatgattcattgctgagctgttgatctatccttgctttatgcatttttggcataggatgtgagctcagaatgtaggccttccttggactgacttgctctccatgtttttaccaatgaataaattgtacttgtccaaaagtaagaattgaaattctttttgtttgcattgttcccatgcattcttaactcacaagagcaggacatcaaatgtgttatgaaatctgttggcaatggcaagcatccctgaaacacacaacatatgcagaataaacttaaagagcaagtgtttgatgacaagttttcaaatttttcaatgaaaaacccatcttaatgaatatgcacactgctgtacaagcctgtttgcaaaatttacacttaatatgctaggtccataattgcctacagctcaaagcacaaaaagatgtgatccatccctgaaatatcatgtgcagagagtatttccaacgagtgcacagttcaccaaaataaaatctaatgagatgaaaccttagctcttttaacctactagaaataactaaaccgttgaatatatatagcatgccatgtcacttttatttttatcaaaattggcaatattatgtcataaatatgattttcttactatctagcagactcactaaaacttggtagtttgaagcaaccgtttctagttgggcttggttttatattctaagcagtcttttgatgagaaatgttctttggtgccttagcgcctggctgctagtagagcatgacttgcatagtgcaccgtgctttggataatttgagatgcattttctttgctgcatctcgctattgtgcatgtgtgcaccttgtttgcctttggcagcactgctgctggagctggatgttctgtagtacaattttgtgaatatctcaaacagaagaacattgtgcgaggtgacctaaggtcaaatgataatctaagcatctgtggcaagttatatctaccacacactggttaccatagggaatctatcaaatggtaggttgttcgtgtccagtcactcttgatgtgctgttttctaatttttaattggagtatactgcattttctgattttcatatgttggattttgggatgtttgtgtcagtgtttttctgaagaattgttctaaaaacttcttacttaacttctgttatatatcatacaatttcattaacattttacatcttgttgtatctggttggttcaattaatttttaggtgcatatatatattgaaggcctgaa

SEQ ID NO: 1386 - DNA, 6750 bp, Oryza sativa
  Intron number 4 from transcript LOC_Os03g51690.2 (locus LO C_Os03g51690) derived from phytozome v7.0 (chr-ID Chr3; po s 29591254 to 29598003 reverse strand)
ctccggcagatcgcttcgcaatatcctttcctccggtaacacaacacatccatccatccttccatcttcttctatccatgtactaatccattgcatgtcatcttcttcgatcgatctgctggtttatatcacggtttcatcggctttgttcttgctgtcccttttgtccatttgattcgatctatttgctggtttgctgacggtttgatttggtctatttcttgcatctaccatgtgtgatttctgggccaggaaaaacgcatctgtgtgttcatgtcttttttttcctcgtacatgcatgcgtgtcagtgaaccctgcagatgatctggtctgctggctcggtgtttggtgctctaaatcccgcaagttctcatcagggtttccaaaagattcttttcccctgattgcttttcttggccatgcatgtgggattcttccatctgggcttctaccgctgatcatttcttctgttgggaaggaatagtagtcaccggcacatgtgcatctcagtgttcagtgcagctactagcacactgacgattttgtggtctggctcttcagatatctcctgatgtttttgctatatttaaaatcgataccctgattagaaaaagattaagctaaagagtttaagtacatttcgcaaaacctggggattcgggacattcgtaacattatctggggtagtgctaaacatttttgccccaaatcttaagtttcttgaaataaactgcagaaccttggggtttttacattatagatatcccaatacctagggttttcggaaattaataaatctactgtaagctaaatcattctaaaatcatagtacatcttcatctccatcttcatcttgaggaataatatgtccctaatatcattgaggttctcccttgggttctcttggcgtttatgcaactcttttatttttttttagataatggaaaattttatatactatgcctctcatgccggcagctggttgagtttcgattccctttctgaaagaacatgtgcatgtgactctcccgagtagagagaagaagttctttggctcagccacatcttttccccgggatggaaacaaaggcggtggtgatgagaggagtccgtccttaccatgttcttcttctagggttttgggggtaaaggctttagctcactgtgcaagcaaacagtgcgtagccgaggagtctcactgccgtatgtcagtggagcaaggacacacatgttgtgtgttttactgatccctctgcacaaacatctcacatagagagagagagagagagagagagagatgtacatgttcagagatgcatcccccatctgtcacgcaaggccagaacaatattcttgtcatctttcactccccctggagaaacgaagtggctacctgttgtcctagaatctctcttctcttggttatgtgaggtggtgttgttgctgtggtcttccagattgttgtgtggatacacagtgcctgcctgtgttcttgtggtgttcttcttttagtctttgctaaattttaaaatgtagacatcaggtggttccagataggccttctctaatgacctgtcacgagagcatagtaagtagcagtaccagcacacagttgacactctcactgtgcagggtttttcgctcatcaggagctgtatccatgcatgcacaggtgctgctactactatgccacacaatcacttcattattggagcatgtagtagggtagaagctgccatctcatgtgtgttgcatgcacagaagcaggatatcaatagtgaattcagatgcatatgtgtagaaattgattaaaaccctgaacaagtttgttgaaataggaaacctgaacaggtagtgaggtcagtcttgtgtagaaatccaatggtcagatagatgtattcctacacactctactatatacgtagtaggtagacagatgagtaaatgggatagtatactatacagtaggtcagtcttgtgtagaaatccaatgtacagcagtatactccatgacttggtattctgtgttttctgaccagtgaagtcgcatggacagaacggtcagagctagcctcgagaaagatacagttaagcaagagcatagcctattatttgatgtgagatctccttgcaatattttgggtgatctccttggctatactagtagtaccagtattatatactccactatagagtactactcgtgtattttttgccagtcttcttctagttctcttcattctctctcatagatgtaatggcggtcaagaaacattggatgctttccaaggctagtccgagttcaaatgcgtctgtatttttcagctgtcaactcatttcttctcaggttcaattgttctttgtcctactacttggacctaggtagacgcacatctactctatatgcgttctcttttccaaaaaatatgactggcttacctgattcacgaggcaacctgaatatcacccggtcaaggttgcaggtgatcattcctaattgtgtttaggaccatagcttgattttaatcacaaaacaacactgcatttttctgactgatgttgcacctgatgtactccaagattcttcgttgcatgcattctttcaaggccatgcaaaagcaggggacacagatatcacgagtttccgtttgtctcgaggcaacaccaaaagagatactgaaactttgcttgctaaaaagcaaacaaaagaaaacaatgggatggaaaagagctgactgattttgcaatggaacgtacgtcactagaaaagacaatgcatgcaactggaggacagtagtatgactcgacaaattgagttaacaaaaattttttggatgataattgttcccctcatgtctttttgtgattgccaaatcgatagtgttggttcttccatttctaaattccggagtttctgtgtctggcattcctttttcttgatgtgtcagacatcttctgtacatttagtctgaggttctgctgggtaatgaaggtcctcttcgtttgcttctgctcttaattttattagctgtagtttttggttaatgcaagttaaaacaaaaatatctctttaattaacttagttcttcaaaattgagtcttaaaaatcctacaaatattgcaacttgcatgatgcattccatcaatattttgtttgcatgcgagtgcagctcctagaacactctcttgcttttctttttccttttttaatgtaaagctgctatattcaataatatatattttcatctatttagtgaacacaaaggaactatttaggcagtgattcggctacctctcccagttgattgttctgttttttccttggcattattttcgcatagatactaatgtttcttatttatttatgaaaaattaagttgcgcattatttttatacatgattcatgttatattgaccaaataaagtcttatagaagtgcaatattttgtgctacacaatacaagatgtgctgtggtagaatttacccatgactcatattgtcatttttgaaaattttcccgtgggttacatgaaataattgtcttgctcctgtgaatatttggatgtgtctgacctttttatagatgttttacagggagtccgaccaagaatgcctgagtcaaaattagcttctgtattatctttccctgtttttcttcattttgcagagtaaaccaatgttctctgctccttacataagcagtaattcttcacaagttgggaacaaatgtggggaaaatcgtctaacccttcatttattgatccttgtttcccccctaatgtggccttatgttttagaacttcatgcaagtaaccgatatgcatgattacatgaatatgctagcaccatcatccatgagttgcaattgatcataactaaatatatattaaatatttaaaacatgaattttttaaataaatgataaataattgtgctgaaatgttgaacatacacaagtatgctactagtatattgttttaaagcaaatcgttacaaaaaaaagacacacatacctccaaatttacggctgcaaaagttccagtgtaaggatgggtgtagaacctggcttcgccctgcacttcttttaaagagcaagatgagatgatgaagcaatgccgcaagttcaaaagctgtttgacaagtacaaataattcttctttatattctgtagaaatgcacaaatacaaaattatggatgttgtaccaggcctttgtatcctacatttaactagaaacacatcttttcttagataggagaggttttgtggctttgaaaaatactcgtagggtagagaatttaacatacaggtggcaattgaacaaccattgtgtccaaagcgaagttatcttcttctcatttctaggatatcagctgattttcagtagtcttgtatgtacgaattaatctagcgtagtagaggagagaatacccggttcacccaagctacaaaaacaattaaaaagttgtgaattttcacagcaaaattgataccatagaatcagactccacaaaatttcaaatgaacagactacttatataagatattaaccattaagataaacagtttactggtgagatattgacttgctacacataaaaagaaaaaaaaactagcaccacagattatccaatgcaccaatttagccaatttatggcatcagtaactacgtgcatacactctaaataaacgaccttttacagtatttagcgctacatttagcattgttctttgcatgtagtaaataaattaaaagtactaaattattttcctgacaactctactgaaactgttttgagtgcaatcaatctatatattttgccttggaataaaatttaataggcctgtcgacctagatatcgctaggacctgtattatccttgcataattagttgatatttactccacaggaagaaaaaaatgttattccttactaaagctaagtaaacttgtcgtagaactatcgtagtactcatcacactcttatcccaatcaggactgtttacatcagagaaactatctcatctttgcactaaaagagcgcaaagggttaactacactttgacagttgtaattatttaatccaagacattatttaagagatttatatactgcatttcttgtacctaatatgcctgataattcactaaaacagaattagtcctcttatggttatttgtagggttcatttctcatgcagtgctctgttatccttgaacatggttattattttgtttaattaattttataccccctctgttttaaattagttgttgttctaggtttgtcctaagtcaaacatttttatctttgaccatcaattttttttttagaaattcttgtagtttaagagcatgcgaattatatatgttgagaaaatattttcttatggtgaatccgaaaacataattctaatgatgttaaaccatatgaatttctagaaaataatagtcaaaagataaaaatgtttgacttaggacaacaaagctagaaaaagtgatttgaaatggagggagtaattcttttcagatgctactcctttggtcataaatatttgatgtttaggacaagatttggtctaaacttttaaaattccgacaatgaattttatattggaataacttaatcaaatctaatacatttatggtattataactttacttttggaggtaaatctacaaaaagcatttcttttgttttgaatataagcatttgagaaattgttgatggttgaaatttcaagagtttgaagaaatcttgcgcttgcaaatggttttgatcagaggaagtaattgaatggttctttttctgaaaaaaaaaattctaacgatgaaagataagcatattcaactggtcatagtcttaccattttatttcgttgtgtcagaatgtttttaagatctagctattgaatactccctttgtccctaaatataagggattttggttggatgtgacgcacatccaaccaaaatcccttatatttagggacggagggagtagataatggctagacaaggatgtgttgagaatattgtgtgcttgctttgtacgctgttttacaaacactaacttattatggatgggttttcttaacactactcctgtacaataagtttttttttcttttttcccctcgagagaatgaggaaagatacttaccatttatgtgaggaaaagtttacaagttactatcacctgacattttacaccagcggataaattctattataagagtctccttaaaatgggacaccttcttcttctttatataaaatgtaggcaacggcatgactgttcaaaaaaaaaacttctattctaagagcaagtactgtgttgccagtatcttcattttcgtagaccatcatctgattttgttaagcacagtgttcttatgtatattttctgctgcaacttaaattctctcgtttgaattcatagcaaaataggttgcctgttttgtcgatttcgataggtacagcgccagctacatatattgtaaagctaatatgtagtttacatgttattctcgtccacccttgtaatcaaatatttatcgtttatctgactgcattctttggtctacttaatttaatttgaataactactgaagagatctacacgtttttcctgatttcttttgaattagtctacctatgtgaaccataatcaatttcttgtctttgctaactatttcgtgtgacatgtttgaaggctcttctgaggaggaccaagaaggtagcggagga

SEQ ID NO: 1387 - DNA, 5354 bp, Oryza sativa
  Intron number 1 from transcript LOC_Os03g13614.1 (locus LO C_Os03g13614) derived from phytozome v7.0 (chr-ID Chr3; po s 7362956 to 7368309 reverse strand)
cgccctgtcagctccccctcacctccatagccaaggtaaggaaaccctagcagtgtgtaccatctctgatattttgtttataatgctagatctgcgcgattccgtttgcatgatatgaatgtccttgctgtcaacatctgttcaagcacactgcaatattttcgtttatcaattattacacagtagttattttcctgacgtgaacaagtattactatgtgatttgggcaagtattttttgatgagatgatttatgcttgagcatgacatggcaacgtgtttatttttctttgattgttgtattgtagatggataagaggaccaaggttttaatttttgctgcttctgccaatctattgttgtcaatgatggccatgattattcattctaggaaaagaaagatagtttctaggagggaaggtgttaaatatgacccaatggttgaaagggataggatgagaattgagtatctaaacacaaaaatttggaggaacgataacatgcttagacttagaaaagattctttctttcggttttgtaagctctttagaaatcgtggtttgcttgaagataccatccacatgtctattgaggaacaagtaactatgtttctaaatacagcagggcacaatcttagaaatagataagttggcactaattttgataggtccggagaaacagttagttgttatttcaacaagtgcttcatactgttggtgagctgcgagatgaactaatcaggcctccctcattggacaccccaagtaaaattgccgggaaccctaggtgggatccttactttaaggtgtgagattcatctgtgtctcattttcaattttatattttaacaaacctcaatgtcccctgatcttttatggtgttgaatataaaataggattgtatggagctattgatggcacacatattagagcctctgttcagaagaatatcgagccctcttttcgtggtaggaagtctcatgccacgcaaaatgtaatggcaactatagattttgatcttcggttcacttatgtcttggttggttgggagggtatagcacatgatgctgtagttttaagagatgcattggaacgtgaaaatggccttataccccaaggtaatagattaatttagttcatcaatttctccatctcaatagaaatgtgaccaacttgtccatcatatgataggaaaattctacctagttgatgctggatatggagccaaaccaggattcctccctccatttgtccggtaccacttgaatgagtgggggaataatccggtgcaaaatgaggagttgttcaactttaggcactcgtcccttcgtgtcacagttgaacgtgcatttggggcactaaagaggaggttcaaaattctagatgatgccaccccattctttccttgtccaactcaagtagatattgttgtagcttgttgcattattcataattgggtcatgaatgatggaattgatcagtatattacagatccattagatttgataagtgaacccacaaaagagtcatttgggtaggcaacagagccatctacgtttaaaaagtttggctagttgcattcttcgatggtgtctgtcccataaaggatgggtgctaagtttataaattttcttaggcataattaaattcccacaaattggataaattgaagtcatatgtccactgtcacccagacgattaaaccactcaagcattcatacaagtaaaaacaaatattaagtattgtaatgacgacgttttctgaagtgatagtagcatcaaacggatatgcatcaaaagaaaaccaacataagaaagataggaggcacataaaaaatgccaaacccacggatcctccacagcaattccatattctaaatcctcaaatcgcgccacggggacatcgagcagatctacccagaaccctcgccggcttagaattcacgaccggattcggattccaccgcccgcacgagcgaaaaaaaagaccagaaacaaatcgagagcttaagtcacacggtttactgggagggagggaggtcgaggcgctcgcgacggatctccactccacgccaatccagcagaggctgggcggcggcgagaggggaagcgcctcgaggtggcgccgcttgctccagcgggaggctgcccccgggttggggagcacttggatttgcgaaatttgggggaggtgtggcgagggagggagggaggtagaggcgctcgcgatggatcttcactctgcgccaatccaacagaggcggggcgacgacgagaggggaagcgccccgaggcggcgccgcttgctccagcgggaggctgcccccaggttggggagcacttggatttgcgaaatttgggggaggcatggcgcatgagaaagagagaggagaggaaaaaagttggtctaaaggcgtactccaatcacgagttcacgtagtccggaaggtgacctcctgagagagagggcgaataaaaaaacaagaagaagagcagctaagacaagtgtgtggtttgttggttgtgtgtgggcctggagaaaaagaatgcctggcccattacagaccgattccgcttccggctacagtaccatactaccatgtgctccaattggcacaatactaagctttttctttgcaattaaaaaaggacaactttttaaatccaaaattttcacatttaaaaattttggatttacgaatagatctaagtatatattttttagtttactttatcaaacaacgaaagtgatgaacccctacatacccctacaaataattaatttttaaaaaggcatgtttagtttcaagtcacctgaaaatacataaatctcggtcttttttagaccgtcaagatttcatccaaattcatgtggactttttctctcccccttatatcttctcttctatcgaaaggatggatgcacacaagcacggaacttatgtttggtttggggacctggtgggatgggttaggtccattaagggggagagaaaaagtccacatgaatttggatgaaatcttgacggtataaaaaagactgagatttgtgtattttcaagtgacttgaaactaaacatgcctttttaaaaattaataatttgtaggggtatgtaggggttcttcatcactttcgctgttcgcttaagtaaactaataaaaatatacagagctattcgtaaatccaaaatttttaaatgtgaaaattttggttttaaaaagttgtcatttttaattgcaaagagaaagcttctatactgtgccaatcggagcacatggtagtatggtactgtaaccagaagcgggctcgggctttaatgggttgggcatttttttctccaggcccacacaaccaacaaaccacacacttgtcttagccgctcttcttctttttttttattcaccctctctcaggaggtcaccttcccgacgacgtgaactcgtgatttgagtgtgccttcagaccaatttttttcctctctctctttctcatgcgccacgcctcccccgaatttcccaaatccaagcgctccccaacctgggggcagcctcccgctggagcaagcggccgcctcagggcacttcccctctcaccgccgccccgctctgctggattggcgcggagcagagatccatcgtgagcgcctctacctccctccctcccagtaagccgtgtgacttaagcttctagtcttcttttcgcccgcgcgggcggtggaatccgaatccagtcgcgagttctgagccggcgagggtgctgggtagatctactcagtgtccccgtgacgcgatttgaggatttagaatgtggaattgccgtggaggatccgtgggtttggcgcttttttttttgcctcctgtctttcttatgttgtttttttttctgatgcatatctgtttgatgctacatcacttcagaaaacgtcgtcattacaatacttaatatttgtttttccttgtacgaatgcctcagtggtgtaatcacgtgggcgacggtggaaatcaatttatccagtttgtgggaatttaattatgcctgagaaaatttataaactaagcacccatcctttatgggacagacaccatcgaagaatgtaactagccaaactttttaaacgtagatcaccaatacggacacaagtattttgattaccacttaagtttactacggagtaccatgttactggaaaactactgttagagaagtgtgtcggaaaccgtgtcaaaatctgagataccattattcatgcatatggaaaataattatggagtggccaaacccctaatgctggggttcagtcccgtgtcatggctagttggctacacggtcctgtgctcccaccactaaaaactaagcccagttctgctggcatacagatagactcatcctataaactcttaatcaactgaaatatttctacacctggctgcctgaaggttttagtggattgtcgtcaagcatgaaatatctatttcttgataatttgtgtggtgcattaaagcagcacgcattccttacctaaatgcctttttgttgacacaaaagcatccctgattgcaatacgtgaatagccatagcctttttacaacaaaggcactaattatctaattctaatagagtattgtccaactggggcataaagatttaactaagtaataagaatgcttgtgatatgtttttctagcagtctttttttttctttccttttattttctaggaaaaacaggagcataatatgaagcaaaagcattgatccttgtgttaacagctactattaataatagctaatgacaaacaccttaatgcgaggtgcatcttgcctgacgtgttggatgaggatgacgccataagttgctgcttaaaagaacctccatcgtcaattctacccgcatttacttgacatcagcggacagcttgaaattaattaggagtctgattaaaagttaaactactgaagagtttgacaaaatatgctcttaaaattcaccatcttgggggtccttatagaattctgtacctgccaacactcaaggttttaaaagttaaaaagtaaaaatatgtcaaacatggattctcatatcggtaccgtgtgaaacagcccatcgtaattgatggccacgtaattgtgatatgcgcataacgctatcatctgtttgagcactcatggtactatcatatatttgatacacatatctaacttgtctctctcttgtagtcagcttgctgtttagaatattttgattagcattcctttccttgttttattagacaaaagttattaatacaccgtctgatcttcctttgtacttttgttccacagtgctagccaataagaaaattttctgccgcatccat

SEQ ID NO: 1388 - DNA, 1944 bp, Oryza sativa
  Intron number 2 from transcript LOC_Os03g44900.1 (locus LO C_Os03g44900) derived from phytozome v7.0 (chr-ID Chr3; po s 25332845 to 25334788)
cgtggatccagtccagcgagatcaaggacaagaaggtgagccctcttaacttcttagccgtagccggtagcttctctttagctccaggggatgcggttcatggtgcaatgcactgcctcctgtgcttagaattatgtatgttctgctgttctgtccagttaattgtacggagaaactgatgattttagaagaaactccattaagttacgccatacgtgcagtgattagttttgttgagtgaagacttatatgcttgctgattggtcagtacaaacactgatctgggaatgctctttattttacctgattcagttaacagaactctaggtgcctatcagctttcctagcgagttatgtattatacattatgtggtctgcggggagtgcgtgaaaatatatttgaggttactgttggtatgcaacgccttttctcttttcgtgtttatgctgttagtagctgcattgttgtgtagcttcaatctcgatgtgatgctattgccactaagatgggatgctgattttgtggtttgtaggcttttcttttcttgttgtgacaaggaaatccattcttaagtaagttttcagtagatgtttgtaagcctgttgtgatgctaaattatttggcagaattatgaatagtttttggggataggttagtaaagatgatgagaactgagatccacttttcaatactatccatggttgacatttgtatccatatttactgtggtgtttctaaatctcaattaagagtgagtatagaacattcctgataattctgaatgatgatgtagttatagttggctcttattggctcactgcggcattcatacttttggtaactaattttaaaatgttttcagttgcattttatggaactacataaaacatatctgtacttaaagtatgtaactgcagcattagttgcagtagggaagtaaagaggaatctggatgatgtattagatgctgttaatcaggagatccagtagatgaacgactctggtacaacagagcattttggaaattatttttggtcttcagcccaaaacatggcttatatggcagtctggtgacacagttttcaacttatgctgcaattgttatatgactgaaatacttgatcaaggcgtgcaacctactgtattgagaagatattttgttttaaggcatcctcttcacttagactactgtttgttgcagtatgtctcaaatcaatctgtacagatggccaccggaatttcagaatttacctgaaggccatgctaaacttcaaggtcacacaagcttagggacaaattcactgaatctattgcatattgattctccttgaagctctttttgttgcttattttccttgtaaattatttttgaaggtttttgtttgtaaaccagatgcactgttatttcaataagtccatttttttcattcttaataagtagtccctctgtcccaaagtgtagttacctttaccattcaaaatttgccccaatcacaaccatttcccatttaatttctccacctatttcctcatctcaaccaatcacaacaatcccttgttttatttaacttttctccttaatactagtgcctgactctaaaagttcttacattttgggggcggagggagtatttgcttcatcttgctgttggtacttgttaaccttggttaaccattctaattatgaatactacgaaacatattttaccatgaacatatgggagtgttccaataaagaaatggagcaggattcacgattatagttttaaaagcagtattctgttcttcccctctgaatttcttcttcaatcatgttttttttttgtatgatatattttgccgttgcaaatgacttttttgttaacattacttactgttctgggtttaacccatttataatatatgtgttgacataggttagtgcctcttatgagcaggctctt

SEQ ID NO: 1389 - DNA, 8719 bp, Oryza sativa
  Intron number 1 from transcript LOC_Os01g17214.1 (locus LO C_Os01g17214) derived from phytozome v7.0 (chr-ID Chr1; po s 9892752 to 9901470 reverse strand)
cttcttctacatctgggtcgtctgcctctgctcctgtaagaacccaagcttgagctagctactatacctcttctttctttttttattttttttgtcatggtttcatccattttgccatgcatacgatcagacacaactcttaattactccttaatccgctcttattatcttttgaaaaaaacattttgattaatttacttgcgttttgttttagatctattagttgttggagagtacgtacgttcaaagtggcaccttctaggcgcacgctcacttggccttcgatagggttcaatttttacccacatctcatatgtaatcaatacaaaatcaaaatctaaaatacttagactttatcaaatcctaaatttccttttttttacattttcaatatatttatcttatatttttataaacttcaatgtaatggttgtttaaagtaaatttactttaaggtaaataggatgagtcaaagttaaacttacttggagactccacgtgctatcttcacttggactaaaatatcaagtatactagtactttccactagtataactacctgatcttattcccttcactttgcctggctaaagcatctgtttattagtctcttgttcttcttctttcatgctgatgcaccatgcatccagaacgagcagttgaaaagtcatttaactggaggactaatttcttaagttaatcgcccaatttactgtgcagtaaaaacgtgccattgctttaaccatgggggttcaaagaagttaaagcagacgtaactacccagacgctcagtgaataaattaagtaattaaccgtggttaatcaggtcacaagaaaacgtactactagtagtagtgccactggccggaaaggaatcattttcacttgtcacggttccagacaacggggctcattttttcgcttatgttcctacttattagccaaaatttaaaattttaaccttaaatttagaattgattttagggttttttttaatcgaagtttatttttcaacctttatttttatttttagatcgctaagaacacgtatataaagttttattcacaaattattttttatttgcaaatataccgaaatgatgggtctatctaatggggccccatggtcagtacagtatacagtactccctctgtaagaaaaacccaatctaaagttgtgatctaaatctagataaatgctagcttatctagatttattattctaaaatatatctttaattttttttctggacgaagagaatagtcctaaaggacatgagaagagtatttattgcacggagatgtttcagcagatgtagaatgtcagcatgtgagggcagcaggtgcggtgttgagagtccattcaaacttaagccaccaaagcgtatgcatccaattcccgctccaaattaaggcaaagttctttccagacgataagagagagaatatcggcttttgtgaaaatatttgaagagtacagacgaatgataaattagttattctaaatttaaaaggtaatttaaactattaaaaacgttaattgaatatatatgaaaaaaatatagaaaattgcatggtttagaatcttgtgagatgcatatatacgtgataatctataatctgtaagagaaaaaatacagagatttggcttgtttgtttcataggaaatatggaagaaaaaccattcctacaggaaaaatcactgtttatccattcgttttgtaggattatagcaaaggaaaagcataggaagaattcctttgtatgtgattcctatggaattttgtaggaaaattaacatccacttggacctcttttttctattcctacgcataggatcaaggcaaatcactcgtttcattatgtatttgaatctaagttacacaaattagagtattcaaatcttggttgtggtaacttaatacaaagattcctgtatttttctatctaagagttattcctatgattttcctatcctaagttttgcacatacattcctatgttattcctacgtttttccttttcctgtgatttgaaaatatgaaccgaataggcccttaataagtccaccatgggaatggaacagttccacttggtcgctcattctcccacccttttccttggaccatggttgcgatgctagcataaaggttgaaagaaacacatctatatcaatatcagattgacgtgacattttgatatgatcagtttgctctactactctgtcgaaactctcttatgaccgtaaatccagtgttaaatttttagtgatattgcatctacttattttgcatcggtcatataataaacactacggagtatatgctagatacaaacacatcttttccatttgtaaaaatggaaaaaaaattgagtgccaaaactcaggcattgtacggaaatttgctagagcaatagagcatcactaaaaaaaaacagaaatatgctgctcttgggaagggggaaataacagaattttacacagtgctgtatatgtgctgcacaacacaaatacacaaattctatgcaagttgagataaggtgattccagtcgagggaaatgcaaagcattgcacctcatccacacgtgaatacgtacgttttctgggagctatatctggcacacagcagggctaagctttccctaccgtgcgaagcttcctggaagtttacctgcctgtggccctggcagtccctcgtcgctaccgccctgcaaaaaagatctgcgatttttcagtgaaagcgatggctcatggccatcgacggtagtactatttcgttgcatactcaacacccccccccctctctctctctctctcttaaaaaaaccaacctataacctaaaaccaagtatgacacattctattactacgaatctagacatacctctgtccagattcatcgtactagaatatgtcatattcggttctaaatttgttttttcgggatggagggagtttgcatgaaattctcgtaccagataacttgactacttgaggtctattccctcccttaaaaaaaacatattctgatatttctaacaatacatctgaaagcatagtacaccatgtcacatcgaacgtttgaataattacatgaagtattaaatatagtttaaaaaaataactatttgcacatattacgactaagttacgagacgaatcttttcaacctaattgctccataatttgaaaatgtggtgctacaataaacatgtgctaatgacgaattaattaggcttcgtcacgcggtttactgacggattctgtaattagttttttattagtgcccgaacactctatgcgacaccttatataatatccgatgtgatacgccaaaactttacacccctgaatctaaacaccccctaatttagaatggaatatgatgttttctaatataataaattgttagaaaacgtcacgtctcattttatgggatggatgcagtgtgttcagattaatcggcaggattgtattttttaatgacataatgtgtaatgtgtagatatctactttcaaaacacggtattttcattttatttgcatggggaattaattaaaccattggataccgtttgtaaaagccttgtgaaatttccctgttttttaactaagttttctgtgatgaaccatataatttctcacattttaggataaattttaaatacaatatataggttgttccatcctccagattgataacacttgtttttttagaaggatacgatctctaaaaataattttgatcactatttttttttattataatacatatacaaatatcaataaatatatgattttattgaagtacttttagactaatctatatatacacatggcctccatatttctaagacaaatattttaaacattattcataatcatatatttcaaaacttaacattagcgttgcacaaaaccacaagtaatattaaactggatgaagtatatttagtacggagcgtgcctcggatttaacatagacccacgtagttgctaactccgtcggtaaaggtccattactagtctattaggcaagagaaggcaagggaattgagagtttggacaagggaattggtggaagaattggtcacccaagttttttttttactctgtctcttgtttgatagtaaagatgatagttatgtgagtacggatgggaattgaattttaactaataatgtacaccttagatttatctgtcgtgcctagaagaaaattccccttccgattatcacttatccttattcagatactagtaatcgtgcacgtgcaatgcatgtttccaacatataaaaacactcaaaatttattgcattttcctgcaatatatgtcacccaaaacacacaaacatactaaaagtttaagaactatttctactataatgtaatttgacatactacgttaaacatccatttaaacacaaaaaatgcaaagcagctaacaatacaaaatatataatttgtcataccttaataaacacttgaaaaatatcaaagcaagatatttatctttatggcattgaaatgaactccaccatctacaatatggctatatgggatattgtttgaccatttttttttactccttgcctcttgtttggtagtaaagatgacagttatgtgagtattgatgggaattgaattttaagcaataatgtacatcttagatttatctgtcatacctagaagaaaattgccctttccgattatcacttatccttatttagatattgaaaatgtaaaagtttgctcctaaactcctctttccgaattccgatcctttttaaaactttcacgtctaccaactaaacaatatattttaacagccctatctctctttaacaatttccccaattaaacgtgcctttgattcaaaatacgttttacataaacggacacgtattcagcaagtacggtttttaattagcgagatcacgggaccaggtgcttgcagaaagtcccacaagtagacgtggctgtcagtgtgtcacccatgcggaggtccatggggtccctactccccaaggatggctcactgggctttaattaagagtgctcctagtcctatagcacattcgacacattatatggaaaaagaaattcactctaactacaatgcttgtaatgtaaatacaattacagtataagtatggtgtaaatttgttttgatatcaaaacttgtgctacctcagtggtccaaaaattgttttttttcttccaaaggctatattgtaagttttctagcaattccattaattaatagtagaatgaaataatatagctattagaaaatgtattatgtcccaaaaaccattataagttttctagcaattccattaatcaatggtactatatactatataattagaaaatatattgtggatgatatatggtatgttgaggggtgcgtctcacaatatgatggagacttgacctcagagtttacaatacgtaccgttctgttgttgtggtaaccacctgaggtaatcttcttagttttttaaaacatcagtttttaaactgttgtaaccataatattagggcccatttgatttggatgaaaaatatagaaattttagaggattttaatcctacaggaaaaattcctatgaatgcctttaaatcaaaggattgaatcctatccaatcctttaaaacttctatcgaatggacaatcctatagagattttagaggaaacttagcaaaagctcaaagctcttggaaaatttcctttgagtctatctctctcatcttattcctatgtttttcctacggtccaatcaaatggtcattcctgtgtttttgcagtcctctattttacacttccatcccttattagaatctggtgtttttcatatttctttattttctttttcattcatgcgattcaaaagagacttattggacaacgataacctcaccgaaacggtaagaaaaaccacgcatactatgagcggaggaagtaattgtctacagacatctatggctctaggcccacatgcacattactgtctgtgcagtacagctgcaggtgacagtcccgtccatcaacaggtcccgaacttctaaggccatgtacaacgcgtgaccttggcatgtggtttcaaacctccacgtcggacgcccgcacccatggcagtggggaccgtggctctgcaggccgaatccgcgcttgcagaggaaccactcgaagcgccgcgcctgggctcgggagccgcgaagccacaacccgaggccacgcgttggcggagccagagccccatgcgtcgcctcgtctggtcggtcaccgtggtagtcgtcgccgctcaccgtcgccaccgtcgccaccgccgctccccgtcaccgccagatgcgaagaggagcaccgccgacgccaccgttgctcctcgcttcctccccgccgccagatgcgaagaggagcaccgccaccggatccggcgagcccgtgcccggatctggcgaccttgggcgtggggcggcggtggaagaagtgggatgcggcggaggagggtgtgggcgtggcggaggaggaggagaggatggcgcggggaagagcgcggcagttgagaggaggaggaggcggcgttgtcgtggcgcacaagaggaggagcggcgcacgagaggaggagcggcgctgcggcggctttgagaggaggagcggaggcgacgagagaggaggcgttagagaggaagaggataaggcagagccggttggtagaagagaaaataaaggggagaggattggagagactgacggtgggtccatatatagattaggggtatctatacatttctttttgttgttagaaggactaaaatagttaattttataataacaaatattatagggactaacacatgaatagataggggctgaaacacaaaatatactctacagtggtctccattgtagacattgtggtttttgtgtggccttatcctatgtggcaacctgagaccacagttgcttgtggctaccattgtacatgccctaaggtgtctgcatccagcatcctatgtgatcttatttctttctcattatgctctcatgaaatgacattcattacgaagcgtgatatttgaccttagtgcccctttaaatcacaagactaagaaaacatagaaatagaaaaaaaaaatgtaaaattttgatataaatgtaagtgtaaaacagaggattgcaaaacacaggaaaaacacaggaaaaactgtttgattagaccgcaggaaaaatacaggcattaaaggagagataaagactcagcagaaagtttccatgaggtagatcatcatggtttacctccaaaccttgcatggcattagacatttcatagtaattgagacgttttctaatactactaatttggacatgctgcctgtctagattcgtagtactgggaaacgtctcatccagttctagattcttatatattgagatggagggagtaataaattaggccgaaaaaaataccgcaatgaccggctattttctttcttttttttagtccaaagtcgaaaacaaatcagagtcgaattggcagtcgtttaaatagcctaacggttcgtacataatttcacaaactacaaatatattgatcaaactaccttaaaactacatatttaaggtgatgtatcacaaaactacaaatttaacactaaatttttatagtgttcctcagccaattgttggtgttttttatttttaatatcattattaccatgtatgccacaagctagaataatcaagaataatatttttctctctttacgttcttaatataactataattgtgtgtgtgagagagagagagagaggagcaatatgcacacttgtacttggcagagaagccgtttcaaaggagagatttaagccgaccctctaatgccactgcctaaacttagccggacaaaattaattaagacaaaacacccaaaaaaagtgatctcaacgctttagcagatcaatgcttgcaattaaacccccattgcttacttcttggcgaaagagaggagaatgcccggacattctcacaaaccaagcatcatcttgatgtggattcagacaactaaacctgcaaggagaagaggagcaaacgtccttgcccgccattgcggcgatgaccggaggcggcgatgccgatcgcaatgcgccgttgctcgccggcggcaggaaggtgtaccatgaacgctgccccgggtgcaggcagcagaggaaggtgcaggccaatgacaggcttccctacctgggtttcctctacacttggatcgcttgcttgtgtgccggtatggtatgcaccatctttgagaggatagatgtttggttaggatgcaggtgttgatctgattttcatcttgtggatcagctatttggttgtcacttgtcacaagttgtggaatgtagaaatggcctttgcaattgttaagattgtgatagtggtgttttgatgatttatataatatttaggagtagacgatgaatcgatgatcttcatgatattgcgtgtttcgacaaactggtagatcttatcagattcagtagtctcattcttttgtcaaaaatagacatacttttatttgtttcggttcagttgtatcaaatattattttatctctattcctgaaaaaagaaatcccattttagctatagttgactaataccatggtcttttgcctttccagcgttgccaattcagtcgttgtttccgtatctgtac

SEQ ID NO: 1390 - DNA, 2552 bp, Oryza sativa
  Intron number 3 from transcript LOC_Os11g01370.1 (locus LO C_Os11g01370) derived from phytozome v7.0 (chr-ID Chr11; p os 227666 to 230217)
acaatttctcctcttcacaacaggtgatcataaaacttgcatttctgatttctctatctcttacctcctctctacttcctctctagttcaagcaatggcggttcgttacgaacatcaattagttcctccagggcagggcctaggaaaacttaatttggtaaccttgaaatctttaatgttgtggaccactgtcggtttgcaataggacaccctacctatccctgataaagtggtttgttactcctaattacgttctgtacaagcaagcttcctcttgttccagtctgcagagcacagccactatgtcattgtccaccagaaaatgaggtcagttggacccgtttgttaggtttgcacgtgataaactaggaacaaatttgcctgactttctggggttttagagtctttcaaattccatagttcactagttggtcttggaataattccacactagttcactagtaggtcttggaataatcactcctgtatccgtatatgcatcagaatgacagaaagtatggtgctatgcacaaactagttacttcggaacataccaatgtctgaaatcagaaggcgtggtgctatgaacttactggattaacgcacctcattcctcaccttttatatatattatttccaaatatttaagaacaagtgaaccaattttaagtactttagtttggaaccactagtattatttcttgttttgtgtgattctcaaaggctctttgttcttttctggtttgttgcttgtgaagcacaaggtgccacaccattccatcacactatgcacgcacccatgtgaaaacaaccctccttttgttgttgtaccagatggtccaccaagaaatttgttgggttcttatattgtatatagacacacatatatatagactgggagtgcacccttggtgattcttttagtgagttttcatggtttcttcaaacaaaaatgcttctgtgcttgtgggtgtgggcaagcaatttaaatttcaaatggaacatttgggataggcacagtatagcctacaagattttgcatgctttagtgattctggcccattttgacaagacaattttcagcaaacataaaacgacgtaatgttcgaaatgttgtacctcaaggaaactgttcaccaatctcagagaaactgcaatgatgtggataactaccatacccacatacacaaatctcactattaaaaaatattgatattggctttgcctgaaagaagagtttctactgttaagaataatgatctgcaaaactaaatgcagtgtaaaaataggcttaatatgcttcttaaataagtctttgtttgatactccctctgtttcatattataagttgctttgacttcttttctagtcaaacttttttaagtttaatcaagtttatagaaaaatgtagcaacatctttaatacaaaataaacatattatcaaaatatatttaatgtttcatttaataaaactaatttggtgttgtaaattttgctaaatttttctacaatttggtcaaacttaaagaagtttgactaagaaaaaatcaaaatgacctataatatgaaacggatggagtacatgtattgggtagccatttttggaaagttgaatttgcaatcttttgagttaggttggtagttggtagatggcaaaaaatttgggggagtgttacttccaacaaaactctgatgcttttgctaggagaatttacatagaaagattagtctatgtcgatgtcacctagaccagccagaaaaaagaagctgtggtagtagattctatataaacagtaacatgaaactctcatgtatgctctttgatgtcaaaatctgatgtttgcagtagtaagatcggtataggtggccgttggttcaacactgatgctgtcatcaccttttgccaatttaatatagacgagccctgcagtgagcttcatagtcgcactctgttcagatccattgctaagacattttaaaaccaccttactgttgaagttagtgctactggaagtctggaactgtggaatatactaaaatataggcatcgtgtgaggtggttgtgagtcttgtgcgtcatgacctgtgcaaagcaaagtactatgtgtactactagtatattttgtgaagttattatcggtgtcaaataatagtaatatttcatcttcatctgacatcctgaccctaatcctttcaaccatgagataaagcagacatcatttggtgctttaggctttaattttattccacatcatttatacatatattgatttgcaaatgatttgagcacagttgcttataaatcaagttgctctcctgacatgtcgggatatttacattctgatgcactcatgtaccagttgaaattatggatagaatttaaattgattgtgtgtttgtgtcagcaaaagaccagctactgtttgttgttgtattgaaccaatcatatctgctcttgaattaacattatggtacatgcatttctaatttatttacatcgctgaagcatttttcccctcttgtgatgctatcttaaaaacagcccagcaca

SEQ ID NO: 1391 - DNA, 3153 bp, Oryza sativa
  Intron number 3 from transcript LOC_Os09g29670.1 (locus LO C_Os09g29670) derived from phytozome v7.0 (chr-ID Chr9; po s 18045202 to 18048354)
ccgtcttcttcggccccgccgccgacaccgcccaggtacaaactattttgtcccaaatacaaattatgcatccgtatttgcaaagttgtacggcaaaatgagaattgttaccaaacatactgtatcagaattcagaattcggatatatagggaaaagttattttatgaggggatatatcctctcgttttgtgcgtgtcacctaaataattataaaaaaaaaaaaatcggtaacatagattaatataaaatatatcactctacaaatagtaaagtttaaattcaacttctacaagttgtaacaaaaataacaaatatagttgcgaatgtgcaataactattttcagtttaatttgttatttttgttgcaacttgtaaaagttaaatttagtcttgcatattcgtggagtgatatattacatattaatctatactgtcatttttttatttttttaataattatttagatgacatgcaaataacgaggagatgtctctcaagggatgaaaatccacatccgatatatagcttaaatgagatgagaccggttaagaaatccgaaagccctagccctataccgtttgcaactgtagatgacgctgacttagcttactcatgaacagaagcaacagaacacattcaatgcactgaaacacactcgcacagtgactccaatcagtcggtgacgtgcgaatttgcaccttcttgtgctttctgtagcttacccttctgacggattcattgatcccaacaggaagacgcagctgcagtagtagtcttccggctgcaagctgccgcgtgccagcatcatatctagtatacagtggtgcagatgcatcagttttggcaaaatttcagttctgaaagctgcaaatcaggttctatactactatgcaaagatcctacaatacagttagtaggtaagacacactgcacaaatcctgaattcctgatacaacaaaggtatcaggtattcaagtgtggtttgaagtcgaaattaggaagcactaggtcaccacgagatttctaaagctgcaaccgccgggaaccggtttgtgaattcagaaatttggatttaaattaacttttgtccagttatcggcaccggttattggtttttcaaattaaacctaaatacttgacctggcctagagtagggaagtagtacagtcattccaaaatatagaaacttctaactgatacatacacataaattttagtattttgggacgaagttggtaatatacataggcagaagttactatatgtagcaaaagaaaaccatgaagttaagtagaaaacaaacgtcttttctgatttacaatgggatttgtggcgaatggcttgatcggcgcttaagacaatagaaaaatgttgtgcgcatgatttggacttacaatcatggtacgatctaacgggatgacatggatgcatggcactgagtcgactgctgcataccagcatcagcgtcaataaacacataagctgtttcatcgtacaaatatcgtaaacggcaaatcatacgtgtagcatcactctaggctcagatctgcaaactgaacttactggttgctaattaagcaaggatcattatatctatgatatggagtagggatgaaaacgactcggaaacaaacagaaatcatctctaccacttcattttatattttttttgggcatcggaataggaatcagaaactctagatacgaaaaccgaatttattattattgaatatgaaaacagagcgaacacaaatcgaagctaatatggtaacagatatttatcggattataaaacctcctcaaattgaacttctcaaatcgacaaagtgatgtagctctttttttttcctagaacaacaaatcgacattatctattttttatcaattaataataatacagctagtggcacacttcacttttcatgaaaacaagaactatattcatctatactgtaactgtaagtagtatggctcaaaatttctgaaaatttcaggaattttcatactttttcgccaaaattatttgaaaaattaacaaaaattgattgaatattccaaaatcacaaaaaaatgggaaaaaacaaaaattctggctgacatatttacttgccagtgggggtggcgaaattactgaaattttaaactgaaattgacaacctttgtttggcatggcctagtaaaacaaaaatagtaattaggaaaaaagaaaaacagatctaaagtactgaactagaaaacaatatctccattcaactaattaaccatctcagtgtactcagtataaatctaaacatttagagtagaaaaggttagagcaaattagttgtatgtgagaagtacttcatttctgattctgaggaaaaaaatccgaatttgtttatgaaaagttctcgatcgatcctggtttctgacggatagtagccttatcgtatccattttcattttcaagaaaaaaaatccgaattcgtttccatttctgaaacttaccgaaaaaattccgacactttctgttttcgaaaatacatccggaaatcagaaactttctgaaccgttttcatccctaatttggagtaacctagaccgtgagatgtcacactagtttcgtgatggaaagcatatttctcctccctagcaaatctgtgatctgtcaaaatcaaaatagggttgaacaaaacagcatttgtggaacaaaatcaaaacagtgttgaacaagtatagcaaaattttctatgccgcttatttttgttgaacaaaacagcatccccgccactttaaacaaaagaaaaggaatacatatgcaatgtttttttttctgaatctgaaccactttaaacaaaaaattcaactagatttaaagaaatttgaatggatcagaaattttcatccaattcgaaaaaaaaatctcgggagggtccaagatatatattgtttttcttaaaaatgaaacagagatatatattgtgagattttgatctgaatgtgaagcacttaacaaacttgaattgagtattgactgtacatgctattttgtattgactaatatcatgagaatttattccggttgctagctaagcacttcctaattttttttattgactatatttcactgtttattagttctccgctctgagcggattcccttgtccgtctct

SEQ ID NO: 1392 - DNA, 1723 bp, Oryza sativa
  Intron number 1 from transcript LOC_Os03g15880.1 (locus LO C_Os03g15880) derived from phytozome v7.0 (chr-ID Chr3; po s 8760835 to 8762557)
atcgtgatcaggtttgtagccagccaaatcttaattcataagaatgcaagatattcatgccttgacatgtgatttctttatttgtctatccttttcaggtatcggaattctctttatttataactacaatgcaatcgctcattttacccgtaacaattaccaagagcttgtttagttgacaatagagatatcaagtcaaataaggttgtttgtgttacacaagataccgatgaattttgtagtgttgcccttctattgggaattcataaatgttgccttgatgagatactacagtaccaataagttttttttaatgcctagaggttaatgaaacgtatagcatatggtccgcaaggctaaccaacagtggatcatcccaaacgaaaaaaaaaaactatgcatgtctctcccacgcgcattatttttcaaggtaacatacatgagccttttatgcacaagtgcatagaattgcaactataagatttttttataatagctttgatatatttaaaattttattacacatgtcctatgctaagtttcaaatgtaagttgaaaaagttggtagataaattcatggcctaataatgatacctacatgaagaggaacacttctacaagcgtcatcaatgttatatctagctatctgcaagttgagggttttcgtcaaagtatggcatcactcaagtcacacctacttaattcaagcatggcgaaccaatgaaataggactaaaaccataaatgctagataaatcatgctagaaactcctatcataatatattgctactaaatcacttattaccatcattagaaagagaatatcattggtactagctattaagagccatgtcagccaagtcacgttctacttgtgacggggcaatgaaggacaagtataaaggtgtgtgtgttgtgtgtgtttggggggttgggggggggggcaatggaccaacatccggtacttttacatgtaaaaactaataaatatttcatattagtgttagctatgtccgatctcattcgagacaacttgttgatacttgctaccccaagtctacatatagattgttgacatgtcagatcaaaactatcattattaaaagctcttctaaatgcaatttgagcttaactcagtttttttcagcctattccttttatccctcatgcctaaaattgtacaatggttagccctactgcaaacgaccttgcacaataaaaaaatcatgcataattgcatattcgagtgtaaattctttttgcatatgtcttttggacagtacacctgatatgtactcactccatttttaagaaagactaatttttaactataaatatggatataaactatctttagatttgtgttaaatggtgtgaagttaaaaataaatgtggcatcctaaatcgatccatacacactattttgtctattggatgtgcacttctgattttttttcttaaaagtttaacttgtctagtactatcgtaaaactatgttgttaaaagttaccattgtatatacattaaataacttgccctcacgtctttacaatgatgcttttgtagctttccctcatttttaagattgaaggtttttatgttggattaattttgccatcggatatcaattgacagcgtattacattgatgcaatttttcttttagctatttcttatcataccctacaggtaattctcaaaatcggagagatttacaaggacac

SEQ ID NO: 1393 - DNA, 7333 bp, Oryza sativa
  Intron number 2 from transcript LOC_Os09g28420.1 (locus LO C_Os09g28420) derived from phytozome v7.0 (chr-ID Chr9; po s 17296269 to 17303601)
cctacatcctcacacaccctggagtaccctgcattgtgagtcctcagctgcatgaatacgaatgccataaagaaaaatctaattttctcaaccagtttctccgactaaattctgtttattgactatgtgtgcagttctacgaccatgtatttgactggaacctgaagcaggagatcagcacattagctgcagtgagatcaagaaatgagattcatcccgggagcaagctgaaaatccttgctgctgagggagacgtctatgtcgccatgatcgatgataaggtcataacaaagattgggacacggtatgacgtgggcaacttaatcccgtcagacttccatgtcgttgctcacggcaacaattactgcatttgggaaaagagcggtctcagagttcctgcagggcggcaccactattaggcgaagaaaatttttcaggactatttggtgcctggaataagatttgaattatatcctaaataaccagattatgattgtatgagatttcttaatctgagcaaagcgttgagcattgctccgatatttctatgtattctacctgcctggggatatgatatttgtatcctctagaagtaaagatgattttaactcagaagtccattgactttactgctacattttaatcagttgcagcactgtgttgatcaaatgcaaacgttcctgacagcagactcatcactaaactttagggaaattaattaacctgcatactagtccagtgcattgtactccccccgtccaaaaaaaagacaaaccctgagtttccgtgtccaactttgactgtccgtcttatatgaaattttttttataattcgtattttcattgttattagatgataaaacatgataaatattttatacatgacttgttttttttaatttttttcataatttttttaaataagacgaacggttaaacattggacaaaaaacagggtttgtctttttttgacggagagagtataccttacgaagcacctgagcactactactgctgatgctgcttgcattgacctaggaccgacggcctgctgctgtgcgtgcactactacttgcttagctatattgggccacagcccaagccagccagaactctcttttcttctttttttttcccccatttttttcatcagacaattctttttgcgcgttacactaacttaattacctcgttgtgaatttaagaacttttcggacaatgcgcggtaacaatttctaagctttgaaccggtgatacggtagtatcatcagataacctcaatggttcaaaatgctacgacgtgtaaaagtacttaacgagttcttgcatactaatctcgaggccacctagcatttagagatcaagtttgatattgtcactgctatattgaactggaccacccatatataggcgttcgttgtacacgatgtcttgcttcgtgcaatggaacctgatatccggcaggttcttactcactccgtactaaaatataagagatttttaatagataatctttattcagatttatagtactagaaaatgttacattgatctatattttgaggagtatgatagaagaaccataataaccattggttccaccatttattttcaagtgggctagcaaaaataggaatcaataggcgagggcttgaccttgaagttaacagagaaaatattcacgcatgctattgtagcagggacatgcaagattgttagtatctgatattttaggtagtatatttatctaaagtagtaggattatgttatcgggatattatgatattttcttttaaaagtttaatttaatatttatattaattatatagagctgatctagattgataataataaataacataaggatagatttgtcaagaagtacctactaatgctaatagttttatttaacattgatttcgaagatatgaacacaaatgcattcatatagttttgatttttgaattcaaataatgtctagttggaaacagttagtatcttgttcctagagtgattctaatgatactacgctatatatcccgatactagtgtgataccagtcgaaaacgatcctagaatacgtattccgatactgacaaccttggaggcagacaacgcacctcctatccgaccaagacatgacctaagtcattggccgacatgtcccgacttaaagctaatacaagtttcctagtaggtgcccaggattaaaccaagttgcccttgttgggaacatttagagcttgcggtagagtggctagtggtacatgaaagatggagatgaagcttggtgcccacgctaactgaaaggaatattctcttagaatatgctaggagccattccaaccactcttacatcataggaaggtgatctgtgctattatactattagggtttacagtcccacaacggcatcaatctaacttcacatgtacttatcataaattaaagacaccagatactgtagcaatatagattacattttatcgaaaatagtgacaatgagagccatttggagcatatcagattcaccttacaactaggataggtaggaaaaccatctccttgtttatccctattttatttgtgacctcttggatcataacattcaccacgtcgcaccacttgacaatttctatttttcaatccgaacttcattatttttccacgtggatccatgttattatacaaatctaattgatggtttctttcattttaggggctgtttaggttgatgccattttcaaccatactatttttttagcatagttgtcaaaaatatgtctatatttagtttgttgtcaaatctattatataattaaaggaatagaaaaagaagcatccacgttcgctctcatggtctaaaaattctcacattaatcggagaaaaagaaaaggcagagtccatatcgaaatacaatttagaaatagctgaaattcggaattaaaaaataaggaatattagaagaggagactatagtccatatagaaatacaatttagaaatagttgaaattcagaattaaaaaataaggaatattagaagaggagactagagtccatatagaaatacaattagaaaataactgaaattcggaattaaaaataaggaatattagaagaggagaccagagtctatatagaaatacaattagtaaataactgaaattcggaattaaaaataaagaatattagaagtagagtatagagtaaatacaattaggaaataatagaaattcggaattaaaaattaaggaatattagaagtagagtatagagtccatatagaaatacaattaagaaaaaaatagaaattcggaattaaaaaataaggaatattagaagtagggtatagagtccatataggaatttaaaactaactaaaatttggcataaacataataaaattaaaagtatatatagtattaaaggaatagaaaaagtagcctccacgttcgctctcatggcctagaaattctcacattaatcggagaaaaataaaaaacaaagtccatattgcgtaaaatttttgaataagacgaatggtcaaacatgtgagaaaaaatcaacggcgtcatctatttaaaaaacagaggtagtacaatttagaaatagctgaaattcagaattaaaaaataaggaatattagaagaggaaactagagtccatatagaaatacaatttagaaatagctgaaattcggaatcaaaaaataaggaatattagaagaggagactagagtccatatagaaatataattaggaaataactgaaattcggaattaaaaataaggaatattacaagtaaagtatagagttcatatagaaatataattaggaaataatagaaatttagaattaaaataagaaatattagaagtagagtatagagtccatatagaaatacatttaagaaaaaaatagaaattctgaactaaaaaataaggaatattagatgtagaatatataatccatataggaatttaaaactaactaaaatttggaataaacataatacaattaaaagtatatatattattaaaggaatagaaaaaggagcctccacgttcgctctcatggcctagaaattctcacattaatcggagaaaaagaaaaaacagagtccatatagaaatataatttagaaatagctaaaattcggaattaaaaaataagaaataatagaagaggagactagagtccatagagaaatacaattaggaaataactgaaattcagaattaaaaataaggaatattagaagtagagtatagagtctatatagaaatacaattagaaaataatagaaattcgaaattaaaaataaggaatattagaagtagagtatagagtccatatagaaatacaattaggaaataatagaaaatcggaattaaaaaataagaaatattagaagtagagtatagagttcatataggaatttaaaactatctaaaatttgcaataaacataataaaattaaagtagagtttagagtccgtataaaaatacaattagcaaataactaaaattcgaaattaagaaaaacatgggaagaagtgtttaaagtcaatatagaaatacaatttagaagtaactgaaattcgaaattaaaaattaaaaaatattgaaagatgagtttagagttcacatagaaatacaattagaaataataaaaaattcagaaataaaaataaataatattggaagaagagcatagagtctatatagaaatacaatttacagaaaattcagaattaaaaaaaataaatattaaaatacgagtctagagtacatatagtaatatatataattacaaataactaaaatttggtattaaaaataattaataactaacacgtatataaaatataatatgaatattacatattagtagttttgtaaagttattgcaaaatttaaaattatgttgccattttaatatttttgaataatataatgagaaaacatatatgctattatatgagagaaaatataataatgctagccgcgcaatatgcgcggggcaccatgctagttttagtaaatacataagaaatcctgtcaaaattttggcaatattgtcatcttgccatattgccaaaatttaataaggtttattttggctacaatctgaacaagcccttaattttcagtgttagtaattttcattaactaattctagcgaggactcttgttttaatcagaattgccatccttgatttatttacttttttatttaattaacatggaatgtacgagccccatcaactggccaagagctgatttgatgccaaaacatggctcattagcgataaaaaataatttataaatgaaaattttatatatgtgtttttaattagtaacttaaaagctaatgctacaaaagaaatacattaaaaatattctaaaatcaactacagaattatgttttgaatcagattttagcagcggttgattttatataggacaaacaatgaggctctaattccaatcagtaaagctagccgaatggcattcccttgaaaaagaaaacaatgaggctctaattctaggaagtgtccggcaaaagtacgtgtacaacaaggataattaaattcatgatggatggatgaattgtataatgtaatttggataccaaagaagaaaactagcaaacataggaaataaagaaaaaacattaattgcgaaacaaaattcgaattggttttagctagctgcccttaggtggatgtgcgccaacagagacgatcgcatgaaggaaggctgcagcctggaacagcctcgcctcctccagggaacgggaacgggaagaacaaaaggaagctttacctggagcccacaacgctatccaaggctttatctaacttcctattggcctcctttttatcctcttttaaatgagcgcaactcgtcgccgccgtgccgttgcgtttctcgttaggagcaactgaacttatccaacgaattgaacaatcaattcacccggagaggtacgtctgcatgccgggctgcacctataaattcccatgcaccagcattccccatccacacaactcagcttgtatctgagacacgcaatggcaaagcattccaccacaatgagctgcctcctattcttcgtcttgctctgtttgggctctcacttagcccaggctcaggttctctttcaggtgagtctcattgatcatttgatctgctgtacttcccgttagtatgtcacatgacaataggaaatagttcctagctatgaacaaatttgacgtacctgcacgttgacatgatgttggtgcagggattcaactgggagtcatggaagaagcagggtgggtggtacaacttcctccatagccacgtcgacgacatcgccgcgaccggagtcacacacgtctggctcccgccgccgtcgcactccgtcgcgccacagggatacatgccgggacggctctacgacctggacgcgtccaagtacgggacgggggcagagctcaggtcgctgatcgccgccttccacagcaagagcatcaagtgcgtcgccgacatcgtcatcaaccaccggtgcgcggattacaaggatagccgtggcatctactgcatcttcgagggtggcacgccggacagccgcctcgactggggtcccgacatgatctgcagcgacgacacgcagtactccaacggccgcggtcaccgcgatactggcgcagacttcggcgcggcgcccgacatcgaccacctcaacacgcgtgtgcagacagagctctccgactggctcaactggctcaagtccgacgtcggcttcgacggctggcgcctcgacttcgccaagggatactcggcgaccgtcgccaagacgtacgtggacaacaccgacccgtccttcgtcgtcgccgagatatggagcaacatgcgttacgacggcaacggtgagccgtcgtggaaccaggacggtgaccggcaggagttggtgaactgggcgcaggccgtcggtggccctgcatcggcgttcgacttcacgaccaagggcgagctgcaggcagcggtgcaaggtgagctgtggcggatgaaggatggcaacggcaaggcgccggggatgattggctggctgccggagaaggctgtcaccttcatcgacaatcatgacactggctccacacagaactcatggccgttcccctccgacaaggtcatgcagggctacgcctacatcctcacacaccctggagtaccctgcattgtgagtgctcagcttgataatctccatcgctatcagaaatcgatatttgttaaccataatctcgaactaacattccgtctgtctgtacagttctacgacc

SEQ ID NO: 1394 - DNA, 5405 bp, Oryza sativa
  Intron number 3 from transcript LOC_Os04g13260.1 (locus LO C_Os04g13260) derived from phytozome v7.0 (chr-ID Chr4; po s 7348696 to 7354100)
tcccagactccctttcctcacctctatataccccggttagttgcccacgacttttcctcttttatttaattccattagtgtagaaataacaacttaagcagatattggaatagcaaattaaacagtttagcatactgtgaaactgatttattatataggccctctttgtttaggtttaggcttattggtctagacttttaagtaagcttattggcttatatgatttataagccagtggatttaatgtcctaagtttagtggtggagtcatatatctatctcatataaaccaaaaaagtttctccaacctagcttttggcttaatagtgttagagtggcttatggcttcaaaaaagtcaaatgaaaaagctgtttgtttgttttagcatagacttttcgacttataagttggcttataagtctaaacaaagagggccatagtgtattcaattttggcaaaaccatttgacagagctcatttagaaacttaatattatggtcaaattttgctctgctctcctcatcagttcccctcctatttcttttacgattctttcctttggcaaaggcatatttagaattctacgtttctacctacaagttcatcgaagtggcagtgtggcacttgcagcttgcttcccatgaatcagtagaaaaatgctccattttacagcgttgttcttctcccaattttatgcttgaattaaatatagctaaccaaactaaatatctatatatttattgcaaatgtatataattgttgactacatattttttgtatgagatcaacaaaagcttagctcgtatgtcagtactttctatctccagttatttacaacaatcaaacttgtcaagttactagtaaatgcacatgtggtatctaagtcaatgaaagctgatcttcgaacctcctttcactacagaaaatttgacacagaaaagtgcatctattcattgctctatgactttgtgtcaactctcacgcaatataaaaaaaaactcctatatccttttcacgttggacacatggttgccagtgctttcaaatctcaaatactatccatctaatgatagatcagaccatcaaccattgaacgatgagaagaaaactaatttagctatgagcattattaaaaaacctaaaaagttggtacatgtggtgaatgaatcaactgaaacaacctgattcagttgattaagtgatagctatacttccatacaacgcattacctatagccagtatagataattgtctatttggattggttattatttgaactattgaagatcctgctgttctgtgtagactaccattgatatgatcgttttgttttatcagtggtacattttgcagtaggagctgtcctggtgatattttaccttgattgcactcatacatttgtattggctggtgatgatggaaacaagtgtttcaaattcatagaatgcaagcaccaacctttggctgagaaatacaattattagtctctttagaggaataaaagccatgatatggatagatatgtttatgcactgctgtctagaaagtaaaattgaaatgtccaactacaaagcatgtcaatagttacaaaactgcggaaagaaacatccaccaaattttgccagatgccaattgacttcctgttcctgacagaataatatctcaggaaggaaagatgttattatcatgcctaggcccaaaatttacagacctacaataacgtggatttttttctctccataaataacggcatcaattggttttacaccataattgctaatccatgttgaagatatgttcatacactcatcagttcttcttcagctcaactccatgtttttttggagctgggtatctcttgctgcagaattttgtggagttggagctggtggtagatttagattactagagtgaagttcatattttggaccaaaataggaagattaagctacttcaatttaacctacaaacactattttctgcaagaatccttgagttgggagccatgccaaacagcgccttagtaagccaaaatatacatgatgaaacacttacaagaataggttaatagtacattaacagtagtgcaaatactgtaataatagattagtagaatgagggtataaataatatttccaccgttcttttaatgttttccttagggcatcagcaaggattccaataaacatgttttatcattatcctttctaccaatgtatttttaaaaaatgttggaaatataattacataaattattttcttgaaaatatgctaataccagttttacatatcaaattttctgcatatattagtagcttatttcaaggtttggttgcatggatccttaaacgtgtctatttgggaacagagggaacagtatattatctgcacaacactgtaaaatatacaaagcgttttactactggaaatttttctatgttaatcaatgttttttctacatgtaagagactataaatacaaatggttcagctactgacccaatgtagataaataagatagataataacatgaaactcgaagtatattgagtcactccagttcagtccacatatgtttgtagtttttttatgagatttggaatggtggatcaacaagatctggtactgcatgctaaatgtgcacaatagaagtgtaataatgattggtagccgtagatcgtacccagggcttgaagggatgagaaatcagactataaatgggaaagaagactggagataggcatattatccattcctgctttattaatatatacaacatcatccttatagttgggatgactcgactattcagtaccttacctcaaaaataaagcaacagcttaatctaatcttatctctaaaccaacaaactctaaccgatgctacaatatcacaggattactgtccattcgcatgaacagttaactcctgtacaggacaacctcgcttgacctttaatacctgaaaatatgttgtgcaagcttcatatatagtggcaacttagaaactaccgttagattcaaaatggatgtcttagatttttccatgtcaccccacgcactgcctgctgataacatcttgcattttggtccctattcatttctttcctccccactgtgagtaaaaaaattatatatggttaaatctgtgagtaaaaaactacccgtggttaaatccttagtaaaaaaattactcatggttaaatcttaggagtaaaaatttacacagaaaaagaaaaaaggaaaatggtggaggcaaaataggagcccagtgaggcaacgacgagatcaggtgggacggccgcgttcgcctagtggaccaaagctggtgtgtgtgagagagagagggctggtggatcgggtgtggcactgtggacgagttccgccaacgtcgctgcccaatcttcctcagcacgtcgtcaatggttgatccaaggaggagagatgaggagggaggtgaagaaaggacggagagagtcagagagagtggaggaagggtggtggcctggtggggtgttttctgcaaatttttagtatggtgacatggacaaatccgagacatccattttgaatccaacaatagttccaagtttccaccacatatggagtttgaactacatattttcccctttagtacaacttgcgcttgagatgtggtggtggccatgctaaccatccttgacaaccccacctccatctgtggccatgatgtgttgacagtggacaacagtggcatgagagcctttaggggattcacgttgtggtgatctggtgagtggttccaaacctccacgttggcactgcagcgccacctcagatgaagccatgcccctgcagagccacttgccttgattcacaccgtcaggaacttgttgaccctgtcctgcctagatccgcatcgccgggagctcgtcggcctcaaaatctgccacaggggccgccgctcgaagcgaggagggatggtcacgggcagcggtgaggaaggattccaccggtgctgccatgtccaccttcttggcatctgttccatccgtgatgccctgatctgctctgtttgcagttttcggccatgtggagaggggccacagcggcaccagagagtggagaggccatggcggcggccggagggtggagaaccttctcatggctagatctgagtggaaggaaaagagctatggtggctggagcaggagaggtggtggtgatggccagagcgggaggaggaaggtgcggcggtgaccggtatggtggtgggcaactcggcgtcggcgtcgatttctttggtggtggctgctggtgtcttaggtgcgagagagatggggagatagaaggatggggatgggttaatatgtgatttttattttcatgaagggttcgttttataaaatttgggctaaaaacgaattaaaaaactatgtaaggatttcaataaaagacagaagggctgtaatagaaatattacttggggtccaattgaagctcctgtgcattgtcagtctactaccctaggagtggcctcatcctacatgctgcagtcgtactctcgctccctgagaccactccttgcattgttcatgtccttaatatgctgtccaaggttggtgaagatgcctccagcgtcaacagtgaacttggattagtggcattctgcttaactccactagaagaattaggactgtgaaagatgtgatggcaccgtgaccttttacatgtcaccctttttgttcaatgcacctcagaaggcacactgtttgtctgccatgtgacaaggcaggcatctagcggttcagcaaccctcttccccagcgcacgcaacagtagtgcaaccctgtgcagcaagggtggcaatggtggtgttggatcttgcacgactcagcataacacgtcttgttttcttcttgctttgcgctcctctagcaggtttaggagctcatggctgaaagccttcaactctgccttgataaggtgccttcaatctttcaatcatgcctttcacatgtgagccctggcatcaaaagccatggctgaaggttacttagcagcagaacctatggctctgataccaaatgccctagatatagggcaaaaaggaacatcctgtattcttgaacaagcaacagaatcaaattttagacttggattatcctatttacatttatcaaattttgctgcaacaatctaaataccatttctgtttcatattttgaactatatatctttcatcactcttttgagatgtgttgcacctcatggaaaactagtagtgttggctgtcaaccaaattttatttatttcattgatgatccaacatgattacattctccttttagcaattgtgattctgtggattaaaaacttttaatctttgatgtttttgtttcagaactctgttttatataagtagcta

SEQ ID NO: 1395 - DNA, 8199 bp, Oryza sativa
  Intron number 1 from transcript LOC_Os12g40419.3 (locus LO C_Os12g40419) derived from phytozome v7.0 (chr-ID Chr12; p os 24982403 to 24990601)
caacctttccggtgagtcctccactctctaagctttcgggcgttgtaggtgaatagggcccacggcctcgcctgccacgtcagcagcactcgcgaaagtcgttgctgcggtcaatcacgcgcgagctaatctaatcaatagttcacaatttcgcacctagagctagctgacagtggagtgaattttataaaacgttaatgttaaatatagttgatcgatttggaaagaactttagcctgtgttcggaggcaaggtctcctgacacgaaaaacgaagcgcacgattatggtgggattaattaagtattagttaaaaaaacttaaagattaatatgattttttaaatcaactttcatatagaaaatttttataacaaatgcaccgtttagcagtttgaaaaacgtgcgcgtgaaaaacgagggaaatgagttggaaaagaggggaaaagaacacaacctaaataagtccaaaaggccctaaaatctttattagagaaatacttttaaaaagaaacggtgagtgaaattaatactacaagtttttagagctgtaagtgtgaggttttcaaaaatggcgatttgattaatttgaacaacagaaattgtttgcaaaaatcagcctgtcagcttgtcatactttggctcccatcggttgcccgttttacccaaaatggcttatttggcttattagaaaattaaaattaatttataagtaaaacttttgtagatttattcgtagcgacttaaaagccaacattaacggcttattctttggccgtttaagccaaacgatgaggctggttgacaagacgcatctgatgatgctgatgcctactgtgataatttagcatcgcttcttaaagttgaattcaacctgctactactccgttgattactcgttgtttaatacctccgtctcgcttttgtagctttgagtttttatttataatgtttgatcattcgttttattaaaaaaattatgaaaatattatttattttgtttgtaacttgtttttattataacaaaatactttaagtatgacttatctttttttatatttacactaattttttaaataatatgaatatttaaacgttaaaaaaagtgaaagcaaccactaatttgggacggaggtagtacatcaatagtataacatccaacacatttggtcatttcgcttttaatcacctattcagaaaaggcattaaaatattaatggtttttttacaagtctctagctaccaatgctattttcgtatattaaaccattttatttattttcaaatttaactacatgtcatatacaagtctagggagtattaatgaacggaagaagttcaccgtagagggatggcgtgggagggatgcgatgacgacggaggggcgcgcgatggcgatctacgctgggtagggcgtcgatgatgtcgggtgagtgcgagagagaagagggcaaaggcagcggcggcgggtgagtgcaagatagaggagggtggaggcggtgtcgtctgcgtgagaggatgggtgcggggaggggagtctaagggggagacgtgggcgatcagagccggccattggactccatgaatttagatcatcggatttgatgaataaggtttgtaggactgtagtcggtgaactataaaaaatagatattatctaaaaaaataaaataatatatagtagatagataagttagttaatggtagatatagacatagactaaaatcaagatttgggctacgctacatttatttgtcaagagcttggtccactatgattaagaaaaagtgtcgcggcccatgtgcttttgatcctaggcctggtgccgtctctatttagccgtatctaaagagcaactagaatggctaaatggctggccaagctaaaatttagtaagtatgggagaaaaataccctccaacagtctctccatccgactagccaagacatccggatggccaaatctcatccctcactggccaaacttggagactctctctgcctagctattcgtgggccccaccactccccctcccaccccatctctccctctccccctggctagagcaagaaggctgcggcaggggcactcgtgaacagcgacggcacgcaggagagaggtgctggagccagccgcgaccaccgccgccgtccgcgcgcatcaccagccgtgacagccgccgtcgtccgcgctggaaccagccacgaccaccatcgccgtccgcgctggagccagcaatgatcgctgccgccgtccgcgctggagccaggcacgaccgccgccatcgtccgcgccgtccccagctgcgaccgccgccgccgtccgcgccgtcccagccgccaccgccgctgccatccgtgccgtccccagccgccgccgccgccgccgctggggacatatgaaattagtttcataaaatttaacatcaaatatattttgataatatgtttgttttgtgttaaaaatactactatattttttataagtttaatcaaacttagagtaacgacttataatatgaaatgaagggagtacttagaaacacacttggaaaatgtattctattcattttacactataagtcgctttaactatcttctaatcaaacttttttatttagtttatagaaaaatataataatatttttaacataaattaaacatattatcaaaatatataatgagactaatctaatgctgtaagtgttactaattttttttataagtttgatcaaatataagaaaaactaacaagaaaaaagtctagaaggttgaagtaatgagaattactaataccgacatgaccccaaggtcaacaggagagagtaagatcaaacccacggatttacgtatgaacataaatcaccagcagtcaaaacagcaacaaaaacaatctagctaaaggaaaaaagtaaaagtaaaacgagagcacaaaatcataacaaaggatggccattttcaagatactccatgaccaatttgaccatgattttgcctgactaataatcaagcttagccaccatcagtccatcaccggatcacccaccagtccaccaccactcagcccattcaagaagcaacagctccagccaaaatcgttcgtccccagtggctgaaacattaggctcgcttgccgagttagctaagctacctctcaagtatagtctagtagctagagatgcgcctcgccggcggcttcgtcttcctcctctgcgtgcacctgttcttgattcctcccgatggggctctctcggcccccggcggcggcggcgagcggtgcaggcggcagtgcggcgggttggttgtcccctaccctctgggattctccggcagctgccccatcctgctggcctgcgtcgacgccggcaactccacggccgcgttgatcctccctggcggcggcggcggcggcaacgccacgacgacgacctcgtcgtactcgtataccgccagcaacttcaacgccagcaggtcgacgttcgtcgtcgccctcccgccgtcctgcagccgcaccgtctccgaggcgaggcggtggctctctggcgccaactacggcgtgtcgtcgcgcaccggcctgttcctccgcggcgactgccatagaaacagcagcgcctcgaacgccaccaactgcagcatccccgccgaaaccatgtccaggatggtccccacggcgagctgcggcgccgaaggcaacacaaccgcgtcggcgctgacttgcgtcacgtcgacctcgccggcgccggacccagcaaagccagagtcgtcgtcggggtcggggatagtaggcctgttcgcggagtggaagaagctcgaggaacctagctgcgacaacctgctgacgtccgtgtacggtgacacacgggagggggtgttctctctggagttctcggtggcggagatggggtggtgggtcaacgggaactgcacccacggcggcggcggcggcgacctcgcctggcggtgcgcgccgaacgcgacgtgcctcaacgtgcagacaccgaccggcgggtgggggcatcagtgcaagtgcctgcacgggatggtcggcgacgggttcgccgccggcgagggatgctactttgccggtgagtcctctcctgatatatctcctctctaagctttcaagcggtgtaggtgagtgggccccactcccccgcgttccacgtcagcagcactcgcgaaagtcgttgctgcggtcaatcacgcgcgagctaatctaatcatgtactagttcacaatttcgcacctaaagctagctgacagagtgacagtggagtgcattttatagaaaacgttaaggttaaatttagttgatcgatttggaaaagaaattttaaaataagttcaaggagccgtaaaatttttgtgagagaaatactttaaaaagaactgtgaggaaaatacctgacaaatttttagagctataggtgtgagattttcaaaaatggcgatttgattaatttgatcaacagaaattgtttgcaaaaaaatatgattgtcaactagtcatacttttgacacgatgcatctgatgatgctgatgcctacggtgataaatagccacatctcacgtcaaaaaaaattaataaatagccacatcaaactctttgacctgccattatttctttttgggagaaaccaccaatttttctagcatggcttctcgcatttgaattcaacctgctaggctgctacatcataggtcaattactcgttctttaatatgtcgacagtacagcatctacatatttgatcattttgtttttaatcatgtgttcagaaaagtatttaaaatattaatgtgtatatttttttacaaatatctactagaaaatcttataatatgaaacggaggaagtaactactaattctattttcatatattgaactataatttttgtttggtttcaaaatttaactgcatgttttgtacgcgtctattaatgaacgagaaaagtaacttgccaaaaaaaaatgagttaacattaaaaatcgacctagcttaaagttaagactcgagccagcctccatcaatttgtgaagagctcggcctaaaatggaaagaagtgttgtggcccatgggcttttgaccctaagccttaggcactccatgacccagtctctgtataaagatgtctaaagatcagttcaaacctcaaggttgggatgttattccctctacaccgaaaaggcgaaaatgagtaattaacatgtttggtagaggtccaacttctaaatttagcttcaggagttagatctatagtggagttatgtagctgcctaaacccagctccacatctctaattcattttgtaagagagctccatccaactctgctcctatttttagtggagctgaaactgtttggatgagctccaggctgtgccaaacaggctctaattaagtattagcttaaagacttgaaaatatatatttagaacaactttcctttataattcttttaaaaataatatcgtttagcagttttggaagtaagcgcgtgaaaaatgagagagtagttgttatagtaaaatagtgaagacaaaataaaaaataagacaaagttccttgtgcgcctcctagagtttctctttacctccttaatcatatccttacatgtccttaaatttttattttgatctattttatatttactctcatgatcctaagttaacagttatattattctttttcaagacaaagaggttttaagttaaccattagttttttttctcaagataaagaggtattccacccatcccattaaaaaaaatcaatcctaactatgaatgtgagtacatgtgtgttaagtttcgtagctaggattaaatttggggtttttcttgaacggaaggtgtagaagctaggcccatggaattaccttccatattgcccctccctcgtgtagtactcacaaggatatggtcgttcttaaaattacgtactctctagattgaccatgttttgcttgactaatcaaagctttagccaccgcaaccccaggtccattcaaacatttcaacatatatgctccagccaattccttcccggtggctgaaatattagtttcgctcgcctgccgagctagccaaactcaagatgcacctcgccggcggccgcctcctcctcctcctctgcgtcggcgtgcaattcctcttgattctcccctatggagctctctccgccagccccgccgccgccgccaccggcggagatgagcggtgcaggaggaagtgcggtgggttggatgtcccctaccctttcggcttctccggcgactgccccatcctgctggcctgcgacgagggcaactccacggcggcgctgctccgcccgaccaacggcacgtcgacgaccatggagccgttgtcgtacgccgtcgtcggcaagtcgttcaactcgaccgcctccaccttcgtcgtctccctcctgccttcctgcaaccgcaccgtctccgacgcgaggctgtggctcaccggcgccaactacggcgtgtcgtcgagcaccggcctgttcgtccgcggctgtcagaacgcgaagaacaacagctgcagcgtccccgccgaagccatgtcctcgatgctcaccacagcgaagtgcggcggcggcggcggcggcaacggaaccgcgtcgtcgccggtgacgtgcatcccgacgatgtcgacggaggcggacatggcgaagggtgtgggcctgttcgcgcagtgggacaaggtcgaggagcctagatgcgacaacctgctgacatccgtgtacggcgagacgacgaacgatggggtgttcacgctggagatcgccgtggcggagatggggtggtgggtcaacgggaactgcagcaaccacagcgccgccgccgctgacctcgtcgggctgtgcgcggcgaacgcgacgtgccacgacgtgcggaccccgagcggggcgtggggacaccagtgcaggtgtctggaggggatggacggcgacgggttcgccgccggcgaaggatgccactttcccggtgagtcctctctatagctttcggccgtcgtaggtgggtggggcccacttcccggcgctccacgtcagctccattcatgaaagtcatcggtgcggtcaatcacgggcgagacaatctaggggctctgctttgctttggtctgtttggaatttcattggaaaagtggattgcatttttcagatttgctagaaaactttcgtatgtttttcttgtcaaaagaaattttagattcgtggcaatcagatcttctcgagatttgtacaggaagagaaaaaatattaaaaataagttttcacgcatgtcacgtgtaattaagatactagtgctaactaactaaaccgtggtttaatgtaagttttatataaattatattgtagttacaatatagttataatacgattataatgcagttacattaaattatatcatagttacatctgaaagttttttactcaaaactgtagcagtattttgagatactcccacattttataattataaaattataagccgatcgatttggtaagggaagaaatgagtttcagaccaactaaagccttttattaggaacagaggaattttgctgcaatttttaagtaatgagttaatagttcagtaaaattgttgtgcttcaaaatagccttatgagagaaatagctgccgattttgtatagctgtaagcgtgcgattttcaaagatggcgactttggtttgaacaacaagaattgtctgcataaatcagcatattagtttgtcacattttgacatgatgcatctgatgataccgatcaatgcctacggcaataaatagcctcatcaaactctttgaccggaatttagttatttttagaagaaaaacaccaaattttcaagcatcagtactcaaattgaattccaccttcttttggttcagtggtctgtatttggaaaatttatctgttgaattttctcatcttaatgcatagacaattttggtgggagctatcctcacgtggagagacaattttgtcataaatcaagtcaattttgctcttaacagaaaaccaaccaactgctaccaaaaacctgatccaatttatgatgttcagcatggccaattctgcccatattttgcaaactgaaataaatatgaaggtctgaccaatttttttttctctccatttttgcagctaagaagagctctacgaagaaaatccttatcata

SEQ ID NO: 1396 - DNA, 1652 bp, Oryza sativa
  Intron number 2 from transcript LOC_Os11g06190.1 (locus LO C_Os11g06190) derived from phytozome v7.0 (chr-ID Chr11; p os 2952697 to 2954348 reverse strand)
cctgcgaggactcgctgcttcaactcatccgagaggtattcagcgcgcacgatacgcgaccatgcgcactcttgtggctctgatttctgaccttccttgtttcatcaagtattggttgatttgattactggaggttggttgcgatttgttcatcggttcatgtagtagacaagcgatccccattccctgttggtcggtacattgctggagatagttattggtagcttgtttatggtgtcggatgcgattgtgctggtgtggggttagtcatttccagctttggttatgtctttttttttttcagataaacaaggttgacattaataaatacctgggattttgtgttaatttccttcttgattcaagaatcaagagatatactacaatcggaacttgaataagtcatacaaacacatgcgtcatgattgggttggtagattgtcttgcttcaatttcgtaatggcaagagtacatatcctttctgattacacctatacaatgcttcttgttgtgtaagcagtaaatatcaatggacatagttggaattatggaaaagatattttctgaatttacttctcaatagtgcatcgatgatttatatgtcacattttccagcaagtacagtttataatgggctttagtacgttttttttttgtacaaaaatacgtgatccttcaatttgacgtattccacttcaatatttgttgggccctctaaccaatcacttaatccctgatccaatgtttcagatcaatactagatcttgttattaatttttttgtttgcgtattctgttgatatgaaacatgatgtttttcttgtaacatttccatctgttgtgttccctatggataaattctgcttaaaaggcaccttgtgccctctacccattgtgttgattactgatccagtgttctaattgtacaatattgctagcctagaccctgctatacaatgagctcatgcattccagtgatatgaaacattgacattcctcttttaacttccaatcttctgtgttcccacctatatttgcctatatctagagtctaataaaatacctctaggttaattcccatcagactgtaagtctttaagggttgagatactataagactatatccctatgaagaatttatgcttaatctccaggctctaaccaatgagttgtttcactgctacatgttctaattgcgcaacgttgctaggcaagatcagttattttctgagctcatgcattctggtgatatgaacataatatttcctctaccttcactctagttattgttgcaagttatatatgcttattattatgtctcaaaagataattgttgcatcaccttgcatatggactccataaatgctaatatttgtacagggacaagggaatgccatcgtgccatgttaaatgttatttctcacatgattatgtgtggcactatggtgcatcaccttttgagatgatctccatgaatgcgttaatttgtgtagtgaagaggcgatgctgtgttaaatatgtttattcattcagttttgaagctagtgtgctgcaatgtgcatattataaagtccttcctgatgtccagctaatttcaatgtttacataatgtaaaattttcagattggtagctcaggaagcttggagaaggtt

SEQ ID NO: 1397 - DNA, 1930 bp, Oryza sativa
  Intron number 2 from transcript LOC_Os03g44900.3 (locus LO C_Os03g44900) derived from phytozome v7.0 (chr-ID Chr3; po s 25332845 to 25334774)
cgtggatccagtccagcgagatcaaggacaagaaggtgagccctcttaacttcttagccgtagccggtagcttctctttagctccaggggatgcggttcatggtgcaatgcactgcctcctgtgcttagaattatgtatgttctgctgttctgtccagttaattgtacggagaaactgatgattttagaagaaactccattaagttacgccatacgtgcagtgattagttttgttgagtgaagacttatatgcttgctgattggtcagtacaaacactgatctgggaatgctctttattttacctgattcagttaacagaactctaggtgcctatcagctttcctagcgagttatgtattatacattatgtggtctgcggggagtgcgtgaaaatatatttgaggttactgttggtatgcaacgccttttctcttttcgtgtttatgctgttagtagctgcattgttgtgtagcttcaatctcgatgtgatgctattgccactaagatgggatgctgattttgtggtttgtaggcttttcttttcttgttgtgacaaggaaatccattcttaagtaagttttcagtagatgtttgtaagcctgttgtgatgctaaattatttggcagaattatgaatagtttttggggataggttagtaaagatgatgagaactgagatccacttttcaatactatccatggttgacatttgtatccatatttactgtggtgtttctaaatctcaattaagagtgagtatagaacattcctgataattctgaatgatgatgtagttatagttggctcttattggctcactgcggcattcatacttttggtaactaattttaaaatgttttcagttgcattttatggaactacataaaacatatctgtacttaaagtatgtaactgcagcattagttgcagtagggaagtaaagaggaatctggatgatgtattagatgctgttaatcaggagatccagtagatgaacgactctggtacaacagagcattttggaaattatttttggtcttcagcccaaaacatggcttatatggcagtctggtgacacagttttcaacttatgctgcaattgttatatgactgaaatacttgatcaaggcgtgcaacctactgtattgagaagatattttgttttaaggcatcctcttcacttagactactgtttgttgcagtatgtctcaaatcaatctgtacagatggccaccggaatttcagaatttacctgaaggccatgctaaacttcaaggtcacacaagcttagggacaaattcactgaatctattgcatattgattctccttgaagctctttttgttgcttattttccttgtaaattatttttgaaggtttttgtttgtaaaccagatgcactgttatttcaataagtccatttttttcattcttaataagtagtccctctgtcccaaagtgtagttacctttaccattcaaaatttgccccaatcacaaccatttcccatttaatttctccacctatttcctcatctcaaccaatcacaacaatcccttgttttatttaacttttctccttaatactagtgcctgactctaaaagttcttacattttgggggcggagggagtatttgcttcatcttgctgttggtacttgttaaccttggttaaccattctaattatgaatactacgaaacatattttaccatgaacatatgggagtgttccaataaagaaatggagcaggattcacgattatagttttaaaagcagtattctgttcttcccctctgaatttcttcttcaatcatgttttttttttgtatgatatattttgccgttgcaaatgacttttttgttaacattacttactgttctgggtttaacccatttataatatatgtgttgacataggttagtgcctctt

SEQ ID NO: 1398 - DNA, 1563 bp, Oryza sativa
  Intron number 3 from transcript LOC_Os03g59774.1 (locus LO C_Os03g59774) derived from phytozome v7.0 (chr-ID Chr3; po s 34035738 to 34037300)
acaatctaccttatgtgagtactgaaatttgtactatgcaatgaaattcaaattcatatttctcagatgtttctataaagtttctcaaatattcagtctgtcaaatctgttaaactatgcaaattcatactacttgacctatttgaggtgtggtctgaattctgaattttttgatatatactactactcataagcaactctttccccttgtgcattgttcgtgatctgcttttgctcctgaatttgatctttgacttttcttgtacctgcaactttacctgcaaagtatatgaaatctgatatgtttcatatgaaatctgatttccatgaacttcgtgcagttggtccataagtaatataaattctctgacacatagatatactttgtgtagtttctagatacatgcctaaatctgatatactttgatttttttgacatatttgctattgactttggatgtaatataaattctctaaaatccaaattttgatataagttctgttctgaatacagtacatatgcagtatatatttgcatgagttctaatttgaccagaaaacatgcaatgtaaaattcatatgtcattatgttgttcaacctaagaatacacataacctttttttgtaaagtcttaagtctacaagatatcggttacatattttaagtattgtaattacattttttattttatgtaattcttatacaacatgactgtaatttaagaattaaatttagaatgctggtgaatattctcaatttttgaagcattgcgtttgatttgaaatgtttatggcaactttctgcaattttgagttcagttttacattttaaggttcggttatgtgaatattttgcagtcatttttttttgttttgaatctctgtttatgtatgagttctgcatagtttacagattatgtgtttatattttccctaatagagatttaatgaatttttttagttctgcatgagttttgatatatgattttgcatataattttattgttctcgactaatatttctcaaatctgttgaaatatggaatgcaaatttcatatatcatcatgttgttcaacctaagaatacacataacaattgaattctaagataatatgatctgtgatgtttctataaaatctgtgaagatttctgtataaaatgtagacccataactcagaagatattttttttggagtgatgaagctttgtgaattattttgatggagattcatatgaaaattcgaagctaaacactcaaatatttcaatctgtgaatactctgaattcaatctacttaatatatcaccaattgaacatttctgatttctgatttgaggtgtcctgaattctgaattttctaaaattttagttgctgtgcaataatgtgtttgaatcctctatttctgattgagttgtggtttgtttcttaatttcttcagtaatgtgtctgcaactctacattctggattactgatttgagttgtggtgtgctgcattggaagggtcctcagagtgactttaacttgttgtttaatttttacagatcaatctcatttgacagaa

SEQ ID NO: 1399 - DNA, 2239 bp, Oryza sativa
  Intron number 6 from transcript LOC_Os02g02920.1 (locus LO C_Os02g02920) derived from phytozome v7.0 (chr-ID Chr2; po s 1136358 to 1138596)
cttcgcagtcagaggctcaaagatctcgtcctcaggtacttcagaaaactcttgaagttgcttgccagccataatctctcagttacttccatttgctggtggaagttagaagaataggtctgcagcatcgtctctctcttgggcagatcggaactagtaatcttcatgattcatgattgtatttaaaatttcagaatcaaatgcatgcagtaacatacgcattcagcaaatttgacatacctatgaggttatgacctattggttctatattcctttcagccctgcatttttcacatcccatgtctaccattaggtatttaggttcatatttgtgttgctgttgatgagatgcacaatcattttcataagtaagacttagcttaatcgtggtataaatgtactaccaagcctttctatggaaaggtctgacatatgcatttcagtgcattttttcttcttagtgcttgaagaatttgggttactatatgatatatgaatttgattctgatcctgtgggatatttactgaactaacaatgaaaatccaacttaaaaataatatcgcgaggttccagaaagatagttaacctaatgccatttcagtggattattcactatttctctatcagtggtaccttttttgagaacttatgtgcagctgtttgaaaggctgtgtttgactgcttgttgttgagaagttcacgccaactgaatgtatatgtccggctacgtgatcaccatctagcgacttacatttttcttgtttgtttcatcaatgggtctgttagggggaaccaatagttttaaacacagtagcttattttttaaaatctaaattaagcattgttcttagatgtattagtaatatctgttgttagctggtgtcctttatttctctggattatttctgagcttaggagcttgagctaatttgaccatgctgaatcaatttcttaatatggtagttttactagttcttgttgtaaggtgctggaaagtttctaaaattgcttcagcaagagaagcacaaccaagtggatccgattcatttaggtcgtgtgttattgtggttatcttttgccaagctcccttagcagtgactcctaactagggaagttattttgcgccctaattccatctgtgtttcaaacatgaccctttattttattatcttaacttggttaatcatggtgctgattttaccctccaaataacctgggtccacgaaccaattgttttttgggtctctaggaataggatgtggaaccttgctgatgtcgaaatggacctattatatgtttattaggagtaaatgtataggcgcttcatagttctgaagttgctattttttgtgttccaacctttcttgtcttgttattttaccatatttataatttttttgactgtttcatataaactattcattttgttacatggaaattaccgtgtatagtttggcaatgcaaatatttgtggtcattttctggcagggttcaagttgaacatctccaatttatttttgcttctagcaaagttttttttttttttgcagggatgcttctagcaaagtttgtttcatgcacattttttctcatgttaaattattactaccaccatcacactcattatgatgttacactactcgtcatagtactaatgtatgttcagtttactgacaaagtaggctatctgggcacagtttactgacaaagttggttaaattaaaactaccaccatcacactcattttcagtttactaatgtatgtctagtaaagttgttgacatgatgcatgattgagttgttatctgagcacttagaggtgtaatatccgcttcatgtttctcagttgtatgttcagatgattgtttttgaactagatatttattactaccttcatattttaatgtatgacgccgttgactttttatcaaacgtttgaccattcgtcttattcaaaaaatttatgtaattattatttattttattgtgatttgattcatcattaaatgttctttaagcatgacataaatattttcatatttgcacaaaatttttaaataaaacaaatggtcaaacgttggtcgaaaagtcaacggcgtcatacgttacgatacggagggagtatttattatcgcgtgatgcctgcatcagcttatatctgtgtagagctacgacctgactctcaacgtctctgtttctgcaggcacagcaacaccagcagcgtccaccacctccacg

SEQ ID NO: 1400 - DNA, 1599 bp, Oryza sativa
  Intron number 3 from transcript LOC_Os04g06790.3 (locus LO C_Os04g06790) derived from phytozome v7.0 (chr-ID Chr4; po s 3572789 to 3574387 reverse strand)
aagcacttgagagagttcgtgcattgttaggtcagtcaaacttatataatttataatctttggtagtaatctcacctttccaagcatatttttcatcctgaactcaatattggaatagtttatgcactcttgctaaaatgtttgttttggaagaaagatctctgttgcttgaatgtttgttatggaagacgaccatcttgctatgaatttaaagatttgtcatttcgtgctgcaatggcatgttttttgctgctaaaatggcatgaatttaaacttgcttaaatggtgattagcaagttttgaaataactctataggttccggatttatcggtgatggcaaatcttgtcctcttgtgtgcagttcgcttgatcttttaagcatttttttagttgcagagtggtttagctgggcctgatattcagccaaaatcaaaaaggttgagcacacaataatattgtcgtaaagaattctgttgaaatgttggtatcactgtagagctaggcttgtaagcacttttggcatgtagccaagtactctgaagttcaacttcagaagaatacacagcaatgtccttgacccactatgactattgtggcggtccttcttggttattctgtaaaccgagttatattgaattcttcagcttatttatagattcttgtgttccttgcaagtagtattcctactttttatttttattagtagaatcttgtatataatttttggttcatgtggctcaaattgggtttcatctcttgtttacctcaacatgcttgggactaaaagctcttgttgaatccttcgctagtcataggtgctcacagcagtggtgccctttgtgcttgcattattgattctttgctgctgtgcatgcatgattcttgatttacttcatgtcttgtacaattttgtattggtgaacaagccatctgcaactagttttcttatttcttgttatgagcaacattttttccatcacaattatgatggctggatgagtaatttaaattgttggatgttggtgatttcatagttaactgtagatcatcctctgtcatatctctattttacttttaccattttgggctgctattttgcacggtagattctattgtttgaaacaagtctccgacttgcttttcctagttactagttcttttaaacaatagcaaatgttcaagcattgccaagatataaaccagtaacttttgagatgtagattttctcatagtcttaatggttattattaccaattaagaagtatgtccaaccatgtaactaggacgatttatctctgcctgtagtatgagttgattaatttgatttatttaatgctgatgcctgacagtataccttactgctagttccatgcattttatctctgccagattgttaatatcatgattcaagagcaagatgttactgtttgcttagatatctcattaatctgcatattctattagagcttgcaatgtaagatttctctgagatagttcaatgcaaatgtaggataaaaataaaacttactgttgatctgattcagtgtaatccaatgcttcagcagacttaaatttttaagtttgtttaattttcccag

SEQ ID NO: 1401 - DNA, 4089 bp, Oryza sativa
  Intron number 2 from transcript LOC_Os01g44170.1 (locus LO C_Os01g44170) derived from phytozome v7.0 (chr-ID Chr1; po s 25316356 to 25320444)
tcgtcgctggcttagggtaaggagagtggaagaaggtcagttgttggagggcttgtggctgtggaggagagggatcaaaataggtggcgttagcgccggagcctggagaggacggggagatcgaagggggaaggggttaaggttgagagattgcatgaatcttaaatcggatccaatgtgtgtagaaaacataggatgtaggtggaattttctcttagatattatttgaaaattctaatttaaaatgcctaagaatgttgaaaaaaaaaatctaaatttccaaaaaaaaaacagatttctattcaatggatagtaatttaatggttccaataactcccacgattacttattcaaaacaaagtatgctattttcttataaaatgttgaaaaataaatcactctaattaaaatatgaagtaactttgcaattcctaataaataaatgtaaaaatattcaaacttaattatgtacaactaaagtaaaagtatatagattaaataactaaagttgcatgttatatagcactgcaatcctatgcttagcaatgtgcaattataggtgttagtgttacggatcatgtatgcatcctatatttgtattcataccagtagggaataccgtgtacccaatattatatggaagggtatatccaagttttgtaaattctatagatatggccaaaaatcctccccagtaaggtaagatgttggattcaggtattacaaggtcttgtctgtctatggtcttggatgatgagttgcctatcggtataaatacaaagcccctcagaatgggagggtattgaagcataacccatagccaggagccacatataagaccagccatgagaagctcgacccaaagttagttgctgactataagtcactagagtagttctcgataagactagatggtaggttagaatagttggctttctcaacttttgtaattagtgcaacacatcgcatatcaatatataaacaagattagggatataacccatctcgggggctgaatcagtataggaatccatgattcgcatcttttactctcaatctcgtatataccctagtactaatgtaacctacgccattgtcaggtccaaccctttgacaataaattactgaatcttcagacgcttgaaatctagcaaatccttagaaaaaaaatgtaggaacatgataggaaagtaagcccatctctaagcacgcgtgtcctaaaaattatgtgtttcaatttaaaacaatatgtttaggtttgtttaggatctcatcattccattttgtcaaatttctctctatgctccactcaatcggttcgatggagctgtttttttttctcaactccgataagtgttccgatgataatcatgactatacatcacatagttgtatttcgtaaagacgatttgaacttataggaaataaggattcctttttctatttagtaagaaaaaaaactaaattattgagttatccaaatttcacactgaggatttcattttgggaagtagaacttgtgcttgtgcaatggcttagcgtatatatacaaggatttagcgaacttgtgtaatggatttgatgccgattttttgttatttaatcacaacaaccttttaattacgaatgtgagcacataatttttgggcttttgtttctaagcaacatgcctacgtgaacatgtcgatccagttgacctgatgttgataaaaaaattggttgtttgtttaactaaatatcggagagattgatgtgcttttcactcaacggcagacataggattttataaatgtggtacggtaaattaatttatttataaaataataaattatctaactgttatataatattatctctaaagaaatgtaaaaaatccaatatatcataacaaaccagactaaaaataaactaaatcttatttttatatatagatcacattgtaatgcatatgcatttaactagtaaatagtgaatttcacaattcacttgaacaatgtatatagtgcataaaatttatatgactatatcgatcaatattattaacctttatagcattctagattatacttaacaaaaatatttttctcttaaaaaattagtcagataccttatataaatacaatttcttatgttaatatatattatggagcgcatatactattaggagtaaatgtataattttttgtgacattcgttagttgatgtgtacgaagtgtgtataggatatgttcctgttaatttttctccaagtattaatgattcatcataaagaaatactactaatcaactagttttaaaatagtaaaaatattgagataaaggtggaggagtcgggtatcgcgtaaaagaaagagaaacctcccgtctcattgtctcctccgctccttgcgccgctgccaagacgagtcgcggctgaacaggggaggggcggcgatcttcatctggcgagcagagcatgggaggggatcctggtgagcatccacatcctctttctgattcatctctctctcaccccaccaggactacttatgtctggaatttgcttgcgttcgttaaccctactagcttctcttctagatctggaagaagctcttctcctccttaatttgagagccttaaacctctcttaatacaagtagtaacagtttgtttgttcacccaaaagtttaggggttcatgtcccaagttggatccgcccctgttttcgctgctttgttactagcagtaacgtgcaggaatcatcagccttgataactctcttatttgccttcttcaaaaaacactctcttctttgccagcaaatagcaatcgtgtaactgccttactatatttagattacactgaaaaatgtatatgctacaatgatttgtaaaagctgatcgatatgcaacactgctatgcaaaacaaatgaagattactaattagcacaaattatgattttgatgatccttacggatgaattagatttgaattgtagaaaaaatgttacacctattatgttgttctgatttctgaaacaaaagccaccgggccaattggaggtaggctgttggtatatacgtgtacgtatgtactcatcaattcagcatccaattagtttgttcacatcagttgaatagaatcaccactcaaggagcatcctgcctacaaatttaaatgtgtgttttgcttgcttgtatttggaaatacagtgttgcatgtgcttagatgaaaaaaaatcgggctttgatgcaatgacttaatttctgagaatataagtacagttggctattaagttaggctcaattttgtgttatatatgctatatatcgtacaaccattagtgcttaatgttatacaagccaattatagtttcttttgggagtaaaaaatatatttttacccttcacatttcgaatacccagcctcaaaatcctgggtcaacccctgcacagtgcacccgtgccgctttcccttgctctttgcctgtcgatcccccatctgccccttttctagcaggtatcttcattcctctagctcatagtttcattgttaacagtctctcgttgtatttgaaccataaactatgaaacatttgtccttaccaattcttaaattactgaatttgtgattgcttattagtgaatgtgccattgtagttgatgaagctcccgtaactgaagaagaaccaccaacagtttccataattgatgtgtaagaccttttctacttgaactatatattacaacatttgcacattttgaacctagcttgttaagttagtcaattattataagatattattgctatatttctcgccttttttttcaactaaatttgtaattccatatgggatttacgatgttcgaaacttttgttatgtgatataaacttgtgaactttgttttgaaatttgatttggaagttaaaaagtacactcaaatttaccaatgacggtgcataattgcaaattagcaactactcctaattaactactttgctcaacagcatttacgtaggctggtttctcttttctaataatttgccattttatattttgtaatttactgttgcttttacagattctgagactgatttctctttcaagg

SEQ ID NO: 1402 - DNA, 1358 bp, Oryza sativa
  Intron number 1 from transcript LOC_Os02g14720.1 (locus LO C_Os02g14720) derived from phytozome v7.0 (chr-ID Chr2; po s 8115672 to 8117029)
ccgccgacctcgaggagtgccccatctgcttcctggtataaaaccgcctccggggagatgtggcgggtggacgggaggaagagatctctcccctcttcctcacttcctcctcccgcttccttccacttcagctttttctctctttttttttggtgggattttgtcgtaatgctactactagtacttgttgttgcgagagtagggcgtggattgcgtgtggccgggtggtggcgtggagcgtttcgattagggggttgattacttttgctcctgttcgattgtggagagtgccggtggtgtgtggccgttatggagatggatgaccacgcgcagtgttttggggcaagaatttcagtcgacattggcacggttttggggttgtttgtattgttcttggataattagtgcggttcgtggagctgattttgcgaaatgtagtagtagtgtttgaattatttctggtagttagtagtggtatcatacttcgtatgtacattgtccgcaatgttctcctaaattgttttgttttcttaatcatagtttacttacttttattatgtaattctgagatacgtttttttgggataattatagtctaggaggttttgggtactcatttattattgtcaatattctataggcctatctattggctgcctggctgtgatgcattgcatgaaatttaatgtttactgccactcccggggttgggacattacagaccttataggaaatttgactagtttcataaatgaataattggccaactgttctgcaatgttgggtgccttcaatttctaatagtggatgctctatagagtacggaggtaccatggtgatatttgtttgttgtgtgtaatactttatttttggtgtattaatgctcttgggaaccgagattgagaatctattgtagtgaacttgattctgttagctgtgccagagtattttcgatgtctcttgtcaagcctgcatttatttggcacaaagtagattttttaaaaaaaaattctgcagctttaatgctactagcttactgcaattaatgttattactatataggaattttaatgcaattctatatggttgcaattttattgcaattctgcttcattagatctttagctcaaaatcactcaataaatttggttttagatgaaatcatgaaacttgtattataggagtatattatatttggtgttgaattatatgtttgcatttgtgctaatagtggtatttaacaattatcacttctggtatttctgagttcaaactgtttgacaaccactcctgtcctgaaatgcatgttttctttctttgtagtactacccaagtcttaaccgatcaaagtgttgctc

SEQ ID NO: 1403 - DNA, 3535 bp, Oryza sativa
  Intron number 1 from transcript LOC_Os05g30760.1 (locus LO C_Os05g30760) derived from phytozome v7.0 (chr-ID Chr5; po s 17762927 to 17766461 reverse strand)
tccgccaccaccgtggaggtaattaacctgtgtttagttcacactaaattaaaaatttggttgaaattggaatgatgtgatggaaaaattaaaagtttgtgtatataaaagtttttgatgtgatagaaaagttgaaagttttaagaataactttggaactaaacacggcgttagttgcgaaatcaacagaagttttttctgatcgatctactagtctttttttatttactccatgaatgcgcactaaacgatgttttaggattacgttaattaaatcaactttaaaatcttatgacctaaaaattccaccctatttttctaaaaggtagatgtataatatgtgagtttaattaggattgtgtcaatatctaagtgtcaatataaccctgaaatgctcaaattaaaatggcattttgtctgggagtccttaatgaattgtactgtggaccaacaagcattgtttgtccgtgatttattttctaaaaagaagaattatgaacacacccacacatggacaaaaatattttaagattgatagtcaatacaaatgcactgttgacatagactcatcaattagcactgaaaaaataattatacaaaaatatgagtactcatacttaatgagttgaagactagaatttgactgagtatattctaccattcgaaacttaacctatttaaggctgagttcgtttgttggagttgtgaactaataatcactcatacatatgaaaacgagaaagaagtgttggcaacctcaagcaacggactcagtgttagtagttacgcttcgtttttagaggtaaccacaactacctaccgagtatcgagataatgtttttgagaacgacatttaaatttggtcaatctttaatcatgttgtgaacttttttattacatttctgaacttagtggaaattaaatgatctttctcgccagataatatagccgacatgattttattttcatggaaatcataggaaataatcatattccctacaaacattttgtcgagataaaacctgccagacatctcgactccattattattatctccgagtcataatatttgataattttgagtagcggaccatatatattttttaaattatttacttatgataaataggctttatattaccacatatatgatttgcactacataaatataaataaatatgtaccgatttacactacatattttcttcacatttatgataactaggctttatattaggtttgtccatgtttccaagagaaaaaaatatttttatatttaatcatgagtaaatattttactgtgagtaaaaattttatttttgctaatgtggaaaaatctcagacgtttgttttcaaatttaacggtagttccaatgtttctaatatatatggtttgtattacatactttttctgtttattaggagaactcattttctttgcgtgcgaccgagagagagggggggagatatagacgtaactaaatgcgttgacttagtttaatattgacaactactgctaatgcgagaccgacacatgagtctactactcccatcgtcccaaattataatatttttttacatggtcttgaatgatatatttttgactattaatttatttaatattatgttatcaaacaactacaaaatttatatcacataaagtattttaaaatacaaatctagtgatataacatgtataatacttagagtgtgttcggaagctagtgttcccaaccgaaagagtgcgcacgaaaaacggagcggtccattagcacgtaattaattaagtactcttagctaattaatattttttaacaaatttagactctagaacaagctatattttgtttattaataggacacatcatacattttccttccctactaagggctactttgggaaaaaagttccgaaggatgtattcggaaagaattactatatggacattttgaacaaaggaatggcttttctgaattcctttaaagtttgttaggattgcctacaattatgagaattttggaggatttttaacataaggtttaacgtcttgaaaatattcatttatgcctcctctcttctgatcaattcctattctttttctgtgatccatacaaacgatatggttttcttatatttttctatcataagacttgtagtgacaaggcactcgaattctaagtttttcaaaaattatgtattccaaagaagttgtcccaaaatatgagggatttttttttatttttagataaagagagtgtttaggacattttagtcatttttcctactacctctaaccccataatatagctatctcttctattgaagtttgaatggtagaggtagttatattatgagatgaaggtaatcggtaattctaaaactggtgggtaacccgccatgcaattggtccaggtggtcgtataggtccgcgacgcgtggagaaacgagaggaacgggcggacggcacaccacgatagattttcttttctttttttgttactcgtgccttcccgatttctcgcgtacgcgcgtccgatttgggcctgctcccagcaaggttgggctgattggcggcccatgcgcgaggaaggacgcgtgacgagcggacgaatgtcgtcgggtgcgtgtgctgggtctttgcctcttgggtgggggggtactggccgggcaactcctgcgctagcttcatgtaggaggaggaaaataatagaaaaaaaaagaccaatgttagccatcaaggaaattctacaggcaaaattaatgcaaattaaatattagatagaaaaaattaaggtaagaataatttgaaagaaaagaaaatgttacatgcaattctaaaaacaaaatctggtctaatttaacctagcaatttttacatcatggagtctaggacatttttgtagttatcagacagatcccatggttggagtcaaataagtaggtatgccctggttgggttctgaaggtaattttgcactgacaaaagtggttgaattacttcacttgctccattttgttttcttcagatataaatttttaagccactatacaataatatctattttaggtgttcagcatatcttcaaaaactttattaagactgtaagtgatgagggaaggattgaaatcactaattaagggatcatttcgaatgtgtgatttttttggatagaaatttcattggcataaaactaattctgaataaacatgaaagatttattaggatatagagaaactcacgttggtgatgggccataaatcagtcaccagctcagcgcgcgccaattggcatgctgattttctagtatatactaaagttttctcgagatacaatggatgcttttatttttggaaagagggggtattcgtgtgcacacttttctacagtcacattttattaggtaaagtatgccgatctcacacacacacacacagatatatatatatatatatatatatattgtattaattaattaactaatcaatcaattcattagcaaatagtttctactaattgtacgcagcacgtgaact

SEQ ID NO: 1404 - DNA, 1360 bp, Oryza sativa
  Intron number 1 from transcript LOC_Os07g41720.1 (locus LO C_Os07g41720) derived from phytozome v7.0 (chr-ID Chr7; po s 24998766 to 25000125 reverse strand)
gaagagaggagctcgaagcgggacaggagagagaggtacatctctatgcgcgccgctgcgctactccctcctcggagaaatccccaaattgtgttcttgcatgcgtcgtcctagtagcagagagctgtcccttccattttcctttcatggagtggattcttggttcttgattacgacatgctgtgtttggtccagttcttatcccctgcgattttttcccatttcttttctctcccttgttccacctcggaaatttgggttctttttttcttcttcttttgattcttggttggtttgtgttgcataatttcagttctttgttaggcttgcttcggagttgtagttagacatcgcaagatgcatcctttcgaggaagtcaatgcatcccctgttgttagctgaccactgtatatcgaatgcactgtgagttgtgttttaggccgtggagtgggtggaaatttgacttccccattgcaggatttggtaacttgaagctaaattccgtgtgaatttgtgacggtatcaagcgattgtgtctctgataagattctgaatgtgtgaacttgctgcgatatgttctgatttactagtggtttagcttttcaatcgttattctgattaagacaagggacttcttctgtgcatatggattggcaatttggactcgagaacaatccactaaaagttgtgtaggttatctctttatgatctgcatgtaataaatgtaaacctgagactgatgtaggctacctcttattcgagaaaaagaaaaagaggctgatgtaagctacctaatgtgcattttgtgcttattcctcttgatcaggttgtttctatataagaattttctgtctgtctacttagggtaggatgctgtgtgttatttgtagtggtactctttttaggttgatttatttgtttttttattcagttatttcctactcttgcaacaagcacttaacaacctactctgcctactctgttcctactgaacagtaccactattaagtattaccttattatgatattaaggtaatatcataatttatttgcttttatggttcagaatctcatgattcagttatttcctactgtctctattcagtattacaacatctattgtcgttttttttagataattcaacacctgaaagtaactatgcataatcatattccagttaatgagtagaaacctttaataggcatcttttgatagaaaggattagagctaatcctttgatgggcaacaaaatccccaccaatctgaagaggtcaggttaaaagccctatcagttcaatttgcttaagttaatgttatcaacttgtcttgaaggctaattatagaagtacacgaagaaaa

SEQ ID NO: 1405 - DNA, 9077 bp, Oryza sativa
  Intron number 6 from transcript LOC_Os06g23504.2 (locus LO C_Os06g23504) derived from phytozome v7.0 (chr-ID Chr6; po s 13712259 to 13721335)
ggagtaattctgctgcattatacagaaggctcaaggttagttcagtgagtttcacattcaacgtaatgcactccctctttagtctggatttctgtttacatctaaacattatttgttcatgttatcttgataccatgattcagactagatagtttactaaaacaactgaaagctccagtgagctcattgcgtaattaaattatagataattccgatttccatataggtagttgggtgggctcattacctagttaagtaagtaattctgatttttgtgtgtctggaaagtagcaacatatgtgtctaggtgcatttgttcagtgatacatgatacagacatacagtattggagcatgaagaatctgagagatagtatgatctcccagaaacagcccagtagacctgtagactgtaaatgtttctgcttctcctcccatcaggattcctaagctttgttagcaggaaccccaatgccacttcgactgctaatccacttggtccagtcattccagtcatctaccattttctgccaatcaaatcctgatggattgaagagccaagtgataaccaagagctatattgatgatgtcagaagtatataggcagatgaatccgtagcaacatcaccttaaaactgatagactactagcagcaacatcagctcaagtcctttcacaaagtggcttctgaagtacattctgtatttctcagtcaaccttacatggcgaacaaaaaaacatctgccagttgctctatattttgcaccaccatggagaattgtgtgtcgaaaataatgtgacttggtcccaaggtagaaagtgaagaacactgaacagagctgaagcgtcatgattatgaaatcccccagggtgcttctgaaacctcttgctagttcagtcttggctaaggtcatcaaaagatctagctgcacaattgactgagatcccatagcttcttgaattgcactattccccctcatccatgcttgcttcataattgaaaactcagtccactattagctaggtaaagtcttccagattcaggactatttttgaaggaactaaaaataatgctccacctggaatctgaagaggcttactagattaaaaaaccatgtcaaggaacgcttgatgctacatcatgattcacggaaaaagaaaacaaatataacagggagtcagccaaatcatccttatttgataagataaggcagatggtatgatcaaactacctgttctacaaagtgtctgccctctaagagaagcccaatgacgaagctgtaggacgttttcctcatttgccccgacttcacttcctcttttggaattaattcttcccatgaaattattccatccatagtcatcaggaatcataattaaagaaagagtggaaaacttggtaacttaataacaaataattgaagcatgaagattgaagggaaacaaaacagaaaggaaacctggaaagagatcttttgtagatagaatataattgttcaccatcttcattctccagatcaagatcacttttggaatatactgttttttcactgtagtagggagtcataatactgccaagtacatagagtgacactgacacacaattatgtgggcttcaatcttttttattgaaattcttattatagtacacttgaacataacagggttatgagatattaccatggtgaattaattttttttatcttatcaaagaattctttcaatttccgtagagaatagtatctgatccgaacagaaggggcgggaaacaactgtagctccctgattccatacacaagttaggctgtgttcttccccaacctttcccaactcaactctctcgttttccgcgcacacgcttcccaaactactaaacggtgcgtattttgaaaaaaaaaattctacaggaaagttgctttaaaaaatcatattaatccatttttcaagtttattttagctaatacttaataaatcatgcactgatcgtcgctccgttttgcgtgttgggagtgaaggttcccaaccctcgctcccgaactcagccttagagccttatgaaagagggaagactgttattaatagcaacttttcttcagacaaaaaaaaactgctatttgagggaatgccgcatgggccctataacttacttttctatttccaaccaaagctagaaaagcagcgcatctatcccgagttttcctttgtctatcctgagttttcgtgtctagcttgctttctcactccccataacggcgttcaaagaaaatctcattctgatcctataacttataactaagtagtgtactaaagagaagactaggatgagtaagcccttacctcaagtctatgtgtggcaactagctatattactatttattagtcagactttttcttgatgggcctattgccgcctatttaggataataataaagtcttctacaattattggcacattggcatatagttactcctattagtgagaattgtattcggaggagagaaccttgcgctaaaagggctttgatttatggtatagattaggaattggaataaataaggctaactacaagagagaagagggtctacagccattctatgtcaacactgaagaataagacatctatccttactcttgcatcaacataagacaatcttcaagggaggagagtatattgaatatgaggctgccctttggcaaactcataataaggctgatgaaagcgaagcagaattgaaaacaaatatggtactccctctgtttcaaattacttgttctatatttgtactaagtcaaacattttaatctttgaccatcaatttctataaactcatactccctccattccaaaatataaggcacaaccaccattaacccaaagaccaaaaaataattattatcatcttatagtttagatcatcctaataaatataatgcatgcatccgataggattagataacatagagagtggaatattttaaaaaagtagtaatttaatagagatatgtcatagttaattgcatgcttgcatgcatgccttatattatggaacatctaagaaaagtggttctgccttatattatggaatggagggagtatagtttaacattataagatttatatttttagattcaccatgagaaatacttctataatatataattcacatgttaaactacacaattttctaaaaattaatggtcaaagatagacatgtttgacttaggacaaaccttgaaacgacaaataatttgaaacggagggagtacgctgttgatccttatagcacatcttgactctgaccatctctaaggtcaaccttatggtttgatggaataagtcttgtggctgattagtctttgcatctttttactttttcagcttttaggatgctctaggcataatcttcgttttcactttctgttttagatgctctaggacagcatcttcctttttcactttctaggacagcatctagactagctctaggatgctctagactagctgcagccagccagctaccagctataaatatgtatcccaccctcccccgagatggtatggcattcatgagaaaataaacagaaaattgccccaactctcctagcgccatcctctcaatgagagtaaagattttgctactaacaagtggtatcagagccattctatcctgtagcctagacatctcttgctcatccccttcttgagctcccctctgtcctcagccggcagcaggaacaccgactgttcctgctcatcccttttcccctgtgctgacaagcagcagctcatcagaggcagcctcttccccacgtagcagcctcccagtagcgtgccatgtccgtaggacagtctcagcgctcggtcgcctcgagcgcgcggctccggcaggaggccgagctcgccgcggtaggggaacacgagcgagcggcggcagagacttctgcgatggtagcgagagcatcaaggctggtggcggcggaattggcggcggcaagggtagaagtggaagcagcggcagcggcagatgcagcgcgtgcggcggcggcagagctcaaggctttgcgcgacagtagcaccaatagctctgtctccgcctccgacaacaccgatgatgagctgacgagggaggcagctcgtgagcgggcggagcagtgggcagctgcgcatgcagggccggccctggcggggggcgagcggtgccgccgatctgggcccccagattgcaggggcccccacccacctcccccacccccctccctcccgcgtccctgggccacagatcgagcgcatgcatgcgcggaagccggaaagcgaagcgccccgcggtgaaaagaaaacagaaacgcgcgtgatagccgccgcccacatcccctcctctactcttcacgcgcacgcgctcagcgatcggcgaccgggcgatggcgaattggcgaaaagccaaaaatcaaaactgcatcgcgtgtcgccggcggccggtgccaacgtaattcactccatggccatcaccagctgctcggcaccgacgcaatctccctggttgctgctgccagctgctcagcgacgacgcaatctactgcgtcgctgctgctcggcatctcctaagcctccatcgcctgccttcccctcggaaggttagtaatcagcacaccaatacaccatctccgtagcccaattattaatttaattactgctgtctaatctctcgatatcaaaacataaacatatgtaggtcatctcgacgcatggcgtcgcgggcattagcgcttaattgtttgttttgtagtagtatgttaagggccccaacatttagtttcgcactggggccctgaaaactcaggaccggccctgcgcgcatggagagagatgtatgtggctcctcacatacaaactgaatctgagagacgtgctcaatcatccgcatcaggtgaggagcatatggaagccccctcctgtactgaagagatgccatgcggatttcctcccaaacaaattgaaatacatgaaaagggacgacagggaggattgaacctgaggagtacggagcgggagtaatggttgatgttgtttgcatcaccatccttgggagtcagagtccgcctcaagatgcggtcatggcatctcttcagtacaggagggggcttccatatgctcctcacctgatgcggatgattgagcacgtctctcagattcagtttgtatgtgaggagccacatacatctctctccctgcgcttacccaagcgttgttctgtgcctcaggacatcccctccacatcctctcagcctcctactacctcgtgagcgtccctctcttgtggctcgttgtgagcagtctcccttattccgcattttgctgagtctctttggcctttgctctgcggaggccaaaaagaaccgcagagcgtggaacgaggtcaagaagacggctcggcgcgtcaagaacatgtaggcgcagctcaatgagcattttcacgtggatgtctctccctccccttcgggctttgaggccgagcccgatgagcatgggtaggaagagatcgaggatccttttgctgggatgcctccggattacgatttcttcaattttggccatggctttcgctatcctcctcttgaggatcctcccaggcgccgtttgtctgagtttctctcttcgtcctctctttttggtgcttcgatgccaaaaagggagaatatctatccttttattatggtcgatcatagttggtttttctttgtataagactatgtgtggttcttgagttagtttaatgttattgtaagaccttattgtttaattatggatgtttggaatgtaatggatattattatgctttatgattaatgtgatgcaatgtctcatttcctttatattgtgcttgtgatgagatgtaatggttattatgcatatgaagtgatgtatgtgatgagtaaaatgtgatatatttgttgtcttgtgagattcaatgtggatgcaaagatttacggggagctcttcacttgctttaatgcacactttgagggggagctttcactaaacctttgcaccaaaatcatctattatattcattctctcttgtgatctaatcgtattgtcatcaatcagcaaaaatggagagattggaagtgcatctaggcccctaatgattttgatgattgattacaatacgattagagaggactaactttttattcaagcaaatgtgaaggttgttatttcctcgacgtgttgtaatgtgatgcatactagtagccaagtccaattacatgtattatcagtaagagtacattataatataaagataagaaatatttgaaaataaaaaacctcattggcaattagaaaaaaccaattactcttaatttttatcctaaaaatgcctagacaacatacctatattggaataatatatccagataatctgtagacagtatacccatatttgaataaaatgataacaaagtatatcacatacctaatacatattaatattcttgaaagttttaggataattagtaattcctaagaaatatcattgcttgagttttcgctaactctgttttatcattggaaaaagtacgaattaccccctgaactatcgcggtcaatcgaattacccccctgaacccaaaaaccagacattactcacccccaacttttaataccggacgaattacccccctcaacacagttttgagcggttttcacttgagtttgcacacgtggcgtctacgtggcaatccagtcagcaaataaaaataaaaatgccttccttggtcccacctgtcatacccctctctctcccgtgtgcacgctcaggcaggcggctccgcaggtaggcaatggcggccgacgacggaggcgaaggccgactaggcgccggcatggtcccgttcatgcgactgcctcctcacgaccactcgcgcatcggctcgccgccgcggctcctgacagtggggagatggttgcgggagtcgtagaaagggccgcgtcggcgccgcggcgcacgtctccgtggagctcgtcatgggctacgtcggcaacatccccggcctgccctacgagagcctggccatcgctgacccgctctcccccgacgccgtccgcgccttcgccgcctggatgtggccggccaccgtgttcccggaggaggcggtgctcgcgtacacggagaagctgacagcggtggaggctgcggtgcggcggatggtgcgacggtggaggcgctggaggtggcggtgcaacgtcggcggaggccggggaggcgcaggcagcggcgatggcgttcatgcttcggctgtcggagtacgtggcgcctggcagtggggtggaggtcggcgggaggctggggctccctgcgcaccaggacacgagcttcctcgccgtggtgacgcagaacggcgtcgacggcgtcgaggtggagtgtggccgctgtccgcctccgctgccggctgcctgccgcctccacctatggctgcctggtccgccaccgccgccggctgcccagacgaggtggcgccggcgttggcgccgacgtccttgaagaaggcgaccttgttgagggcggactggccgtagaattgggaggccttgagtgccgaggagtagacggcgaagcagtaggagctccccgcaaagcactggatcagcgcgctcgccgccagcgactaccaccgcgagcgcgaggccatcggcggcgtccgggattgcttgatccttgagatggaattggagcatgtggttacgtggatgagtaggacacgcactccactcgcctcgtattgagcatctgagagagatagagacagtgtgaagagatgacacgtgggcccattaattatttttattatttttttctgatcggattgccacgtggacgccacatagatgtaaaaccactccagtttgtattaggggggtaatttatccggtttagaaagtttagggtgtaaaatgtccggttttgtggttcggggggataattcgtactgtcacgatagttcaggggggtaattcgtactttttcccacttagatttgaaaagtattcttgataagatcacaaagtccagcaccctgcaccattactcgaaatctcaagacaaattccagatcccattcacagtatagaacaggtttgggcttgtatcatcttggccacaaaagaaagattgagattaatgatctaatttgcttttttccaaaggagaaattttaattgtcttcaatggcaagggcctttttggctgggttccaaactgtattttctccaaaccagaaactgatgcaaatgggtggtattagaagtagatattttcttatgcgatgacttgcagagattttttgattgatttggtaaattgtgctggtagaaaaaaaaatggccatgatccctttatcaaataaaggaagaattattgggtctgtgagcacagatcaaaccactcaacatgaatggttcttttgcagatgtgtttgcaatttgtagatgaaatcaaatgatatttcattgttgttttgatagtgattctgcaccattgatgtttcactttttaattttgtcaaaaagaaaacaatattctcgtgcgatcaactcatcaccaaacttaatacatcaagtgaattactacaaaagaaagtttaaggcaagcgagcactataaatgaacaaaaagaagctagctcagaccaaaaatggatgggtttctagcttggcttctaaaggttcctaagggcagacaaccaaaaggaagcttctgaggattgaggaagcactagccagtagccaccccaaacaggtccattggtggactacttgattgtacaacatgagcacctttatcaggcaggtttcttttgactctgatgcttgactctgatttcggtcacttccatttaagtctcagccaattgtcctaatatctttagacagcgataatttgttgtcatctcagcatttgggaactctttattcctcaaagctctaatgcttatgcaacaagtagataaaacggaacacaactacatccagtttgttcagctaagtaaaccctaatgttaacgttttatacaggagag

SEQ ID NO: 1406 - DNA, 6635 bp, Oryza sativa
  Intron number 2 from transcript LOC_Os01g58194.1 (locus LO C_Os01g58194) derived from phytozome v7.0 (chr-ID Chr1; po s 33642459 to 33649093)
gcgggaaagactacgtgaacggtagccaagaacaggtaagttttgttggcaatatagtcattaatcggcatattttaatccaagaaattgaaacaatgatcatggcataaatagcgtagggtgatcttaacataaccagtagcatactaggcgcatcatgaatgtcagaaacaggaacataccagtaacgcgataacatgctagaggcatcatgtagaacaggaacaagaacatagcgcacatagttcgctaacaatgggaacatgaatagcgctagcaacagtagcaggaggagaagattataccccgagaatggccctccgctggatggtgaggcagaattgcctccgttgttgttgttgtcgttcacggcacctcctcctggcgcaccagctccggatccggatccagctcctgtcggcggcgtaccacctccgctggcagtggcggcggcaactccagacatggcgacgagcagtcgtgtgggaggcactccccaaaaacctgatcacccgcctacccggtgcagatctcaggcgaaggtgtggtttcggaggcactgctctttccaatctctcgtgcgcgcaagagatcagaagcgaggaagcgagagcaactcaggcgcggagaaggagaaactaacaccgggaaagaagcgaagaagacggatcgaactcgcggcctccttatctatcaggagaaagaacgtggacgcgctgttgcggagggaatcgtgggaacgtgggttagtggctgcaaaaggatagcgacgtgacgtgacgcacgcccgccgccagccagccacgcccacggcacggcacggcccggcccggcccggcgcgcgcgcgcgcgcgtgtggcattccgacccccacctcaactggtcaacagggagcctccaataactccctatttaggttgagatatttctcgcttaaatcctaaggtggtattattatcctcaacatttattatgggcctttgagatttaatattataagttgggcctagcccaattattctaacaatccccaccaaattttaaggctcataagaaatgttctcaatgttgtgcctgtttgatataccagggttttggtggagactgttaagttgaacttccacctaggaaatgagctacatcagaccacaactgaacagtggactatgccttgaattgtaagttttgtgtgatcaggtttcactcagaaccttgactggtactgggctgccgttcgcatcccctctgtttggagcatataagtcaaactccaggcctttcatgagtatctagagatcgcccaaacctcatagactgtgactagcagtcgaactcatataggtgtgttccttctgagatgttctgcaggtcaacatctctgcttggaaaagccactcggatcacattaagacataagccatcctaccatgcagaaaagaagagaagcacatcatgaaaatgagcccttttcaagggtctcttctctcagtcacacaatagtttgtttcaccatccaaattcacgggatctccgatcacaatggacaggtttccactattatgcaaccttaggtgggtatcaagcccatttccctcgatgcactgtctatcacattacgtggtagccccttggtaaactgatctgccagatttctagccgtttggacatagtccaatgctatcactccggagtttttctgctttctgacagatttcagttttctcttgatgtgtctagatgacttcatgttgtcctttgaactgttcactttaataatcactgtttgattatcgcagttcattaggatagctggcactggtttttcaaccaccggcaaatccatcaggagttcacgaagccactcggtctcaactgtcgcagtatctagtgctgtaagttctgcttccattgttgacctcgttaagatggtctgcttgcaagacttccaggaaacagcgccacctccaagtgtgaacgcatatccacttgtggcttttatctcatcagcatcagatatccagtttgagtcactatacccttctagtacttttggatacccggtatagtgaattccatagctcaaagtgccctttagatagcgcattactctttccagagcctgccaatgatcgtctcccggatttgagacaaaccggctcagcttgcttacagcaaatgagatgtcaggcctcgttgcgctagccaagtacatcaatgaaccaatgatttgagagtatctcagttgatctcttactattcttcggtttttccttaatagcacgctgggatcgtaaggagtaggagctggcttgcagtcactatatccaaagcgactcaaaaccttgtccacatagtgggattgcacaagtgtaatcccaccctcatctcctctttgtagtttgatgttaagaataacatcagcctctcccaaatccttcatttcaaaattattggacagatagtctttgacctcctcaatcacattaaggctggtcccaaagatcagtatgtcatcgacatataagcacaagatcaccccttctcccccaccatagcgatagtatacacatttgtcagcttcgttcacaacaaagcctgcagatgtaagcgtggtgtcaaacttctcatgccattgcttaggtgcttgcttgaggccatacaaggatttcaatagtttacacaccattccctcctgaccttctagtacatacccgtctggttgatccatatagatctcctcctccagctctccgtttaggaaagctgtcttaacgtccatctgatggacgagaagactatgagaggctgccagagcaagtagtactcgaatcgtggtcaagcgagcaactggtgagtatgtgtcgaagaagtcctcgccttctttttgggtataacccttggccacaagccttgccttgtacttttcgattgtaccatcaggcctaagctttttcttgaaaacccatttgcatcctacgggcttgcacccatatggacgctcaacgacttcccaagtaccattagacataatcgagtccatttcactgcgtactgcttccttccagtagtcagcgtcaggagatgaatatgcctcttctatggttcttggggtgtcatctacgaggtatacaatgtagtcatctccaaaggattttgcaaccctttgtctcttactcttgcgagtatctacaatgttgtcctcctcaggattttcctcaggcgtttgatcattgtgttctatcggtgcatagtgctcatggggcatgacagtttctttactagaagtgctaggtgtatatttcataggaaattcattctcaaagaatgtagcatctctggactcaagaattgtaccagcatgcatgtcgggtactccagagtttactattaagaatctataacccacactgtggatagcataaccaagaaacacacaatcaacagtttttggtccaagtttccgctttttggctataggtacatttaccttggccaaacagccccatattcgtaggtatgagagatttaatttcttcctttcccattcctcgaatggtgttacttccttttgcttcattggaattttattcaggacatgacacgcagtcaaaactgcttcaccccaccattccttggaaagccccgcagtgtctaacatggcattcaccatctcagttagagtatggttctttctttcggccaccccatttgattggggtgaatagggaggcgtcatctcatgaataattccaaactcttcgcaaaaggatgcaaactcattggaaaaatactccccacctctatcagacctcaactgtttgattttcctttcaagttggttttctatctcagctttatagattttaaagtaatgcaatgcctcatcctttgttttcaatagatacacatagcaaaatctagtcaacacgccgttcatttcgcacaaatcagaatgaacaagttctagaggtgccaaattcctcgcctcagatgccttgtgaggcttgcgaggttgtttcgattgaacacaagtatggcacttggaacctttgaccaaagtgaattttggaattaaactcatgttagctaagcgcgtcatacacccgaaattcacatgacagagtcgcgaatgccacacattagactcatcattctcgctaatatggttcacagcattatgattattacacatgtcattcaaagaaaagcggaacaagcctccgctgtcataacctttttcaacaaaagtcccatatttagatacgacacatttattggactcaaacacaagtctaaaaccttctctacacaatagagagccgctaactagattcttctttattgaagggacatgctgcacgttcttcagctgcacggtctttcccgaagtaaactttagatcgaccgtaccaacaccgtgaacagccgcaagcgacccgtttcccatcaacaaggaggaacctctcccgacctgataagaagaaaacagagaaatatcagcacatacatgaatattagcaccagtatccacccaccaatcaggtgaatgaaaaacagagagaactgtaggtaatattttaccgtaccccgatgttcctccgccctcgctaatgatcatgttggcagacttcctgtctttgcgctcaggacagtccttggcccaatgcccagacttgccacacacaaagcagtctccctttgcctttcccttgcccttcttcttaaaattggttgcagccttgggtttgacatcaggcttgactttcttgttgttgtgggatgcatgagggttcttcttctgtaccatattggcactagaacctccctcaacctttttgccccggacgtcctttgccctcgccttctcctcaacacccaaagagccaatgagatcaggaacactgaactcttgtctcttgtgctttagagaagtggcaaagtccgaccaagaaggtggtagtttggcaataatgccacccgccacaaacttgtccggcaactcacagttgttgttctcaagttccttagccagcatctgaatctcatgagcttgttctactacagaacgatcatcgaccatcttgtagtcatagaactgctccatgacatacagctcactgccggcgtcagagactccgaacttggcctcaagtgcatcccacatgtccttcccagaaggcatgtgcatgtacacgtccactatgttgtcagcgagtacactgatcaatgctccacggaacaggcaatccgaagcctcgaacatggcctcttcctcaggaaaaagaggtggttcacttcgtttgccccgtgaaacataaaagcactgcatcgctgtcaaccacaatagtgcacgtgctttccatctcttatagtttgaaccatcaaaagcatgtggtttcagtgcagcagcaaagccaactaccgaaaatgacctatcaggtttttggattgttggcaatatagtcattaatcggcatattttaatccaagaaattgaaacaatgatcatggcataagcagcgtagggtgatcttaacataaccagtagcatactatgcgcatcatgaatgtcagaaacaggaacataccagtaacgcgataacatgctagaggcatcatgtagaacaggaacaagaacatagcgcacatagttcgctaacaatgggaacatggatagcgctaacaacagtagcaggaggagaagattataccccgagaatggccctccgctggatggtgaggcagaattgcctccgttgttgttgtcgttcacggcacctcctcctggcgcaccagctccggatccggatccagctcctgtcggcggcgtaccacctccgctggcagtggcggcggcaactccagacatggcgacgagcagtcgtgcgggaggcactccccaaaaacctgatcacccgcctacccggtgcagatctcaggcgaaggtgtggtttcggaggcactgctcacccgcctacccggtgcagatctcaggcgaaggtgtggtttcggaggcactgctctttccaatctctcgtgcgcgcaagagatcagaagcgaggaagcgagagcaactcaggcgcggagaaggagaaactaacaccgggaaagaagcgaagaagacggatcgaactcgcggcctccttatctatcaggagaaagaacgtggacgcgctgttgcggagggaatcgtgggaacgtgggttagtgttgcagagggaatcgtgggaacgtgggttagtggctgcaaaaggatagcgacgtgacgcacgccgccagccagccacgccctcgcccacggcccggcgcgcgcgcgcgcgtggcattccgaccctcacctcaactggtcaacagggagcctccaataactccctatttaggttgagatatttctcgcttaaattctaaggtggtattattatcctcaacatttattatgggcctttgagatttaatattataagttgggcctagcccaattattctaacaagtttaagagcgtcggtgcatggcacaagatcgagcttgcattaccattgccgttgatccaaagcatgaatgcatccagctgttggcctcaccatggctaagggctgcaggttcccatctcgagcctagtcgggaagacggtagg

SEQ ID NO: 1407 - DNA, 515 bp, Oryza sativa
  Intron number 2 from transcript LOC_Os07g47194.2 (locus LO C_Os07g47194) derived from phytozome v7.0 (chr-ID Chr7; po s 28211324 to 28211838 reverse strand)
tacagttttcaggcacaagctcttcaggagagcaggtgataataattacagcacaaacttgcattcttttgtctgaaaatgacagtccaattgtccaaagtaaattttgaatttcaaagtttgatttttaagaatagtttaggtagatttctttttattgatcttcttgaactattttgagaggagagcttgacaacctctgaaactgattctaaaatcaaaatttaaatttaaaataagcctcagcttttttgtgatagctatttgagggtacaaatgaatgaattaactcctattaagttgaaaagtttttgtacaaaagtatttcaagaaagttttatatagatttttttttacaaaacacgttggttagtagattgggaagcgtgcaaatgaaaatccaaaatccagaaaaagaatagggcctatgatatgaagatgaacaagtaatggatgatctagacaccagcaaaattgcagggaaaccattcagaagctggcgcaattcgggcagc

SEQ ID NO: 1408 - DNA, 533 bp, Oryza sativa
  Intron number 6 from transcript LOC_Os07g28800.1 (locus LO C_Os07g28800) derived from phytozome v7.0 (chr-ID Chr7; po s 16862326 to 16862858 reverse strand)
gctcaacgaaggtgaacttgtcacatctgactttattctatttttctctttgcatgttttttgtatgccaggctgttcggtgaataatacacttgtttagatagtcttgccacaagtatctcgagttcacacaagataattggatatgattatataaattgctggaatggaaattgcggaccaaaatcccctatatcttcagtatttcatttgcatctccaaccttcatatgaaggattggttattagctcacacagagacaagtttaccagtttccaccatcttcctttctttttttttttctttctctgaacgtacctgtatctgattcaatagaaggcatggtatgaaattattgtttgaacgaacagatgcagttcttggcaatggaatattgtcttttttgatgttttgagcttatatcttaaaactaccagaatcacttatactgttacacctatttgtttatgtaactcatgattttccttaaatggacaggctactgcagaggagaaattcaagcactgcagtgc

SEQ ID NO: 1409 - DNA, 5528 bp, Oryza sativa
  Intron number 4 from transcript LOC_Os02g32690.2 (locus LO C_Os02g32690) derived from phytozome v7.0 (chr-ID Chr2; po s 19408130 to 19413657 reverse strand)
aaggtaaacattaaccacccatttatgtattcttttttttttctttccccttgtctctgttataggaatgctttcttttgtcatctctatctatctattatattattaaaggaatagaaaaagaaacctccacgttcgctctcatggcctagaaattctcacattaatcggagaaaaagaaaaagcagagtccatatagaaatacaatttagaaatagctgaatttcggaattaaaaaataaggaatattagaagaggagactagagtccatatagaaatacaatttagaaatagttcaaattcggaattaaaaaataaggaatattagaagaggagactagagtccatatagaaatacaattaggaaataactaaaattcagaattaaaaaataaggaatattagaagaggagactagagtccatatagaaatacaattaggaaataactaaaattcggaattaaaaataaggaatattagaagtagagtatagagtccatatagaaatacaattagaaaataactgaaattcggaattaaaaataaggaatactagaagtagagtacagagtccatatagaaatacaattagtaaataactgaaattcggaattaaaaataaggaatattagaagtaaagtatagagccatatagaaatacaattaggaaataactgaaattcggaattaaaaataagaaatattagaagtggagtatagagtccatatagaaataaaattaggaaataatagaaattcggaattaaaaataaggaatattagaagtagagtatagagtccatataggaatttaaaactaactaaaatttggaataaacataataaaattaaaagtagagtttagagtccgtataaaaaaataatttacaaataactaaaattcgaaattaagaaaaacatgggaagaagagtttaaagtcaatataggaatacaatttagaagtaactgaaattcgaaattaaaaattaaagaatattgaaatatgagtttagagtccacatagaaatacaattagaaataatgaaaatttagaaataataataaataatattgaaagaagagcatagagtctatatagaaataaaatttacagaaaattcggaattaaagaaaagaaatattaaaagacgagtctagagtccatacaggaatatatataatttacaaataactaaaatttgatattaaaaataattaataactaacacgtatataaaataaaatataaatattacacattagtagttttgtaaagttattgcaaaatttaaaattatgttgtcattttaatatatttgaataataaaatgataaaacatatatgctattatataagagaaaatataacgatgctagccgcgtaatcttcgcgggccaccatgctaattatattattaagacagctttgaaaagaggcaccacgttcgctgtgggggctagaaattctcacattaatcggagaaaaagaaaaggagagtccaagtagaaatacaattcaaaaatagctgaaattcggaattaaaaataagcaatattaaaagaagtatccatataagaatccaatacgagattagttaatattcggaataaaaataaaaataaaatctgaaattagcaaaaagaaaagaagagttcaagtaggaatacaatttaaaatcaactgaaattcataattaaaaataagcaatattgaaagtccatataagaagccaatacgacattaattaaaattcataataaaataatatccaaaattagaaaaatgaaaagaggtttcaagtaggaatacaattttgaaacaactggacttcaaaaaataaaaatattaaaaagaacactatacggtattaattaaaatttgaaaaaaataaattctgaaattaaaaaataaaaaagatttcaattaggaatacaatttataaataacaaaaattgatgataaaaaataaagactattgaaaaaaaaatgaccatctaaaacacatgacgagataaattaagtaacaggcctataaaagaatagagtggtggcggttgatacgacatataaaaactgttagtaaagcaccaaattgaatcctaatgatgattaaaagaagggacgacaggcaggccgtgaagcaaacgggtaaggcagttgccgggacttgtagaaagtaaaaaaaacccattgataatcatattcgatttttaaaatcttaatgacagcaaaaaggagaagtagcgtgcagcgtgtataggagtacagttgcagagccgccgatggttggtgggacttctagaaaataaaaaatgaattctaatgatagttatgttcgatttttagaatcccaatgacaataaataataggcggcggatgggccgtagagaagtatagtggcatcgtttgacggggcttctaaaaattataaaaaatgaaacccaataaaaactacaaggtccaatttttaaatattcggaactactaaaaagtaaaaaaaacaatgctaatcatgttcgattttaaaatctcaatgacaataaagaagggaggcagcggacgagccataaaggagtacaatggcaaaattgctgaaggtttggcgagacttatagaaagtaaaaaatgaaccggaatgataattatgttcgatttataaaatcccaatgataataaagagaaaagacagcggacgggccgtagaggagtataattcgtttgacgggacttctagaaattataaaaacgaaacccaacgagataataaactcaaaaaactatataagatccaaattttaaaggtttcaaggagaatgaatagaaatagtggtagaccgagcaagaaaataaagaaggatatgacagaagtaaggggtagcagctggtgtgacttttaaaaactatataattagaaatacggggatagctatttaataaatcttaagtaaaatcatactgaaatgttcatgattcccattatcaagaatagggttaatcctaaatgtaggtgcagataagaactagaaagcaccattgcatagggaagttctttgagtagtaaaaactctcaaatcgaataaaactctttagcaattggtctgacagaacggatggtaaggtgggggacccatacctttattctattcccgtgcttagagcgagtgaatgtttggatcatatgctgccttgcctgatcttactagagtgagtttccttctctaacgagatgatgcatattctcagtctggactattcccagatttacgaccaacaactagtcttatcttagtccatggagaggaaaaagcaaacgaagcatgcttctgtcgctccatccccgtatgggtggagaacccgtcgctgtctcggctgtgctaccggaggctctaggaaagtcggaggagagagaactcggagattcgtgctggaacgcccactttgcattttaaagaaaaggtacaaaaacatatttattccgaatcagatggggaaatgcactggagtaccgatgtttatcatgcgcccgaatatcaatatggtaatcttcgtcgattttgtgccgctacgcacatagataccaaaggtaaatctacacggaatgtggtgtaaatctacataaataagagataagtaaccctattgtctcttctccatttgtatatggtgaagaattcagtctacatgcagtgttgaatgacgagtcaaagttcaccggtttcggcctgtgatttataaatagcttcggcacaaaagacaaaacggtccctccaacgcccgaatccttgtagtactaagtcgtggcttacaagctagcccctactccttgtttgggaaagatctatatggtttaccaacctggcatagacactagatcctttttatcaagcacgctactggcgcttccaaaggcgaagctctcgtctttggcgaccagcaaactctgggctaaaacctgtagttttgaagcaagggatgagcgcgaaagccgttgcgcttccgtacacgcgcatacgttttcttgctccgtcgcgcgttagtaaaataatgcgcagccgttttcttgctgggcgggacacggatttctgcaagtacaggtacaaccacaaccgctcgggagttccatggttctaaaggaataattcctttcccatttcccttttgagacaattatacgttctagaaggcagttctaattgatcaataaaaatacaattcaatggaattctttttttgtttttctttagattagtgactgcggaggaaattagatgaagtactccagatacaaagtatggaaaagtatctagaacttctcccccgggccctactccccaacctagagtagctaagtgcggaagtaaaagcagcccctacacttctatgggttgttccagcctctgctcagtattccgcaataatatcgcacaatcctctagaatagtcaggccgcattttcgttttttcactcaaactcaaagggtaaactttgcttcttatctttttttttgaagatcgacgaatcaaatgatatttctgttctaatttctgccgcttcctctctctctgaatcaaacttttttttttgccataatgtgccgttcctactatctaccaagtatacggttctaatcctagatggaaaaataatctaccaagtatacggttctaatcctagatggaaaaataaatagaaaaagaaatctaagaaggtagatcctccccctccatcaagagtaatgaactaggtgctgatacagtcgtctagaagaaaaacggaaatttcgttttcatgatggtatgacagaacgacaattacttagatatgtacatattgctggaaaagcaaaagggttacgaggaagggcgtagcaagcgacgaaatgcttcggggagttgaaaataagcatagatccggagattcccaaataggtcaaccttttgaactgcctgctgaatccatgagcaggcaagagacaacctggcgaactgaaacataaaagccttagaattcattcataaaatgacaatgaacagtctttatggctgttttgctatatcgcctgaaagcactatgaccgttaaagatatgattttgtttgggtgctagccgcgcaattgcgcgggccacctagctagttgtgtaaaagaagccaatagtgatggtggtgactctgccactcccaccacctctcgagttgaagggaccttttgaggacaaatacatatttgtgtgtgtagcttaatatgttatgaactgatatttgattaggaattatataagacatttcaaatttaaaacttataacatactttttaaatttcattgcaacacattggtatttggatagtgtatctaaacaacagtgaaaacttgtctcattttcctcattcagtttggtgttggaaaaaatagtttggtgtttagccatttgtaatctaaatggcataagctctaccattacaattcaattaggtatttttgtatttttgtaggcaatatctgtggaaggcttagaaaggagc

SEQ ID NO: 1410 - DNA, 2412 bp, Oryza sativa
  Intron number 5 from transcript LOC_Os04g48210.2 (locus LO C_Os04g48210) derived from phytozome v7.0 (chr-ID Chr4; po s 28531522 to 28533933 reverse strand)
cttcagaaaggcacttaaagacatacggttcagtgagccccccacaatctgttgatcatgggtccaaaatcatatcttgatgctgctatttaataatgaggtaggagtatgattgatgagctagcaaggcttacaaatgcgaccagtcattgaataacccaatctatctattactccaacttatttaaagtaatagaaaaatgagcctccacgttcgctctcacggcatagaaattctcatattaatcggagaaaaagaaaaacagagtccacgtagaaatacaatttagaaatacctgaaattcgaaattaataaaaaggaatattgaaagaatagactagagtccatgccggtatacaatttagaactaatggaaattcggaattaaaaaaaagaaaattaaaattaggttagagtctatataaaaatacagtttagaaatagctgaaattcagaattaaaaaataaggaataagtttttcatttcactcttctgcagcaatgcctgggcaagaaaacaatatgagcaaatccgcatattggaagagtagattagagttcatgccagtatacaatttagaactaattgtaattcgaaataaaaaataaaaaaaataaaaatcaggttagagtccatatagaaatacagtttagaaataactaaaattcaaaattaaaaaaaatacagaaagaagagtatagagtccatatagaaatacaatttagaaataactgaaatttagaattaaatataaggaatattagaagaagagtatatagtccatatagaaatacaattaagaaataataaaaattcggaattaaaaaataaggaacagtagaagagcatagagtccatataggaatttagaactaactaaaattgggaataaaaataataaaattacaaatagagtttagagtccatatagcaatataatttacaaataactaaaattcgaaatttaaaacacatgggaagaagagcctaaagtccatatagaaatacaattttgaagtaattgaaattcgaaattaaaaaaataaagaatattgaaagatgagtttagagtccacatagaaatactattagaaataatgaaaattcagaattaaagataaataatattaaaagaatagcctagagtctatataaaaaatacaatttgcaaataacaaaaattcggaattaaaaaaaagaaatattgaaaggcgagtatagagtccatatagaaatacaattcagaaataactaaaatttgatattagtaactatcaatgtatatacaataaaatatgaatattacaaattagtagtttggtaaagttaatataaaatttaaaatatgttgtcattctaatatattttaataacaaattgagaaaatatatgtagtattatatgagagaaaatataataatgctagccgcgcaatctgcgggggccaccatgctagttatcgatgaaaacatgtgatattcaggcaaaatttgctaaaaaaattagtttgagctttttttaacgtggtcagttgaaacagtttgatcacttagctagatatccaccgatttgttgcatgctaattaaattgttatgaaaaaaaaatcaaattttttgataagatagattcatgtataatatggcactctacaaatatacaagttcaaatttgatttttacaagttgtaataaaaatagcaaatcaaaatttaaatagtatatctatattcacaattaattttgttatttttttacaaactacaaaagtcacttttgaactcgcatgtttattgagcgatatattagaatccatctccagattactatgtcacatgttgaaaccttgctaacgagtcagtacatcatgcatccggttaaaaaagagtaaatttcacaaaactacaagtattttgatcaaattatcagaaaactacagatttaacatgacgtgtcacaaaactacagatttagtactaaatttatcacaaaactacagatttagtactaaatttatcacaaaactatagatttatggtgaaatatcacaaaactacgtatttagtaacaaaattatcacaaaactacatatttaatgacaatttaatcacaaaacttgaacaattataagtccaacataacactagtgctaagaatttaaaccctaaaatatgtagttttgtgataattttattattcaatatgtagttttgtgatacttagccttaaatctgtagttttgtgataaatttatagttaaatttgtagttctgtgatacattacttaattgtgataatttgaccaaagtatctatagttttgtgaaatttacttttaaaaaaagcataactgaataccattcttcttttcctaagtgacatccattggtgacaggatacacaattccagcagg

SEQ ID NO: 1411 - DNA, 4413 bp, Oryza sativa
  Intron number 3 from transcript LOC_Os01g70340.1 (locus LO C_Os01g70340) derived from phytozome v7.0 (chr-ID Chr1; po s 40743330 to 40747742 reverse strand)
ccggcaagctaggactcacacaatctcatcttcaggtacaataatccggaattagtcaacacctttcttcagctacaaattaagcatgcatatatactttccttttctttcactattaattaattaattactacaccttgattatataattttctctaaataaaatattaatgatgatgatatttaatttgcttgttgattgtcgcataaaatgattggaagaagcagcgatcgagtgatcaatagtgaatagtgagcagttgttgaatttgcactgcaaggtagctagtattctcttgtgctgagttgccgcatatataggttggcaattaggggggatcatgaaaggaacattatacctaatcgaaagtaccacattgagctaaggttgggatctctttgatttggtactagacaaaagcaataggtcacaggcccatatcagcatgcatgtagtatatagttaccaaaataccatcatgctgttctgtatatttgtatccatatgcatcatgcaagttcattaattcgatctcttagattcggtaggtaatttggaccataattagatcagttccctgaagaggccttatggctgaattttcatatagctttggcaaattttgaagaaaaaaaatatttgctccctccaaaggaaaaaaaaaacttaattttaggtgtttctggcttcaactcgtttgtgacgacaacatttatgtgtaggtcaatttttagcggtacaaattaattaatatttaccatggaaaaaatacatgtagctagtagcatcccacaaatgaaagtatgaaaccaatgctaaatacgtttattctgctgtttgtaaactttgtatcatccaaacataaaagagctagatcatgaaattaattttggacatgttttgtacaacagcaccaccctttagtatataacatttagttgcaaaaaaaaaataacttagacggcttccaatatttttttgaaccatttcacgaattcacaaaatatatttccactgcattacattgagattaaataactgatcattgagtaataagtaagtatacaatagcaacatatatatggtgtttatgttatatatgcatgagctgggtatagtattgttttctctctccacttccactatatacatttcccggcatgcatgcagaatatttgttctttttttctattgatatatactccctccgtttcgaaatgtttgacaccgttgactttttagcacatgtttgaccgttcgtcttattcaaaaacttttataaaatatgtaaaattatatgcctacatgaaaatatatttaacaatgaatcaaatgatagggaaaaaattaataattacttaaattttttgaataagatgaacggtcaaacatgtgctaaaaagtcaacggcgtcaaacatttcgaaacggagggagtacatgatatatgcaaaaacaagaaatatataggggagctaattaattacgaagtgtataataggtagccagctggttggtagatagtaatacatggacgtagcaacaatagaattaagtgtattaacattttgcaacattaactattattgggtcaaccacacaggaacaaaagcagaacagttgaactgtcaatgtatacgtgttgtacattatggcaatatggctgtagagccctcagctcgatccattacacgcagcactaaactagttctaccaacttattaattctcattattcactaggtgaaaaatctagatcacctccattaattaattgttcacagatataaagtgattttttgacatcaaaagtcaactagctctcactatttttttaatctaaattttatcgtcatctacccaaaagataccgaggggctcccatatttattatgacatgtttaattcgcattcatcatttttcatattaatttgcggctatgcactcaaataaattgtatgtcttgattgtatgaattcttcgtccacatgaaaaatatatataaataaaaaagggaattataatcttaataaaaggagggtttcaaatgtacaacatccacaaattatattatatatatttaccatagactttgtggaagtaattctttgaaaaggttttgttgaaaattaacgtttgaaaaccatatagggaataatcactcttgattggaagcctggaagggcatatgattttcgacatatatatatatttaatcatgttagttaaatagttgtctaatttaattaacagccggatatcgacaactcgatgtgatcgccttaattaccttttactatactatactaaattcatcattgggcgtgggagtataaggggaatatatttttttcttatattaattaatttatgcattattaataaggggaatatggtgagaccgagtagcaatacgtatatatgtcatcgtcatgctttcgtatatactacgtatcaatcacgttgcgttgtccatcatacatacagcaagtcagcaatgcaaacctccgttcttaaagaaatgctacgtcatataatacttgcatgtagtcgtcacatctcgaaatcttaaatcatcaataaaaaatatcggtattttaaagtatgaaaaattatatttggtagattaatttgtaaatgaaagctcttttactgtatagcttatttttaaatattgcttatacaaatataaagttttaggaagtgcatctacatctttcgagaacggagataggagtagcagttaattaggccgaccaattaattaacagaaaacctatgagacagtacctgatacctgatacatgttgtggtactacctgcatagtacccgatacctgttatccggtacctgtgatatctaggacttagatacatgtgatacgcgtgcaagagaatagttaatatgtctatcccgctgcaacgggattctgttttgtagcacagcaattatatttgagcaagtttacagtagaggtggttcatacctctataattttatcatcatttgaaaaaatagccaaaggtatacttttttattgtaaaatttgatacatccaaatatatactaggtacctcgaggtaaaaaaaattagtgtaaaatttaagtatcttgagttattttctcaactacagtaaaaaatttcctaattatatatcacctactcataaatttagaggtagtatatacaatacattaattcatctataccaactctaatacactttatcacgatacttgtttgctcaatatatctactcttaatttctctcattttttatatctcaaagcttgtttgtagactagaaactgcctcttatataaggcggtggtttcttgtctcttcttatctcttttcttcaccacctcgtcataaaaacttatgtgggggtatcttggatatgtgcttaggtcattacagcaaacataagtggagggcgtatcaatatgccatgtgtactttattcctaaataatagcatgcatagaataaaaggaaggttgaggcaattatgccacttaatattgtgggagggcatgagataggatatcttcatctaattaattggttgtgctctgctttattagaaatatactatttttagataaattttgattagtgaattagaggtgcctataattttttgttgttttttggacggagaggatgtaataatttgttttcgctactggtttatttgtttgttcccttggatttttgcctagaagtgtagtggctcaatagctgattggcttctccaaactatcacaacgtgaaggcgacatgcgtgctatatactactatatatatgcatatgcgatgtgcaattaatgccaaagggtatatatagaatagtactccctccgtttcagcttataagatattttaattttggtaaaagtcaaactgcatcaaatttgactaaatttatagaaaaaaatagtaacatttttttacccaagatgaatttattataaaaatatatttaattactaatgtaataaaactaatttggtaatgtaaatattactatatttatttataaacttagtcaaacaccaaagttaaaacattttataacctgaaacatagggagtagcttgtaataatatatatgtgtgagcttcgttgatctgcatgtttacgttcatatgccacatgcatgccaatgaactatggaagaatataattaaagagattaattaattagtagtacttgcacatgtgttcatgcgcatgttcattaattagctctatatattagtttgttcctgttgtagcacatgtacatgcatgtatatattgtgtgagaaaataaaaaaaaaatcatgtacgtgtggttgatcttgatcttaaccaggtggaactgacatgcagagggcagcttcttcctcccttcttgctggtcaaaa

SEQ ID NO: 1412 - DNA, 3234 bp, Oryza sativa
  Intron number 1 from transcript LOC_Os10g06750.1 (locus LO C_Os10g06750) derived from phytozome v7.0 (chr-ID Chr10; p os 3506036 to 3509269)
ggctggtgtgcgctactcacgtgactaatgggctgctgtgcgctactcacgtgactctggtacatacatgtagctatgcacttatgcactgttgattccttactttattatttatgtgcatggtgacttaactactatctctcctctctcctattaaatgctagcacaaatcaactttattagaaaactttaaatgattttttcttctcaattatttatgcaatctataattcgattacaccattatattcgttgtaattaaatctttacaatacgagtcacgctccagtgctttctactggtagtattctactacaagtagaatgatctgagccgttgatttctaagggtatattagtattttgctacctgtatagttaattaggggtaattttgatatttatttttccgttaatagttgaatctgtcgttggtgtcgccgcttatatcattttctctcgctgtatctctacgcacctacaccggcggcggtgccaactcgattcggcaactgaccttcgccagtaaccatccatccaatatctatcgaattctctttaagtagatattcttttcaagtatccatctctttacggattatgaagattaaattacaaagacatcaacacaaattttacaaccttcaaaattttctctgtacaattgaagtcagaggaaatacggaacaaacaatcgttgggccttgcatctggtcattctcctctgtctatgaagaattacaaacactcgcctagatggacatgttggcgatgagtgtccacacgcagattagccgccgtcgccgatagcagcgaccgcggtagccgcctctaccccctcctgtagcgccaccaccatcgatctcatcccaaagtttccaattcgtatttacaaatttatccatcaatgtttatttttcaatggacgaatttgccctctcacgtttctactactcttaataaggtggtagtataaataaatctaatcccttggataaaaacgaattagcggtttagattgatttctactctaagtaaaaagcaccggagacgcactcttattagaaaactttaaatgattttttcttctcaattatttatgcaatctataatttgattacaccattatattcgttgtaattaaatctttacaatacgatccaatatgattatattttgataaaaaataattaaaaaaggtattgtttcattggttataaaaaaaagtttcagcacttgaggtcaaatgtttcaactcgcttctaataatgtttcgaagagatgtaatatttaatatcattgcaacactagtcattgcttacatgaaacattgaatcttaacaaatatgatgaaacacggaagaaaatagtatgttacatactatagatttacaaatacttgattttattgaaatatttttatagcacatgtacatgaaacatcgattatagctattgaaacataaagtaacacttactgaaacatacacataatacgacatgcaatatttgcgaaatgaactaaagaaacatcggaaaatatttattggaacatccaaataaatcagtgtgcaacatttagaaaaaggatcaactgcaacacaaaattaagctaaatttaaaatttatcggaatgtaatcatgtgagattttgttgtaaacatttaattacaacaaatataatagtataatccaatcatataatatttacaacatttttaatatttgctgaaacatataaattataccgtgtacaacatttttaattaactagtgaatacttattgaaacactcaaccaacacatatgcaacatttttaaataaaaccggtgaaatataataaactacaactgaaatatacaaatagcaccatatgatacattaaagaaagatatatacattgcgacactaattaaatatgtgcaacataatataatttcagctgaaatatctgattctcacatgtgaaacattaaatttaattggttgaaatatatgtgtgtatttttattataatatagtcatgtgagatcttattgtaaagatttaattgtaacgaatacaataatataattggatcatagattagatgagtaatttagaagaaaaatcattttcaagtttgttaaaagggtgttatgtatatgaaaataacctcgcgaactttctccttcatgcataatgattacggatttgctaatggtctgtcgactgattttaggtctccaaatctgtcgtttttttagccgtccgtatttctttgtgattcgtgcttcgctgggtgtgagttgaactctttgttttttttctgggctgtgcattttgtttttgggcttggtttatacatggcccgtttctgggttgttatgtgggtcccacttgcactgttcattttcgaaatccgcgcctactttttttgcctgttctatgggtcccaccttgactttttctctcgttttttccgacacaactgaagagagagagagagaactagagaagctgccgtgagaggaagcgattttttcactgaggtgaggaggtgatttcgccgtcgtcgccggagattttgtcgtggcgccgtcgtcgtcgtcgtcgtcgtcggagcgactagttcgtgatttgaaggtcttcctcgtcgtcggcgtttttagtagttgctcacttgcttttcttctgatgtcccattgttttttgcagtggtagtcatcaccattcgacatttttagggtgttttttcttttgtttttttttgactagttgatattatttccggctgcagtgttgattttgttcgtggattttgtatattttttggcggcactgtttgatttgttgcagatcgattagtagctgtttgttctcattgcgatgttttgtgaaccatttcgttgatttggttgcgatttgttagattattagatctaactcataccataacttgatgtatttccggttccactctcgattttgtttgtggacttactctattttttcgttgtcactgtataattcgttgcggtatgagtagttgtagttgttctcatggcatttttgttttgaaccatttcgtttatttggggagcgaattttttagatgattagattagtcctgcaacgatgaaaacacacatccttgagtagatcacatgcatgtgaaccatttcgtttatgcttgcatgatttattctaaatttttttgcaggttttttgctttctattttggctcctattttg

SEQ ID NO: 1413 - DNA, 2980 bp, Oryza sativa
  Intron number 5 from transcript LOC_Os08g35210.1 (locus LO C_Os08g35210) derived from phytozome v7.0 (chr-ID Chr8; po s 22211477 to 22214456)
ttcctcgtcaccaagtggcaccagaggacggtaagtaaagcttatattagctaccttgtcacgtcatctttacctttcactatcagagcttagttctttttaatatattcatcagattattggaaggaaatatttttttcacgcttaaaaatatatttaagctatatgtttatctatttatcaaaatatctaatttgttcctataatgaagtactatataattcttatcaacaatctgttttaaactgagcctcggagtacttgattataataagatcctattaaactctcaaaatctagaataatagctgtaaaagttaagaactattataattttatatacttatttcgatatccttaaaaaaacttactactacattgatatgaaataatggtaaaaaaagtactacattttcaatattgtttttttaaaaaaagtcaaatgctaattactctgtacttcttaccgtacaatagattctttttgctaggatgctcatcacagatgccagtaatttgcctcgtggggtagctttcgtgagggcgacatttttccggttaattttgatccttccaaaaggttgcaattgcacgtttttttgggttctagcatcgatcgttttggatgtgtgctctcgctcgctctcgccctctctttctcctttggtggcttttgcttttgttatccatttgttagggtcatcctcctcctcctggtcctgcctgttacggtgatgggcacagggcaccattggaaaaaaaaaggagagaaattttagttgcaaattaagggacaattgacctcttggggggccggccaaaatcattgcaaaacagaaaaaggaaaagataattaggacattacaccagaaattatttagtgagtatcaagaattcaaagttaaattttaaggtcattagtagtacgtagttacacaggcacatcaatttatttttgggtaggtccatgctttggacattggacatggaaggaagatatgtagaccaccattgcactgcttcaaattgctttccttggaggaaaaatgacgtgtgcataaatgtgagtggagcccacgtacatgtggggtccaggatgactagatgcatctctatccgtgtccaacactccaacctgttttagatagtcttgaaaccactgttcaatatcatcatgttgttttcaagttattcactcgattatgaaaatagattatttgctccacgctcttctttttaagcttattcactaaattattgaaacgggttatttgtttcacacccaaaaaatacgtttctctctacggcgcgtcgcttcgacaacctgatttttctttttgttaagtctatttcttaaaatatttaatttattcataaaattaaatcgatgatccattgtaataatctgtttaatgatgtataaatcacatggcttctatccagtttcaccgcaaagagtttagatccaatcattccataaacatagcagtcttggataaaatctgttgggttctacggaccgtactgttgcaaagctagctcttgcacggaacgtacagtgatggtaacgggatgttgacgccggcgcacgcacaatttattgtccggttggtgtcgcgttcgagtcagaccggaactcgatcgaccgaagcaaatatgaacctgtccagtattgagggggtttgatacgccaatttgtcattttcagatgcctacgcatcaattggggaatgcggggtccaaccgaatgccaagcccaatctgttgtgagttgtgaccatgaaataataaagtatcctgcaaatcagtctgggagatgaaatcactgtcacatatatatatgtagtatattttttggatacacagagagttttataggagaaaaatactagccaattggatatttttggatccacagagatttttatagggggaaatgctagcccattggattactcaattaggttacaattatagtgacaggggatttcgttaatggcatccatttgtagattatgattgggtgtgatctgctagtggttttcctttaaagcatgtctggcattggttggttttaaggcatacaaacttccaaaactacagaaaattaatttaattatttttgcaccatttctaatttgagcacatggaaaacacctataagaaattagctttatcttccacaattacaatggtcagtgccattcacaaatctgcattcatagccttatgggtagcactctaatccctttttccatttgttcttccttttggagtgctacatttgccaaaggcaggggtttgtttttttgtttttgttttgtcttgccaacaaccacatggctaaacagcacattttgatttgcgtcagtcacaaatagtatgataagttaatgaggtgtactacaagctcatgatacttacatagctggaataggttcattcacatttgccatggattttttttccaccctggttgacttgtgctacccctaaattcctcaacactaattaactcggattgatgcttctgcgcctattcaatctgcgatatggttcatatgaatcctgtcctttgccacatgcatcttggctacataccgttcaatcattgctggcaacacagggcgttggttgtacagggtcacggatttggcatctacaaatcagtcattaagaaaacataatcaactactgaaatgcagaagagtacatactttgcactcaacatctacggttgccattatttagggccaacgttgaacaatccaattccaacacaatctgccctatctcctcgacgctgaggtgtcatattctgaacataaaaaaaaccacagatttagagttcattatgtctagattctgcactcttacaactttgcaacctcacatttagagttcattgtgaaatttagacaaccttctcttatcaagtaatctgaagttaacacagtgatttctttggtgatattcagac

SEQ ID NO: 1414 - DNA, 288 bp, Oryza sativa
  Intron number 12 from transcript LOC_Os08g12680.1 (locus L OC_Os08g12680) derived from phytozome v7.0 (chr-ID Chr8; p os 7497584 to 7497871)
ctcagatttggcggttatactgggccagccatcaggtggttctctttcattttacgtaacaatatgtttataaccataacaccctagccaattatgagattatggttccccagaaatcatattgcttccttttggtataatatatgatctttgattggggattaaattctgattcagtggatttgaacatggcaatttgtttgaccttctgaaaaactactacatatgattaataactaaataacagtatgctatgtatatatatttttgcagcgtttctttaggcat

SEQ ID NO: 1415 - DNA, 2706 bp, Oryza sativa
  Intron number 1 from transcript LOC_Os03g09310.1 (locus LO C_Os03g09310) derived from phytozome v7.0 (chr-ID Chr3; po s 4862315 to 4865020 reverse strand)
ccaggtaagattcactcggttaacaaatttttcggtttacaaaattgttgattttactgtggtcttatatagaacttatgtgaagaaatgttcagtcatggtcatcatttactcacctcctaactggtttaggatgatcgctggtttgcagtgttacggtgtctcagtacccttaatactgcagtactcccaactaagttttatttgtgcaacatttgctctatcaaagttgatagaggtatgttcatgctatttattttatcagtatattggacttttccctgcaagtatagccagcgtactcctcttgttaagttttagatcagtaggttccgcacaatgttctttgatgttgggtttcgtcacttctgtttatatttggagatccccagaccagcagtttgtgagttcgatgcgaacatatgagtactaagtacacattctcatccattcggttcttgtagttatgatgctgcaattttgctagggacaatctgtctttgttctttcctttgtatcgctgtctttgttcttaaatttggagatgctcatcttctttgatgtgcaagatgaaatgatgctgctttcacttttatttatattctggtcaaacctcttgtttccagatgccattacaattcccacacaaatctttcttactagagaaacatcacaaatacgtctttgtaatggtttttgctttgttttgtgtattcatccaaatgatgctaaatggaactacttttttaaaattagcacgccactcttgagttgctattactagagaaacatcacagatacgtatttgtaatggtttttgctttgttttgtgtattcatccgaattagcacgccactcttgagctgctactgcatgattcgttacttcgttagggacacttcttctttacttgccctaaattcatgacataatttatttctgtgcttgtatatccctgtgcttgtatatccttctatctagataaaacaatccagtgaaaccatttccctgtactgattaggttcattgccatattgacatttggagttcaaaggtctgtattgctttttcctcagccttttagaaagaccgatacttgaatggtggtgtccttaaaaagcaagtttgttgtttatacttttctcttatgtctatattctattgtatgctgtcttctatcatcgagttttatagcacgtttttgtgaatttaaagtggaatgctccatgatgagtatgttatcctgtcatctggttttatggtatacatggattttatgaattatgtggacaatgatgataaatgtttcacaaaatataatcttttggcactgattggcatttctctgccatgctgccattctgcaatttccatgtccatgactccatgttatatatctccattaactaagtctcttttttttctttgttaaatactgttctctaattgcactgctagttttttagtcttcttgatgcacttcaattcaatgaatcattgaatagtttgtgtttaagactgcaccgtgtgacctgtgatgatacctttgtgaaaataccatctttcgggcctgattggcaaccagccatattgtcactacaatttctgaggttatgaccttgttggtatgtacaagcgtgcagtcatttctcttctcataacttgtcagctgctgccaaatgctttcctccttccatgattcatctgcgtttctggcttgggcattgagaccaaggcttggttaagtcgtagcctaactcaattaatcttctcaccatccgcatcgagttagcccccgtgtcgattcgttttggttgtgtcttgcggtctttgcgctgcgtcgcttgctcgccactgactggatttgcatgatggcccgcgttgcatgcctggacccatcactccatcagtgaatttgcatattggtgtgaatttgcactcatgcaaattggtttatgtcgcgaagtctgcttgcatgcatgcatgcttgtgggctcgggccgtgcgagaaatgatccctacggccgcaaaccaatctgacgcagcggcaaaaatgagaaatggcaagcgagtatgtagatcagttctggaaaaatacaaaaaggttatatgtagaagaatcatgcacagagggagtactgcctatttaggcttttagcaatctttcctgtgctattttcttgatcgtgaaacagtagggggatcccctacggtatattatttatttttgaaatttacaaaggttttttataagttgttatccgttcagcatctagatctgcattcttagagggatttgcagctttcttatttccatcctgttatgttatcattatttattgcagcttatgtaagtacgttgtagtttatgcagattttggattccttttcaggagataatggatcttagaaagctcttttcaacatcaaataatgttcatgagtgctttgtaccttttagcaacgtcgatgaataatatttttcaatatatctggtgctttttattttttggctcatgtatctgtcaatttgttcacccccaccctattctgtcgtgatccatggtagctttctgttctataagtccatcatccatggcatgatgttttctgctctacatttaatgtttttttgttctttgaggtatgtccgtatgtgtgaacattaacatgaaaactctctttccaccagttttcattcataca

SEQ ID NO: 1416 - DNA, 2996 bp, Oryza sativa
  Intron number 1 from transcript LOC_Os08g31940.1 (locus LO C_Os08g31940) derived from phytozome v7.0 (chr-ID Chr8; po s 19802611 to 19805606)
cggccgcggtaggctcgccgacggcaacgtttccggtgagctcactgtgcaatgcgcattatatatgtttatgctgtttatgtagagttagcattagaaagtgcttaagctgcatagttgaagctagtatcacacacaaagttcgacctcttaagggcccctttgaatcgcatgattgaaaaaacggaggaataggaaaaacacgggattttgtaggattgcaagtgtaaaacagaggattacaaaacacagaaaaaatatagaaatgaccgtttgattagaccgcaggaaaaatgcaggaatcagatgagagagatagactcaaggaaagttttccaagaggttagagtggatgttaactttcctacgtttttctctagaattgtaggaataggaaagttttctacgtttttccttttctcattcctacgaatcaaaggcataagcccctttgaatcacaggaatgaaaaactgacaggaatgtaagtgtaaaacagaggattgcaaaacacaggaaaaatataggaatgactgtttgattggactataggaaaaacacaggaatttgaggagagataaagactcaaaggatttcttccatgaggttctacctcttgttaaaattcctccaaaacttgtatgggaagaggcattccataggaatttcataggattccataggattcatttctttgattcaaagagctttgtgggaaaaattcatataggaatgaaatcctctaaaattcctatgaatttcctttgaatcaaagggggccgaatagtgtaggatttcaattcctttgtttttcctccatttttcctccaattcaaagggggcctttgattcaccaaattgggaagtgtcagagttcaaactgatgctgaaattatagcattgggtgaaacacctgcttagtaaacatttaatcactggtgtctgttggacaatcattgacttgctaactgactaattgtcatggtcctgacacaagctccggtttgatgagagtgcatccttggtcttggatagtacttcctttgtcccaaaataagcgtagccatgagttttcttgtccaactttaattgttcgtcttatttaatttttttttgaaaaaactaaaaaacacaagtcacgcataaactactattcatgttttataatctaataacaataaaaatactaatcatacaaaaatttcaaataagacggatgattaaagttggacacggaaactcatggctgcgtttattttgtgacggagagagtactattggaaagatcagctagttggaaaatgccatctagttgtaactaatatgttggacaggggaaagttacattgctaaggtctaaagtggaagaattaagggttttttaacttttagtcatggtgaatcttcactgacttgataattgacttagttgtcttatgttggaagccacaagttccggattgatggaattactgagtcccactgcaaaaatcaccaagttggaaaatgatcaaaagatggaatttgttttttccgtaattttctctgattgaaatgattgtttaggtgttatcatccattcatcctaatagtagactaggatagtacgacataactgttctctctacatgctttgttttgtcatcattttgttgtgctactgtgaccataattgttgttatatgtgaatgtttggtggcatgatcatcctgaaattataacttgtcaattgtcatacttgtggtgtccatctctgttctggtgcatgtgccaagcaagctattgctaatgatctgtcatgttggtgtccatatgctgttggtagataaatcagttgttgagtttgatggctcattttgtacggttgccttgggaccttcatttagtctgtgttgtgttgcctaaatcctaatgcacagtaggatgtgctattttatccagttttcagttctagacggaaaccctgaatgctctggagatctggtgagaagtacattttcattactctagtgttatctgttcctgtagttcatgattaattctgtgtcatgtggttttgctctggtagcgcctgcctaactctattaggaagggtcttgtacgctcattattgtccccctaagttaggaaggtcatgcaccaaaccaaacttgagagctgcaaatgaacatcaccacacaagggtaataaatgattctgttatatgctgtctctcctcattctttttgttcagttacatctatatgtagtgatgtcggataaacaaacacctgttactttctatgtactttaagagcgaggtggaggtgaagttatcagtgtgtttttttatgaattactccccaaatttcttcagtagtatgcaataaggcttccatgtgtttgtttgttcttattatttgacaaccttctgagatcacattttaacatggaaaagcccgatacaacctaattgttatgtgtgggtaaaatttgcaattagggcgcataaacactgtcaaatgctccttagaacaaaagaatgaaagacatgttcgatgcaaagatcacattgtttttaataactctttaataacaatattaataattttgtaaacatgttaactaatcagtatggtcaatttccttttacaactatttatttctaggacatttaatgttttagttcttatcattcccagaatctttacaagataaatgtcgagacatttttcagagggcatattagcctgctcaaactgatcaatagagaattaggcactttgttgtctgatttgaccattttaatgttaatattttaattaaatttgtacataccaaagttagttgtgcagcttgcctttcctgatatagctttgtttgttaatatattctctgttttcttagtcaataccgtgcatgattctaaatatttttttgcttgaccattgttgtaatatttctttctgtttgtgttccgcaggtggcaagaattttgtagagcgctggctttcttct

SEQ ID NO: 1417 - DNA, 5226 bp, Oryza sativa
  Intron number 2 from transcript LOC_Os06g14350.2 (locus LO C_Os06g14350) derived from phytozome v7.0 (chr-ID Chr6; po s 7998238 to 8003463 reverse strand)
gcattattactccgtcggagaccattgaaggtgatatgattagctatattgttctgtttaatttgcaatgagttccgagaatattgtgctagtttggtatggagagatatacttaagttcaaaaccgatattttactctagctatatgatttaaattcagaacttcatgtgcactgtagcagccatatataaaaagctagcaaatgcatagttaaggtaatgttatttgagcttgcattaagggtatgttatattgagcgcaagccatagtgataggtgtgcaaaaactatgtgttctaaaaaaaatctacctctatgtggagaagaagagtttttttttaaaccccgcagggtgtatttgtattaaagtagggggaaacattgtacaatagcccaaggctaggagattacaaaagaaaataaaaagaaatatgagagggggagggggactgttagggggaaggggttgggggtacatgtcacgatttacagattaccaatggtacttccacgagtgtacgaagacatggattggatgccccttgttccacttgtgtgccatagccatacttcatcaattgcccgaataaggaggtgccaatcaaagtttggtgaatgagatgtgtggtccagctgctttgctagtaattatggttgatgttgccactgttgatgctgctaaatacgtggcaaatatgtggattcaacatatacggaggcatacatatatccgtcttcgaaaaccactcctgagaggtttttttgtggtttgcgtgaaaaccgtggactaccggtgaagttcgacaaaattttacaaagaacttaacaattttttttctaacttggcatatgcaaaaaccatggattaccggcgaagttcaaaataaaatgtaacgagtttaaattcagttagaatttttcttaacttggccggcttaatattgagtggtttgtgatcatcttgagccaactcgaagcctctggttattgttttataaacctgctcatatggatgttaagaaaacatcaggctccaagagcacgtcaaatttcaattcagagaattttatatttacttagaggttaatataataaggctagagaaaatctgagctaaggtgattcccttaaacctggtctatgtttgaatgagctccttgcagtggtaaatactccccaaatcttaggttccccaaacaccagtctcacctagactatgagatctaataattacacaatccaaacattgaaccagtaactataactctaacttctacagattcttaattgctgcttctcataatctctagcccttaaataaggctttagtttccgtgtttgacaatcaatctactagttagcattttttgggttgaatgctgggggattacttaggttaccgatccatagaaccatagtgcaaaagtttaaccaatcacccaaccggccggttagactctctgttcaccggagccatccgtccgattggcgatcacccattagaatgtggtttagtagttaactacatgtaacatttatatttgagtagtaagtggtctactgcctagttggtccccgagggctctctcactcccacccaccacggatcaattctcgcatttagccggctcagtttatcttaggtcgttgattcacatgagaaaccacctggttcatccgggtcacataagttcaaatgcagtgagggtccttaaagcaaaccaagctgctcatgctattttttccggttattccgttcaaccgccagtcagatccatgtttcttactatatatatgcaacataaggaaagttaggttcactagaacggattccctcatctcaaatgggcagtaagccccatctcaatcaggcacggcgtccgtcacaggctagaagtcactgatgtgaaaagtaatctcaatcgggcaaacggccgtcactgatgaacctatctcaatcgggccctaattgaagcccatcaccgatagctttgacccagactactagtcaaactatagcccgtcacagatgacctatctcaatcggaccacaaatagagcccgtcacagatgactactaaactcaatcgggcctaaactagagcacgtcacagatgatactcatctcaatccggcctaaactatagcccatcacagatgactgtcatcttaatcgggcattaactacaacccgtcacagatgaccatcatctcaatcgggcattaagttgtggcccgtcatagatgagtataatccacaaaaaaaattattttttggctagcctcaggcctttgctagccatgcccgctgcaaaaatgacagaaacacatatatccaatatccccagctccccagcatcacccattcatatatatgcattcacatacacagccatcaatatatttcacacaactacattcacagaacatccattttgatctcatatttcacatccattcacatatttcacatccattcaaatatttatcatatttcacctgcaaaaccgagtaaattggatcaaatatttatttagcaagtattaacataaacataagaaatatatatataaatataaacatcacagttacataatcaatgttcatcattgcctaaacataaaagttcaacaatgttcatcattttagtttaagcctaaacattcctttggggttaattatttcgcggaggatgaagctggctatctcctcgcgaacctcctcaaagctggtaggcagagacttggtaattttgccctacattgtcataattcgagattagttgatcgatcatatatatgtacttcgatgtagttagttagtctatcacaattgagaccaccgacctcaaactcagccaaagtcttcaccttttctctgtacagaaggcgcatgttgtggcacacatggaatccgcattggtcacctatttgttgctttaccgggaagtattttttttggatgagggtgtcatgtcctgtcttcctgaggcctcatctttgcacgtattgggcccacgcttcatctatcgctagttgaatcggggtccaatcatatgcgttcttatcaattctggagttcaggtagtgacatgtactccacttagatgttatgaccaaaaggatccaatgggcactgcggcattaatatagtgaaagttaattagtactgaaggaatgtgtcatgctgttgtatatatttagggaacacacttactattgattataggcgcacataatgtactccttgtctcggcgggaccacaaggtgtcgtagatgtagttgaccattccttgacggtcattctggagatttgtgacatttaccacttgtgaatcaaggaaggcaacttccggtgcattcttctgacaccattgccaacttaacctacatgcaacataaacgatcttgtaagcgagttaaaccgattgttattaccaaattgagttgggcgacaatacttacaaggagtagcacttaatgaggcttgtgtccaccgctcggagcctatagaggtcgaatagatccttgaagtcgaccacgatataatttgttggaccaaggaatggctttcgatcgtgctctccaaggatttcagtagctttattcggcctcctggcgttagatttctccatgtagtatatgtgaaggtccctgcaagcggtgcccattgcggcaagcacgtcatctccaaccaatggcatgcctagttggaactcctgtgaagcaacgcatttcttcttgacctctttgcccttagtctcttcctgccccttgcctagatctagcttccttggatctagaagcgaggcttgcacctttcctcctcttcctctcccctttgcatcggtaaatctctagcctgtggtaaatctcatgtagtaaatctctagcccttaaataaggctttagtttccctgtttgacaatcaatctactagttagcatttcttggttgaatgttgggggattacttaggttatcgatccatatagagtgcaaaagtttaaccaaccacccaacagccggttagactctcggttcatcggaaccgtccgttcgattggcgaccacccattaaactgtggtttaatagttaactacatgtaacatttatatttagtagtaagtggtcaacttcctagttggtccccaagggctatctcgctcccacccaccacggatcaattctcgcatttagtggctcaagttttgttggtgagcttgttaagccagtttatcttacggagtaggtcgattcacatgagaaaccacctggttcatccgggtcacatcagttcaaatgcagtgagggtccttaaagcaaaccaagctccacatgttatttgttccggttattccgttcaaccggtagtcagatccaggtttcttactatatactactacatatgcagcgtttctaacataaggcgagttaggttattcaactcttgtgcttggttaattaattcattcatgattaaggtggccaaaatgcctaacctgggttttggatattcacatgcatggaaattagttttggatcacaattagttgatgtgtgcattagcacataggaaaaagtttaaataccgcaataaactttggatgaaagtctgtatagcatcctgaactttaaaactggacatccaacctcctaaactttgctataccatccatattaccccctaaggtgattttggatgacggttttgcatatttggaagcttagatgaataatttgaataactaatataacatatttgtatatcataagttataagccattaatttatttctatacagtatatcatactattattggtatttatttgtaaatgagagttaataagaagcaaaaagaaatatttcagtcaaaattttaatatatatatctaaagtgtatgacatgatcaaactcacccaacttatatacaaattagacaaaatcactatatgcaaaaccatcttaaggggttcaatttacccttgtataaatggtattgtaaattttaggtggttgaatgtccgatttcgaagttaagggtgttagatggacttacatccaaagtttatgggggttgtttggactttttttctagcacattatattatattggaactagtctctataaaatcactgcaaattaatttatatcttactaacgtatactgcttaatttggattgcaggggttgttgcaatcggttgtgacttcgcatttgct

SEQ ID NO: 1418 - DNA, 4541 bp, Oryza sativa
  Intron number 4 from transcript LOC_Os02g09720.1 (locus LO C_Os02g09720) derived from phytozome v7.0 (chr-ID Chr2; po s 4991390 to 4995930 reverse strand)
tcatctcccagctgcctcagggctacgacacacaggtaaaattatctcagaattagcatcaatctctccactggtaatacaactacttccactaagccaatttggcatatatgcaaatatgcagtcatttcagcacaaagtttcttatctttgcaagtcaatgtccaggtttcttttcaaagatttctgttgctatcatgaccataagctagcagtaacttgcatgcatgtgatgcatcctattctcatttgtttttaaataaaaaaaatggctgaattgcgactagagtaacttgcatgcatgtcatgaatccaatttttttttaaccaataaatggataaattgcaattggagtaagtaacttgcatgcatgctatatatgcatctttttccttagacaataaaaaaactgaactacagttgggaagtgctatctgattcagtgaaaagacacatcctcaacatatcacatatgtatgggaaacatgaccccagccagcacagtgctataaaactatgatcatgaaattcacacacatgaaagtcaagggaatccaggggacaaactccaggtacatgagtgagtgagtgcatgaactgtttcttagagtttctgtgatccatgtgcaaatacccaacattttgaaacgtctataggagttagtagtttagtcgtaggttcataatgtgacagcaggactagaatagtagaatatttcgaacataatctagccaaataagttgtaccccaactgatcagacaagattaggtggcaactagtctttaaaaaaaaaggttgcttgtggctttgggacaccattctaatactccctccgtttaaatgatcagtcattttagctttatccttaattaaatatttgtatttttggccatcacttttgtaatatacaatttacatgttgttaaactacacgaatttctaaaaattgacttaggataaaggtagatacggagggagtattattaatttattttcaagcctgatagcaaggagtaaaagctgtttttggaagcaacaccttttgtttctagtgtagtatagactttgtttggaagcaacacataatcacacacacacattactccatccatctgttattagtgctggctagctataatttgcaggcgccacgtcactggcagaggacacggtcctgcactcctgcctgcttgtgcgctcaagagaagaaaattaaaaagaaaaaaaaaaggcactgatgcaatctgagattcagagagctgtctgccttttgttccccaaaataatgacacgcctaaattatgttatggcttgtttggtttgaagccagtttttaccttagcaagttttggcacaaacaaaaattggtaccaaaccccaaaaagtaaaccttaaaaaaattggtagcaaaccccaaaaaagttttggcttaaatccaaacaagaccttaatgttatccctactgaaataaaaaaaaaacccaaaaaaaaccctggaagtaacaagaaaaccatataattatggtatgacattatacaggaaaggacagcaatcaattaaaaaaaatcaatagcttgaaagtgcttcacatggttaaaatagtataggaatccattatgtacatgtctcggtgaataggttgagctgaaggcttacattagggaagggtacctttgagcactctaaattatctaagtatcccaggactattagggaacaaacatatataattaatcatacttcatatttctggtatgatacaacctaatcaggaactaagagcaatgaaaagatcatggaacaaggagttcactacaagatgttttcagtaaagcagtaaaaattatggacacctgaagagtgaaaatacatacccccaatcaggcgctgaagactatggcagtcctgaaagtgagaacaaataaaacaaacaagctaaaggcttaaactcggtgcatctgataatcacatcataagatcgtatacattgcatgaataaccacagcagaacaaaaaagaacacaaaaaataactctgggctgtcacagaaacacctaaattgttacacattgcctgggatgaacaggtagtcaccttgaggtgcagctttccttgccgctgcttcagcatagttcctctccagcagacctgccagtccaccatccatccaaaattggatgagaaataatttcattctcaatattgaatgaatgatctagtagataccttccatacatgacttgcaaaaagaatcaggacatagaactgaatatatcccttagacaaaaaatctgtcgttatacactctatagtgggacctacagcttccgcatgtggacgtagacaaaagcgatccacgctcataacctcaattgcttaatgcctggtttctctatctcacttccaacatgatcacgactcaactcatcctccatgatgtagatggccatatttccatataacgtacagctgcagcactacctctaaggctgctataaagaccattccatcgagattcatttctagtgatggcggtatcaaaattgaaagcatctgctctgggaaattgctgatggtgagacataggagtcgtagagcgattagtccaagttttgttttcgaaagatcaaagcgaatttgccggtgttatattaaagaataaggtttctcattttaaggagagaatgaggccaaaccatgcagtgaacggtttatttgggaaaaccagacaaaaaacctgaagaacaagaaacacattatagcaaccgtaaccatggcaacaaaactagcaaccttaaaacacaatgagcgcaagtgaaaaaggcaaggaaccattggcccaccactcagggtgtgactccatggtcggtggacactgaaggtaaacagctagaggctttttgcaaatctagaaaccagaaaagggattcccagtcaacaattttatggtgctccaactttcccagaaataggatttcacccaggacctatcatgctctaacgattttgacagcaatatattagaccttcacagaacaaattgcccatgtgcgtgtgacatgagcgcattcaaaaggcagttttacctatggaaaattaaaatgattctcacgttatagttttgatttgtccctttgctgccaatgcgaatcattcaaaataaccaaaacttataatggtaaaagagtatctctcttttttggctaataatggaaaatcactgtaatgatatggatccttaggtggcatgcatgtaaaccttgaaacatgaaaggtttattcatggttggacccgcagcactagcaatttctactttgtgcaaacctgctgtggggcacttaacattagattttgatgtgggcaaacctgttaacaagatgacctgacaggccactaaaaaatatcctctccatcagatacctaccacctaatatctgcaatgctgtgagttcaacaataataatggaaggcacttgataactttactttaatttttcattgttcaagcactcgtaggaacatgataggaaagagtgatacaaaatgacaaatagtaaaattctgctagtgcgtctacagtattcaatgataaatatcgtaactattagttcgtcaagcttttttcagagcatgtacgcactgatcattgacacacgtgtagtattttagatctaatattagaggaccaaactagacctttcatactcactcgtacaaatacggaaaaggccctttcatgttgatacttgataaccattaccttgcatctttctatttgtatagaagttttgcctcttgacttcttttttattcgccaggaaacataacttgtttcctagaagataaatctgaaagaaagatggtccatatcagtacggcagaaatgcagaatactagttgaaccttttaaaatatgtcaagcataactgtacaactactgaaaaaaaattactaaggaatcaagataacctgatgtgcctatcccatcccctaaagcagtggtgactattttttaacactgcgcctcagagcttcgatcagttttaaaaccaggcttttgatgtgggcaagggaacagagtattattacatataagggtatgatttgaactcagtattctgggaaagtatttataaatgctgcacaaagattttagaaatcttcatggaacagatgggataccgacacccacagtttatgaagttcactctcatcagttagtgcttatgtttgtttgtgattagtacaaaagggtaagaataatcacgtctaacaatcaaatgatgagccaacttttttctcgaaaaacaaaactgatgtcacccttgaaacaagataacaatatccttagcataattatgctttcgtagtgtctataggacttatcaactgagcatgtttttttttaagaacgtattcaggtcaatatttgcacatactgttaagcatttcaaacacgtttatcatatcagcattcctatcctagtaatgacctagtttgaaataaaaacaacaggtgggcgagcgtggtgtccaa

SEQ ID NO: 1419 - DNA, 4220 bp, Oryza sativa
  Intron number 5 from transcript LOC_Os02g44642.1 (locus LO C_Os02g44642) derived from phytozome v7.0 (chr-ID Chr2; po s 27048345 to 27052564 reverse strand)
gatctgaagtataaatttatgccaccagttgttatcttctgttaataccactcctgttctttttttacttgttgaacatgtgtgatcattccttttctaacaacacattcataaaaaaaaatccttttctaacaatacatttataaaaaaaaattaaaatctaactacgtgaaggtattttccataacaaatctactagtaccattttcacatatcagatcttttttttttttgcatacactccatcgtttgtttctgttaggcgtatagtttttcaaacttttgcaagatatatgggctccatgcaaatttattaactatattccttatatgtccataattattactagtgtctctcctgcatttataagaagcatctcactaaccatctatttagctatttctaaggtatttaagtatggtaggatggtcaatttaactgctctttctcttggttctgtacaattattgttataaaagttagctgatatagagtaacgacgactaaccttctcgatcgcttcaatcattgatcacccaagacatgtcagatgacgactcaggaacacacgatatttgttaacgaggttcagccgaagcctacatccccggggctctgattatgggtgctcctccccaaccaatatagctcctagccgctacgagtccatggccaagccgccatcatctccctgcgtgtctacgctacattgtagtcgccatgattacattgtcgtgcccccctctctatttaagagagatgacaggttacagagtccgactctaactctacccctaacacctattacaactccaagtccaactgtaaccaaataggactagtatattcgacacctattctaacaaactccaccttggcgaatataagccacctagaagtagtagaatcaccatgccgatccacctatcctctagacttgggttgtcttcttcgcagcttcaccgcaagccgcccgacgagtctgcgccagacccgccgccaccaaaagcaattgctatcccagcaaccgcttcctcctggactccacctgcaatagtgcaccctcgcagcttgtaaagttgcgactccaccttctctccagtcatcacagtcgtcttgcccttcatgatctccatggtcttcttattccgattaccgcgaaatattaacccttcttcatgcaaggttccaagcgaaatcagattcctctttagccctggtacatgcctgacaccctgaagaacatgttcacctccatcttctagcttgattttgacttcacctactcccacggctggataacttgtgtcatcgcctaagtagacaaaaccaaactcactagacttgtatgaaaagaaccactccttccttggcgtcacgtgaaacgagctagctgaatctaatatccacgcttctgcatccttagactgtgcacttgacattttgagaagatcacaaccatcgctatctgagtcatttgaagaagtcgctgcattagccttagcttttcccttcagtattgggcacttcttgcttatatgcccccactcatcacatctgaagcactgcaccaccttcttctttttgttcttctttaccttatgcccagcatgatcttctttgactagcaaaccctccgcttgagatgtttcaccctctttgttctttctcatctgatcacgagccaacaacgcagaagtgatctttagttttgatggtctccttgccgtacgtcaaagtagtcaccacatgctcatacgattcaggtaacgaacacaaaagaactatggccttgtcttcatcgtcaacttccacatccatcttcacaagatctgtgactagttgattgaaaacgttcacatgtgctgtcagatccaccccttcctgcatctttagcccatacaacttctgcttcagatacagtttattgtcagagtcttggacataaactgagcttccaacttttcccaaattatctttggtgaggtctcctccatcacatggtacatgacctgatctgaaagacatagccttattgtcgcagccacctgcaactgcatctcctcccaatcgtcatcctccatcttggccggtttgacacccttcaaagcctttgaagcaccttgttgagctaacaaatctttgaccctagtttgccacaagccaaaatttccagagccgtcaaacttcaccaaatcaaatttcatacctgtcggcgccatcttgccaacccgcgacctgactggtctgtcgccaccagaatactcgcccttctcagaaccgtccgtattcgtcttcacaatcccgtcttgtgatccgatctcagacattcaacagcaaaccacctgtccgccgccgcaccgatccaactaatctgcttcacggtttttctccgtcctgcttttggttctgtccggtttgcacacacctgtacgcctgctgtacgatcttgccttgagcccagatttgtgccttccgtggtaagcttacgagtgtctcgatcaattgcccgtcgccttttctgccataggttcacgtcctgaccgctccttaaatagcatcagccaccgggataccgagtccagatcgacttcgagtccggatggacacgtcaagccgagtccgcgtcgatgacataatttcgtgccttatcagaaacggtctcctgaccagctcccacacggaattaggcctttgatgtttgacttctcctcacatcttctctcacggcagcaatccacgtcgtctgttctgcatgcccatgcatgcacgcagcttgtacgtgtcccacacaaatccaattgaaatcgtatgcactcatgcattaagatgcaactaattaatccatgcatggaattaatatcctgcatgcttgcaacaactcgtgcatatctcttgctcttggccaccatctgtacgcgtactgtatgcatgtgacacgtacacatacgtgtcgttcgtgcctctgcacgcaccgcagtcgcagccctcatgttttccgtccacgatcccgtcgtcatcggccttgcacgtccgccgcgccgtgccacgctcgccggcttcgcccttccgtcactggcctccctgccgcgttcgccgcgtgcgtcgggcgcgccgtccatggcgctacccctccgatctctccggtcgccttcggccacgctcggccccgtcttccggtcaagttccgccatcgccggtctgatcgcgagcgaggttgtcacctccgcaacgtcctcgttgtcgccatcgatctcatcgccacggctgacgatctcctgtcgatgcgcgacccccacctcgtgtttcctcctccacatgtcttcttgatccaatgttgaaaccttctgctctgataccacttgttataaaagttagccgatatagcggaacgacgactaaccttctcgatcgcttcaatcattaatcacccaagacatgccagatgacgacacaggaacacacgatatttgttaacgaggttcagccgaagcctacatccccggggctctgattatgggcgctcctccccaaccaatatagctcctagccgctacgagtccatggccatgccgccatcatctccctgcgtgtctacgctacattgtagtcgccatgattacattgtggtgccccctctctatttaagagagatgacaggttacagagtccgactctaactctacccctaacacctattacaactccaagtccaaccgtaaccaaataggactagtatattcgacacctattctaacaattcttaatctttgtgccctcaaaataagccttatattttgaaacagttggggggggggtactagctaaatgcaggtggctttgcaacagataaaaataaatgcatgtcttattggtacaaaatgtagttcatagttggtgggtggcagattcactgtcaccaccgctacactgtcttccttcagaaggagtacagatttgtgggttagtttcaaggtttgactgcatgaccaatgtgcgtacccgcattattatttcttgcactgcactgtactctctgatgatgacatatgccactgaactataatatttctctgaacacttctctgtaaggaaacgtagcaaaaaagttcatgccacattctgcagaattttacgaacttcacttttgcttgcactcctgactcctctgtttactttaaaaataactatacactatccatttattcaaaacaggttg

SEQ ID NO: 1420 - DNA, 6431 bp, Oryza sativa
  Intron number 2 from transcript LOC_Os02g09690.1 (locus LO C_Os02g09690) derived from phytozome v7.0 (chr-ID Chr2; po s 4975391 to 4981821)
accaccggcattgctgaagttcagccgcctattaagtaagttcacgtgtcccttcttttgttcatgtttattaaaataagtttacactgccttgtaccatcgatgtgtcccttcttttgttcatgtttattaaaataagtctgccttgtaccatcgtatacgcagatcatcacccaaaagtatgttcaaaactgcactagcgtgaatcagctagttgcggcattctctaggaatatttctgtccgtagtttcatatgaaaccactggttgttttacagcaagatgttggtagttgttatatgaaattatcgccattaggtttaaggcagattggagaattggcattagttagtaaattagaacccctttatttcatatgattattcgtactccttagtttcaggttttgatatggggacatgggtatactggacatcccccccaccccccccccccaaaaaaaaaaaaaaaattctccttacccgttgaacagcatatctaagttacaacaaggaggttttctattttgttcatggcccactacgttcttttaaaaaaaaacgtgtgaactggaaacagttgcctaaataataaacacatatttgaaaaccaagaatgttgaatttcacattttgcaatacctgtgtgaaaattacaagccaattgtaggtaacattgatatttctgatccaatctttttgcattgtgatgctattactccttgattgtaaggagcatcattctgcacttaaaacttaaccttacatcttctaaagcccatttgggatccacgtgggatgtagaggctgtattgatgtccattatctaaaaaatattctgaaagcccataagggcaataattctttcaatatataatacctttttcaacatagtgtcttctgcctatgatacattgatcatgatgttgcattgttactacttactagtctctgtggtactgtgttcaatagctatagtagttttcaataaatatggaacaaaagaacaaagaaacacaacctaatatacaacatatctcatatttttttgatcttctcatcattacagtaaaatttcagcagataattcaagaaagaaaacttgcaagcttcatacacctctatatacagatagagcaatgggagagaaaaaaaaatcccagtttcataaaattttaaatgataaggagcatccttgcttgcagttctaatgactgattgaaccgggtgtgaatttggaaatgggtgctgtattgttgtgcaaaatctcactgctggacctgctggttgcctctttgtttcatactaaccaagctaaaatatgttccagaggggcctttggccatgagggatgcgtgtgtgcccttctccacaactatccctttttcgagcacagtgataaggtcacaattttgtatagtgctcagcctgtgtgccaccaccacacttgttctgtcaatcatcactcgatctagtgcctcttgtaccactttctcggactggctatctagtgcacttgtagcctcatccagaagcaggatagctgggttcttcagtatggcacgggcaattgcaatgcgctgtttctgtcctcctgatagctgaactcctctctcaccacaccacgtaccatatccatccttcaggttgctaataaagtcatgtgcattagcagatcttgctgcatcctcaatttccgcctcactagccgtttctgtgccatacacaatgttttctctgattgtacctgcaaatagtgttggctcttggctgaccaatccaatgtgccgccgcagcgctcgaggattatatgctttgatatcccttccatctatcttcaccgaccccctaattgggtcgtagaacctctctatgagcccaatgatggttgacttgccagagccactttgcccaaccagggctgttgacttgcctggttggatgctcaatgtgaaccctttgaagattataacatctggccttgatgggtatgcgaaatcgactcttctgatgtccacctcgcctttgagcttctctggcttgtatccctgagggttgtcaggatcaatttctgtttcccggtcaagaacagcaaatactgaagcaactgcatctgcacccttagctaggtctgttgtcatgcttcctgcctctgcaattacacgacctgtgcttgctagaataatgaaggtttggaagatctccttggcagtaatttggtgctcagccataagcctgccactataccaaaagccaatggtccatgagcatgccataaggctcatggcggtgccgaggccgagccctgcaaaccatgattgccggatactttccttgcgtggtccatcttgtgattggtcaaaaaggcgtaagatacgctcttgggatgagaaggctgtaattgtacgaagattggagactgcctcagcagctagcttgctactttcagcttgtgcatgtattgatttcttggacatgctcttgagtaagacacggcgagcataaaagcaaacaatgatcagaggctgcactgctatcataacaagggccaaacgccaggcaatgaccagacccatggtgcatgcaataagcactgctgaaatagtctggatcaccagagccattcgatcacccacgagagacctcacctacaataacaacaaaagtatgtcaggccagtcacaattccattttaattatctacaattctacatacttattttgatgtatgcacttacaacgttggcgtccttagctagctgtgagcatatggcaccactggagttctcgtcacggtcaaaccacccaatttcgaaagtgaggatctttgcaagcatctgttcccttattctcttggtgaggtattcccccattgcaccaaagttgtaatgctgaccaatatttatcaaaaatgagagcactgctagacctacgaaaatgagtgcgtaggtccttgttttgtccttgatctccgcatgatctgtcaagaagtagactgagatcatgcttcccatggcatatgcaaatgctggctggatgcctccaaacacaactgcaccaaaactccctattagtgcttgcttccactctggtgcattaagcataagtagccttctgaaggatggcactggaagctttggcttctcagtgttgtcagcatctcttgcatcgcccaatgaccttactgagcttgacctgctagctgcagagaacctcctgctcatgctgtggctgctggactgccctagagcggatgtactaccaattacaccaatctcatcaatctcatttgaatctctggtctgttgaaggcgcacaagagatgaatagaggccattctcattggcaatgagctcatcatgcgatcccagctccttaacctcaccagactgcatgacagcaattatgtcagcattgcggatagtggataggcgatgtgcaatcacaatagtagtccgccccatagatgctaggtcaagggcctcctgtacaacgctctctgactcagtgtccaatgcactagtggcttcatcaaggaggaggatcttgggtgacttcaggattgctctcgcaatagcaattctctgcttctgccccccagacatttggacaccacgctcgcccacctgttgtttttatttcaaactaggttattactacctccgtcccaaattatagctatttttggctacaaatctggtcacgcggttgtttagattcatagctagtaatgcttatattttgggatggagggagtactaggataggattactgatatgataaacatgtttgaaatgcataacagtatgtgcaaatattggcatgaatatgttcttaaaaagaacatgaatactcagttgcaagtcctatagacattatgaaagcatcattatgccaaggatattgttatcttgtatcaggagtgacatcagtttcttttttcatggaaaaattttggctgatcatttgattgttagaagtgaacattcttacccattagtactaatcacaacaaacaagcataatcactaactgatgactgatggaagtgagcttcatcaactgtgagatggtgtatgtctcctgtctgtttcatgaagatttctaaaatctgtgtgcagcatttataaatacttagcctgatttcatgaacactgcgttgaaatcatacccttatttgtaataataccttgttcccttgcccacatcaaacgcctggttttacaactgattgaaactgtttggcttaggcccagttctttttctcaactacaaacttcaactttctcgttttctgttagcacgcatttcaaacggttaaatggtgtgtttttagcaaaaagtttctgtgtaaaagttgtttttttaaaaaatcaaataaatccatttttcaattttataatagttaatgaatcatgtgttaatgagttttatcgtttcgcgagcgctgaaaatatccctccaactgggagagaacgaacagagccttggtgttaaacaatagccaccattgctttagcggatggataggcacatcaggttatcttgattgcttagtaaagtttttcggtggttatacagttatgcttgccgtattttaaacacttcaactagtattttgcagtactgaaatggaccatctttctttcagatttatcttctaggaaacaagttatgttccctggcgataaaaaaatagtcaagtggcataacttctatacaaatagaagcatgcaaggtaatgattatcaagtatcaacatcaaaaagccttctccgtatttgtatgagtgagtatgaaaggtctagtttggtcctctaatattagatctacaatacaacatgtgagtggatgattagtcagtacatgctctaggaaatcttgttgaactaatagtcgcaatatttatcattgaatactgtagatgcactaccagaatttagtatttgttattttgtagcactctttcctgtcatgttccaatgagtgcttgaacagtgaaaactaaagtaaagctatcaagtgcctgccattatttttgtgaaactcacagcattgcagatattaggtggcagatatctggcaaagaggatttttttttagtgctctgtcaagtcatcttgttaacaggtttgcccatatcaaaatctaatgttaagtgccccacagcaggtttgcaaaaagtagagattactagtgctggggtccaaccaggaataaacctttcctgtttcaaggtttacatgcatgccacttagtatccgtatcattacggtgatttttcattattagctaggggctgcatatcaaagaagtcaaggcagccaaaaaaaagatgtactcttttaccattataaggtttaggttcttttgagtgatttgcattggtagcgaaggaacaaatcaaaactaatattgtgcgaatcattttaattttccataggtgaaactgccttttggatgcattcatgccacatgcacacaggcaactttttctgtgaaggcctaccatattgctgtcacaatcgttggtgcctgatatataggtcctgggtgaaatcctgtttactgggaaagttggagcaccataaaattgttgattgggaacctcttttctgttttctagatttgcaaaaggcctctagctgcttacctgcagtgtccaccgaccatggaggcacacctaagtggtgggtggggaggaagatttcttatcccgaccaaaggaagggtctagcttcccttaagattgggggagtcccaacggtttcttgccttgctcgctcgtgctcatcgtgttttaaggttgctagttttgtttccgtggttaaggttgctagtagtgtgtttcttgttcttcagggtttagccccttttttcccaattaaccgtgcactgtgcggtttggcatcgtcctctccttaaaatgagaaaccttcttctttaatataatgctggtaaattcgccgtgatctttaaaaaaaaatgcactcatcgctctatgactcctatgtctcaccgtcaacaatttcctaaagcaggtgctttgaattttgataccgccatcactagaaatgaatctggatggcacggtctatatagcagccataggggtagttctgcaactgtatgctacatggaaatatggccatccacatcatgcaggctaagttgagtcatcatcatgttgggagtgagatcgagaaaccatgcattgcaattgagggtatgagtgtgggttgctatgttgtctatgttcacatgcagaaggagcagtaggtcccactacaaccgcagctagatgttaagggatatagttggttctacatccctaatttttttgcaagtcattcattcaatattgaaaatgatattatttctaatccaattgcaaatggatggtggactggcaggtctgctggagagaaact

SEQ ID NO: 1421 - DNA, 6559 bp, Oryza sativa
  Intron number 11 from transcript LOC_Os01g59819.1 (locus L OC_Os01g59819) derived from phytozome v7.0 (chr-ID Chr1; p os 34588503 to 34595061 reverse strand)
gggatttcccattttacatcgaggagagtaagtacagtttccaagtagagtattcagaacaggaagtacaatatgttggaaatttggtcataattcggcatattttaatccaaaataataagataataaacatgatatttacaataggatttgatccagtgatagtggtgaatgtaatcaacatgagcatgcttaacgttgaataagcatcaacaatcacataatgacacaatgttgacattgcgatgaacattaacagtaaaacttctaattgaaataatgtaataaggttataccccaagaatggtcctccgctggagtttgaggcagtattgcctccgttggtgttgacgggagtctccttctccttgtctccagtgttcgacatgttggtgaagatgaagtagatgttgacgaacagtgagtagtcgcgccttgcgctccccaaaaacctgatcgcccgcccgtctgtgcaaacgtcgcagcaacgcgtggtttcggaggcctactctcccaacgcgtgtgcacacactcgtcgggatgggattaccgtagcagcaacagcttttgaaaatggatgaaaatgtgtcttcttcttctcgcgggagatcaaatccattctcattttataagaggaatggaagatgaagagtaagagtcatggaataggaagaggaatggagcaactaattgtcatcaactagccatgaaccatcctccactacacaaccatcaaccaacaatcaattaagagtaattgatgtaagttaccaatggaataggaagaggaatagagcaactaattgtcatcaactagccatgaaccatcctccactacacaaccatcaaccatccatcaattaggactaattgatataagttaccaattccttaatcaaatggattaattctcaaaactcttcatcccattgatatcccatagaagaatgaattcacatgaattcctagcataatgagccttggaatttatttgatttaattgatttaaatggattaattacccaattaaatctaacaatccccaccaaatttcaaggctcatgagaatgctctctattccatagcagcttttatataccagtgtttcggtgaagactgttaagttgaactttcacctagaaaaggagctacacctgaccacaactgaacaatggactatgccttgaattgtcagtcttgtgcagttaggtttcactcaattccataactgatactaggcaaccattagtattccctcgggttggagcttataagtcatactccaggcctttcatgagtatctagagatcacccaaatctcatagactgtgactagcagtcgaactcatataggtgtgttccttctaagatgttctgcaggtcaacatctctgcttggaaaagccactcggatcacattaagacataagccatcctaccatgcaggaaagaagagaagcacatcatgaaaatgagcccttttcaagggtctcttctctcagtcacacaatagtttgtttcaccatccaaattcacgggatctccgatcataatggacaggtttccactattatgcaaccttaggtgggtatcaagcccatttccctcgatgcactgtctatcacattacgtggtagccccttggtaaactgatctgccagatttctagccgtttggacatagtccaatgctatcactccggagtttttctgctttctgacagatttcagtcttctcttgatgtgtctagatgacttcatgttgtcctttgaactgttcactttaataatcactgtttgattatcgcagttcattaggatagctggcactggtttttcaaccactggcaaatccatcaggagttcacgaagccactcggcctcaactgtcgcagtatctaatgctgtaagttctgcttccattgttgacctcgttaagatggtctgcttgcaagacttccaggaaacagcgccacctccaagtgtgaacacatatccacttgtggcttttatctcatcagcatcagatatccagtttgagtcactatacccttctagtacttttggatacccggtattgtgaattccatagctcatagtaccctttagatagcgcattactctttccagagcctaccaatgatcatctcccggatttgagacaaaccggctcagcttgcttacagcaaatgagatgtcaggcctcgttgcgctagccaagtacatcaatgaaccaatgatttgagagtatctcagctgatcccttgctattcttcggtttttccttaatagcacgctgggatcataaggagtaggagctggcttgcagtcactatatccaaagcgactcaaaaccttgtccacatagtgggattgcacaagtgtaatcccaccctcatctcctctttgtagtttgatgttaagaataacatcagcctctcccaaatctttcatttcaaaactcttggacagatagtctttgacctcctcaatcacattaaggctggtcccaaagatcagtatgtcatcgacatataagcacaagatcaccccttctcccccaccatagcgatagcatacacatttgtcagcttcgttcacaacaaagcctgcagatgtaagcgtggtgtcaaacttctcatgacattgcttaggtgcttgcttgaggccatacaaggatttcaatagtttacacaccattccctcctgaccttctagtacatacccgtctggttgatccatatagatctcctcctccagctctccgtttaggaaagctgtcttaacgtccatctgatggacgagaagaccatgagaggctgccagagcgagtagtactcgaatcgtggtcaagcgagcaactagtgagtatgtgtcgaagaagtcctcgccttccttttgggtataacccttggccacaagccttgccttgtacttttcgattgtaccatcaagcctaagctttttcttgaaaacccatttgcatcctacgggcttgcacccatatggacgctcaacgacttcccaagtaccattagacataatcgagtccatttcactgcgtactgcttccttccagtagtcagcgttaggagatgaatatgcctcttctatggttcttggggtgtcatccacgaggtatacaatgtagtcatctccaaaggattttgcaaccctttgtctcttactcttgcgagtatctacaatgttgtcctcctcaggattttcctcaggcgtttgatcattgtgttctatcggtgcaaagtgctcatggggcatgacagtttctttactagaagtgctaggtgtatatttcataggaaattcattctcaaagaatgtagcatctctggactcaagaattgtaccaacatgcatgtcgggtactccagagtttactattaagaatctataacccacactgtggatagcataaccaagaaacacacaatcaacagtttttggtccaagtttccgctttttggctataggtacatttaccttggccaaacagccccatgttcgtaggtatgagagatttaatttcttcctttcccattcctcgaatggtgttatttccttatgcttcattggaattttattcaggacatgacacgcagtcaaaactgcctcaccccaccattccttggaaagccccgcagtgtctaacatggcattcaccatctcagttagagtacggttctttctttcggccaccccatttgattggggtgaatagggaggcgtcatctcatgaataattccaaactcttcgcaaaaggatgcaaactcattggaaaaatactccccacctctatcagacctcaaccgtttgattttcctttcaagttggttttctacctcagctttatagattttaaagaaatgcaatgcctcatcctttgttttcaatagatacacatagcaaaatctagtgcaatcatctatcagtgtcatgaaatatttctttccccctttagtcaacacgccgttcatttcgcacaaatcggaatgaacaagttctagaggtgccaaattcctcgcctcagatgccttgtgaggcttgcgaggttgtttcgattgaacacaagtatggcacttggaaccttttaccaaagtgaattttggaattaaactcatgttagctaagcgcgtcatacaaccgaaattcacatgacagagtcgcgaatgccacacattagactcatcattctcgctaatatggttcacagcattatgattattacacatgtcattcaaagaaaagcggaacaagcctccgctgtcataatcttttccaacaaaagtcccatatttagatacgacacatttattggactcaaacacaagtctaaaaccttctctacacaatagagagccgctaactagattcttctttattgaagggacatgctgcacgttcttcagctgcacggtctttcccgaagtaaacttcagatcgaccgtaccaacaccatgaacagccgcaagcgacccgtttcccatcaacaaggaggaacctctcccgacctgataagaagaaaatagagaaatgtcagcacatacatgaatattagcaccagtgtccacccaccaatcaagtgaatgaaaaacagagagaactgtaggtaatattttaccgtaccccgatgttcctccgccctcgctaatgatcatgttggcagacttcctgtctttgcgctcaggacagtccttggcccaatgcctagacttgccacacacaaagcagtctccctttgcctttcccttgcttttcttcttaaaattggttgcagccttgggtttgacatcaggcttgactttcttgttgttgtgggatgcatgagggttcttcttctgtaccatattggcactagaacctccctcaacctttttgccccggacgtcctttgccctcgccttctcctcaacacccaaagagccaatgagatcaggaacactgaactcttgtctcttgtgctttagagaagtggcaaagtccgaccaagaaggtggtagtttggcaataatgccacctgccacaaacttgtccggcaactcacagttgttgttctcaagttccttagccagcatctgaatctcatgagcttgttcaactacagaacggtcatcgaccatcttgtagtcatagaactgctccataacatacagctcactgccggcatcagaaactccgaacttggcctcaagtgcatcccacatgtccttcccagaaggcatgtgcatgtacacgtccactatgttgtcagcgagtacactgatcaatgctccacggaacaggcaatccgaagcctcgaacttagcctcttcctcaggagaaagaggtggttcacttcgtttgccccgtgaaacatagaagcactgcatcgctgtcaaccacaatagtgcacgtgctttccatctcttatagtttgaaccatcaaaggcatgtggtttcagtgcagcagcaaagccaactaccgaaaatgaccaatcaggtttttggattgttggaaatttggtcataattcggcatattttaatccaaaataacaagataataaacatgatatttacaataggatttgatccagtgatagtggtgaatataatcaacatgagcatgcttaacgttgaataagcatcaacaatcacataatgacacaatgttgacattgcgatgaacattaacagtaaaacttctaattgaaataatgtaataaggttataccccaagaatggtcctccgctggagtttgaggcagtattgcctccgttggtgttgacgggagtctccttctccttgtctccagtgttcgacatgttggtgaagatgaagtagatgttgacgaacagtgagtagtcgcgccttgcgctccccaaaaacctgatcgcccgcccgtctgtgcaaacgtcgcagcaacgcgtggtttcggaggcctactctcccaacgcgtgtgcacacactcgtcgggatgggattaccgtagcagcaacagcttttgaaaatggatgaaagtgtgtcttcttcttctcgcgggagatcaaattcattctcattttataagaggaatggaagatgaagagtaagagtcatggaataggaagaggaatggagcaactaattgtcatcaactagccatgaaccatcctccactacacaaccatcaaccaacaatcaattaagagtaattgatgtaagttaccaatggaataggaagaggaatagagcaactaattgtcatcaactagccatgaaccatcctccactacacaaccatcaaccatccatcaattaggactaattgatataagttaccaattccttaatcaaatggattaattctcaaaactcattatgtgattgttgatgcttattcaacgttaagcatgctcatgttgattacattcaccactatcactggatcaaatcctattgtaaatatcatgtttattatcttgttattttggattaaaatatgccgaattatgaccaaatttccaacacaatactctttctcacttgcctgttttctttttcttcagggaagggatctacaa

SEQ ID NO: 1422 - DNA, 489 bp, Oryza sativa
  Intron number 3 from transcript LOC_Os09g39390.1 (locus LO C_Os09g39390) derived from phytozome v7.0 (chr-ID Chr9; po s 22649703 to 22650191)
ctgcagttccattggtatgtttctgtggatttgtgtgctacttattagttatagtaacatttggatgccatttggtttattgctcagttttattacatttactgctaatcgcaaattaactacattcttagaatgttgaactgttttgttgctaaacaataaggaacctcctgtctcaagtgacttttatatcacagtttcttgtacgtttgcacaatcaagtttctggtgatctatcatccagaaaagattgtgtccttccattgaccattgctcttagcttcgtagttatgctgcagtagagaccagtttagagtactacagatttttagttttgagtgtactgtggaaagtcctaaacttgagaggtgttatgataaaaacctgcggtatgtgtaatcagtcgaggaaatgcagcaatgttttatactataactactgccataatttgtaattcagctgaccttttatcataatataggtgggatt

SEQ ID NO: 1423 - DNA, 4131 bp, Oryza sativa
  Intron number 3 from transcript LOC_Os07g03770.1 (locus LO C_Os07g03770) derived from phytozome v7.0 (chr-ID Chr7; po s 1566084 to 1570214)
cggcggcgccggctcggcgcgcctcctcctcgccggtaaatcaaccaatcatccatccccctcctcctgctctcgcctgcggttttacttctatttacacacatgctccttctgcttcttctcttctgctgctgctgctgctgctgatgatgatgatctcgtcgtcggcggcgatggcggcggcggcggcggcggaggcttaccgcattaggaaatagtttgatccggataatggaggtggttgctttggatgattgccattgttagtatagctacccatccaaagccctgtggattagtaatttatttattggggttagtaacaagacgcctttgcagcagcatgcactaacaaaagtaattaaactaacaattagtagcggtctagtcgagtgattaatctaatcatgttggcaaccagggcactgtgagcaaccatgtctcaagcttctcctcctctcgtttcagcagcttcacctccattgtttattgcatccatccatccatccatggcagcagctagcacagcctagttgcaaaacacaacacatgctagcctttcaactcaaccatttcttttttcccctctttcttttggccatgaattgtctcttctctctttcttttcttactgctctactagatgacaagtgactagaagccttgtctttagggttccaaggcatgcagggcagaggagagaatcagcctgtctatagactaatagctagattgatggagattctgaatggtgattaagcccagtaaacaatggtttgaggaagagtattataactacatagagatgtatggcagtacaagcttggttaatcatctctctggttgctgctgattggatagcatgcatgcatctaccccggatcagtagtattattcttttcttgctctagtggaagtagagccatatgcattggaaattgttgtcatggggctagctaggtacccaatgttgcagcagcactgtacgaaccgtctttcttcttcgcacgtagcactgcagctgttcttgtaatggttttgggatgcagcacagattcatctgggcgttcgtgttttccggggggttgtactgtcgattgctgcagggcaggataatcaattaatatgatagagatctgatgaactgttgatagactactgttgaatgctttttattttctgtgcatatatatatgtatagaagtattggagaagagtgtctgattggtagatcaaactaggtcagttgcatttgattcatgatggaaattaagacagttgttggagcttgccagctgctactagtagttttcctttttttttcttgtgaaagattcaatttgattaagcagagatgcaactttattaggcaatattagtggaagtcccttaaatgaaaagttacagaaccatatattatcaaaggtttttatgaacaatatacaaatttattctatgatcattttttatattactaaatctatgttcgtcagatattgggaaagattcacccggcacttatgctgcaaatgtgaactcttctctattatctaaaacaaatgggagagattactagtttcttatctctgtgatgctcaaaacctcacatggtgattctgtattctctctatataagcctagcgcatctatgctgaattttcacaaataaatctcaactattgaaattaggccacttcaaaagatcttttgtcaatgagtttgctatatgttggtttacttctatgattgcttttttgataatgtatttcatctcatcctcgcgcatgcatgcccggttatttattgccagttatgtgttccatttgagatttaaagaaccagctaatatattattattgtttttcttgtttgttatggtatgacaactgtcctagcaaatccacatccacacatcgatctatatatcttaaccaatcagcaaggctctatttgtttgtatagatcagcatgttgtttatatcgcatcattggtattaaattgtaacagttgcctactatactggtgaaacttctgcctttaaaacaaatgacactagcttatacattaaacaaatatgattgtgcaaatgcatttactaattttttttatctaataaactgtgcttgtcacttgtcagtgtttaacaaactgtccatttttcagtcattcataagtgtcagtttccgcaccattagttttagtattatggtttcctactcttgccatgtatgcttaattagattcactttgctgaaacttggaaaattaccattaatgtgtccaaatccatggactggttttgattttataattttatcaaaactgtttgagaaatgtatttttcaaatgaattatcatgtttactcattccacaagttaattaacgtgtttctcctcaaaataagctaatgcgttttctataggcgccacaaataaaaagcaaagggttcattcacaaaattttgaaggttttttttagcaaataccaagtgccatgttattaaaagattaaaatcttgtcactgttaatgcattagtacatcaggaataattctttttctgcgtagaagcacaagggcaacattggtgtatttgtcatgccatttccttttttcatgttatttgtacctcatcttaaaaaaaaggagaaagtattacataggggactaatagcttatgtgaaagaccaccgactggtttataattaaacactggctcatttctttgaagctttttttttaaggatctggttttccctctagtagttctgagctgatgaaaagtttctatagcgggttactgagagaattacagtcattgtgctaccatgagaataaatacaataacagagtaacaaccatgagaatatgttcaagaactaatggattctaaaatttgaaaggcgcttaaaatgttttcttgacactattcatgatgagaattaaacggttaatcaagtaagacatgggacgataacaactactacctaatcctgtaaatctacagaatctccatgcttttcagttgctttttatgcacccacaatatagttttcagttgcatgttatcattggaggatgtagaatactcatgcatgcacaattttttataatatggggccacatatattatcttttattttcttgtatcacatcctgggtcagatcaacaactgtcactgtacagtttcctatgtatagatcaattattttgattgcccatctgaaattaagttatggtcatatgtatctttatttattttgaagttgatctccgaattattcaattacataggcccaagacaacgctttatgtgtgatatttttgtttctggttgtatggtagtaatttttgtttttttgcttttattttatccatttctttgttatatgctatattctgtaggacgcatggtcagcatgtgaccattctgtttagagcagagaaatgctctgtcaattctttatttctttccactaaatgattctttatctactgccataatatgtattcctttgaccattggaccaagttttttaggccaaagacctagcttttatataaagcaaaagaacataggtgataagagataggaccaagtttcagtcagtatcatttttttcgtcgaagcctgggactctacgtatacctagttcagtggtttctactatttggtttatcaaacactgttttaaaaccataatctgcacaccacaatctggtcaatatatctttcaactggctgatttggcacaaatcaaacctgacaaattaataaacctaaagcagtgctagttttatccttgtattgaatatccttgtcttttcacttgcatagttttttttaccgttttttatagtgttttcttctacgaaatcagtagggcaggatccttcttgaaatccatactctttactgtagctactctaccagtagtcaaatacacagtgtcaccctattcttgcattccaaaatggatagagttgtttacccacagctatgggcctttctgcgtctgttccattgctgaccaacatggtctagactgaagctcattccaacaatacaatagaaatctgatgaacaaaatgtagtatgatctcttacattaaccaccttttgtctgcag

SEQ ID NO: 1424 - DNA, 2667 bp, Oryza sativa
  Intron number 3 from transcript LOC_Os11g37880.1 (locus LO C_Os11g37880) derived from phytozome v7.0 (chr-ID Chr11; p os 21989349 to 21992015)
agcaggatatttcaactggggatcaagaggtatacagctattggtttacccacagcatgcaaatataatctcatccttgctgcataacaaacttatacttattttagacaatggataaattaattccaatctttgcttcaaagaagctacaatcacttattacaaactttcttcaactgggtatgtaaagtattacaaaggataggtaaagacaaactaaaaacacaccaacaaaagagagataaattctaagtaagacgtagtcctattagaaaatcttcatccaaagttgggaaaatctgcattaccgtagattttgcaagtaggttgccttgtaatgttccttgtcttcttcacagctgggatcaaaagcaaagccaataggttaccctgaaaagtacatgtatataagattgaattgaagctttgtcaaaaccatatcattactactaagccatacagtccaatatagtgcagcagatgctcccgctaacatatgttttattggtttttataatcgataccagcaagtcaatttccagacatatgggagaaattctctgatttaaaacaattctcaaaagaaatttagagaagtggcaatcaaagaaacaatgttgaatagtttcacactactacaaaaagacaaataggtgtcgtcactataggtgccggaacagctaaaaccggcacttataatgtctttcccgcccatgcacccgcctccatgcacctatgatcatcatgcaaacagaagcaacacttcctactagcattccaattccgtcgtgctaaattatctttggccagtgttacccttttaataaacaccacgtaaaaatatttattttaaggggcaccatcagtctctatgggaccttgcttctctctatatgaccattgctaatcaaagctaggcacattgaacgaactgaaaaaggagcattctgatgtcaaattcatcttaaagatatatttgtcttcattcaattgtacatgtactgtttttgcaactaaagcatgccaaagagccagattccagcctactaataatgctctgcgaaacaaaaattaagagaaacaaaacccaagattgttaccactgttgcattattcgtacaaacaatgttacagttggatggatattgttccctaaaagaaaagttataactctatctatctccccaaaatctaacatatttcccatcattaaccataaaattacccgagcttaaaaacctatcttttactttcatatgtcccggtcagaagtgagagcctcctggttttctcagtctaggtgatagtttgattctttaaatattttcttccttataaattatgcaaaatgccatccttgttaatccttgaaaagccatttgcgtagaagacatagttctgcacatccaaattatgcattccaagccatcgtgtttctttggttgacaaattatatttcatctagtcaatatgtttttcttattgcgactatcacattgtaaaaaaaattatgaatctatagtgatcatatttttttcaagaattactctaggaatctcgaaaaacaagatcataaacatagctaaactggttaacatagatttaattagagccagtcttcctccaaccgagattatctttccaattagtaagttattttctctatcctcttctcaattgatttccaatccttattacttagcgtcgaaataccaagctacctaaaagaaaaatatcctaattaacatcagaataaccagaatatatatatccttgtgttctttagtctggcccataaaaatgagttcactcttacaaaaatttattttgaaccaaaaagcttctaaaaaacagtaaataacaacctcatgtttttggctttattcaaattgtaatcaataaatattattgtatcatcaacatattgcaaagttgatagatgagaaactgcatccactatttgccgatcttctttagcatgcttaattaggatagctaacatatcaactactactccctccgtcctaaaatatagcaacccagtactattctatgaatcggaaggtagtatgtttctaatcttatactaggttgttatattttgtgacggatgaagcatatatgttaaaaagaatttgagatgaagtattgccttgtctcaagattcttctctcttttttttgaaaattagtgccaatctagtcattaactttgatacctatatgtctcccttgatcatccattggcaccatttaagagaaaggccttccattctgaggtttgtgtataaataaccatttgaccttatcatatgccttttcaaagtcaatcttgaaaaatactctgtcatgtttctttttatataactcatgaatagtttattgtaaaatcactattggttccattggaaggtatgaaacctgtttgggtaggactaattttttttagctaccccaacaatccaattaatcgcaaccttggtaaaaatattaaaactcaccatataataaacagatcagcttatattgctcaatcttaaaagcctctttacatttagacaataaaataattgtaccgaaatttaaagagtacataggaaataaccaaagttaaatattataattaatttacttaactactggtttctctcgcagttccaatctgaca

SEQ ID NO: 1425 - DNA, 1221 bp, Oryza sativa
  Intron number 1 from transcript LOC_Os02g39880.1 (locus LO C_Os02g39880) derived from phytozome v7.0 (chr-ID Chr2; po s 24090274 to 24091494)
gccctcctcgccgtcggccagtacctcaatttcaagtaagcgagatatatcccctaaacccctcttccgacagtcggacgcgatgctatcccctcgcgttcggatcgtctgcgactttctagtttctatgtgtgttgtgctaggttttcggtgtaatttatctgttcccatctgtgatctttccatgatcaataatccactaattgcagttcagcaccaaaaatttgcgattgtataaatctgtgttggtcgtttgtcgatttagtgctgcagaatcaacagtttgctgtagggacaagggatgagtaagggatgggacgattttcaagcaggaacaacgatcatctgcttctatttaccaattattactgatttatgaattttctccatgatttgccagaatggcatctacaatacacacacacacacaaaaaaaaaaaaacttatagctggagtataattttaaaagcacaagcaatgctctcatctaatatgaaaaaaaaggggccaaatttcatcttaagttgatgtgtactcataatgctctataatggactgatgcatctattgtagttgtcccgttctcgttcagtatttgttttgcattttaacaatatcatttttgctatagtttttgtcctaaagccctatcttccttaaatgattgccataccttgaaataagatagggccttcaatattagttataaacatttagaattgtttacaattgttagcgatttagacacttagtgatgcaaaagtaagttaagtgtcatagacttaacagtgctaatccatgactcattgagtttgatacctgtgaagccactaccctggggattagtcactgctaacttatttttatgctaattcctatgcattctatgttggacttctagcaactctttacaccagtaggaaatagtctgaggtagtcgaggaggcactcaagctccaaaatttgtttttattctgattttaacgtctctttaacagaataaaaacactttcctataatcttgaaacggccacttcggcaacacatattatttgagcatttggtaatatgagtatagtacacaacagtttatagtagactaaattctgtatttatcacaaagacggaaggggtaatcatcattcagttagttagcttgtggctgatatatgtgatttctcttcagggtgtaccagctgctcggtgagccaggcacctact

SEQ ID NO: 1426 - DNA, 3453 bp, Oryza sativa
  Intron number 1 from transcript LOC_Os12g03740.1 (locus LO C_Os12g03740) derived from phytozome v7.0 (chr-ID Chr12; p os 1514594 to 1518046 reverse strand)
cccaggaccacgtccttctcgaccaacgcagcaaggtacgtataatacctaggatttaagattagggggtgtggggggtggggataagccataagactgaattaccaatatcgatagcaaaggaggtcaagtagttactgtcaataacaatcaatgcgtgtaaactaatcctttaaaaaaacttgaatcttaattagctctttaataatatcattgaaagtttggaactagtttttattgttaaatccttttaatgtaaactattgaataatctcacaaataagtatattctattttactttgaaaaagatgagaaatcacaaactaattttgtagatcatgtttcttgctaatgtttttttagacttgctaactaaactgataataatttcaagctacacaaataaactagataaatacatatcttagttaacctcaatatagagtaaaaacaggtgagggtggcggtggtggtgtttggataggaggtgttggccccctccggcaccccccacagctgtaccactgttaatactccccattgttttggacatgatttagtcaaacttttaaaccttataattctagctactctttgaggcaaataagtacataccgtaattatttgtttttaaactaaccatttcagaaatcacttgatggtcaagttccaaaaatatgaccgaatcttggccttaagtgtgcatttggttcatgatcatgcatggataagatatggtcatccatattttattggatatgacgatctaatttttttttgtttggtttgtatgtataggatgatcaaatttcttgtttagttggagggatagagcatggatgggataagccaaatttagtgggacccatttgtcatatatatatatttaatcaaaatataatcattcgagatcttgttttaaatatttaattgtaactaatataatggtgtaatcaaattataaattagataaacggtttaggagaaaaaaatcaaaccaagcacaactaatcagaatatgacacgtcacccatacgaaagcatggatggcttcatccggccaaataagccgtatacactcatctagcatattgaggaaatattcccttttctagaccgccccatccacatgtaccataaaaaatcaagcggctatctcccatccagtcttatccacccaaccaaacacaccctaaatgtctaacgtttgtaacctaatggagtagtatacagttaagatggttaaaaaagaaccatcacacctcgcattagtcggagagaaaaacaaaacacaattgtatacaaaatataagttatagccttataagcatagattgattgataaatttgtatacaaaatatgagtacctgaaacaaaagctaagatttatatattaaatctatttttacttttaaaatagtttatacaaattacaactatatgcacggaaacataagataaaggtgtatatgaaatctaatactatttttagtatcatatataaatcatatatttatagaaacataagatatgaattgtttatcaaattctaatcctacttttatctagctccgcacaaaagtttgcgagaaaaaaacattcattggttatattattaagatagctcgaaaaagaaaatcattagtttcactcggaaggcatagaaaccgtaccatattaattgaaaaaagaaaattatttaaaccattagattttgatctattcaaattatgatggtgcagaattatcaattgtgacatcccagcctagggcttaataggattaatagaatactcatatcaataagttgtaacttcttttctggaagccgatctccaaagaactccagggttaaacgtgcttggcctggagcaattttgcctagggcttaataggattaatagaatactcatatcaataagttgcaacttctttttcacacagagcagtctatgacctatgaaagttgccagaacagagcagtctatgacctatgaaagctgccagaacagagcagtctatgacctatgaaagctgccagaacatcccagcataaggcttaataggattaatagaatactcatatcaataagttgcaacttcttttccacacagagcagtctatgacctatgaaagctgccagaacatacaacacagagtagtctatgacctatgaaagctgccagaacatcccaacctagggcttaataggattaatagaatactcatatcaataagttgcaacttcttttccacacagagcagtctatgacctatgaaagctgccagaacatcccagcctagggcttaatagaattaatagaatactcatatcaataagttgcaacttcttttccacacagagcagtctatgacctatgaaagctgctagaacataccacacagagtagtctatgacctatgaaagctgccagaacattctagcctagggcttaataggattaatagaatactcatatcaacaagttgcttaatagagtactcatattaacaagttgcaacttcttttccagaagctgatctccaaagaactccagggtcctcccgggtgcgcacaagtgaggggatgggtgacctcccgggtgcgcacaagtgaggacatgtgaggacatgaaagctgccatatgtagtgtgcataaaagacttgtgtgtctctatgaggacagtatatgacctatgaaaactgccatatgtagtgtgcataaaagacctcccgggtgcgcacaagtgaggacatgtgacctatgaaagctgccatatgtagtgtgcataatgtagtgtgtataaaagactatgaaagctgccatatatagtgtgcataaaagacttgacctatgaaagctgccatatgtagtgtgcataaaagactatgaaagctgtcatatatagtgtgcataaaagacttgtgtctctctgggaggacatgaaagctgccatatgtagtcacttaaaataggtcataaaacgtttcatagtatatgacctatgaaagctgtcatatgtaagcggtcctggcctgggagaggcgggtcgttacatcaatatagttgtttttaaagaaaaaataattgtattcacataaataaatgtcaacagttgtatattagttccaatcccacttttgttgtattgtatacaaataattgtacctacgaaagtagaaactaagagttgtaaatcaaattcaattctatattcttaaatctactatatacaaaatacaattgtattgaggagctacgagttgtatattaaatcaaagtctaatattacaatctagctccacgcaatgttgccagggaaaatccattattttgttcaatattagtgctaacttcttgttatcttgatgctaagtaaatgaatgcgcgcgactaatttgcacatttgcatccagagtttttggttggaaagaacaagcggagctaa

SEQ ID NO: 1427 - DNA, 2100 bp, Oryza sativa
  Intron number 3 from transcript LOC_Os01g50450.1 (locus LO C_Os01g50450) derived from phytozome v7.0 (chr-ID Chr1; po s 28970852 to 28972951)
cgttctctggttcggagagatagattaaggtctgtatcgctgtatcatggtttatcttttttttttatgatgatgatgctttgtggaaagaatatatcattaccattactgttagatgtcattggggaggcttaaaataacagatattttactaaattgtttgtttcttttaattttctgtcctttgctcatgctctaggactatttcgatgtttgttaatataagcaccgggcctgatttcttttgtaggaatgaaggtggtactatagctgcgtttatgcctttttattcatgactaatgttattagcagcaagattattctatatgttttataattgcatcactttgcgcttctgtgtgctttgctgcttgttttttcaaatggctaccatatttttaacctagtcagagcaatgatgtcaggacaccctcttttccttgtttctaaaaaactgtccagttcagtctcctgatgtgcctgtagaagggagctgaagaatgttaatgactgatgacttaaggttgtgtaaggcttatcagaccatattagagaatacagttatacaattgtcaactaatctcccaaagcttcatgctattttaacctttcaatgcctttttttttttaatttgattgtcaatacattttttcttgtaaatgcttctgtaaatcattggactgtttaaggttgcaacatctagctgatcaaatagagttttcttagtgtttgcttttccttaccaagaggacagtgaactcaaaactaaaactaccttttgaaatcagatgcccagtgtcagtaaaagctaactgaacataattttgataaaactagctgtatgattacgatcaattttgatatgccacgtggacatatttttttagttttgaatatttggatatgcttgctatatgttagtcaatttgtttgcagagaatctgttagttgcttaagaaacgagatacccggtatagttatcgagtcatttcataagcagtgtttgttccaatgctgataaactaaggaaggatgcacaatggtaacactgtaactacgagaaattgaaaacacatgatttatttgatttgtctgttgtatatatgttatgcacatggaacatgatgccccaagtttacatcttagtggagaatagtcatgctatgcatatgaacatgattggagttttacatgttctaatttgttttccctgttgatttggttaaatcaagttttaatttccaaaatagctgaatgatctctcttagacttttacacgtaattatgttctgttggcaatccaacttggcatccaaagagactaaagtttaccctaccattttgctaccagcaatattgtgatgtctaccacatgaaaatacgaggatgcaccttttgtattctgaactatttctctgctctttttcccctcatctttaaaatggttacctctgttcctaataacaactattttgtacttgtggataacatggataactatcatagctggccaattccatttgagatacagtccagctgtaatgcttggtatgcttgaggttgtggataccaaacctctcaaatttgtgtaatgtcaaagtgaaattggatgacaatcgtataggaaatgactaaatcggaatttttcttgggctcagatgatttatctgagaaagtactaagagcaagtttaataatatagccaactattagctctaaaaaataacacatcatatatagctaacttaataaaccactcatacaatagttaactatagatacgtatactgcaccattattgtgcactccatatttctctcagttcttggagcacgagctgcaatctgtagcccgcctttcatctcctcttatttcttctccacataagcacaaatatgatgttgcaacatgtagagcccgcttacatcatcttattatctttgctctaatgggacaagatgtttatttactattttggtttcgtagtatttattactgagaataacatgtacttctaatcttctatgttgtcttaaaagttctcttgtttttcccacataccaggttggaacttggaagccaagaagacagtagacgcg

SEQ ID NO: 1428 - DNA, 4594 bp, Oryza sativa
  Intron number 1 from transcript LOC_Os05g04584.1 (locus LO C_Os05g04584) derived from phytozome v7.0 (chr-ID Chr5; po s 2144395 to 2148988)
caggtatatatttatggattcaaattcagaatttttgaatttcctacaaagtttcgctagactttgtattcttataaaaaataataacgtaactaatctggatcgatgatcatattgctaactccatcctacaatatacgagattttatccatacagttatatggagtaaaaaacatatatattaattattgcatatgtagtgcccaacattataaagatttatatatgtaccgtctttactttaaataaacgggtggacatctacttatactacatcatcacataatatgtatgattttgtcaatataattagtataaagtcacttatattataggatggaggtagcatatatatattcgtatattgataactagctaagtggtatcatcatctacggaccattatatgatttggcgggagatcaattatagtagatttactgtctaatattaaaaagatttatgtatagccatctttactctaaattctagctatgctacttagggtctgtttgggagagcttctagctgctagaatttctcccagaattagaagctcctcagacagttcagcttttggtttagattctgagaagttgtacttgtatgatctagaaaataaactagaagccagaagttataggaaacctagctttttttagattctcaaaagctagctaccgactaactatttcttagaattttaagcaccccaaactaacccctaaactggttacaaagacatggcatgctttagcgcgttggatgcatgggccatgcatgcatatgcgttcttatatatatatatatatatatatatatatatatatatatatatatatatatctcctttggttgtgctacacgtggtgtgtccccatatgtagatgagatcgtggcatgcatcgatatcaacatgtacaactaaactattctcgatgatcactgatcactcactatcggggtaggtaagtcgatcaatcggatggctctctccatcttgcaatcttcgattccctttattttatttaatagtatacaataaagaaatatatatccacgtataccatataatcatttatcatacatgtgctgtttatgtgtctactcgtaaaagtgtgttctttttaattatatgctcaaaagatttataaatgatgaagaccatatatatatatatatatatatatatatatatatatatatatatatatatatatatgcaagtcatcaacacactgtacaaaattctcacaaaaattttcccatatatatgttcataaatcaatatcaggatttgataactctggttgatagagtcatgcaccagtaattttacccataaactatatataaaataaaatcgtggacaaatcccccactaataaactgtgttggtacactctagtaaataataaagaaatctggtggcctcccacagccacatattattgtgttgaagtcggtcgtcgatcacatataaaccaacaacaaaagggggccacacaaaaggccgcatattaatttatttccagttgattaacaaaatgaccctatatactatcttttcttgcttggtggaaaagaaaagctagaggtcagttaattataagtaaaatataattaatcacaccatgtgtcttgctgtgaacactgtactggaagaagttaggtacacacattatgtagtgctacgcactacgtgttgaaattaaatgtgctctgtttgcttgcacaacatccatttgtcaggcatgcagacaggcaacttatatgcgtgtatgcagctcaggcatcctctcgagaatccattatcatccatctctttcgcaacttcgcgagaagtgtacatgtacgtacccacactacaaaattagatggatcacctaccgcattatattagttacctctgtttggtaatgcatcttacactctcccatctgtttggtataaaacttttaatacatatctcaacgattcagaagtaaatacagtaaaataaactatgatgaaaactcacaaaatcaacttcaaaataaagtttaataatttaaattttgacttataaacatatataggcagtacatgttcaagattaataggtaattaatgttctttttagattgtggaatatttcgttaattactgaaacatctttcagtaaagtttgtgacgtgttgttatttgttgcatcaaaattatatgtgtatatttagtgttggaaaaaataatttcttatatatattaattgtagtacaaaaatggtattttaaagaccatatgatgtttagaacaatttctctctctctctctctcttttttgtcgtgttgagtaaattgtgaattaagcaatgagctagctagttaggttcaatgtttgtttgaagttaagacatttgtgtcactgggtcggccgaacactccaactaatcttatgcaaaactagctagtagcattttgcacgaattttgtcttagatactccactgtcttctcaaagtctttcgatcaattactttcaccagcttgtgtagcaaaagattgatttgtgccgaacatactttagcacacgaaccggccacacttggatcaaattaaagggccttttctctagctagtgttggattatatcatgaaccatgattattttgcttcaattttcaatcgagagagacttggcaagtactaaagatttaaaaaaattatatagctagtggataatccatgccagtggaaatgcaaaactagctacagttgattatgaccaggtatcgatcggtccaggatttttcaggtgggcgccgctggtatacctgaaactgtagaacaattaatactccctccttccctaaatgtttgtcaccgttgacttttttaacatgttttaccgttcgttttattgaaaaacttttgtgatatgtgtataactatatgtatacatcaaagtatatttaataataaatcaaatgatagaaaaagaattaacaattacttaaattttttgaataagacgaacggtcaaacatttttaaaaaagtcagcggcgtcaaatattttaggatggaggtagtatattctaactgagccttttttttattttaatttcactgcttgttctcaaataaaaaatggtatataattttcatgagattcatgaaaaggaaacaaagatcttctctcattgaatctagagttgccttgactaatagtagtacatgtggttcagtggatgtggaaagtttgttggtgaaaaggtaggctacacagtgggcaatagtaattttgacttagtgttcttttacgtccacagtcttcaacataggagtactaactttggtcatcattttgtagttacagtaaaatataagaataaaaatataatattatgaaaacatttttaacaacaaatttgtatagatcttttgttgagttaaagaaacatgggggtaaaggtagcgtggggtagcccttaatgtaggacgccgttgacttttcgaccaacgtttaaccattcgttttattcaaaatttttacgtaaatatgaaaatatttatgtcatgcttaaataatattgatgacgaatcaaatcacaataagataaatgataattgcataaattttttgaataagatgaatagtcaaacgttagataaaaaaatcaacggcgtcatacattaaaatatagaggtgtagtacattataggacccactagccactagagttaaaatcattccgtgcccgcaaatattactcgtgtactggtgcacttttaacgtaaggaatttagagaggatatatgggtggttctcgtctctttaaccttacatcaaacatgaccattcgcgtatgatatatgctttttttctctctctgtaatcgtggaaaaaagaaattcaaaaaacctgacggtcaagtggaaaagaattaatggagggcttcgttagtgcttaataagttgttgtgtcggtaaaagggacggtttaaccacccgcacgtaaggttgatgatcgatctacggactacgatccaacggttcacgatgcgtgatgcgatataccagtatgtgatgtgacaatgaacggtggttgctgcgtcgttactagatgatgctagaacactcacaatctcacttagctctcactaacaaagtgataagctctagtactatctacctaattagttagtgacaatcaccaacatttgattttaattacctaccaactcaattttcttcaaatccgttgaaaattgaatcgatatgtataaaattcagcaaaattacaatgaaatgaaattgagatgcccaggtagtgcagtgacagaagatatatggtttcaaaccctaaaattccgtgttcaatccaaaacatgcttaaattttctttttaaaaaatgtttggaggaagtctctcttttcaaatcctttttttacaaaaattacaatgacattgatcatgttaattatttttaaaaattgtttgtagggagtctctcccttcaaatcttgtttttttaaaaaataagaatgaaattgatcatgtgtgttttaaatttgcaggtgacggagttcacgtgtggcgggttcgtggtggg

SEQ ID NO: 1429 - DNA, 1940 bp, Oryza sativa
  Intron number 1 from transcript LOC_Os07g36590.1 (locus LO C_Os07g36590) derived from phytozome v7.0 (chr-ID Chr7; po s 21879628 to 21881567 reverse strand)
tcaccatttggaggtcagtttctcgattcgctctggttgctagtatcatttgattcggatttgattgatactaatatcttaagactgtagggcctagaataatgaatagttcaaatcaaatctgacccgcaattatgcttagaataaaatttggggttattaatgtatacttcaacttcaagtggttgctgttggagtgttggtcataggaatttcttaagttcgagtacagttttacacaaatctaagcatcttccttgttattcacggggcaatccaagatctatatttaatttttgaaaatattgctcagcttcaattaatgttgcttggtaggtagcctagtttggtttggctttggttgctcatcctctattatactttggagtttggatcacaagttttgagcatctccttttcatgggtgatgtaaacatcgttttcattgtgatgtggaatggttggtgaggggctatcagaaacattaagtttagcaattggaatgggcaaaatagccatgtggggaacgttacctcctacttgcaatccatcaataatcattactcactagttcatgattagtgctagtatattggtaggctattctaacagatttaacctctgttttttgacacactgaatgttttctgcacttaagttttatgagtatggtgttaagttacaaataagacatttagcccggtcgcaaataagttttgtaattgacatgacctccaaacatagctctgatgaatgatttctgttgcatcgcgacctgtcaggtgcggttttaaatatctttttcagtcaaatctatgcttatcactttcatatgtttggtttaaatttccacaaaacatattgaggtccaaatttaaaggaagctagaaacaacatgcctaaacatcatttattttttactggagggagtagtaattgctcccttttttttatgctgttttagaaagttatttttgttatcaaattgtatcggtcttctagttagcgtttacccaaataggtcctagtaatagtcattgtaagctgaaaattggaattgaatgagcaagataggtggaggctattgattgcagcttagaacatttaagagggcgaacatgtcaaaacatgggcattgcttagctccttggtttgttgatatctaaaaagaacagagggaatacatgtgagcagaccgtttgagaaaactctttcaacaaacagatttgtattttttctctctttctccatgaagtaatccaataaatccagtcactaacaaaaagaaaaaaaaaatcctctatggcactcttgagtttgtgaaatgtaggttcagcttcttactttgtgtattgtcttatctgccaatggaaacatatgaacactaacttttggtatggagaaggaaaagaccatatatccttgttctttaccatttccactgtccaaatggagataagctcaagcaatagaaacctggagtcatgtgctgtattttggacagtgaaagtagcatgtaacaagagtatattacccccccccccccaactgttaagtgttaacctctgaaagtggcgtaaaacatcagtacaatatgtttctggtgacaaaatactactataataaataaactcaggtgtcagattcaagtgtgtcatataagaaaattttccttttcggtattgcatggcatgcttcgatgaattctcagttcctgcaagctgaacatcagcctgatggatccacagaaaacaagtcaatacctatgaaatatgtaatgcaagtgtgcaaaagctagtattcaagatgaaatgggatttgaattgtgttattgaaataattaatgacaacttaactgatttaatatataatatcagaaaaaatggattctcaatttaagatatgccataactttaattgactctttacaggtcaggaca

SEQ ID NO: 1430 - DNA, 1495 bp, Oryza sativa
  Intron number 1 from transcript LOC_Os10g28340.3 (locus LO C_Os10g28340) derived from phytozome v7.0 (chr-ID Chr10; p os 14676799 to 14678293 reverse strand)
acttctccagcttcgtccggcagctcaacacctacgtgagcacccctaatcctaatcctaatccctttccttgtggagatagtactagctgttcttttaattttattcctcctgaaccggaaaaaaatacctgtctgatgatgtagattcgtaagtaatcttgggtagcactgtagttgttgtttactgaagtagtgcttaccgtttagtgtcattgtgatttgtgtggcaatggtatgcgcattctgatgattgtaaattacagatttctgatagttgtttacactgtttaggatttgcgtcattgtgatttgtgacattctctgcacactctgcaaaagctttgcttgtcttgagagatgttgaagcagagtcttctagtgtttgatcctctttgtagtcatgtttaggtgctagtttttttttcttttgccataacggtacaagtatatttgctactaggtatatatgtgttgatccaacttggaatgctactaaagcatttgtgcttagtagtgtaaaagaacatttcaaagaaccatgaattagattgtgaagggttggtttggtttgtggcctaaataggccttaccaaattttgtcagtgccaaaatttggctagttttgtcatgactaattttggtaaagcaaagttgtgtttggattgaagccaaaatagcctaagttcactattgaaatggcctattttcttaggcatgccaaaatatggcttcaaaccaaatagatagtaaacactattaaattaccaaatattggtaagcctaatttaggcctcgaaccaaaccagcccgaaaagttaacattaagaaaatgttgtgtgaaaagtgaaatagagaaccaaattgaagcgtcgggaagcagtggtatcaactatttagttgttaggtgatagttgcactgagcttggtatacataaataaatgtattgaaatgttacagaaacttcttactacagagtttgtggaagagcagtttcagagcagactagggctttatttgctactacctccgtttcatattataagactttctagcattgcccacattcatatatatgttatatcgtcacattcattaacatctatatgaatgtgggcaatgctagaaagtcatataatctgaaacggaggaagtactgtttagtgtttaaaatcacttcgctgccacaggctaactgacttaggtctttggcagatttagttttcaggacagcctataaaataaaatttgataatgtccatcctgattttttgatactcatcaaccaagttttgcaatcttcaatcctacttctgaaatattgaatttgtgtgatgcatgtataaatggcacctttagcatgcttatattcttaaaacaatgcatgctccaatgagcttcatctcacgttgaggttaggggattctgggagattaattctcccgcgcaagtgtatcatcctgacatgatttctcaaacttcttattgttgctag

SEQ ID NO: 1431 - DNA, 7006 bp, Oryza sativa
  Intron number 1 from transcript LOC_Os11g24824.1 (locus LO C_Os11g24824) derived from phytozome v7.0 (chr-ID Chr11; p os 13690233 to 13697238)
tctcgacgtcctcccttctggcagccgctgcttgattgcttggtaagggtacatgttcaacccgtgctaatatgtgtatttgcttgttgccacagtggtccactctaatgctatttggtcgtagttttcaccatactcattgtgtcttttttaaaaacctaatacttgttggaaatatagtcattattcggcatattttaatccaagaaattgaaactatgatcatggcataagcagtgtagggtgatcttaacataaccagtaccatactatgcgcatcatgaatgtcagaaacaggaacataccagtaatgcgataacatgctagaggcatcatgtagaacaggaacaagaacatagcgcacacagtatagcgctaacaatgggaacaggagtagcgctaacagcagtagaaggagaagattataccccgagaatggccctccgctggatggtgaggcagaattgcctccgttgttgtagtcgttcacggcacctcctcctggcgcaccagctccggatccagctcctgtcggcgtcggcgcagctcctgtcggcggagccgcaccacctccgccaatagcggcggcagcaactccagacatggcgatgagcagtcgtgcaggaggcactccccaaaaacctgatcacccgcctacccggtgcagatctcaggcgaaggtgtggtttcggaggcactgcttcttccaatctctcgtgcgcgcaagagatcagaagcgaggaagcgagagagcgactcaggcacggaggaggagaaactaacaccgggaaagaagcgaagaaaacggatcagactcgcggcctccttatctatcaggagaaagaacgtggacgcgctgttgcggagggaatcgtgggaacgtgggttagtggctgcaaaaggatagcgacgtgacgtgacgcacgccgccagccagccacgccacgccacgcctcgccacgcctcgcccacgcccacgccccggcccggcccggcgcgcacgcgcgcgcgtgtggcattctgacccccacctcaactggtcaacagggagcctctaataactccctatttaggttgagatatttctcgcttaaatcctgaggtggtattattatccttaacatttattatgggcctttgagatttaatagaataaattgggcctagcccaattattctaacaatccccaccaaatttcaaggctcataagaaatgttctcaatgttgtgcctgtttgatataccagggttttggtggagactgttaagttgaacttccacctaggaaatgagctacatcagaccacaacttaacaatggactatgccttgaattgtaagttttgtgtgatcaggtttcacttagaaccttgactggtactggtctgccgttcgcatcccctctgtttggagcatataagtcaaactccaggcctttcatgagtatctagagattgcccaaacctcatagactgtgactagcagtcgaactcatataggtgtgttccttctgagatgttctgcaggtcaacatctctgcttggaaaagccactcggatcacattaagacataagccatcctaccatgcaggaaagaagagaagcacatcatggaaatgagcccttttcaagggtctcttctctcagtcacacaatagtttgtttcaccatccaaattcacgggatctccgatcacaatggacaggtttccactattatgcaaccttaggtgggtatcaagcccatttccctcgatgcactgtctatcacattacgtggtagcccctttgtaaactgatctgccagatttctagccgtttggacatagtccaatgctatcactccggagtttttctgctttctgacagatttcagtcttctcttgatgtgtctagatgacttcatgttgtcctttgaactgttcactttaataatcactgtttgattatcgcagttcattaggatagctggcactggtttttcaaccaccggcaaatccatcaggagttcacgaagccactcggcctcaactgtcgcagtatctagtgctgtaagttctgcttccattgttgacctcgttaagatggtctgcttgcaagacttccaggaaacagcgccacctccaagtgtgaacacaaatccacttgtggcttttatctcatcagcatcagatatccagtttgagtcactatacccttatagtacttttggatacccggtatagtgaattccatagctcatagtgccctttagatagcgcattactctttccagagcctgccaatgatcatctcccggatttgagacaaaccggctcagcttgcttacagcaaatgagatgtcaggcctcgttgcgctagccaagtacatcaatgaaccaatgatttgagagtatctcagttgatcccttgctattcttcggtttttccttaatagcatgctgggatcataaggagtaggagctggcttgcagtcactatatccaaagcgactcaaaaccttgtccacatagtgggattgcacaagtgtaatcccatcctcatctcctctttgtagtttgatgttaagaataacattagcctctcccaaatccttcatttcaaaattcttagacagatagtctttgacctcctcaatcacattaaggctggtcccaaagatcagtatgtcatcgacatacaagcacaagatcaccccttctcccccaccatagcgatagtatacacatttgtcagcttcgttcacaacaaagcctgcagatgtaagcgtgatgtcaaacttctcatgccattgcttaggtgcttgcttgaggccatacaaggatttcaatagtttacacaccattccctcccgaccttctagtacatacccgtctggttgatccatatagatctcctccagctctccgtttaggaaagctgtcttaacgtccatctgatggacgagaagaccatgagaggctgccagagcaagtagtactcgaatcgtagtcaagcgagcaactggtgaatatgtgtcgaagaaatcctcgccttccttttgggtataacccttggccacaagccttgccttgtacttttcgattgtaccatcaggcctaagctttttcttgaaaacccatttgcatcctacgggcttgcacccatatggacgctcaacgacttcccaagtaccattagacataatcgagtccatttcactgcgtactgcttccttccagtagtcagcgtcaggagatgaatatgcctcttctatggttcttggggtgtcatccacgaggtatacaatgtagtcatctccaaaggattttgcaaccctttgtctcttactcttgcgagtatctacaatgttgtcctcctcaggattttcctcaggcgtttcatcattgtgttctatcggtgcaaagtgctcatggggcatgacagtttctttactagaagtgctaggtgtatatttcataggaaattcattatcaaagaatgtagcatctctagactcaaaaattgtaccagcatgcatgtcgggtactccagagtttactattaagaatctataacccacactgtggatagcataaccaagaaacacacaatcaacagtttttggtccaagtttccgctttttgactataggtacatttaccttggccaaacagccccatgttcgtaggtatgagagatttaatttcttcctttcccattcctcgaatggtgttacttccttatgcttcattggaattttattcaggacatgacacgcagtcaaaactgcctcaccccaccattccttcgaaagccccgcagtgtctaacatggcattcaccatctcagttagagtacggttctttctttcggccaccccatttgattggggtgaatagggaggcgtcatctcatgaataattccaaactattcgcaaaaagatgcaaactcattggaaaaatactccccacctctatcagacctcaaccgtttgattttcctttcaagttggttttctacctcagctttatagattttaaagtaatgcaatgcctcatcctttgttttcaatagatacacatagcaaaatctagtgcaatcatctatcagtgtcatgaaatatttctttccccctttagtcaacacgccgttcatttcgcacaaatcggaatgaacaagttctagaggtgccaaattcctcgcctcagatgccttgtgaggcttgcgaggttgtttcgattgaacacaagtatggcacttggaacctttgaccaaagtgaattttggaattaaactcatgttagctaagcgcgtcatacaaccgaaattcacatgatagagtcgcgaatgccacacattagactcatcattcttgctaatatggttcacagcgttatgattattacacatgtcattcaaagaaaagcggaacaagcctccgctgtcataaccttttccaacaaaagtcccatatttagatacgacacatttattggactcaaacacaagtctaaaaccttctctacacaatagagagccgctaactagattcttctttattgaagggacatgctgcacgttcttcagctgcacggtctttcccgaagtaaacttcagatcgaccgtaccaacaccattaacagccgcaagcgacccgtttcccatcaacaaggaggaacctctcccgacctgataagaagaaaacagagaaatgtcagcacatacatgaatattagcaccagtatccacccaccaatcaggtgaatgaaaaacagagagaactgtaggtaatattttaccgtaccccgatgttcctccgccctcgctaatgatcatgttggcagacttcctgtctttgcgcttaggacagtccttggcccaatgcccagacttgccacacacaaagcagtctccctttgcctttcccttgcctttcttcttaaagttggttgcagccttgggtttgacatcaggcttgactttcttgttgttgtgggatgcatgagggttcttcttctgtaccatattggcactagaacctccctcaacctttttgccccggacgtcctttgccctcgccttctcctcaacacccaaagagccaatgagatcaggaacactgaactcttgtctcttgtgctttagtttggcaataatgccacccgccacaaacttgtccggcaactcacggttgttgttctcaagttccttagccagcatctgaatctcatgagcttgttctactacagaacggtcatcgaccatcttgtagtcatagaactgctccatgacatacagctcactgccggcgtcagaaactccgaacttggcctcgagtgcatcccacatgtccttcccagaaggcatgtgcatgtacacgtccactatgttgtcagcgagtacactgatcaatgctccacggaacaggcaatccgaagcctcgaacttagcctcttcctcaggagaaagaggtggttcacttcgtttgccccgtgaaacatagaagcactgcatcgctgtcaaccacaatagtgcacgtgctttccatctcttatagtttgaaccatcaaaagcatgtggtttcagtgcagcagcaaagccaactaccgaaaatgacctatcaggtttttggattgttggaaatatagtcattattcggcatattttaatccaagaaattgaaactatgatcatggcataagcagtgtagggtgatcttaacataaccagtagcatactatgcgcatcatgaatgtcagaaacaggaacataccagtaatgcgataacatgctagaggcatcatgtagaacaggaacaagaacatagcgcacacagtatagcgctaacaatgggaacaggagtagctctaacagcagtagaaggagaagattataccccgagaatggccctccgctggatggtgaggcagaattgcctccgttgttgtagtcgttcacggcacctcctcctggcgcaccagctccggatccagctcctgtcggcgtcggcgcagctcctgtcggcggagccgcaccacctccgccaatagcggcggtagcaactccagacatggcgatgagcagtcgtgcaggaggcactccccaaaaacctgatcacccgcctacccggtgcagatctcaggcgaaggtgtggtttcggaggcactgcttcttccaatctctcgtgcgcgcaagagatcagaagcgaggaagcgagagagcgactcaggcacggaggaggagaaactaacaccgggaaagaagcgaagaaaacggatcagactcgcggcctccttatctatcaggagaaagaacgtggacgcgctgttgcggagggaatcgtgggaacgtgggttagtggctgcaaaaggatagcgacgtgacgcacgcccgccgccagccacgcctcgccctcgcccacggcccggcccggcccggcgcgcgcgcgcgcgtgtggcattgtgacccccacctcaactggtcaacagggagcctctaataactccctatttaggttgagatatttctcgcttaaatcctgaggtggtattattatccttaacatttattatgggcctttgagatttaatagaataaattgggcctagcccaattattctaacaatactactgcctgtaatatgaacttggtgaccagttccttcaccttaattactgtgtatgcggatttgtgtctgaaggttgcggtgtgagattattctctcaagctgcactgcaaattgattttccttcaatttctctgcatggtcaaaattaacatttgcaacatggattcatggcctattgctcaattctaattcttagtagtcttgattggtggtggctggctgctatggtcgttcacatgatcatgtaatttgttaatcaggattagtttcattgttcccttctccgaacccagaataagcacttcttgttcatatgctaaatttattttattttctggttgtacaaccttctgattataattataacttaaatttttcagtcttttgcagtgaact

SEQ ID NO: 1432 - DNA, 1221 bp, Oryza sativa
  Intron number 1 from transcript LOC_Os06g22030.1 (locus LO C_Os06g22030) derived from phytozome v7.0 (chr-ID Chr6; po s 12760826 to 12762046 reverse strand)
gcagcggcctcagcacaagaaggcagcagctccaggtataatgctttgtcttgtgccttgtttgttgtagcaactactcacttcgtgttactatattggatatatgatggtattcctttgtgatacatgtatagttgtatactctccgtttaacaaaccaatctagggaggatttgacataaccttctgttcagattcattatcctaggttatatcaaattctctcttaaattggtttattttgcgagggagtgagagaatgctacttcaatcagtatgggcaaaagggcatctggtattttttggttgttgtcgtggtgacaagcagacagcagcacgccataagagtatgtaggcatgaggatgaaggggactagagttgtgggggggagggaatggaatatctgctgatgatgataatgacctttatgcccttggtgttgctatgcgcttgtagtagttgctggaagtttctttctgaggatgaacccaactggaagttcgtgggttgtgttcagttgttctactgtattcaggatcactgcttcaaggtgaattggtgtagtagtgatcatattatggatatgagaacctgtcctgctagttcattctgaaaagtaacactgctttagttctatttttgcttatgagtaattgtggttttagctcatttatcctctgatgtctgtggaataggtgtttatgtaaaccctgtcttgtgggttttgttgatctacattgccaataaagatgttctaattccatcattaaaattaattgtttgttgaaaaagggagtatttgttatccttttccttagctggaattatctggccattcatccctttttgaatttgattctgggaattttagtaacaatagttgcaattgtttcttagctggaattatctggccattcacccctttttgaatttgattctgggattttaataacaatagttgcaattgtttttttgcctctcatagttagtttcctaatgcatggctactcttagaatcctgtgttgctatttcttcaagaattataccaaagattgtgaaacatttggaaggtgttagttctatctagtgccttatgctcatgagtgctttgaatcatcagtttatctttattacaatattatctgtacttcattaatatgaaaattttctttgaattcttgcaggatctagtgtgattggattgaagcctagcgtcatc

SEQ ID NO: 1433 - DNA, 1670 bp, Oryza sativa
  Intron number 2 from transcript LOC_Os12g06640.1 (locus LO C_Os12g06640) derived from phytozome v7.0 (chr-ID Chr12; p os 3218259 to 3219928 reverse strand)
atatttttaaccaatcaaggctgacttgtaaggtaagccaactccccagcatcattacccttaaaaacctaaattttcattttgaggaaccctttttgcctatcaagtttttggtattactgtgcagaaaggcgctagtaccatcttagcactgtatttcatctttacagcttaatgttctatatgtgataacatcaataaatattttgggagccatgaattcttgagatacttgagctaaaaaagaatataagttgcctgtatcatcaattaatgacattgtatgaggggtgaccattccaattaatgtacatggtatatttatgtttttttactggatcactgtgactattgatatggttgtttcacatagtgccgacatcattcatttagtttcacattaattccttttccataataaaattctaccagtttctacttgtaaattttatgcctattatcttatgtcactagttaactcataatagtccaagttgttaaatgcgctaaagtgcacatttgcatctgttcaatttatatcggactttcagcagaacttactttaacatgccttttgttctaggcatatttaccaacctttatagagtcttgtttttgtttaataaatttggaaagggtgcatcctggttgtctatatgccactgaaaagttcacctcatcctattggtgtctcgctcacatgtcagcagtgggccaatgctggagtgtgaggcaacagccgacagggagaggggactgattaggcaagcatatatctgtccgtctgtgtaagtggagtgcgcattgagttgctgagcatgcgcatattcttatatggaaaaccttattacatgttacgaaatatgttgttctgggataactttctcagtagatcaaatatgttgttacaaaatatggaaacactatgagaatagtgcatataagattgatcaagagcaacccaacaaacaacttatttcttttttgtcattccgcaatcatttattggaacactttagtgcctctaaagctggagaatgtgtcatagataaaacatatgatagagcaccttatcttgtctgttttatccatccttcactatggcttgtgagttatgaggtaggaaaaacaattgcagaccaaaattcgtgtaggaatgtcatctttataggcttataacgcagtggcattcagaagttatagggagtgaacattcatcctgatgaagttactagttccgtagtacggagtacataactactggactacatggtggtttgtgcaaaagcaaaacaagagctttctagcttctgaagcaattgcaaaaattatgtagatttgttctatatacacagtcatattggggttggagacataaataaattgttattaccattggtttaccttggttatgagttatgttctcaaaatgcattgttgtagctttacgtccttatatttttagtggttttatcaaatgacttacttccacaatcagagtaagtgaaaacaaaaatgctatatacggatactttctatgctatggtgccttcccatgcagggttggctcacttgttaattacgataaagttgtattcttgactgattatggattctgtcaagttgtgtctcatgaatttgcttcttcttttggttatttcaggtcgctg

SEQ ID NO: 1434 - DNA, 3155 bp, Oryza sativa
  Intron number 1 from transcript LOC_Os02g22780.1 (locus LO C_Os02g22780) derived from phytozome v7.0 (chr-ID Chr2; po s 13561488 to 13564642 reverse strand)
ccctttgtgtcatcaggtaatacttcgctcgaataatgattgaaatgttgtatgcgtacaattttcttggttgtagtcaacttctccagaggtctttttgaatacggtgagcgggcaatgtcttaatggcagataatgcacatatatagggtagggcatgaccagtatttataattgcattggaatcaaagcaaatatgtttttttttttggttctggtccactaagatcatgctccaaatcttttattactttgtttcataacattccccatgcaggagtatcatttgtttttaccatctatatatgcacattttgaagcaacaacttttttctctagtattagttattatttcagaaagtaatacattatgcatctactttcattattttatagcactggcctgattaattgtatacatttgttatgagttagatagagaacacaggcttgccaatgaatatagattgaatgcaacttacatagcgttgaaacaataaattttagacatctgttgttgtattcactgttacaaacttaaattttaatgggtcaattggcaactattttccatgtctgtggtttgtggtatagacttttgtccctcgtagactttacagtcaatttatgtcaaattgtcactgcaataaacatttatcacatggtaatggtattttaatatgctcagtaagtttgctgccagttatagaaacaaggcaatgggtttggataaaccacatcgctggagatgatttactcttgccatgttacttgtacacagttgcaacaattggctataaaaataggtgattttccttatctcccatatatgctgcattaggcatgtttggagaaaggattgttcaaagcctgtcaagtgtgctagaggactactcactagtagttgtaagagtgttttaattgtgtttgatgaatctcaaggccaggatcttaggttgtccagtcagtgctgaatgtttaccattcactttatgattgctcatcttctacaatgcactttataactgctcatcccttctcttgtggcattttaacaacaatgctgtgccaaaagtgtggcagaaagaatcatttgccacagctgtggcaataatttgtaaatatttttcatcatatggggcatggctgttgggaaagtgtgtagttttgcaggaaatcaaatactattgtagcaaattatgacatttaaccatataccctctatattttgaggaataaacttatatatgttttttaagttagtattttttgtaaagactatcttcaggcgtatgtttgtttttattgatgccagtgaacatcctatgtaatattttctttcagaattagcatctccatgactgccataattttgtaactgctgctacaaattatatttttcagtaattccatcttgctatctgttttgcatgtgagcaccttttaaaatattatctggtgacctgacttgactctcttatgatatcatcaattatccattctatgaacctatcttaatctaatgataatttattagtaaatatatgcatttgttttataatatcccttgcttagactctattgtgttctttaattattgtgatactttatgaatatttatatttctttgggactacattccatttgtttgcaattgcaatggagcaacctagtagattttctgacctctaacaaaattgaaagaacataatatagtgtcattactctctagaaaatgatttcaacctgtgtcagtgagaaccaatgcatcgaggaaagcccccaatctccctaccactcatgaggactgtttagtattttattgatcttacaagcatttgtgtaatgtttatacaccacctagtagaattgacaattttccaacagactcacaactattcttcctttttatatattaattctaatttggtggataacttaatgattttactaatattaacagaacacaataagctactaatgtgtactccatagacaacagatagctgtagttctttgtcaatcatcacaacagtttgcactcttaagttacatccacattctccatatttttgaacgaacttagctcaggggaacatgtaatagttcagtttgacatttagctattaataaatgcttgaaatgattatttgtcttacatgaatatgctggaataaggttatatgatttccttttttggtactgcagataactgctagagaaaaaaatctgaatgatgataacaggggtgtgtgcctaaatcttatgtatcagttttgttgataactgttgttaacttgttttattatctactaacaataaacctgttgtacgtaaaatagtatggttcccatttctatttttgtattacttaaaaaatgattggagattggtctgggtattctattatatatcttctagttttgcttggagagctacttagtagctctaccgatgtgggttgcaatgggttacttggtatttgttcttgcctgcattttagattggtgtctggactcattaatgaattacaacgtgtgaactggttaaggtaatcttttttggtctcaacttggcgagtggagtaggtcccaaacaattgatgaaaatacaaagcctcctactagatgtcgatggtttttgtgcctgagtggtgtaatgtcatttgtgcatactattgatgtttctcagattacctgatggctagttgacatttatggcatacaatggacaataagaactacacaattttgctggtttcatgatagtcatcaaagtgctagattggttagatctgctattagcagagttatgtgcaggactgtacaaccagcccttatctaggtgagaggttcttttagggtttatttggctaaactcagtggttttatcttgtttttggtgccttatgggctaagcatatcatcagctttaagttctagcaacaccatttatgtgccatatgggcataattacactcttaactctaaaatggctattatcatgtgcttaagtacttgtgccattttgtaccagtgtgattgaaagtaacttgggcttgtaagagttgattttttcaatgtcttcatctcaattcacatttccgtattcacgcttcaggtgcttggtgaacaagaggtttttgattgctggtg

SEQ ID NO: 1435 - DNA, 1973 bp, Oryza sativa
  Intron number 1 from transcript LOC_Os01g32080.1 (locus LO C_Os01g32080) derived from phytozome v7.0 (chr-ID Chr1; po s 17561312 to 17563284)
gaggttgaggtatgaataatggcattcctgttccactttgacaaataaaacatctaccacaattcacaatttatttgatttaatttgcacaatgctattattagcacctttgttggctcatattctttacttttgctcctgccatgctgttgtgcggtgcaagtgatattcatttttgctcatgcaaaaagtagttgattaagcatgtcatgatatcaaaactattcagacaattctatatagtaataactacctgtcataatattagtataactatgagactgccaactacaatgagctaacaaatccccttaagttatgaaattgggatatcatgcaaataaaatcctctaacaaatagataaagatgacatggcatttaaatagcgttcccaagaatcatgtatcatttatagctgtgctggttgtattatttcttttagataatgaaaatgtttttacatcaccggcttctgccataaggcacacagccaacgcactggttgtttgtatatatttaaataaaaaggtagaagatcctttatcaactcaaattgatcactattgtaccattggtccctaatttgtcatatgtcaactcaaattgatcactattgtagaccgtttctttgacatatgacaaattagatgtacatggataaaagagttgaggatggtccaaggtgaaacaatggcaaggttacctggtccaaagtgaaaacattggttaaagggtgatccaaagtgaaacatcggtaaaaaatgtggcccaaagtgaaatttactcgtattttttatatgttgatcgtagttgtaccttcgtaatatcgaagtaaaaagaatcagaaattcaggatacccttagtcctaaattatacattttacagggaacctaaaattacagcattttacgagaggcctatctggaaatattgccaattggcaaccatgcaattctgtatttatgttaaccttgttgtttcttacattaatgcacataattttcttgaaactaataatgctcattttttgtcattataacaaaatgatatgcttcaatttattaattaaaatccagctgtaaggtaaggccattccaagctttatgttcttctcaatgctatatctgatgtgggagttgtatagcttgtttaataataaatttataagatgacatgatttagtatatagttgtgtttaacccattcaatgaattattagtggagcactcctaaattgtagggtgtaggactcatgctcaataattcgcttcgagtattaataactgtttgagaatttgtggtttgctactactacttgatagttggatatcaattggccgatgtgtgggtcaagcaacaatggaactgtgcaaattaaattatgtgatatagtgtgattaatatttatgtgccaaatattgtcaattgttcctcttgttatgattagatcagccattttaatttttttgcctcttaagtggtagggaggtatactcctccgaaagatgggagaaaacctcactgcttctgtgcctgctaactagttgcacttttaataaaaagagagtagtacatagctattccctctggttttaaatatatggcaccattgacattttccttaaacttcgaccaacaatagtacactagttattcagttacttagttaagtgaaaagagtaccactagacctgtcatcaatagttacactagttattcagttacttagttaagtgaaaagagtaccactagacctgtcatcaatagtactttaaacgtgccgtgtatgtttgtctatttgcatatttcttgaaaagacagtcaaacgaattaaagaaaacaatggtgtcatatattatcggcggtactatgttctattttcacaatattgtactaaaggtaccttaacgtttatactttgttgttcactttgcagacattggtaaggtaccagctgcctgttgttgtaat

SEQ ID NO: 1436 - DNA, 2667 bp, Oryza sativa
  Intron number 1 from transcript LOC_Os10g28009.1 (locus LO C_Os10g28009) derived from phytozome v7.0 (chr-ID Chr10; p os 14446000 to 14448666 reverse strand)
aggcaagaactcctctcctcgacgacaatgaggaggacaaacgcttctatctttcttttctttttttttccagcgctttgcagtcaaatggtggggaaattttggtgactttttttttttgagaactcaacaaatttcgctttggtgcaaagaatgctggctgatttttaataccaatattattctttgtatgtgaaaaattgtttatacctattgtctagatttgaaatttttgtatgggatattatagaggtaacctcacccaattaaatgaagaggtaaccagactcaaatctatccaaccaaccaaacaaaatattttccaaaccgcatctctcatgcactcaaccaaacaaaatctcatctcagccgggctaaaccgatgcaaacaaccaaaacagttgcatgtgtatctcttcatctgggctagactcaaccaggatgaaagagatgagccaggctaggaaaatgcaagcaaccaaacacacccaattgttgctgtggtgtggtggatgactcaggctgggccgtggttgctctcatgagtcatagcaaatgggttgatggcgtctattcttgattgtgcttttgatgcgttcttcggtagcaatgtttgttctctagcaatagcccatggatcaatatggattaagcaaacccttgggccttccggtgctaattaaggagttttgtcatgtgtggttcacattatcaatgagattttgttttaggaccttgttacagtgcaatgagtctgcgttcaggatttgtggttggttgggatgacaaattggggaaaatgtgttacaccttagtaacagatctggtttaggatagccagataaacggtacatatgcctattgaagtgtaatttatggatgtattccctatatttccccccctattttgacacaaatccatagcttacaaaacaaccactgtatgaaacttctatcaggatcatgagcaagtttgcaaggggtcttattacctggaaatgatcaacttgtatttactttgtaaaggtcgtgttactgaaatatgaatttgttcttgaatatgtttactctctaaaagcctaacatgtcatcgaaaatatggctaccaaatgcttgccatttcataattatccagaaatttcttatataaaagtgttgctttattcaaaagcacatcaacactgattttcatttgtcacccagctttggggattaggtaaatgaatcaactttagttgtgatattggggtccatgaaagattgggaaaaattaaatatattggacctttgccgagcaaggttccgattctccctgaactgtggtagtcttagtcatctttcttggatttgtgcaacacatggattgactggttatgctgtattgtaatgtaatgtcatggactcgatttgtcctaatcttttgctaattacactatatgtattatgcctttttttttcttttcagccatgattccctgttcactgaattctgaatgtagatggttcacattgtatccaactaccataaatcatgagaaatttagttcaatcacaccttcatgtcatacatagaaacatcgatgggcattaaattttgtttacacattgcacttctaactaatttctctagaccacataagctgtgcactcattttggattgtttctttgatctgtgttcaaatttcaaatgctcacaaaaaaaaatctctacaatatctctatcatcatgtaaaaaaaactaacatatgtaatatgtcttgaatcccacaatactatacagatgttcaaacacaaatctctttcatcaatagttgttagttagtatattttgcagagagtgtgtgctagacagctacgcttgttgcagcttatgtcatggcatcaaatcattagttttttttattcattatagtttctttgctttgagttgttctactcctatatgctaacaattgaaaacatgctccaaattgcaaattatgtcagtttcaattaccatatgatttgatcaacacacacctaccgcctcaacaactttcacctgctttgtattgacctgcatgtgttctcatcggagttcttcgtcatcgtagtcttgcattagtcatcatgactgacaagttcactctaactccatttggtagtaatttttacttaaaaacagggtgtttaattgttaagcaatgcaagatccatttctttgtataggtccaaattaaatgcatacgacaaccaactccactagcaagatcggttgcgtcattgtttcatagtggtggggctgtacaagctactagtagatcatgaagcctggttgtcttcctatataaggattggtttcagatccttgggagacttgacctctgcatggtcatggaagttatgtgtatagtggcagtaccttgtgtagtgtctcgtgtatcagatattgtttgatatcagattcctattatcaactcagtatgattgcttgcacttagctttcctggccatccttttccgtagtatctttgttagtgagttcatgtttctatcctcactttcagacagaatctctgaacattggtttttctctcagaagctagaagataatttattttgagttcggttctctacatcttatcataatttacagagttttccattcacttttgcagtttctagct

SEQ ID NO: 1437 - DNA, 5205 bp, Oryza sativa
  Intron number 1 from transcript LOC_Os05g31230.2 (locus LO C_Os05g31230) derived from phytozome v7.0 (chr-ID Chr5; po s 18103095 to 18108299 reverse strand)
cgagcatcccggtgatcgaaaaatcgaaatcgaaggtattgcaatccttcccccccgcatagccctctccctccccctcgtcctccgcggtcgcttcatgttccggcgtggtcgtaggtcgcagatccgttagggggttgggggctggtttcatcccctccggtttaaaaatccatctagtttttgtctcgattacatttgttttgacgcatttgtgcgttgtgcgttgtgcagtgctaaattaccactaatagtctagtgatttagattttttttttcaacaaaaaaaaagctgaaccctatgccccacgttaggttagcctctctacatcaggcgcatgaactactctagcacagtttcagcaagttccattctggctttgaatggaatggtttgcctctgtctgtctgtgtctatgacagtatcatactatcttgtgagcacctttggaattcatgaattttacagaattttcacatgatgaaacagttcaagtcacatgaaattcctcgaaaaatcatacgtcccaaaaggacgcttgaacaaaacacaaaaacacacacacccaaaaaaaacccgaaggaactgcctcaatatccttccaaatgatactgtgtgcttctttctgttataaaaaatgaaaggaaaacgaactgttgtttcacctataacctattgatgtgctgttgctgatgatacataaagaactagtctaccaaagagtggagaacagaaccagaacgccattggtaatttggtatagaatgaatcatggatggaagacaagtatcctgttcatgagcttgtcagtcaactcccacggtcttgtagctcgttcatgagaggaatcaactccacagtacccgttccagcatcgaccactttgattctttcatcttcgacagccacattcagagcatgacagctagaatcatctgcgacaaggacggaaaattcagcagtgtcttgacctcctttcctagcttcagtagattcattgtcctgaagcatctctgccgggaggagcattgagttttggtcactctggggaacaagaaacagcagcatcagcgggagcagcctcgacaagtttctgatcaggacggcaacccagaggttactgaactctgttcgagtcacattcagcaagtgcagcatcaggccaccccaccagccagacatcagcaacccggcattttggatggacatgagcagcgcatagaaagttccttcgatgcctggaggacaaagcttggagcaaagcacgaggagcggcaaccatttgagcctcccaaccatctgggagacactgttgtcgatcaccgcaaagacgtaatccggaatgccgattcttgtgttgagccgggtcaccattatcagattgagcattcctgccaggcttgaaagaacttggccccagaatagcacgccgcggaaagggtagtccttcagtgaaatttggtatagtaaaactccgagcagcgaaccgattgaaccgaccgaatacacaaggccaataaattcctgaaataaacgatcgaatgacgcaatcgaagtgtcatcagatgattaaaattagaagaaggtcaaataactgaatttatctaaaaccacacctcattatatggatttaacagtggtatgcattctcagtattacagtccatgcaaatgatgcgatgaactgatgatatctagcaaatatctatatgcaggaatgtgcatacctcagagaatcctggtcccactattggatcagtgtaccagtagaacattcctgcttggatatccaggcttagactgagagaaacatacatatacacacacggccgccaaacttcagtgttgcccccatggactgaattgctttgtagaatttcctatgaacctgaatccatcaaagcactcaagtggcatcactgtccatgcctgaattcagcaatctcaacacacaaaaggaaaggtgttcaaattttgtcttgacattctgacctgcttgtaatcgaaatctgtaactcgcctctccttcagcaaaacaccagccaagaacaccagtgcagaagggatgcttagtaatccaagagcacccttagaacaagaaaagaaaaaaaaagcaagaatcacaatcatatcaattgacattgtgtgagaaaacaaatgatgatgcaaatcattatctaaggtcagggaatatcacacctgagaccctatggagtggacaagaagaccgctgatggagaatccaagcaatgccccaacggaggagctgaacccacacaggctctgcatgtctgcggctagcggctggtgcgtgatgctgttctgagcaaccagcgcgtccaccgtcacgtcggccaccgccgcgcccgcgctctgcgccgtcagcgccaagatcgccggcatgatgcccagcttgcggtggagagagagcgtgagcatggacgacgccccaatcactcctgaatgaatcaccgagagaagtgatcaagaaaggcgaaagccttcgaactgcgagatgggatcgaggaggcggaggctgcaatcccctcaccggcaggaggaagtacgggcggcggcggtagccggcgacggggacgacgtcggtgagcaggccctagatgggcttgacgacccagggggcgctgacgaacccctggtagaactgcgccgccgacggctgcacgcgctgcacgtccttccagtagtaccccgccgtgacgccgccgacggcgtcgccgacgccctggcaggccccgtagacggccacgacggcgagcacgaagctccagcgcagctcgcgggacagacgccggagccagccgccggggaaggaggcgccgccgccggcttctcgaagcgccgcgtcgtcgtcctcctcttggcgatccatctgggcagcgatttcttgccgggggtttcttggggatctacggcggaagcccgccggaattcgcacggctagaatgcaggtctcgcgattgctcggtgggagagattgacgaggcgcatcttggcgttggcgagctgagcaagagcaagtgtgcgttgatgggtatctgcgctcaaggttttgacttgacaccccccccacccaccttgcaactattatagtactgtatactcctactaatttaaccatggtaattttgcaccattaatctatgtactagtagtagaaaactgggcaacatgtcaacactaattttgcctttgtgccttttactattgcgcatcacctctttgcactgcgttattactgcgtagctgcttacgacctgatcaaggcccgacaggaattaataagtgaatatgaaataagttcactttcgacatttaaatgctgagtttgaattgcgtccttatccacaataccagtataatatgtcagttaatttataatatcggtgtacccgagattctaaaacagtataacaccccattttaactgacatgattagccaactatgatcataatgatcgagtaagcgtgagacccacatgagccccatatatcagcggtcaactctttttttccttcatcgccccttctctctacccatccctcttgccaatttctctccaccggtggagaaggccagaagggcggtgagcagcgggaagaaggatagcggccaatgggagaggggtgacaaccagtggactagaagaccttgagcttgccacgcggctgctcgagcaaccctcaccctcaggaacccagcatcgacctcgattgcgtaacatcatgttgccccctcggcttaccccgatggcaacacaagctacgtggccaaggtcactacggggttcttgagcatgatggcttttccagcagctgctccagttcctgtcgggagagagatggggaaaagggatgggtagatagatattaggtaaagggactcggtagagagagttggctgctaacatataagacccatgtgggtctcacgctgactcaaccagattgataatagtcaactcgtcacattagttaaaactggatgttatactatcatgtgacctcggttacaccgattttgcaaattggttgaaggacacaatctaaactcatagtcaataagagagacctaaagtgaacttattataatgaatattgactattgagttggcccagcagcccaccatgttcataagaataaggtccatgacaactgctgctcacctactctccgcctctcccagtctcctgttcgttcctctctcccaagtctagggatgaaagtggttggaaatggtcggaaacggcatcattattttattattttttaaaaaacaagcagaaacggtcgaaaaattttcatattcatgaattcatctatttagtgtcaacttcaatgccacgccgatagaaattaaaaaaactaaattttaaaaacgataaccatcgataaaaatattattattatattagtttttcggaaacggtatcggtacggtcggaaaatttccataccgttttcacccccagccaagtcccaacaacgttccgaggtcacagcgctcgtccgggcgtccatcgctgccaatttcaggcccgttgttttggcgcccgaatccccctcccgcatttttccccttcagaaaaccccgcgcgcgcggccttctcgattcctgcccgtccgatccgccctcacagcctcaccgcctcatctccgccgtcaattggccctaaccccaccgaccacccgcggccctcgtcttcctcctcgccgcgccccctttcacaacggagccgggcgctgtccccccctccgcgctgcaccgcaaaccagccgccgcctcccgtcaagaccgtccttcgccgctgcagccgtgagggcatccctccccctccccgccgagcgagctacaccggcctctttccccccctgccccgtgctggacggtgagtggcattcttcttccccctttaaaagttttctaaggttgatgtgtatatctcgcttaggtctggggatttttgggtatgatacttcttgattttgttaggctactcatatagcatatggtagttcagatttggatgtgtcttgcacatatgttgggttctgcacactggttaattctgtagtttagctattttcacatagaggttgcacatatgcatgctaataatttgctggcaaatttgcataattcaccgcagccaccgccgcgtccgtttcttcactctccgtcttt

SEQ ID NO: 1438 - DNA, 1630 bp, Oryza sativa
  Intron number 2 from transcript LOC_Os06g36490.1 (locus LO C_Os06g36490) derived from phytozome v7.0 (chr-ID Chr6; po s 21430861 to 21432490 reverse strand)
gattcctggctgggttaaccgacctgcgaagctaggtaataaaacttgtgctccttttacatcattatattttgatttttctaatactttattactaagcagtacatcacactggcactttggcatattaccttgtcaaaaaagataagattgcaacaaactatgtccattatgtgggacagtttttcaaagcaagatgaaacaaatattcgacttgtagtatctggagttttgaacttccagcctattttcctgactagtcaggattctggacaagttataataaaaggtagcgaacattaaggcttgggggaaaggtcatagagtggtggattatgcagtattgttttacacaattcagaaatctggatccaaatccttaggatttttttaattaaatatgtcccgaaaagttataaagcaatcccctctcccacacacctttgttcagacatgggcgaaaacaatatcaattgagaatgagatgttgatttatgtccagggagtatcatctgctgacatgaacaagaagggaaatgtctgaacagactacagagtattgagtattcacagaaatgatgatgagatcatagatgataaaatcatagagatagtaatatgtggcaatataaatgaggattactgaatgatccaaattaggagtatgttggatctcctcataggtgtcaactaaaatgttaatgacataatttaatattaataattttatatcaaacttgatatacatgagtacatggaagtttaataaagttaattatttctctgttagttgtttaatatattgggcccatcattttgaaatccgtcatagaattagaaaatgccatctaccgttctccaccagatggagaaaatagcttagcttctgctggcaataagctctgtatcagcaggtcaggttccaacaaacaacataggtctttcaaaaataggaaagtctgtttggatgaggaggattagattgcagtttagcttctcattgtctgcttgttagcttatcagccacagccaaagtttgaaattttgaaacataaatttagtagctttttaatcgtagtctattttccagtattatcctttaaatcgcaaacaactcaaatatacaagtgttacccataaattagtttcggttgttttgttcatttttctacggcttgttagacatagctcaaacaatcggagcatcatgacatatgtttctatattggaattatgtgagagtaatatggtgtttcagtttaaatatatcaatcaataaattttaagtagtccggtaagttggcagggcagaatttgttccaactgtttcttgcccctgtattgcatgtgagcctgagagagaaattgatccaagatgcacgttactgtgtttgccttgagctgtccactcttgacccaacttcaagccatttactcagaaagaaactcatatatcaacatccaattattcaaagctgctaaaatgccaaaatatgtacatttcctgctcccaattctgttctgaattgttctgttgcaaagatgacaattcatagtcaccctttctttagcatgtatgataatccaaattatttcaggtgccttttgcaactgccttctgccagaaagc

SEQ ID NO: 1439 - DNA, 3138 bp, Oryza sativa
  Intron number 1 from transcript LOC_Os05g30870.3 (locus LO C_Os05g30870) derived from phytozome v7.0 (chr-ID Chr5; po s 17862714 to 17865851)
ctcggcggatcgccgcgtcgcccgggtcggatcaggtgcggttcttgtggtgggggtgtggggggaaagggttggatcttgggggtggttttgtttgtaggaaatggtagctgatgatttgctccgatgtggtcagttcatgagattttggtgtgattcggatcaatgggcgattcgaactttgtgctaacacgtattcgattttagcgaatgggttggagacaatctcgaggtttcggcgcggatggtggtgtggtggtatttgggagattttccttttgtttgtgttaggctattttgatggtatgagtgcttgatgttagtatgcgttacttatctatttgtagtttatctgtgatgttttggatcggtaagctaggtcatcctttttggtttatcctataactgatagaagccagcggctttagtgatattttcgtggatggataggaggttgtggatggataggaggttgcagtatgactcttgcagtattggattcagggggacaaggaaattaatgtttcacttcttgtttatactgataaatgatgtggaagtacttgcaagactgctatagatgtatatgaagaaatggacgagtcagggagacttagcttccccccaggaaatatcacctgcaattttagcaataatcggtaacaatgtggttaaccttgttagtaaagctgacctttgaaagcattctatctgtttgacttattctctgggctacaatgacaaacctatggacaacacatgctagtgttggtacgtatggtagaagacccagatgcaacatcaaacaagtgccaaagaagcgtcattttgtacttttatttatttccatacaacatggtacattcaccacaaaattttaatcctggtttgtgatgaccaaaatggccaatgtgttttagaatgattaggcaggttatctcagttcttccactggatatgtttttaatatgcacaacacatctgtaaatggactggaaaattatgtgattttcatgaaagatcttctatatgacattcatcaaaacggaaatgcatatttcaatttctctaatataattctctgtctggatttttgtcctatgctccaactccaacatgcatgctgacaaaagtgaaacctttccgactttgtcctgacttaaacatattttttattcacccccctcaatcgataagacaataaatcaatataacttgtataatgatgatattgagcgcagtttagctggccatggattccgtttgtgtttcaagatgaggcattgattttgtagggatttttcatcagactgtaaatggtctaatcatcaataactaaaattgtacctgcttttcacatttgttattataaaagctcaaactatcgtaatatgaggaggcaccacattttctccgagtggtcaaaatgtacaactctaatcagagggagaagaaatgagtcagcatttggtgtgcccataaataagagaaaattccttatataccattggatgttaccctattcctctattgccattcaaaaattgacgtttaattatttttcacattctcatttcttgttcctctttcttctcctttcctctcttcctctctctcctcacctgctgtttcctttttatttcttccttcctagcctgttctgtcttcgaggatgttaccctattcctccatggccttgttcctctttcttctcctttcctctcttcctctctctcctcacctgctgtttcctttttatttcttccttcctagcctgttctgtcttcaaggtctgctgtactgagcaccgtggatgattacatcaagccagaataccatgaagttggggcccattgtcaatagagactgaggtcaaagccataatgttgggggacaaatacaaagaatggctgaaattgaagccatgacgacgggaagagcacattggcagcagtgtgagcttggcagtgcacaaattgaggcacgatggcacatgaagttaaagctcctcgtccaaggattaggctgtctgcgcttgaaatcagaacacactggcaacaaaatctaagttccttcctctcgttctaaacccaaggtccatggtggctaactggccatgaccttgaaggcagtggttgtgtttgggaatggtgtggatgtgtctagcagcagtagaaagacattaagtccgtccactgacaacaatgcttggctgcagggggctgcatccatggctgccgaaatcaaaacttgagggtggcaaagcttttttggctgtggggacgagctcagtggcagctgaatttgtaatcaatggtacatcgttggggctgggagaggtgagggaggcaactaaattacatgggtgattatgtgattgggataggagagggaagtccagcagttgagccgcttagagtaccttgtggaccatggtagcgtgccatctggcatggtgggtgaataagagagaggagtatttagtgcagctggctgtaggttgatattagtgctagtagagtagggtatggtcgttttattttttattggtggcacattggtaatgttttgatactaaaatgtactaatgtttctcttccgcgtattcgagaaaaatgaagaagagaggagagcagaaagagattggatgaagatgataagtggccgtgtaagggcaagaataggattttgccaagaaaaaaaaaacctgaccactaacaatgcgtcgtcctaccagagtaataaatggactagggcaagaaagggttattaaatatgggtcggtggaaaataagtgaacatcaaattttagatggtaaataggggatttaagtaacactcaatggtacataaggaattttctcagtaaaaaagggaagtttactaaatagatattattactgttatatttgatttgtttaataacaaacataaccatattctcaatttaggtattagagcattttaagcaatttaactgcacaatcatgtggtatctatgacttgtttttactattttactatttattctttaggagtagttcacctttttttgttacattgatgattcaggtggcccctaacactagatcattttctctagataaatcaaaatcacagggtggattggactctagg

SEQ ID NO: 1440 - DNA, 1493 bp, Oryza sativa
  Intron number 6 from transcript LOC_Os07g32420.3 (locus LO C_Os07g32420) derived from phytozome v7.0 (chr-ID Chr7; po s 19285513 to 19287005)
tgcttctacttcacctcttgcttcttccagacaaggttggacatgctatctatttatccatctatttgtgcatgttaatttgcatactagtatctctgttctcaaaaggatgatgtcctagattcattgcaaacacagtcaaacctcaaaaatcttaaatcattaataaatgaaaaaataccaggatttaaaaatcatattagtagatttgtgaggaaaaactgtcatatggttatattttaaatattgttcccatactatcataaaaatacaaactgattccatttgtcatccttgagttttcggccatggcgcaattctgtcgatttcctgcacgtgatttttcggtcgtctcatcattgtttgtttttcatctgagtcctgtgcacactgtggtccgttgtctgcatccgagacccactcacatccgttgtccaacgtcccacgcatgaccctgcctcaccttggccacatgcacccctcttccgtgtgcccatggtgctcccctcctgatccatcctttcctttcgtccatctccctcttcctatgctgcgagaagcagagctgccacaagcagaggcaaagcacagagcgtgattcacttagctaagctgaacatgatcccttaatttttctccatcagataagcatcgagaagaagtggaacaaatttctggattgattcattgtttatgtgagtagttctcaagtctggtttagttacattacgtaaatgtttctgatccacacccttcttttcgtaggacgatgaaaaagaatggataaagatcccaagaatacatagtttgatctgaatactcataccttgagaatagcacatctacaagtaggatttcctctgtgatcgtaccaaaacatgagttccatttggattttcttttttatcattggatttcttcaatgctatagtgtcattcttctggcgcttaatgctatctattcccaattacaattgtgtacagccctacacccgttgcaatgcacggtcattttgctagtaaatatataacttgagaaagtaatgataaaacatgtgcattggagactgccgatgtcctaaatgacaaccatttgagaacagagggtagtaactttatcatctattctttccatatgttcctttgctaatatattgcatcttatgatgtgaattttcagaagaggaatatttgcctgaagaacctttatcaccaagcaaggctcttcgtgcagcaatgctcaagagtcgttttgctggtacaattgtcaaggcgcagcagaaagcacttctggatcatgtattatttctgaaatgtgtactgaaatttgtagatttcaattaggctattccttcgcataggacaagttctagtctacgtctgtgtagctcttgctgatgtgcttttttaatctcctaggggaagaaaatagaccctgcgaaattgcagttagaaaaggagaggctggaaaaaaggcagcaagaaggtaagaa

SEQ ID NO: 1441 - DNA, 4256 bp, Oryza sativa
  Intron number 1 from transcript LOC_Os06g37330.1 (locus LO C_Os06g37330) derived from phytozome v7.0 (chr-ID Chr6; po s 22052341 to 22056596 reverse strand)
ggcaccgcccaagaaccgccgcaacccgcctccaggtaaccggccggccgggcccgttcgtcgatcgttcgatcgatccattgccgtgttttgccgtccgcttcctggcctgtggatatatatctacctatctagcttcattgaaatgttggagatggcatgcagctgatgaccctaattagcgatgaaaatggagtggatagtttctgctacagaagaaaaatgaatacggatatcgtgcggagcagataattattggatagtttttacatatatttgttttcccggatgcgaacaagaatatggtatcagaatttttgtcggatacatatatcgcatatctgctgaagacataaaacatataccatttctctctaactcatctttaacatacctctttagattttattattaatattatttaaatttttaaatatttttataaaatatactatatttatatattataatatcagttatatatgtatttttaccaactctgttatacatgcatgtagaacttaattagcactgtttagtctatgatcaaccttattatataaaaagagctaattatgtgtgttggtgtttgtttctattaaatgtttaggtggtttttgtgttccgagaaataaattcttggtattcgtgtcggatatatttgatgattatttgcattagagataattcttatttgttttcatatccgacctattcggttttgtatctggaaaaaaaaatacaaagatgaatacggtatgacccttatctgcataaattataaaaatacaaaatcaaaattatcttcataaattatacaaaaaaatagaaaaatgtttgtagcaacaaaatcacaattatatgcatgtaaattcaaatataaattcaatgatattatttttgtcaaataagacataatttataataaagtattattggtcaaaatttaaagaactgaatcttaaattgagtgcacaacttactaagtgggacagagggagtactacactagcttacccccacggtgtaaatattttttcatcttcgtttttattaaactgacaacttaaaataatgcaccacttttgttatagaggctataaacttctatattaattgaagaaaaagaaaaataagttcaaatacagaaataacataaatttgaaattaaaacaagaaattttcaaagaaaagtctatctaaacataacatgagattaattaaaattgagaataaacaaataaaagagttcaaataaaaatataatttgggaataactaaaactcgtaaaaaagaagtactaaaaagaggagtcaacctgtaacacaacacgagattagttatattcaaaataaaaaaaatataataaactatattacaatactaattccaaataaaatttaaaagaatcatgaaaatttgggaaaaaaataaaaataagtaagacaacataccaagaggagtccatagaatatataataattaaatattcaaagtatgatttaaaaatatagaaataacacgtataaaataacatttgtggggaaaaagaaaaaagagagtccattcggaaatacattttatatataactaaaattggatgtaaaagttatggaatattgagagaagtgttggtctaaaacataacacgagattaattatggttcgagatgaaactatatttatctataatattattaagatattcttggaaggagatatcatgtttgcaatggagactagaatttacaacattaattgtagaaaaaaaacaaaatctacactgttagatcatggtggaaccatattatgttgaatccatgaacaaatttgactagctgtctgctttccagtttgaatacaagggtttttttttttaattggacgtagatgtgcgagggtagcatggtcctaaaatatcaggatgtttagatcccacctaaaattttacatcctgtcacatcgaacgtttgaacacctgcacgaagtatatattaaatataggcttaaaaataactaattacacagattgcgactactttacgatacgaatcttttaagcctaattgctccatgatttgacaatgtggtgctataataaacatgttctaataacgaattaattaggcttaataaattcgtctcacggtttactgacgaatactgtaattagtatttttattagtgcccgaacaccccatgcaacaccctatataataactttacaccgatggatctaaacacccctagaatagaaaattccatttctatccacgtaagacaaagacaaaagtatgtctgtgttggtaaaattagagtagaaagaaattttgaatagaaacaacacttgtcgcacaggaaagtgaccaggtctgcatcctgctcaatctggtactatcaaataattaagtatgaataagtgagaagcagacctagtctgcatcttgctcaatcatcctagaatagagactagattgtagggagtatcaaatagtaactgtgattgagcatgatgcagactggtattgatggttgaatataagagaaactttggtagtgtgtgattgtgtaaatagataaaaatgcacattatcaacatgcaaatatgtgaatatttgtttttgagtaatattgttagatattaaaactttaaaaaaaatcaagttgcaaatgtgcggaccaccctactattttatttaaacgaactataaatggaggtgtggttggtggaattagagggccgtagaaggaattagaggttatggtgcgtaaggtgtaatggggccttaaaacttaacatgttatcacgatcaacgtgatatgactcgtagaactgtagaagatggatagcagaatacgaacaaacggccaatcacgacgactcgtagaatatgattacacctagttctaatcgatttagctttagatattaagcctattgtgccttccgtttttagttttgggtcttagttctcgaattaaatttaaaaatatactattaatttggtttttcgtagaaatattcgtgatatatactttttagcgaaaatataccagtgtcgcgtggtaggagcgcaagaccgcacggtatcgtgtgatgaagcatcgagaccgaacagtctcgtataaagaatcagcgagaccaaatgtcatgtccaacggagctacttaattagtcattaattaccctaattaatgattcattaacaataattagtgattaattattctaattagcgattaattaatcactaattaaccttattcaatcggcagaggcagtcgctatcgctcactgactgagcgagactgctcggtctcgcggtttggccgcgcgagaccacgtggtctgacgtcgccaccgcgtacatcctcgattccgtcgttcagtgctatttcgtcgtgcgagaccggtctcgcgctatgatcacgcgataccgtgcagtctcgcgttctcctcgcgcgagaccgttcacgacgtcactcccacgtcactttcgcggaatggttatacgagatcgacggtatatttcttctaataaatttacattctgaatatttttgagaaaccaacgaatgaacagtgtatttttaaatttaattcttctctctgaccatctggtcttcattttagtaatgccgctaattaagcatatacttagcactccatgtagagcttgtttagatccctggcaaattttttcatcctgttacatcgaatgttggaaacatacatggagtattaaatataaacggaaaaaactaattacacagattgcatctaaattgcgagacgaatcttttaggcctaattgctccatgatttgatagtgtgttgctacagtaaatatttgctaataatagattaattaggcttaataaatttgtctagtaggttacggattaattaggcttaattcgtctcgcaatttaaccatttttaaattatttgagcccacggtttttattatttttccgagatataattgctacgtaagcgccacgtcaataccacgtgggacgaagacctagtcaaaccagccatgtagttggcacgtcagttaaaaccgccttctaaatcgtcaagggatcttgtttgtgccggttttgacagttcagggacctgttatatctagttttggggtttaaggacgaaaatcggattcggtgtaaagctaagggacctcaaatgaacttattccttatttcattgtcatgcagctgttcctggtttacccataatcggaaatctgcat

SEQ ID NO: 1442 - DNA, 630 bp, Oryza sativa
  Intron number 1 from transcript LOC_Os10g02220.2 (locus LO C_Os10g02220) derived from phytozome v7.0 (chr-ID Chr10; p os 774464 to 775093 reverse strand)
caagttgcaagcaaatctttcttcttttgtggtattagttctacacctgaacttttttatggatgcaaaaaaagatatcagcatcgaaggaagcagtcttgttctttatgagtagggagctcatttcccccaggttaaattgtgggatggatcaaataattcagggctaatttttgttctgaacttgatttcgtagttttttgtgtattcgcattcaagattgaataggataagaaataggggtatctttgattctaaatatcgtagtcaaagattctagctgctggcaaatatatatggatggaagaaaaactataatatatgatttcttccttccctgcaaagtagttaatttgaccccccaaaaaagttgaacttatctttgttatcattaaatttttaagttccaagctgacagaatatggtgtttgcttgcaagaaattagtcgttcacaatatatgcagtcaatagtgttacatatcttctaatatcgaaattgcgtgatggcgttattctaagacgaaaatcggatatgagaaatctatcagaaaagaagtgtgagtcatgatacaatttgctccatataatcttcttgactttcttacattttcctatattatcttgcccag

SEQ ID NO: 1443 - DNA, 1837 bp, Oryza sativa
  Intron number 6 from transcript LOC_Os05g09660.1 (locus LO C_Os05g09660) derived from phytozome v7.0 (chr-ID Chr5; po s 5457120 to 5458956 reverse strand)
acgagttgccctctttgctgttgtgtgcggtatgttaatctattttccaaatatggtttcagtgttacagatttacgtagttggtaaaatgtaaaatgctgtttgtaggggtaaaaaaaatgtgtactaactacgtacacacatgggcatatttattttaacctgcctaacttccgtttgtaagcggtatttttcgccctttgggtgatgtaggttgctgtgatgccttgtaatttttcaagttgattgctcgattagtctttaatatgttattagtggtaaaaaaacagctggtgtttcttgtcgaccttgctgtccgtttgttctttctgtaagttgactttgttgtcccatgcgttgtattcttccggatgtgtcccgacctcttttggtatttactgttaacagaggttgctggcgatttgattcactgtttaatggcctaggtgtcagcttgcatgcctgctgtttgttttatgcgtgtccatgctcttgcttgttgtctcttcttgctcctccccttatattgttcctctctgcattagtgatagctcctctgttctctctgcgatccgttcgttcaaggtgcttgtctttgttgtttgtcttttctttgttattttctcctcccgttcccgacgcttgctctgttctttcaattatactgtgctaattttctgatgattgtacgcctccttgtttctgtaaacttatgtgtttattgtttttacttgccaaatcgtattaagcactgggtatacttgcttggccgtattggtttatgccgtctgcatcagctgctagagctcgccgtgctgcaatccttcgtggtaggagtttttcctcgcgctcagcatgtgaactgacacgacaaactggtaatttcagtttcattggttaccatattcatttttattctccttttgacccaaatttaaacatgacttcttccgttgcattttttactgtacgattagcgcgctatgcttttcgatactcattagatttaaatttgtgtttaccctctactttttagatagtttgatcatgctacttttttttaagctgcatcgttcaagtctggtccttcgtaccagtctttggtgaatcgaaggaaaaggaaattggcgatcttacgtcggcggttgtttgcttcaccagattggttctttctcattatcttatcttttttatcgtttctttgattatttgctcccatgttgagccttgttttctctgctgctctttgtttattcttagtttcttcctcccgtgctcggtgtgaaaacttttttttttcttcctcgtttacagttcctacttctaatccttctttccctgttggatatgttgttttttccaccgattatatatgccatttgaaaggtttgtttcctctcgtgcttttttcccttatactccatttatcgtatttgtttccgtcttcctccttctacctttttttctgatggctatttatttatttttattcttttttctttagctgcgtattctggtcgatcttactatggtggtcctgactactcttgccgtaaatgctctgttgtgttttggtaccatgagagtacacgaaacacaccctaatattaactctaccggccccacgcagtaccatatgttccaaagcccagaattaaggcacgataataccatactgataaagtaactttccaacacgtatataggctgctgacttatactcttcacagattgaactagaccttagcctccctataaatccttaccaataaccatatacttgctccctttcgtaatgtaagggtgagtttgagcagaaggggattaataagattgg

SEQ ID NO: 1444 - DNA, 718 bp, Oryza sativa
  Intron number 10 from transcript LOC_Os06g03676.1 (locus L OC_Os06g03676) derived from phytozome v7.0 (chr-ID Chr6; p os 1439830 to 1440547 reverse strand)
aggtattactcacatagttacatatgtgcagatctagtctgactagtttataagcaagtgtgttatttttctcaagttgttgctcttagttttatcgtacttgttattgtgtgacttggattgatgtcactgtttcatattttcgtgtatactcattctgacttctctgtcacgatttctctatatactgatacgggcattattgatatatagccaaaatagaactacccacaagaagattcttttgatttgtgcatttagatattggttgcacttcagacaaacaatccaggaaagcttcattagtgccgtcaccctggccattctttttttttaaaaaaaaaagaaaagaagaggaaggacatatgacggtgatgaacttcttggagctctatggccccctttgtttcatcactgggcctggtttgatttgatttcttcatggattcacatatcctttagttccttatggatttgcattaaacacacttgctaatgttctgaagtataaaataatcttactttggggcttctaactgatagatgactttgagactcaatagtcaacgaaaagaagctgcagcgctgcagtcttttgttccgagaaactacaaaatgattaaatgtcatcaaatattcataccgtttatgattactgaaatatagttgctgatgaaatgacatagttttgtttacttgcaggaactactatacctct

SEQ ID NO: 1445 - DNA, 3399 bp, Oryza sativa
  Intron number 2 from transcript LOC_Os03g43020.1 (locus LO C_Os03g43020) derived from phytozome v7.0 (chr-ID Chr3; po s 23997640 to 24001038 reverse strand)
tccacgagctccacgacgaaatcaagctcgccaaggtactcaagtgccgccttctagatccccctctctcaccagttgtctgtgttgtgtgtttgctcatccgtgctccccccatataccaaccattgcttgatttgttattttccagcacaggaattgctttttcattagctagtctggtccaagagccttttgcggctcgccgtagagcctacatgcttatggtttcaggggtttacctgttctttggatacatattactactgctactacttctatgtgattatgattagtagtattatgttctcgccgtttatttcttatatgtttggcaacagtggaaaagaaagtatccgttaggagcttgagatcccagggatttgtgtattcccatgagttgcaaatgcattactttgtagcgtatggtattttatcgcttgacgaggtggagcctttggttaagttgcacgcattcgctgtcatgtgctaaataaagtagattggtttcatttccggctatgcatccgcacgatcctttgagcagttgttctttccatatatgtatctttctaacaagatttcctaattgtgatatgccaatatggaattgtggtgatctgattgctcattgttcttgtctgcattttgtgtttcacaatggactctgttatggatgacatatttcagttacttaacacatgaacatcgatattgaaaacttaagaatcaatactgactcttgtttgggaccgctaacttttggcaaatgttttgcgaggaatttgaacctcataggaaatttgatgtatcagaaaattgtttgagattctggtatataattttttaagaaagtgctattcatatcttctcattttgttgtttgaaccatctttgtcaagcccttttgtttaccatcatctgttattttagcgattacactacataccatctaaacatgtgaatgcacagatcaaattttttgatatgacagatataccacatcatcaatatttcttactggcctcagttgctgcaatatattctgcccttaccatacaactgaaccattaatgtttccatcaaacatgaagcatgcaagtgcattttgttcaaattacagtgttccattttcaccctgtgaaatatgatgatgtgctgagttgttgatttggaggattgaccaaaaaagctccatgtttgatgttttatgcaaaaattgtctatgccacactagttttgtggtttttgcaggacactaattttgtgtcttggctagaacacgtttcaaaaatgaggctattttctgtaggacactgaggtcattaaaatggtattgtcttgattgggagagagagtgaatgcacaatgtcactttggttcagacaattaaaagggagaatataattcaacatgttaaaatgggtacaaattttaggtataccaaaacttccaaacaaaatatttaattgaacttgagtcccaaattgaaatgtcaaccgaaactcttgaaatttactgaaattagagaaatttctgaataattatagttgtactatcaattcgaaaataaagctaaaaatatgcacatatatattaccttttttttagggaaatacatgtacatcacttgtttaatttagatgctattagtgctgagtttacaaggttcaagggcatcccaagtcattttcaaaatttttctctccaatctaactagaaatattatttaactgattcgttccttatggaaaataaccacgttttttttgcgttgtgttttagtaaagacatgaaactagagtgtcttgtaggcttgtagccaatttttcaatgttgcagttgcattcttcttggagggaatatttattcgcgttcgtattttatagcatgactcatcatatcaggatgaacaattataaatcatctttattattctgaaaaaaaatgtattgtgcctttttttttcttggcaactttatttggtcttggcttttatatgctctgtacatatttacaattatttttcctaggagaatatcctatacatcttttcttactgaaatcactattagagtggtaggaacctcatataaacacttattttcatgtagagagtgttccattacctgatatgcactagatgataggcttacttttgatggctaattttgtgaagagtatgttggatatagatagttgagaagggtgagtacatgtggtagcttactctttgtacaattcaccattcaagggtgaacctaccatttttcacataatcagaaaagagtagtgctaagaatgtgtttgtacaagagtctctaataaagatttcactaagtatgtggatttagaatattctcctagggaacaatatattgcccctaaatgtggttggcacgttcgtcccctttcaagttgaaaatatggttctgcaattgcaatatgctaatgcactgtgcgacatatcagaggcagctgacatgtgcttgatgtcaaaatttcctagctaagcatccctggtattttccaacgttgcctttttagcttagagcaaagtggcagtgggtggaattcagcagactagaaaggtagacccagatttccatccattggctaaaaccagttttccgtagatttttgctacatgagtacatgatgtaggtagaaatattctatgttttacataagatgatcgagtcagttccatctacacattttacgaaaaaattatgttgatatgcggtggcgagaaaacgggtaggtaacctgtgctcgtgactgtcagagtcaagttgattaaatttaagcggaaattataaaacaaattatgtgcccaatacctccgtaattcatagtactaagaattccaacataggaaaatgcaataaggctacgtcattagaccatcacaataatattaaataaataaatgaatatgctttcttgggagagtatttattacagattgctagcacaacatagtaatttccaaagaacctttgcacgtatcataaattgaagtttcattttatttgtcttctcctgcatatatttttacttggccgacatagaattttgcttgtagcataaccgaagcagaacaactgtttttaatgcttccttatactgaaatgctagtttggcacctttctaatcataacaaaatttcgatgttcctttgctctttttcacgtgtaagcagagtaagattgctctttttcacgtgtaagcagagattgccaagttagagtatcttattttaccagatgggtgcaaaatttggatgcaaatatttatgcacattacagtcagtacctttccgttataagctaaacttatcttagaacacgacgacactaaatgccatatgccttgtttaccctatgttccaggaagcaa

SEQ ID NO: 1446 - DNA, 503 bp, Oryza sativa
  Intron number 4 from transcript LOC_Os12g38970.1 (locus LO C_Os12g38970) derived from phytozome v7.0 (chr-ID Chr12; p os 23929126 to 23929628)
ttccacttaagcagccaccagctcaacccgagagagtgagttgactacccctttttaaccatctatctttcagtctttgaccatacagcactgttatcttttctgccaagatgattatatattggcagacatcagttatctttgatggatatttattgcgttgctgcatatgcaccagattttttattattaattctttgtatctgttactgtttaattgctgatgttctgtgcttgtgcgtaaatgttgttgtgcagaactgcacaattgactggtacagcacaatgtaagaaataaagaacctgtgttgctattaactcttatgtgacattggcactttggtagttgaaatttctttttatgccatggtattattgaagagaattttgctgtcttgttctgtaggctttactaggaatgttatgatcgatgcttaaatgtttttgtgcttttgcagctattcatatggttatttgttactgactaatttcttaacttgtag

SEQ ID NO: 1447 - DNA, 2300 bp, Oryza sativa
  Intron number 1 from transcript LOC_Os02g04230.1 (locus LO C_Os02g04230) derived from phytozome v7.0 (chr-ID Chr2; po s 1854606 to 1856905 reverse strand)
tggggctcatttgttattgagcaaggtatatactagttacttctcttgtgttattgccttcacgctatttcgactagttaatttgttctttttaagcaactctgatctccatttccttacatatatgtaaattggttaccttataaatcactgcatcaaatgtgttttgatttttatgctcacaaccttctaagctgtggagcttaacatgctcaaatcatctcccttcctgtggatgaggaatgcatcctgtttcaattgttcatatgccacatcgaagctttgtggaagggggtggtgactctctgctgcaatctgattggatgactattgcttagttggtaatcagggtgtagtgttctctgctttggcagcaacaagaaacagcatttgctgttgtgtctccgtgtagggggttaggacctgggaacttaggagcttcatgaaagatgagatatttgttcatgataggtgagatatggttgcagagttggatgtaaataaggaaaggacgatagttaggaataatgcacctgccagtttctttgcatcaagaatggatgtttgccccttagttcatagtagatatctaagataaatgaaaaggcaacacatgacttttcagggggatgatgcaatagtaggtagtggcgtagtgcttgtccacttgagtgcaagtatctgtctattataactttgaattcgccaaaataaccacgagaattttggaccatgaatgaaaattgtgaagaaaagcataatttttgggcggtacagtgggctagtgataaattgcatactcatgctaactgtttggattagcaaagttcaaaattctaatattagtatcgaggatattgcataaaatccttatatagatgtattagaaaacccagattgagcaattaatttcaatttagccttgatgttctttaaaggttttgatgcactcttaataatgatctgccaattgtttgattttcttttttgcacgataattacatggtgataactatgatattgattttatgttcatgtggaacagagttgattgttataacattacaaattaaaattacttaatcttccacattttgttgtagctagaaatagtgcatcctgaccactgtatggatgttgaatcaatgcatgcagtctctttgtagacacatcttcaaagaaatccagtcttgattggtacaaactgaaacattttgcaaaactatccaatgtaaaatgtcgaaatattttagaattttattcaaattcttgtttaggtctaatgactctaacatggaggctagagatgatatgaaccaatggaattgtgcaatggttaggcacttagggttctttggatcaacgtgtgttcgccaaatcttttttatgctacatgtcttcttctgatgaaagatacatccctcttacgttacatttactctttttcatttatctaagctgcaagtttaatttaattagttctccatcaatatggtgcaaggagctagtagcgtagaagggtgcacaacatactggtgagggaaaaattgatgtgggcccacattatttttggacaaatccatcccttttgcctatccctcccctttccccactctccgaactcctaacctagtttcttcattcttcgataatcttcgaatcccccctctcctacgaccgcagctacctgttatacctagaaatccgacccctgttttttcttcccaaatcagattttgcttcctgcggtgccggacagcatttttggccttggaacactgacgacccacctaattcgaatcaccttattacatcttcgatcgttggtctgaactcgttctcgttctctttccacctgattctagttgccttattttgtaatagcttgtgaacacaattcatctatatgtagatctttttttgctttgacttaactgcattgctctgatttaactatgtttgttactgatcttgaccattgacatcgatcaataacatttttcctttcctgtttttatgttttgattatgcatgtcatttgcttgaagctacttttgccatattgatgtgtgccattacagtttccaaattatcagttgttctggttcagtttattttatgtcaacttcgattaatttgcaatgctgctttgctttctttttggtccttttgattgtcttattttactggattgttgaggactcctaaaatgttccctcacatgctctatacacattttttctattctgtgatggtctatatgattttgggaaattgtgatgttttagagaacatcggac

SEQ ID NO: 1448 - DNA, 3674 bp, Oryza sativa
  Intron number 1 from transcript LOC_Os01g36984.1 (locus LO C_Os01g36984) derived from phytozome v7.0 (chr-ID Chr1; po s 20634652 to 20638325 reverse strand)
gactacagcggtgacttcaggagcggcggcgatgattttttttgttgggaatggagctagctagggtttccagattatttatgtttgaatttttatttttttcgctatttttattagaagggtggtataacatgcgcccacgtgcaaaattcctattttcgcatgcggttgttcttcccatttgaaacaaaataccgattttcacatacatatgtggttgctctggtagtgacacatgcatgcatgcatgttcaattatgtgggcgccaacttatccgaaagcccgcagtgagccaatttcattcacaaacgtagtggcgaaccagaaaaaaaattactcgggatcctataagtacgttatctaatttttgactgatataaattagttagaattagataatctacttagggtcctaaaagaccctgcgaagaacaacacagtaacgccactgcacaaacgtgtagccaaaacgtacaaactgtagtaattaacttctttacagagaacatgtataggtgcaaaaatgaatgaagtccatgcatggactagctagtcagtcccgacctaaacttcattcgtctagttagcatcacaaccaccattgcaagccctggaatctttatcggtgcagtcgatttcgacggatttcgtgggaatgatctatttgcaccaatttcacaagtaattgaccatgcatatcaatcccgtcagctaagattgattagcagtgttgttaggccaatagatagatattgtgctagctagtggagtacaaaccactaaggagttcccaacacgcactagctacttactctatgaattaaaattgtttgtaccggcaacccttctccattaattagatagggcatcacttctacaagttgtaattatatattttgaaaacacaagtactacgatcacgactttgaaatacacaaacacaaaaaaaaattatatcaaatacatatatttgataggtaccgcaagaggtatctcgatctttatgacatcaggttcaccgagaaaggataacttgctgataacaatagataactagcttaatatctaatcaaggttggatgtgatcaaatgatggggagaggggcaccgaaaccttaaggagtttatcttgatccccgaacgaccgcagaaacacaatccgagactaatacacacaaaaggcctggaaaacaagagcacgaattaggggatccctgatggatcttttcacaagtccacaaagaaaatggaagaacaaagggtgtgcaagcattcagcagctcgcctacaaagtcatacatatttttaactcatcatatgattcaaatgctttgcacagtagcatgcatatgatatttatattatgaaaaaccctactatatgggtatgaactgaagtgaccacgttgagaggtaaaaggccaactaatgaagcattcaagaagtgtcctttcagttctcgggcatcttctcgccttttgcgcaatcttcagtaattgagtccttactggtaagtccaagtgatgctccgtttattgcgttggaaaataaaacttgatatgtataatatgcaccccagaacgtggtagattggtacatacttgcgcttgaatttgaggctcttgaagtgtaacctcaagtcttgcacgtgtaactcttctcatcttgtacaacagttttggtgctcttcatgtaaccctccgtatcatccatgtaacccagtggagtagcctcatgtgtaaacctgagtaggagtagagtacacgacttgggcagtatataattttcatcaatatcgaaattaataagatttagagaggaaattcacttcttgttggagtttcttatgatgactgcgcataactggtcagtaccaatttggttatatgtgattgatcctacacttttcttttcatatgtaaaccaagttggacttggtataacctgtggcgtaactggtgcatccggtgtaaccaagggccgcggattacatatggctgggatgtcctcatcattatccttgcattgcttgaagagtactccctctatcctatattataaggcgcggtcaaagttggcacggtctccaaaactaatctttagcttatatttttttcatatactataaggtttgtagcaacaaaattataatcatatgaaagtaaatttaaatcttagtctaataatataacttttaacaaataaaattcatttcatattatactaagtgttagtcaaatattttaaatgttaaatcttgaaatacgtacgcgtcttatattatgggatggagggagtactactgaaatatttaattgaggtctattgggtaaagaaaagtttttccaccaataattcgaagcgtgtaacattattcttgattgtatcactatagtacttaattaagcactgaaagctttgactttgccggatgaacctattgattatgtctcagaatcattaacaaacacgggtttcatattctcaaatctagctagtgctctgatgtgttaggtgaagttaaaattcaggataactaggtgataccccgtgctttattgcatagcgtacggatgaatatacattaaacattatagaaataataaatattgaaatattgtaaaaataatatgagaaaaatgattaacatacttgtatgttttctctataatattatattctagatgattatttatctttgcatgagatttaaaatgcttagaataataattgttagtgggtgatgatgcgatatactcgcatgttgagttttagcttataataattgctaatgagcatcagctatatagaatatatagctctgatcaagtttcttttttttctcaatctcaggttttaatttcctttagaggcgtgtcctcggcggtgactatccctccacgagcggcctacaggcgacctcatccatgtcgtcttcacctccccagttccaatttccaaattgtaaattaattaatgaaaaggcggaaatgcatatggaagtatggattcagtctagtgtggcctatcatgtttagtaataaaaatccagtcacagcagtaaatggaaggaaacatggttttttatcgtcacattaggtttgatccagaattttgtgcaaataaagtcctgaccatgagcaactgatttagttttcatgttttgagcaagtaagagttatacttcgatttcttcagatatttcaatctattgtgtaaaaaaattgaagtttcctcttgctaaaaaataaaactatgatacgatggccatatgttccttttattctaatattgaatgtaatgagatcaactggtgtgtttaattttcattttatccatgagatactcagctcttaatgctgtaatattctggaaatatatttagtgtaacgtgattatgcatctattgtactaatgcacttgataattttaagggttaattggatccatgccatcataaatttgctagttttaaaaaataccattactactcatctatttataactttaccactacaactttttttaaaattggatacatagcatcctttacacttgacacatgttttgaatcatttttttgtattctgtatttctgtatggactaaaatacccataccaatcctctttcaaccatagccccaaatccccacaaatcctccaatcccagcaac

SEQ ID NO: 1449 - DNA, 2092 bp, Oryza sativa
  Intron number 2 from transcript LOC_Os10g37850.2 (locus LO C_Os10g37850) derived from phytozome v7.0 (chr-ID Chr10; p os 20192067 to 20194158)
cggaggcggaggagaaggggaggagcggatcggaggtaactatagccagaccttgccttttcttcccccctcgcgtaattcttttttttgttactactgtctttacgcctcgctttctttctcgctcgtgctcggttggtacgcttccaagctaagcatccgctttctctcgcctccacctctccggccgccgcctccctttctccgccgtgttcactttacattagatcctctttaactttcttattttttttaaaaaaaaatcaactctcagactgatcgagagatcgatttgagtgagctctagttttgaaaaccacatataagagataggtttccttctctagagtgttcgccggcgatgccaacgccgccggcaacgacacggcacggcggcggttaattccgtagctttggaggggtagaaaagtcacttcacctcacctcaccccaacccacccacccgctccccccaaacagcgccgttactgcgtgcggtccagttgtctagcgaccaccacccaatgacacctgggccccgcacgacagatccccgactttggatgccaaaaacggcggggccccgcaccctcgccacctgtgcgtaatcgagtactagtccgttccgatccgtgggcccgatggtgtgtggcgcttcgggctcggtcggtttgcttgattcggctcatgatgcggtccggccgtgtgaggctgacatggtgggccccacaaacccggtgcgcgcgccatgccaagttgccacgagcccccacgagcttttaatccgtgcggaaaaaagtggttggttgacgcgaaaaggcgccgtgtaatcgccaggtcgcatgcgcggtggccgccactgacgtgtgggccctgcccgtcctttttttcattcttaacctttttttcatttactttcgtagctaaaccatggttaagttgttaattatactaccaataatctcgagtcagtcaaggtggagtctttttggttctttttattttccttcgatgtgcatgcgtggtaggttagggttcatgataaaaatgtgtaaaagcatcctggtggagttatatatggctgcagcttttgacaagaactcggttcgtttacgatacgttcccccacgcaattatttcgccatgattcttctgtgttaagaaagggcgagatctttgggttagaatacaagaaagtcgtgtgaaaattgtgggcgattaaatcttcccctttcgcaaagcttgtcttaagcactcatctttcgctttaaatcgcaatcttttctttcagatcaaagcaaatactaggagaactagctaggtagcccgcgcaattgctagcacccatataaaattatatattttttaatatgattttacttaaaatttatttaatagttatctcgttgtcttgagatttgaaagatcaaatcttatcatcctcgtgtttctaattttataatttttctaatagtataagagttttaatttcagtttttctttaattgtgagaactgcgtcgcatgggccagtctgtttagttgagatgtaacatgcagaatcgaatgctgtagctcacaacagtatacattagttttagtattcaatccacttgttgatttcatccacttttcctttcggttgttctcattcactctccaccaaccttgccaccattctgtccagtcaaaacttgaatttgttaaaccaagcattgataatttgtcagaaaattccgggaattttgaataggactttttgtacccagcacgtcgtttttattctttgtcacgagcatttacttctccggaattcacatttcgatccagagaagaacatcgggctggggcactgtagcagctcatctcagtggggcgaatggttagcggtagctttccaagatcagatttttgattcgttttttaagtaggattccttgcccatgtctgcttctagcttcttctcggctgattgctcttttttcccagatttgtctgcttcgttcttggctgaactgagagtgagcactaatctactccatactccgaacactgcagatcacgaggtgcggtgttgtagcttcgaccgagga

SEQ ID NO: 1450 - DNA, 3997 bp, Oryza sativa
  Intron number 1 from transcript LOC_Os01g55770.1 (locus LO C_Os01g55770) derived from phytozome v7.0 (chr-ID Chr1; po s 32122462 to 32126458 reverse strand)
gtcgaggtgaggaaatcctttgctactttacctttctagatctaggattggacggacctagggttccgtatctcctcgttgtgttgccaaatttgccatacgaaaacagttgtgcgaaacgttaccatacaggcatacggtttcaatctccccgttgaatccatttgttttcctttatgattgaggatatgatttagatgcatgtagactggaacgaaaatgctgtgaaatgaactattgctagattgcaaaacagttactcaaatgtagcggctcttgaatttgcttgcaaaacagtgagaatcgtaataaaatcagaatgaatgattctgccgctgattttgaattctaacattttgattttattaggattttaattttatgggctttcattgtcaatttattatcttgttctcttttcatgattgctaagatgacaagtaaaaaatctacctaaaattattcttaaaattcaaaatcactttgcattagtccgtagcagaaacaagaagagccaccaaatgctgaccttgttactttgcctattgtttttatctttggactggatttggtggaatcttcttttgagtttttgatgcgtatagcgccttcaaatgttgttactacctctggatggaataatttgtcatttcagacagtgaaaatgacttgcacttagtagtatttggctgtctgaaatcctgacaggagggagtatgactaactagtcaattctcaatgacatctcaattaaaatgagacttatctgtcgggttgttctattttgtcggatattagtacagaataccagttctttgctagaaatacaactccctgcattctgaatatagtagcaactttttctttcattttgtgatctcatttggttagcttctttagagattatattgatacaaatttgatctagagataaaaattaaaattggtttcatattcatcagcttattttggaagtattttgttttcctcttaactgatagcaacaacatcagatgtctgcttgcaatagctagtgtttgcaaagtgcaacgatctgtgttcttaggccctgtttgtttcagcttaagattattgtaatctagattattgagccagattactataagctggattataataagccgacatagaataagctgttagctgtttgtttctctagattatttgctgtttgttagctgttagcaacccaataatctaaaaaaagcacctttagagtggattactagattatagtaatctggcttatagattgtaataatctattaaaataagctatctgtttgtttcagcttactactaataatccagattataataatcctaagctaaatcaaacagtgccttagtgtagctgccgcttagctaatatgaatcaggcacagtgcactcaacttaatttggccatttgacctgactcaagggttcactcacattctgctggacgcaacagagccacagaggtgtgtgccgcagcaggaaaaaaaaattctataaagatgtacacctgtgagtccataccacatacaatgtgttctcatagaagtttctttccctatcaaaagctttgcggtgctgctgctctattttcatggttaggccttgtaatgtgaggtctggtttaggttcttccctctagttgcagatgcaagcatatattttattctaaatttcaattgatctttttttacaataaaacaatagttagtcaccaaatattccgggtaagaaatggatcacttcccgctattgagttctatgacttctatcatctatgcacgatcaacattataaggaaatatatgccattgctagctaaaattgaaaagaatttccaatagctaaaattgaaaagaatttccaacttattgggatttatggacgattaaaccgattaaattaatattcaattatgagccattgctagctaaactttgtaagtattataattttgaggctaacacggtgaagataggtacctgaaatgactctggtttagaatgattggaccagggctattgtgttgcctgagctggttaggacttaggattggttatggaatttgtacttattgcggtgacatgttgtgatgtttgcgagcagggggccctagactagaagggcataggcgtgctcgacgggagggcgaggctgctcacctcgccgcctggagccgtgatggtggcgtcaagctagggttagtgatggtggtgatgggtaccgtcgagcaggtggtagaacgccagccacactttctcttccttcagcgtacacggccccctgtaaaattgctcgcagcggttgagaaaatgaatcgggtcacccttacgatcgaactttggaaagtcaagcttgtggtagcatggagggcggtcgccgtggcatccctcacctccgtgccccagggtgaagctgtcgctatctgcgtcacagccaccgtggtgtggagcgttgtcgttgccagcccgttccaggcgctggattgcgacgtggtgcgcttgttgttggttgttgaggtctgagatctggccgtggatggcattgaggcgttcgatcaccgcagcaagtcctgtcttccagtcgtcggccagcgacgttggtgacggtcgacatggcgcagcatcagcgagcatgaccgtggtctctagataccaagatgttgcgagcaggaggaggccctagactacgaaaggcgtaggcatgctcagggggaggtcaaggctgctcacctcaccgccctggagccgtgatggtggtgtcgagctagggttagagatatttcttggcttgctttattgattgaatgaactgcccatatataggcttacaaattgaactaatctgctgattgaagggaaatactaactactaacaactcatatctttaactaactaaaaacctaatttgattgcaagccgtaacaaccttcctacacgcattctgcttcttatccttccaccttcactgcttctgccacaggctgcctccgttgcatatacatacgttccaccataacatgtgacctggggtagattttttaaaatgcattaacaaaaatgtttatccactattttcttgtaaaatcacgtttctaagagggaaaaagttttcttgtatagagaaaactcagttgcatttgggtcactattatccagaccttcccttacagctgcttggctattgtagttttgagtgttgatactatgttgtacaacatatcatgcattaaagaataaagagaatgctgccttatattttctggctaggaagttttagataaccttgccatacaactaagaacccatgttgcctctttgtgcatggaagttcgacattttaaactgcccctaactgatttattttgtatgactaattcagtatcccatgtggactacaagttttctgttgcatttctgacttgtccagaagtactgacgctctccggtgctttgcagtatctgtttcacactgtatttataatctgacagctttcatgaaaataatcctcccagtgcctgtcctttttgtttgtccaacaagtgcattgcaaccccaattagtagcatctatttctgactctgtcatgcattttgtgtggcaaattgtgtccaagttactcccctccagtcaatattagttgacgttgggagaactgagttacgtcaaatattttttactggaaggagtatatgctagtactccatttataggcacaggtgcactactacgtttagaattgcatatactatttagtcatctctagatttctggtaccttcagttcaaaatgagatgcagcacttgaagcgactaggtggggtttgtgacttttaactacctaattccagacgtgaatctgaattcttgcttaattatttctgtcttcatgaattatcattgtaaaaaaggataatgattcgaccattcatcttttttttcaggtatctacctttcttgtgcttgcacttcgtcagaa

SEQ ID NO: 1451 - DNA, 2271 bp, Oryza sativa
  Intron number 7 from transcript LOC_Os05g22370.3 (locus LO C_Os05g22370) derived from phytozome v7.0 (chr-ID Chr5; po s 12618376 to 12620646 reverse strand)
caaaacgtgcctataccagtgtaggttatatcaaggtatttgattgcctacatttgctttaccctgtgattcttaaacaaactctatgctaacttggaactcgatggtcatgccatgtaaatccacacatgcttgtagagcaacaatataaatgtttggttagtttgtacctcctagtgatgcacttgagtgcttgaggtcaaggaacataaaaaacatggctttgttttttttgttgtggattgacactctgtaacacaaatatttagtcaaatgaattttatatgattgattaataaaaccgtgtaagttgacaatgttatcttgaggcatgatcactggcaatcagttgaggccactggaagcctccaacatcattgaattccggataaatatgagttagctagaccattgaatttagtagagaatgtgtgtaatttcaaatggcttaaaagtagtagctatcaagtcacgtttatacgcatattcaattattcttttgacttctactggtctccgctcttttgttggtgagctgcgcacaacatcgttgtaggcttgtagccaccttcttggaggtagatcatactcttcaccaatgaatttggaatttcttgacacctttcttgttaagatagtaaacataacataagcaaattgagtttggaatttgggtttatgcaaatggtatgttcaggagatgtggtccataaaagatagtcttatctggtatgtacagtacctggttgtggtagaggggagggaagagcacacaatgggcttgtcatcaatggatggttgtttattatttcttttattatcagtctgccaatgactgcgttttctgtgctatctcacttaagaaaccatgaaactaataaacactgaacaatatgctaatacaactatgtaatctctgaggaatccaacttatctgtctcttgccagctcctgctacatgcttctgaaaatgttactgaaatcacaactgaatgttacatttcattgtaaatctagtgttgttgtcacagctctggtactaagattttggtcaaatacctcgcacgcacactcttctgcagagccatatttcatttggtagatactgagaatagtaaatttggactgtcaatatataacagttacctatcagtagcggagttagatggaaccattatgtttccactctaaacttcagaatggttttccttaattatcttttagaccatgttgatgttattttcaacgactgtttaactgttcacctatttgttatgataattagtttctgaccattttatcatcatttatattcacaaatatctaaaaaatgttcaatctccattatatatgttctttgtacttctcttttggctaacatgcttgtattatgaacagaggccgcaaatggaatcctcttaggcagagattagatagctatgactatacagttgaacaacatgtagttggttcactgttgtttacaccagtcctggttctcctacccacaacctctatattctacatattcttttctatgttgagtactgcagttatctgtctctgcatacttctggaaatcacagtatctataattcactctactccttatgctgagttaattatgtgggtggcaaggaggcaaagatttcctactggattattcttccatcctgtgatgtggtcatctgtatctgctgttgatggtgatggcctcttatcaaccaaaggttataggaaaacggagcatcttgtccttggcaagtcagaacctttagtgtcagaactttgctgtaactatgccaccttcggtaaacacttctgcctgccctttctgttgatgcagtacatggttagaagtagcacatgaattaagtatttccaggtctgctgatctgtgatttgatttgaacacttagatttgttcatttattccatgagaaaaaaggaaaagcatgcttttggaaacatactaattatcttttgaaagaaccaacacattttttccccttttactatgctcccttttattgtcgtgatattcgaactaacataaagtgaactaaatgtagggcacataatcagaccgcattaccggaaaattttcaacggggttgctttatcattctgcaaacagttggcgtatggaatccttagcggtgaaaggtttgtacattttccatcatttttgtggtatactattgataatatttattttaacttctcttgatttcagggtaccaacgacgctgcacctgcagttttcactgt

SEQ ID NO: 1452 - DNA, 1416 bp, Oryza sativa
  Intron number 1 from transcript LOC_Os08g36850.1 (locus LO C_Os08g36850) derived from phytozome v7.0 (chr-ID Chr8; po s 23280510 to 23281925)
ggagctggctggtgagaggaggtggtctgtaggtggctggtgacaatggtggtgtgggccaaatctatgacatggtaggacaaatgttcttggcctctatggcgacgaaagtgttgatggcggtaggccaaatccattgtagggaagggtaggtgtcctcggcccctaaggtagtggcatgggtgacattggtttatgaggtcaatgacggcggatagatctacactaagggatgacattatgcttggctcttgctacggtttgtcctatagccacactagcagtagcatgcagagttgtgtagaggctaaccgatagaggggtgttggtgtagaggtgtctatacgttgttagcaatattgaatgttgggggcaatggagctgtagttgtaggggccgaacaagcagcaagtaaaaggctagcctgatggcttgctggattgacaacgacaacattttcaagtgttgtgatccctccaaaaggtcttatcgaggtgtttcgttctcccatgtcgggatcctctaagtaaaaacaacatctagattcctaggacaggtggtggcgatgtttatgtcattacttccttcttagaagcattgcctatgagatcatgtttatgtttttttttaccccttcaaacaattggaatgacactcttaaatgacggcaggtctattcagggatgagtagatgttattctcacttgtcccttatgcaacctttctcgctggtggtgtctatgaggctgtgatgttttcggctgtttagaggctttcatgggcagttcaatagtggctacgttataggtctgacggtgactggtctaacgtagcattgtacggtggtatggttgtttttctttttcggattacaacatttcagaatatagttttgtaaaaaaaaagtttactagaagttttataatttttcctgctctattattaatacaaaacatcgtatagactatctaggttgttcattttaaaataacttgtggtataattatacgcatgaaattcataccggagtgatctattctttaagttggaacctttgttattgatttgagaattgagatccgtcattgtaatgcacggatgacacaaaactggtggtgtttaagagaggggccaaaagagaagccgatgatcccctcatggacactgcacgacatgcgcatgccgtcgcgtgagctcttgtccggcgtgtgcttccgtgcttgccgtgtcagagcaagtactgcccctcgttagctggactccaacacacaccttgtccgaagtccgaaccctacaaacactggatgccaactcactttcgacagcagtgaccgaactagaacagcggttggtatgatctgacaaatgcttttcccatcagaaacaccagttcagtcctctaccggagctagcacc

SEQ ID NO: 1453 - DNA, 2376 bp, Oryza sativa
  Intron number 5 from transcript LOC_Os06g11050.1 (locus LO C_Os06g11050) derived from phytozome v7.0 (chr-ID Chr6; po s 5791026 to 5793401 reverse strand)
caaactgggctgccttgggccaacgtgttacgagggtaaggccggaagaacttaggcggtgttcttttgtatgggttgggaacccctcccctccgcataaaaaacggagtgatagattaacacatgattaattaaatacccgcccgaccatctccttttcctctccagaggaccaaagcagaaaaaatataattcatactattatctccatcctttaatatacagcgaaagtggattctaatattttaagaggtgtcccatcttgtatctttttctttcaaattcgatacaaatagttgtgagaaattctgaaaaaattaacaatgtaaaatatagtgatatctatcggtccaccaaaaatcaagtttaaattcgatctacccatcaaagaaaaaaaagataaatttagatgtgaacaatatgctactattcatatgctgatttttttatatctcgacatgtgagttgagtttggatctaagattttgtggagttgtatagatatgttgtatgagcgttgctattttttttcttaaccgtttaaatggtttttaagcaaatgataaacattttctcaagagatcaaaatagtttcccatatataaccaaagtcatacattaattaaagataaagtgaatatgtatgctactacctccatcccaagaagatttcacttgttgccatcatttttatttttacaaaaagtctttttgattaggtagtagtactatttaaccaggacaacaagctagattccggccgtccctagaagagtactgattcacataagcaacttgaatgatgatgctactactgattcacatcgacaacttgaattaaccaggatgacaaaagtgtattgttcctggattttctaaacacggcgaagttgccacatttgccacgaattttagaaagtcagcaaaggaagcaacatttagggcccttttattcgcaggatagaaaaaacacaggaattgaagtagtaggtttctcaaatcctacaggaatcagcaaacacaggaaaaataataggagtcatttaatagtgctataggaaaaacaaaggaaaattcacaaagaggtgacacctcttgctatttttcctatgaaatgtgaagcataggaatacaatcctatgaaaagtttcctttctttcctttgaatcaaagggacatgtaagaaaaaattcataggatttgaatcttataaaaatcatttgccaatcctataaatcaaagggcccttacatcagaaaagcagtcatcagataggggcacgtaacgttaaatgtgtggagacatttctttctttcttttgtgtagatatgaatgtcttatctgatgatagtcaaataaattagtttccgttttgaaaaggaccggaattgtcacagtcctggactgctctctatcacatccttgattgttcttttatgagtttttttttttttggaaaaagtacgaattacccccctgaactatcgcggtcgatcgaattacccccttaaacccgaaaaccagacatcgtttaccctgaatttttaataccggacaaattacccccctcaacccaaaccaaagcggtttcgtcctacgtggcgtacgcgtggcagtccagttagcattttatttataaaaaatataggacccacctgtcatactccttttccactcttcctctctctcttctctctctaccactctctctctcattgtgaacgcggaggcgtcgtgcgctgttcttcggcgactcgctggcgagcagccacgtgacgtccgtcacgtccctcgtgtgcgtgctgtcgcaggtggaggcgccggcgaggtcgggcgacgcggcggcggggttcgagcactggcgccggcgcacggcttcgccgttgcgtacttctggttctggacgtcgttccccctcctactcgccgcaccgcgggacgcgcggaggcggcggacgagggggccaccgcccgcgcgtcgccgttccccctcctactcgctgcctctgccgcagcgaactcctcggcctgcgcccggtagaacttcgcctccgtcgccgccatctctggcgccgccccgtcctcgctctcgttgaccggccgcgtcgcggtgcactccccgccgtcgaaccacccgccgttctcgtagtgcgtcggcgccaccgtgcgtaggatcgccgtgccgttgaacccgtccagcctcaccagcgccccgagcacggaacgccgcccgctacgcgtgctccggctgcttgagaatggttgtgccgttgttgtcgccgcagtcgtggcagccgacgacgcggccgtgctggtagtacacggccgggcgcgcgaaccagtgcgacgcggagagtagtcgtggccccatcaagcg

SEQ ID NO: 1454 - DNA, 5325 bp, Oryza sativa
  Intron number 1 from transcript LOC_Os04g08800.1 (locus LO C_Os04g08800) derived from phytozome v7.0 (chr-ID Chr4; po s 4812450 to 4817774 reverse strand)
taacccttccctctgctactcgtgccatagctcaggtcatatttcttcccaatgccccttgatgatgagaaagggtgttaaactttgtggttttggcattccgggacaggggttctatagtttgaatgttgagttgtctgatatgagattgctaaagcccctgtgagaggtattttgactgtgcttttgggatctggatctgttgcaaaagtcattgctgaattgaaacacctgtttgtgggtcttaattgggattggcgtgtgaaacaacttaatgagaaagagtttttaatcaacttcccatctgatgaagtgagaagtaaaatttcaacatgtaagagttttgatttcgaaacatctgtgatcaaagcaagtgtagttgagactggtatgactgaggaggctgtagatgagctggtagcagtttgggtcaaggtgtttggaataccaaaaagtttgctaggactgaagaatctgtgaaagctattgtggagctagttggggagtttgaagctattgatggggctagcttaagaagggatggtcctataagagagttgcttgcagggatcctagagaacttcacttctccatccacctgtatatcagcaaagttggttatatggtgagatgggaacctgaaggatatcttccttatgaaaacagacagaatcctccagatgaggggatgacagagatgataaagatgatgaggggttaggagaggacatgaaccttgatgaggaatttaaacaaaataccccaagaggtagacaagctgcagatggacgagcccaacaggggagtaggttaggtgctcattctgctccacctgcttttaaggggaagtcacaagtaagtcagggaggaaaaactatgaagaaactagcttccaaaaaagactccttgctgactgtgatggaaggtacagagatatctattatcacttcagagaggaaggctccagaggtatgtgccaatatacctatggtgaaggaatgtaccaccatggtcctttggcaggaagagaacttgcaggaatcccaagaaatccaagatccagtggtgcaatctcaggaggatgttggggggtttgctgctgatatccttgtcttagagagctttcttttggatgatgataatgagaggtgccagataccaacagactctgacattgagagaatcagagaggaagaagaaaaagaagaagaggatagttttcaggaggtttcacacaagaagaagcacagggagaagagatctgaaccggcagtgacctccaggatgagtcttaggcagagagagatggctgatgtccctataacaaagagagctgaatttctgacttcaaaaaagaatttggagcttccagatacttcttctaacccttttgctatattttaaatcttagataattctgagttaaataacattgccatagtttctaatatagtgcttggtagctctcctgaagagatagataacaccatagaaactttgaaagctaaagaggtggtgcaagctaggttagcagagttgaattggaaaaaggaattagggaagaaaaatccacaagaagaggagattagtggagaggttttacttgataaaagtgataatgaacagctgttaaagagagttgacttgacagaataagaggttgtcagatgataagagttatggtagaactttgagagaggaagataatcctgagcctagtaagagaggtggacttagaaatcacaggaaaaaatgaaagtgcttttttggaacattagggggatgggtagtcatgctagaaagagacagttaaaagagttgcttaataataaagaggttgacattgtgtgtcttcaggaaacaaagaaggagttgttcactgagagagaattgaactctttccaaggggggaagaattttagttggtgctggaaagcttctagaggtgcttcaggtggtattcttataggggttaactctgacttagctgaggccattgagacccatgttggtgctttttttcttagttgtgtcctgaagattaaaaaggacaacttcgtttgggagatagtttgtgtctatggtcctgttgataacaccttgaaaaatggtttccttgatgagttgtcctggcatatccagttcagactacatcctgtcctgctgggtggagatttcaacatgtattaatttgctagtgagaaatccaatggcaatttagatctcagatgcatgaatatgttcattaattttattactggtttggatttgagagaattacacagaattggtcctagatttacttggactaacaaacaagataaccccacccaggaagtgttagatagaattttagtaactgatgactaggacaataagtatcccaactctgttctttcctctattctgagagtgggttctgaccatattcccattttgctagatacctgtgagggtaacattgagagatctagatattttaaatttgagtctgcttggctagctgcagaaaattttaaagagatggttacccaaaaaatgccaacaagagatgattcctacattttggagttttggaacaagaaacaagctgagttaaggagatttctgaagggttgggggattaatgcacactgtgagagagtcagagggaaacaggttctgcagaagaaattagaaatgatagaggctaaagctttggaaaatgagttatcacctgatgaatggcaggagagatatgctttggaaaataacctagaacaactttatgagatggaagagctttactggcataatagaagtggaggacaatggattctagagggagacagaaacactgactattatcataggatagctaatgagaggaagaagagatgtagtatcacttctttgatggatggtgacactgaactaacatcaaaggaaaatctgaaaaaccacattgttaactactccaaatccctgtttagagctgatccctccctaaatatccacctctcccccaatgtgtgggaagaagagttctttctgaaacctaaagacagggaggttctgatcagaccctttaaattagaagagttagacaaagtcctcaaagaggcaaagctaaataccgctcctggccctgatggttttagtatccctttctatagagctttttggccccatttgcagaatgatatctttgaaatgcttcttatgttgcacaatgaagagctagacttgaagagattgaattttggtgttatttctttaatcccaaaaaacaatgacccttctgacataaaacaattcaggcctatctgtgttttgaatgattgtttcaagttcataagtaaagtggtgaccaacagattttcagaggttgccaatggtgttatctcccctacccagacagccttcatcccagggagattcattttagagggttgtgtgatcattcatgaggtgctccatgagttgagaataaagaacctagaagggattatccttaaaatcgattttgagaaggcatatgataaactaaaatgggattttttgtttgaagtaatggagaaaaaaaggtttcctccaaagtggattagctgggttaaatcttgtgttatggggggcaaagtttgtgttaacatcaatggggagaggactgacttttttagaacttttagaggacttagacagggtgaccctctctctcccctccttttcaatctagtgagtgatgctctggctgccatgtttgatagtgctaagaagagaggtgtccttagtggtttagtccctaatatcttccctggggatcactcatctccagtatgctgatgacacagtccttttcattgccaatgatatgcatcagattgtaaccacaaaattcatcttatactgctttgaggagatggctggtttaaagattaactttcataaaagtgaggttttctctattgggatgagtgagcttgacactgaaagagttgcccagatgctgaactgtcctgtgggtcattttcctatgaaatacttggggcttcctattagtcctgataagatcctaaatgtgggtttcgacttcctaggccagaaacttgagaagaggttgaccaaatggggaagcaatttatctcatgctggtagagcagtccagattaatgcatgcctctcctccatccccttttatgccatgggtttttatcatcttcctgaggggatccatcagagttttgataaaattagaggtagatactattgggctagtaacaaacttagagggaaataccatatggtcaaattggaagatatggctttcccaaaggattttggagggcttggttttacagaaactaggaagatgaatattgctctcctagcaaaatggataatgaaggtggattcagaggacaagagtctgtgcatagagttgttgaggaaaaaatacttgaccaatgagagtttcttttcctgtaaaattggaaatgtttcccagttctggagaggccttctgaacatcagaggatggatgatgctgggggcagaatggagtattgggaatgggctgagtgtcaaattctggaaagatacctggtttggtaactgcccactgatgacccttttccctgcgatctatagagtttgtaatcaacaagagattttagttagtcaggtgggtcaggggggcccaggctgcctatcctttaggaggtcttttggtcctgaggaattagaggaatggaatgatcttaaagagataattgatcaaattgttctctctgatacacatgacaagctcaattggggtctgaatgcaaacaagaaatacactaccagatcactctacagagcactaactttcagaggcattggggatgtgaatgctaagatgtggggttgcccttgccctatgaaacataaacatttcctttcgttagctcttagagataggatccaatctgctgaacagctaaaaaagaagaattgggaggggtctgaattttgtcagttgtgtggggagttagaaacaactaatcacatcctctttaactgtcccatggctagatttgtctggtgcgtgtgtagagacactttgcgctggaattttataccaagaaactctgatgagtttttcttgatgtgtgatggggctcctgatctttgctctgttagaatcaccctgagtcttttagctgctgtttgttggaatctttggattactaggaataatatgattttcagggacaagttggtgtattccccccttgctatcctttttcaaataacttctaatcttgtgcagtggaagaagctttgtcgtcctggggaggcaactaa

SEQ ID NO: 1455 - DNA, 1171 bp, Oryza sativa
  Intron number 4 from transcript LOC_Os07g04600.1 (locus LO C_Os07g04600) derived from phytozome v7.0 (chr-ID Chr7; po s 2045778 to 2046948 reverse strand)
acaaagaattgagaaaaaacttagtagttggaaaggtaagcatatgtctgttggtggtagattggtgttgactaattatgtactttcaagtttagctatgtttatgattttcttttttgagataccgaaaggggtgctttaaaaaattgattattatagatctcgcttttcttggcaaggagattttcataaggaaaggtacagacttactagatgggatatcatctaccagcccaaagatcagggtttaggggttcataatttggaaatagaaaataaatgttttttggacaaatggttttttaagttaattaatgaacaaggggtttggcaagacttattgaggaggaaatatcttcataataagtctattacccaagttgataagaagcaatgtgactcatttttggtcaggtttcatgaaagttaagggtactttcttaaacatgggttcctgtattgtgaataatgtggaacaaactagattttggaaagataaatggttagataaggcctttaaagataagtatctttctttatatgccattgtccgaaggaaaggttcttcaattgctagtgtaatgagatctgttccatttaatgtttcttttaagagagttttagttggtcagaatcttgttttttaacatgagttgtgtgtttctattgtacatatcaaattgaatcattcttatgattgttttagatggaactttaatcagaatgtcgcggttagatcaatgtatcttgttttaattaataatggctatattgagataaataaaataatatggaagcttaagatgcagcttaagattaaaatcttcatgtggtacttacttaaaggggttgtgttaaccaaagacaatttagcaagactgaattggaatggtagtttaagatgttgttttttatgaaaaataagaatattcaacatctttttatggattgtcattatgcaaagtttatatggagagcaatgtagtatttttttggtctataccctcctagtaatatatcacatatttttaatggttggcttttgcgggtggacaagaaaatgagtaaacttatacttgtgggagagcaggaatgatttggtttttgacaaatcttcatctatcacatatatgcaggtaatcttcagggcaacatattagctccggtgttg

SEQ ID NO: 1456 - DNA, 3574 bp, Oryza sativa
  Intron number 3 from transcript LOC_Os01g01484.2 (locus LO C_Os01g01484) derived from phytozome v7.0 (chr-ID Chr1; po s 250756 to 254329 reverse strand)
gtcaggtacctactgatccctacggcaagattgctggatctatatttagtttacatcatagttggtactggtcatgtattacctgtctaatcaaattggtgttgattgcactggaaccatgggcattcatagttcaaataatagtaactagaaagaagcacgcgctacgctgcgtgtgatctaacaattactgtttgcacttaaaacaaaaatcatctttcaccatacttcgtacttttctttgctctgccatccaagcatgctctgtaatatgatcaaattgtaaataaaaaaactaaattgcatcattaaggtaaaatatggtataaatttatcttgcttcccccaaaagatagatatcaccgtaacatctgaacttaacatgttcaccaatcctcgataatgcaaagggtaaagaatagaagatatctttgcattgatccaattcaagattattcaaaattgacttcagagtcaggataacacattagttacactgaccagatataatctgatatttgagatttatttgattgaggaatttttttcataaaaaagaattagtagctatggccagtaaagatccaaccaccagcttgcaggtgcttgagatgtactgcacgcttgctgatccctatcaccatctacaatgataataataagagcaatccatgagaattggtctagacagtttttacaatagaaggtaaatatgcccacaaaatatatagagaagttggtaagggaagcatgactaactcaaaaaactaaaatatgtatggctgtgaagtagggagaaatggtgtttccatacgacttaactaaaatgcctcatttgtatcacaaagaactaaactgcattgtaataattaacctagtgaaaacttaatatgtggtagaaaaataacagatcatgtagttagtgaaatatggctatcgttccatattgagaaggaaattattgctcaggtaagtggtcatgcaatccaagatataccatataagcctctatcatcttagtgtgcttggttcttcaactgatagcttcgttcattattttttttcatgagctgaggacaatgggttgcccctctcaacaaaagtaggagttttgttttgcaagaaggatctgtcaccttgcttgtctcaagataaagaacaactaagacataaatataaatcatggatgctgtatacaaaagaacaattttcatgaactcctatccaaaaagtaagtacacttgctataacaataggatattttgtaaagaaataggaagaacatggagccgatggcaactatattagtggtacatgcgctcatgtgtaatcaaggaaaactaatgtatatagacaacccatcatagaatgaagaagcgcatctagaatttctcataggatctctttaaaaaaaatcaaaactgaaaacacgttgcagaacctttcatgtgggtctgaacttatcccacaatcatttatgaatattcttcatttgtatcttgtacatataaattggaagacctacaaactataactgtcactttgtcagataggttgttgctttctcataggtgggacagagcatatacttgacatttgacatcatgatgaattaagcctaaatcattttgctgaaatagaatagaacattgctctggaagtttggatacctcaatataattcaaatgcaagcatcagcagttgctgaaagtgagatgtcttgttcattttccaaaatgatggtcattcaacagtttgtcgatgagataaacattgcatgattgtaatattctgcaaattaaaaacatgatgaaccaaaacttagttgatttgaaaatttaatatgacaactaaagcaaatatgaaagtactggattaaggagctgaattctacaacttccatatacaaagaatggcattatctgccatgtaaatggggtgaaaaccctctgcaagttgacagatcaagttatagtcgaactgcaatacacagacttcttatcagaagttacctctgtccttaaacttgatacctgcaactttgcagtttttcacattctctgatttggacttcaaagattgcaaatatcagctagatgtaaattgcatactaagaaaagaaaatcatataattgaaattaggatgaagcatgaaccaattacctcataaattggaatgtggtctgaatataaataaataatgtagtctctgaaaactgcatcagagtagcacaatcttttgcccatcttttcccctagttcctctattgctcccttctcacttcaattccattgggtctagcagtagcacaatgggatcaccctcctctgctttcttcagtaggaatatcgctgtaaggaaaaaaaagaaagaaagagggcagccgctagcatacctctcgttcgggtggctggatcttccgatgtggcaatgacggctagaagagcgcggtggcggcagctgcggtgatgtcggcggcggcgacgttggcggcggcgacaacggcgatgacggcgtatgcgaggggaggagaagagcgagggagcgggccggcgcgcatgagggaggaggaggcgaggcggcgcgcttgcgcggctgcgggcgaagcggacaatgaggctagggtttggtgcaatctctgccgtccgtttgtgatccgacgatatcacaggtgtggaagcgccggcacggtaggacagatgtacgacccagatcgatcgtagcacaagatcggacggtggggtagctgggactggcacataattaactggaagttcagggacctttgtgcaaaaatacgctgacgtggcgctctaattctcaagcatttccacggcgtttaagtaaactaatatatgagagctactggagcatcaccaggagattatataaagaggagtaatcattccagttttaatgggttgccagataaaacaacaaataggtcaataaccactgatttcaacacccattctttgctgaaaaataaattaggctataaccaagaatatttattggactgaattgatcttctagactgtagcaagcaatatttttggtgctatgttaaaaatagagagaaagaaaagaaaattgtatgcctgcatctgtccaggagtgcttttgttctgacatatttgattatctatttgctaatgacattcttctattgttttcatattgtttctgttatgtaaacggtataacttacaggagactagtgatagagaagcagatatgcacttccccatttgttgcttgaaatatatttctcgtaattttatttccaccatgttcattcattcattcattcattactactagttctttggatttttttttaactttggctccttgtttcccccactatttttattgcacaaaagcgccttctcagtctaggaaaatattcatgtccatgatctattattcttgatcaacaatagttgatattattctagttatgaacttatgcacgataaatctaaatcaaatctacgtatgaatcacaaactgtcaatgtacttgatgcctgcaggctgcacgaggtgtttcttttcttcctggcatcaa

SEQ ID NO: 1457 - DNA, 1101 bp, Oryza sativa
  Intron number 4 from transcript LOC_Os01g49470.1 (locus LO C_Os01g49470) derived from phytozome v7.0 (chr-ID Chr1; po s 28453709 to 28454809 reverse strand)
tgtgcatcttccacaggtacataattttatatcttgatctatgaacatcttattgatggaatcatgggcttgttgtgtaattatagtaatgatcttttacttaattattcaatattacctttctcttagtgtattcaggttggtatttcttgacttattgtgccatttgtttgttgatgtacaagtattcggtgctcctttgcatcaacctacttgttatgtatgatttcggcttatgtttcttgttacatagacatttggtggatttattaatagccatcatcttgtctttttgaagagtataacgtgataatctactagtctctcttaaataactagattctgcaactttgcagcacatcacaaaaatggcacactgacccatagtcaccatgacaccatgtcaccatagcataggattgtatgcttaaacgcaattacataactcctggatatcaaatttaatactgcatgagttggggataaacctatgtcttcattaacaaagaagttcacttttattacaaatgcttggatttccatccaaagtagccagtgagtagtgattacaaatgcttggggaagaagtatgacccgacattctgattatcaagtttctgttgagacatttgcatttgtagcctttctttctatatagttacaacccacctaatctatttgtataaagaagtcaccacaagaagccacatcatcctttgacatccttggatggtactttgacgtttcagattagtccatggtttttccagcttgcattagttcttttttttttttggctatcagattagtcattttctcagttcgagatattgcaattgcaactccgctatacacacccaacatccttcaacaatgcatggggtgtcatctagttattattcattttgttgtacagacagaattatatgtggcatgtatttacagcatggtagtagtagcttgttgggtatcgaaccatgtatttcttgattacctgtatgcttttcacttgaaagaactaaattcctctttagtttcatcacattcatttttctgtgacctacagtattgccgaggatcaggttgtgtttcctgcagttg

SEQ ID NO: 1458 - DNA, 962 bp, Oryza sativa
  Intron number 1 from transcript LOC_Os09g29950.3 (locus LO C_Os09g29950) derived from phytozome v7.0 (chr-ID Chr9; po s 18228587 to 18229548 reverse strand)
tccgccgcctccccgcctcagccctggggcccctggttcgtattgctccattccgtttggtactgtagtttggtcacgcacgcactgtgtggattggaactgtatcgccgctatacctaatttagctatggcctgtgattgtgaagctgcttcagtgatgtaaacacaacacaatgcacaaatctacgggaatagtagcagttactgtagtttcacaaacttttgattttgtagttttgaggtttacgcatttgggatgattctatggtgttagctttgcggattcgtttggacctaggagtgaggctgattctgtgatggaaacactcgtaagtctacatgaatagcagttgctgtagtttcacaaacctctggctgcttctgtagtgttgagatttatgcatctatttcattttttgcatagctaagccagatattgactggcttggctgcattgggatgtagagttattttgaaggacactcaggagcgatctgttttattattgccttttgcttttgtgtgcttaaatgagttaactgttccagtgtaacgttacggttggttttccaatccttgtagtgtaatatactgagattgttttacttgcctttgcaccactgaaatgcgcttccatttttggctcttttgattatgtcagatggaaggctgcgttgcaaatcgaaattttacatgctagtgaggacatgtttttattggtttgatcaggcctagttttcttggagatatcacattctgtgtatatgtctatggttggaaacaagttcaaatataagacaggaaaccaaagagctttatattatgttttgttgctgcaatatttttatatcaagttaaatgataccatttaatatactgttcttatttgaattgagcatttcatactgtaaatccagaattataacataacttgctctgtggatccaggttatattaccagt

SEQ ID NO: 1459 - DNA, 1542 bp, Oryza sativa
  Intron number 19 from transcript LOC_Os04g23210.1 (locus L OC_Os04g23210) derived from phytozome v7.0 (chr-ID Chr4; p os 13202814 to 13204355)
ttgtcacggtaggatatgagagagcaaccaagggagagaaccgagatgaaagctaacgtaagagacgaagacttatgtggtcacacatagtcccagatgttgtcatcatagttgatgacaacttatgaaaggtgcactggtcgtaacaactgcttgtggttgactggttggggcgctgtaaagtccttgttgaggtatttggagttgcatgctaggtattttatggctgctggggttgcatgacaaagctatggaacttggctgtactggaatgagtttttagaagacaaatattatttgggttctttgaattcagttgaacgttttatgttgcatttaaatccaaatctactaagtggagtcccttattaacagaatctgaattaagtaattctttggatgtgaattaacataccaaataatggccctgtaaaatctacatcttggtgtttttgttgaataagtgtttattccctacctaccaatttttagtagtttattccccacgtaccaaacttttgtactagtttatttcccaactaccaccttttgtaccatgatttgttcttttgctactaacttaattttctttttgcaaaagatggcataatccattatattatgggacggaaggagtaaagtaacagactttgccctttaggctgtatcaaattcttatttgtatggttttaagatcccttatgttgcaaaatgggtaaagtgaaatgataagaacgattattggaatatgaccatgccttgttcaatattctatgagtgaaaatgaatgttttaagggatactctaattttaatggtgtaacagaagacataaatatagtagatatatgattgtaatagtgtatttttcttaatttgtcatcacaagtctaaaacaccattcatattatcaatggaggcagtaccaccataatacatatgttttgtgttatttttgacgtttagagagtttgtgttcaaggtttatctagttatctatctgatctttctgtaaatacaatgtaattatgagttgcacttgcatgcactggccagttcacccaaaggcttataagctcatggtgaaagtcagacaattcacttgcacatccagacctcacatgcaggatagaaactagcacagttcttttttttttttgaaaaaaaaaattaaattgcactgtattcaaattatagaacatttaattctgatgtcatattgagttgcatgcacctgacggttcactaaaaaacatagcctattgagaagggttggcaattgtcttatatttcaacagtaataatgccaacaagaagccctactaaaaatgcctctaagttatatgcagagtgaatgtcctgctaggttttattttttgtttgggaactcttgtccaacatggtaaaagctgatgcactaagataaaatttctaatcgccatttccgaaatgaaaattttaaagctgaatgctagttcagtgttcttgtcctatgaattttatcgagctgttggtagatcttggctagcaaggtggactgtga

SEQ ID NO: 1460 - DNA, 947 bp, Oryza sativa
  Intron number 1 from transcript LOC_Os03g62630.1 (locus LO C_Os03g62630) derived from phytozome v7.0 (chr-ID Chr3; po s 35437715 to 35438661)
aggagcgcctcgccctcatacagcgttacgaggaggtaaaaatcaaaattactagtaaataattagctgcactgactaggcgccaatgcatttgctatctgctgcagtagacatgaatttccgaggaagatttgtagtggccaatgcatgagaattttatcttttgccagtttatggtaaatcgggctgaatttatggcacactggtaaaactcaaaatcactactagtggtaaataattagctgcattgactagacgccaatgcattttggatttgggctatgctgcagacctgctcctgcagttgacatgaatttctaggaaggtttgtactggccaatgcatgaacttgtcatcttttcccagtttatggtaaaccaggatgagttaatggcatacttgtttcttattaaaaatgctgtcatttggctcgttctgtcattaacattgcttaaaatcatatatcagtcattgtaggtgaagctgaagcaaatcattttgttgcaaatgtatactttctggtcaacagctacagccccatattatttgcgtatgtcatagtggagatacaggaagcataaaattgtttctgctgtagaacatacgtttactacagaacctaccaaaaaaatagttttgttattatatatccatcattccatcctgcgcgcacaatctcctgcattgtttagtaggagtagtagcaatcaccagttaacacgcattcaagtttaccttggtctttttttttttttgtcccataattgtcttggttgatgatcaatcaagcctcttgcccattctgtaaccttaaatttgatggtatcctgaagtgtgacttcactccataagatgttcacttgctacaaacctatctgcaatttgcttactgagttacttatggtggtttttcgcatgtcttgcagctccttgttgcgggtggcgcc

SEQ ID NO: 1461 - DNA, 2530 bp, Oryza sativa
  Intron number 3 from transcript LOC_Os09g19140.1 (locus LO C_Os09g19140) derived from phytozome v7.0 (chr-ID Chr9; po s 11429112 to 11431641 reverse strand)
cacctacgacggcacgacaacgttctccaaagactgtaagctcactcaattacgctctctcgcactaaatgtgcaccaacattgctccaaaatatgggttaaacgcatgtatgctatagaagggtttcacctattgacatatctgtcaatatgctattgattttttaaaattactataatgccgttagtttggtgatgaagatgtcactatttctcaatcagccatttcttttgttaaaattactataatgccattagttttgtaacgaagactaaaaatgccattctgccgaagtgtcactgttagatcaacaataattaacacaggttgagggccctttggatttttgaaggatttgtggaggattgaaatccttagaaaatttttcctacgaggccatttggatcaaaggaactggtatctcagaattcctatggattgatttcctatgcccccatcctgtaggaaaataaacataagctcatacctcatgctttttttttaacctttgagaagcccaatgcactctcttcctttctccctctaatttctctctagcacaaacaattttctttagaattcccatgttttgatttctcgcgaaccatccaaacacaccaattctagtatgctttggaaccctgtaggattgtgttgaacatgacatcctcttcatgcattttcatgtttgcatgtttttagagtcctgccttccaaaggagccatgactgtttatgaaaagcacctataagaaaaaggaaaacatacatggcagtttgcactactatattaatatttttcactgctagaagctttcctttccataggcggctcaaatttcaagccgccatggctgaggcttctttatggtcatggacgacatgtgaaaacctatatctgcatacagttcttttaaaaaaaatgcctgtggagacaagaaaactgcatatgaaaatcattatttttggagatgatcctgaagaaaactttctatgagaataggatgatttttaaaggtgatttgcttaagaaaccgcttgcaaataatcaattagtgcagacagatctttaggaagtctgcctacggaaatatttttcctcataatattttctgtgtaaatactcaaactatcaaaattgaaagatttcattttaagtccaattgaggtgaaccaaagcttacaatatttcctttaatatggtcagatcaatatttttagaattgtttaaatgtggtggtatatatgcatattaagattagtgaatgatcatattaaagaaaatattccaaggaaatattgatctcataatatgaaaaaaaaaagcattgtaagggtccaagagaactttgatttacgtcaatcgaatttaaaatgaatttagtttggacagttttaaaggataacagaaaggtttccacaagcttactttacagagaatcgcctgaattaatcagcagacattttagagaatcgtctgtacaaatcaattagtgcatacggtccggatgaatttccaacatagtagtgaaggtgatgaataataatgcctacatcgccagcagcccaaatggcatcaccgggtggaagcaggggcaccattgcttgagcagcagaacccctcacctgacttggttagtttttttttttagattgacttggttagttaatctcctacacactgtgtgaggattctctatcataacgttagtatcattatcattatagtcactgatatatgggtcccacccttctattaccccacatatcaattactataataatagtgttattatggtagaggatatgaacccgtgaacactacttgggcaggacttgcctcctgcaacttctcaccttctcctagccgctgcctggcttgtgcgcattcgaggtattcgatcaaattaacggtaaggttggctctctggtcagtgccttaggccgagtttagttccaaactttttcttcaaactttcaatttttccatcacatcaaaactttcctacacacacaaacttccaacttttccatcacatcgttccaatttcaaccaagcttctaattttgacatgaactaaacacacccttagtggatcccacttcccacatgttggtgtccattgggcttaaaaagatcaagggagggagtggacaattatcccactgttgtctgcttcgatcgaactgagaattctttcttgaatcaggcatttttgtctcaacaaaagtctaagacactagggaagttctaacagttaatggagacatggattgttcatgccatgtttttgaaagtacgatttctcaaaaaaaaaaaaacaagaagaagaaactttctacatcaactacaagataactttctttagttatattttcaccttataatatttgattcatccatatgagcaattttttcctctgcccatatctatagtcacctagttagaatgcaccctgagagtatatggtgcctttaatcatttaataaactctgtaccttccttttcctatgctagttgatacaatc

SEQ ID NO: 1462 - DNA, 2700 bp, Oryza sativa
  Intron number 1 from transcript LOC_Os04g32250.1 (locus LO C_Os04g32250) derived from phytozome v7.0 (chr-ID Chr4; po s 19151837 to 19154536)
acgccgttcgcctccgtcgaggacgccatcagcaggtacatacgcgtgcttccccttagccgatcaatctccctcctcctccatcgatctcccgtctcgccgccatcagcgttaaaaccttctgtgcacacgatttctttagatattgcattctcgatctgaagaggggtttatttagaggatctgaaattctcaatctacgtacggtaaacttctactgcttccaaaacaatccatgaacaattttaacgcgagagtatttgaggatcgatatctcagaattgtccgcgttgggttagttcattaatctccctgtgatagacaatggtgaacccaaatatcgggtcctatacaaatcataacatatacaatactttaattttaaactaataatattattgatatagactaaaacaattaattaaagattataattttacacggatcatgtaggactggagctagaatgaaatagagttggggccactcgcttgctttggtcctttgaatcaagtttaggttgatgcacgcgtctaaatttgaaccgaggagaaaaattgtgactgcatctgtgggaagtgggaacccctcgataaatgtaactatgctcctaggtcatgtgaatctgggtacaaaataacgtaggatcgatggatgaacatggaaatcagggcatgatcatgtactttaatttttttttaacgaactggcatttaggtgtgaaaatttcgttaaatatagcagaatttaaaatgtttgtactataaaagaaaaacaaagttaaggtagatcttgagagtggtagatttggtcctgctaagtctaagttttagcctctttcttaattttcgacataatggtcaatggttacgtcgagagttctctattgtggaacatagtggcggacccaacactaaaatttagctatggcaggtaaatatgctaggacaaactacaaaattaattatcaacaaaataatataaattctactatctaaaggttatgtgttgcaatggagatagaagcaaaacaatataattaggtgactaggcagccatgaccaaagaatgtcatattcaaagtaaaggctttcacgtgtgatcgtttggagaccttatggtcccacataccatcttgtgacgttagaggcggatttggacaccaccactagtatcatttaaagtactatagatacacaaaccctattataaatatgcttatatattactttattagaatatatggcactaaatacaatcaacaactacactcttactgtgattattatttggcctaaatttgtcatgtaactattatcagcgaagtgacttttgcaagtgttttcgtgtttcatagacatgctttacttatattttctcttttcccacactccgactgtgcctatgcttaagcaacggtcaggccggtcaatagttcttctgaaggaaaaaaaaaaggcattgaactagtgggcattcacttattttagcattttcattttactggttaatatttttttgttggactattaattcattaatttattttttgcagaagaaacaccataaatcgttacttccaattaattaaacatataaatgtctaataaatagccaattaatcacttgattagcatataaaaatcaaagtccacacggccaatggctattccccctacttcctttgcttgtgacatatagctatggccaactccatgactttccacaagagaaggtcggccatcttggaacttagatctggtttctctagagcttcttttgtattttctatgtcgttagtagaactagtgagggtgtgtattcttgttcatttttttaagtcccggattaatttttcgtttcacgttgtcaagacgacatggtttggaatctattgtttggttagcttcattgagcacaatgcattgtattaacgggccggggacaaaaactcattaggagtttttggtcagggcatctggggacgataataagtgagtttagaacattaggatcaatctctgaaactataatttctggaaccgcacctcggaacatatatataaacttgtgttgtctctgttaattagaaactaaattataattatgacatgttaatggtcaattatttttatcaccaaacattttcaccttctttcgttcatatatcaatggacgtatgtaggcatgtagctcagaatatttaatacttacccgagactgatgctgtcatgtatgtatgttcactgtaaaatagtactccctccgtattttcatgcacgacgtcgttaacttttttattaacgttttaccatttgtcttattcaaaatttttatgtaaatataaaattagttatgtcatgcttaaagaacatttaatgataaatcaggtcataataaaataaatgaaaattacataaactttttgaataaaacgaatggtcaaacgttggtaaaaaaaatcaataacgtcatacattaaaaaaaatggagggagtatgtagtatatgtacgttatgtttgatgaataatatatcaagtacgtgttcttgttgccaatctttgaattccgaaaattgcaccaagaagtttcttacatctgctgaaatctgtacagtaacaatgttgtctcgatttgttcatgcatggattgattcgcctgcaggctgcttccgtaccacgtgttcgcggagtacgagg

SEQ ID NO: 1463 - DNA, 2352 bp, Oryza sativa
  Intron number 1 from transcript LOC_Os11g23790.2 (locus LO C_Os11g23790) derived from phytozome v7.0 (chr-ID Chr11; p os 13000301 to 13002652 reverse strand)
ctcaagctggtacgggtttttttttcttttactgttatttatttggtagatggtcctctactatttgagagaaattggacattctgccgttgccaaaacagggtttggctcaaatgtcactccctggattggattagttaaaaagccacttccaaccggccgatgtcaaaccgctgttttgccatatttgccatttcacaggaattccaccatttttcgcacttggcctgaccaaaatacccttcgggctgcggtttgatgtcggtcacacatacatggacatcgtatgttgtactacttaaagtcaaactactttaagtttaactaagtttatagataaatatagtaatatttataataccaaattagttttagtaaatcaataattgaatatattttcataataaatttgtcttgggttgaaaatgttattattttttcaacaaacttagtcaaacttaaagcagtttgactttgaccaaagtcaaaacgtcttataacctgaaacggagggagtattattcatgaactttgcaattcttttttccacaatgattccctcaagaaaagctagcaatatgacggatcagcaggacaatcatatgcagcatatcaaatcaaccaaagcaagcaagaaaagcatcaacgcatttgggcagctttacctggtgaaacccagattgatgaggaacccgcaccgcgtgaccgacttcagcaacaagtcctaatagaatcaggccgaggcaacatcctctccacccagaggtgatcgacgctaggaaccaccgccacgtctgtggccgtagccatacccatatgaggccgatgaggaggaggaggaggaggaggtggtggcatggctgtaggaggaagaggaggacgagcgaaggcggaggtcataatcagcgtggaggtggtcgtcggagtggaccctgtaggcctgtacgcgtcggaggcgaggcgaaagtggcgcgcatggctgcgtcgggggagtgggcgtggcggtccggctggtcatggagtgcaccgcggcagaaggtggccttcacctcggccgtggtggcgtcccgccgcagccccaacgtttggtagtggtcgctgcccattgctggcgcctatcaccgaaggggtattttggtcagaccaatggctgaaaatggtggaaatcctatgaaatggcgaatatggcaaagcggcggtcatggttttaaaagcgtcgcttaagcgttgcctaggcgtctgagcgccatcagggagcagagcgtccccactgcctacccttctacacgtcttggatcctaatatctcgtgaaatcaggtagacacgggcaaggtgggggtcaagggcgcatgcgctgtagggaattacacatgctgggaaggaaatcgcgtgaagatatgatggaaatcgcgtgtgcagcaatttagggagggaagagtgaaagatggaaagagaatagagaataggggtgcgccaatttagggagagggaagggtgaaagatggaaagcgaatagataatagggtgggcagagattggaaagagaagatggttgtctccctcttgctgctcccttcttctccaatggatctgtctccctgctcttcctcgccccttcatgttcttcctctcttttttgcctcatatatctctagtatgcctcttgtgcttgtgtttaaggcgtcgccttacccttgccttaaactcttaaggcgttgcctaggcaattgagtaggggtgggtcgccttgcctcaccttgtcgccttaagtacactggtggcggtttagcatcggttggaagtggctttttaacgaatccaatccgtagagtggcatttgagtgaaatcctcttttagcagtggcagaatgtccaatttctcactatttgaattgtgggtagtaactgtctcggttgacaaaattctgggatattttagctctgggtggttaatagattgggtgttttattttcagttctttggtgattaaatactttattgttttattatcctctggtgggtagtatattagagcatttcacgacgaattggccaatagttccctcgggaaaaaaaataattggccatttggaaaaaaataatacatcctttgctgcatcttttcacactttctcaaggttagaagattatggatttttattaaattttcgaacaaccaggaatgaagcaatcttcaatgatgaattagagaacctcggtatgcgatgtggaatagcaaggttcatgatgcagctgaattataaggattgctacctttgagggtcttaaagttgtaaacattgtattgtatattcttgatatgggactatgtatgctgatgatgctgtag

SEQ ID NO: 1464 - DNA, 4866 bp, Oryza sativa
  Intron number 1 from transcript LOC_Os12g31748.2 (locus LO C_Os12g31748) derived from phytozome v7.0 (chr-ID Chr12; p os 19081700 to 19086565 reverse strand)
ggcaacctcttccactacgcctcctcccacaccacgtacgtcactatcactactcctgctgcattttccatacaatacgtacaaaataacaaaagcagtagatatatatagttagctcaattaatatgatggattatttcagaaacatttaacttctctctctctctctctctctctcttccctggcatgcatcgtccatgtatcaaattaaaagatgatcaagaatgcaatgtgaaaaatatataacaacccgtgtacacctgtgagtttacaaatacaagcatttcaagcgttcataatttatccatccataaatataagtgttacaggatatactacttattctatcgtctatcacccttctttcaaacttcctccggatgcatgcatatcgatccctcattcaacaagggatattttagtcgctaaacaaattataaatacctatattaattcatcgatagagggggagttagcaagtactccctctgtcccacaatgctggtcgtccaaggaatgtagagaaaataattgctctggatgaaacttaccaggatgccccaaaacattagttgcagtagtcattttaacacaagtacaccagccacataatggtgccatacacctaatttgaatgctttggcacctagaaatttgacaggagcactagatggtgctagggatgaaaacggagcggatacggacggataatgctcataccatattcgttttcatattttttaccggatacgaaaacgaatacggatagctcgaatacggaaacaaatacggattatctcgaatacgaataagaatcgaatatgatcggacacgaatacggaaacaaatttttctcggaacacgaaaaccaactcaacttctaatggaaacaaatatcaacatatataattagctcattttatataaaatgaggtataatttataaatattttttaaaatttaaataatattaatagtatggactagtgttaagagataaactactattaaaatctataaacgtatattgaaggtcatagagttagaaagaaatggggtatgtctcatgggtcctgcggatatccgaatagcactgttcaccggatatccgaattattatccgtatccgacagaaaccttggtaccatatttgtattcgtatccgggagaaaatatccgtattcgtatccgtatccgaactatccgagaattatctgatccgaaaggtatccgtatccatttttgtccggagcggacggaaactatccgctccgttttcatccctagatggtgccacttttctgcgccattattactgccgatgggcgagtacaacgtcaaccattctaggatatttgttagccagtaaaacgatctcctttgtgggagggaggaagtagacattgtacacttcatagggcctgtttggagaactatctcagggatatttttttgctaaagattatcccaccaaaatagccctcttgctgtttggatccaagggctatttagctattattgtaccatcccaatcatttgtctccactaaaagtatacaacagccggatcttctatagctaatccaatacaggcacatacaagcatacacaattccttacaagcacaaactcataatttgtctcaaatgtataagcaagtccgtaaaataattgcacgccaaccgcggcccccacgtccgcggtcgcggccacagttggttgccatggcgcgttgccgacggcgacccattgcccctgatgaggagctgcctcgcccagggctgccgccgacgatgcccgatgacgacccaccatttccaccgtgtccagcacggtcacctgccgcgccgaagttgagccggcgggagcgcggtgcaccacgagacggcccggcgggcgcgtggtgcaccacgagacggcccggcgccctctcgaccagcccttactcccagagagcgtggtgcgcggatgggagggagaccggagcctcggccatggccagctccttcctcgccgccaccctggaggaaggcactgtactcgtggaggtgagggaactcctggcccgacgacgcctgggtgttgaggtccagcgtgtccacgccggtgcggggaacggatccgtgggaagggccggacgccgacggctgcgagggccaaatgttgccggcggcggacgaaatgggatcttgggagaagaaatcgaagccgttggggtccatctccgcgcggattcggtgcacagcgatgcgtcgacgacggatctgatggccggcaacgcgggtggggtgagttgccagtgtggatgcctctcggtggatctgaaggaaggggcagcgcgattcgagggagagggcggcgcgggtgaagggccgggcggcggcgtgggtggggggagggggaggagaagctagggccgggcggcggcgcgggtgtggggagggggaggcgaagctgggccgggcggcggcgagggttctagagagtgagcgggggcgacagcgagcgggggcgaaatgcgatgggttttgccgcaacgggatcggcacaagtgggggaaagtgggaatcggtggggcccacagcaaaatagccccaattagcacccggtgggggtgataattttttggggtgggctatttgcaaatagccctaaaatagccctcctgtttggatccccttgagctattttggggttaaaaggggtgggctaaaaaatatccctaggatccaaacaccgccatagaacgatattatgcatagagattctccttactatcttgtaccaccggtaagtacacggcaataatttgctgagccagctttatttcctcttatgggaactgttatacctgcccaggggtactatttttggtagatgcatgtcggccccattcttctcttgtcctagtatatgcagtattaccttagtcctattgcatatactacattcgtcctattttaagtgcatctatagtttttcgtgcctaacttcgattgttgtcttatttagaaaaaaaaattaaaaatataagtcacacataagatacttatcatgttttatcatcttataacaataaaaatactaattataaaaaaaatttaaataagacggacgattaaaattggacacgaaaactcatgggctacactaaaacgagacggatagagtagtattaatagagtagtattaggaacagccttttgacttgtctacggcaatgcacaaatagtaatcaatataatctaatcatatcttttattgataggaacaattgtttgcacagtactgatatatgtatattttttttcatgttatttcagatcatatacatgaaactcataatcaaccttctattctgttgatttatataattaataatttgaatctgtagacaatccagatcatgctatatggagtataacattattaattgcctctttgtaaataaccattatcagaactatatattcatcttcaaactttgatcactactcgttctttaaaagacaaatacttaaaaatgtattatcaaagtgtgccgcattaatcgtgaaatagttttcgtttatcatagtctaaccatttgcaagatattagatgcatcctcttgttttctctcaatccctccaactcaactcaaattgtactcagtgatgccattccttttacacaattaattgcatgatgttacacttacacaccattgtttacgccctaacgaaactaatgtgtagtgcacgtaaaacgaagcgattcattagcgcataattaattaagtatttagttttttttaaaagggattaatatgattttttttaaaacaactttggtgtagaaattttttttaaaaatgtactgtttaatagtttaggaagcgtgcgcgcggaaaacaagaagaaggaagttaggaaccgaagtaacaaacacaaccttagggcactcccaaccctccacctagtatgatgtctatggcattaactacattgccatgtaggacttttagcttatgtggcactatattaattaagagagagggagtgaagagaggaagaaactgggtctcatgcaagacacagcttcaacacgagaacctatgcactagacactatcaagttttgcattgggagagaatagtgtcttcataatagatgaaaaataaatatgattggtagagaagagatatgatgtatttattaatggtctattattttaagaaaccatggattatatagtgtagtgtgatttcttattgacatggcaccatagacactgcttatggacaatatggattgggactgtctttaatccaatcaaaccaaggccaccccgtgaatgttcactgcatacgcatagcactattcacatgagacagacccatggctgggcctaccaaccgtcacatattgatctggaaggacatgcactattcagcgcgtgtgagatgcccaatcaaagaaataactgaaattgatgtagataatttgtttacttaaacaccgtgggaacgctggaaagttaggggtgccacgtcagatgttacttttgtaaaaaagcccccgcagttctgttaattatgcattggtccccgctgataatttatagtataaattagctaggtttggctatcgttgagcattggccgaaattctattctattaactaaacaaattagctaggtgacttgaagtgaagtgagtgtactcaccatccaattatagttaattagggtctgtttattttgttgccactttcgattcattaatattcatgtgtgagggcgggaatattgtgaacattttaagttagttttttttattagaggaagtatatcctaataattgattctcatattttattgatagt

SEQ ID NO: 1465 - DNA, 2422 bp, Oryza sativa
  Intron number 1 from transcript LOC_Os05g47750.1 (locus LO C_Os05g47750) derived from phytozome v7.0 (chr-ID Chr5; po s 27291694 to 27294115 reverse strand)
gccgcgccagcagctcgacctgcggtaactcgtcttccccacgaaattaatacacaaattttatttttaaactgatattaattaattttggaaacacaagaaattaattaaaatacagaataagaaaaacacactgagggcacccacaatggttatctataagctatctacaagagatccatgtcagcatatttttctacttggaagatattaaatgaagagagagagcaaagctatctactagcttagagatagtctatagagaaaaacgaagcaatgcatgagagagctatagatacctatgtagacatactattgaggtggtttactattaatctagtctattgctgagatgtacatgttttatagagagcaccctactttaccattgcgggtgctctgacgaactgtgggcagcagtagaagtagcgcggcaaccaacgttgacgtgcagtcttgttgatactgttcaaagtcgctaatcttgacgaggtcaaaattcagttagtagataatactactatactaacgcggtcgaaatcggtgacgctcgtcctgctctgtgctcaagctacctacctaaggcatttctttgtggctaagaatttttttacgaaaagtttaagttttacgcaggtccatggtcaatggtagtttaactcaacccatcaggtcaatttcctcccacgattttctgttccccacgtttactcagccaacccttcttgacctactgtagctgttctttgtcccctcttatctttgttcatcaagcagctcctcctcctcctctcccctttcctgttgctcttcagttcatcatcaccacgccttggagcagatgcatcccctgtgtgcgctgccactcctcatcaccctactgctgatctcttcagtgccactttctgtacaagaatccgatgccttcttccggtacacaaattgtaccacagcttcttaccagtgcggatcactcaagctcgacgtcgattaccccttctcggcgaatggcgtcgaccgtccaaactactgctcttaccctgggtaccgtctcatctgcaacccagacaacaagctgatgatccacatgaattccaccgtgttccaggttacagatatcgactatggcaacaagtttcttgcggtcatcgatcaaactcaacctcaggagacatgcccggatcgctatcacaacaccaccatcgacgagagcaggttcatgtacacagaccttgatcagttcctgacggtctatgtcaactgcagtgccaagtcttcatctctgccttttatctatgatcttctgtcatgcgtttctgggggaagctcctactataggctgcacaagaacaaggatgactcgttggaatcagatattctgggatcatgcagctcaagtttcgttgttccattcaattcaaccatggcaggctcattggctgccggaaattctagccttgtggatgtgattagagggggtttcacggcgagatggaaagttggggtaggttggtgtagtgattgtaaggcttctggagggcattgtgggtttaatggcagttttcctgatcagtatacatgttactgtcctgatggtcaggctatcggatcatgttcttcatcaggtaccgtttgtatcttctaacaaacttgagggcaagtcaaggttggtgataaggttgtttttttagttaatttgtttcgattaggacaactatgtttgactcaagatgtctgtttctgctatgtttgggtcctatagtttaatctggtgacctcatcttagacaagtttaggatagtgagtggcgattttcgtttctttctttgattaatgtgccaattttttggtgatgttctagttttgacggggccttgatcaacctttgatttgcgtgcatttgacatggctcaaatgacaagtattcgcttacgttctgcaagtctacaaaattcagacttacttgaattaatctcttcacttaaatttatagaattttctcttgttgatgccgactgttaacctataagcattatcaaaattgacaactaggggattaggtagtatgaactgaattagttattttttgaccaaaacgtttaaataattaagctcgtgttgaatggcaaaccaagtagaccattttcttgtattccttgttttctcaccccataagatgaagatgtcttaaaagaaggaagaagatgaaaaataggaccggtatcatgatgcacttttagtgtgatattgtgtcttttttttcctaaaggagcatgcatgcattctatttttttatgacctgcaaaaacattttttttgtcaaataattagctaatgttgtcgcttgctgattgtttcgttgataaaattgtttcatgattttgcaggatcaaagatatcgaagaaaaaggctattgcaata

SEQ ID NO: 1466 - DNA, 4815 bp, Oryza sativa
  Intron number 1 from transcript LOC_Os09g16240.1 (locus LO C_Os09g16240) derived from phytozome v7.0 (chr-ID Chr9; po s 9911159 to 9915973 reverse strand)
taacgccttgcacgccgctgttcagaaaggcaaaggtaattaactgttctttttttttcttatttatcagtcattttttcaactctagatctatatttaataattattagtacttcttgcatccacaaacataagtgactttgaccctttcatatagtttccacaaacacctcacttgtgtccattgaatccatcaacatgtcactttctttttacttcattcctgttaaatatggcaaaagtacaacaagaatcacctcggttgtattatgtttcctagcttagtttttgctaaaattggcatataatcccttatatttgtggatggaggggtacttatgttcttgttgtgaaacaaaatgacggactaccttcctaggcagctatatcctaaacttgattaatagttatgaaaaaaataaggtcagaaggaataatcttcatatttaaaaatacttttattttcatcaataccaatacaaaactgaaaacataatatagatgaacaaaaagtgctttatagattattttagaaaataaaatagaagtaaaactaattgttgcagtaaatatctgtagtgaagttgcagattgtatatcgtgcaagtttaacgtatactccctccattccatgatagtgcacaaccacttttattagatattttataatataaggcatgtatgcaagcatgcaattaaaagcaaggctaataatacagccgacctgttagttataaggttctttataactttctctcagcctactcgtataatagttagctctttaaaattaatacagggcccacttgtctctctcacagcgtttcttagttttttgtttaagccggctgtaagtttacagctcgcttctcctttctctcctctcttctctcctacacgtcatcatttagtcggcttatagcctactattatacttgctctaactatggcatcttctccattaaattattacttttttaaatcctccactctcatgttatctaatccaataaggatgcatgcaatatacttattaggataatccaaactacaagacgataataattatttcttggtctttgggttaagggtggttgtgccatatattttggaatgaatggagtatatatatatatatatatatatatatatatatatatatatatatatatatatatatatatatatatatatatatgctgtgcaatttaagaaacaaaaacacaagatttagttaggtaaattaacctcaaaagtggatacgaaattgaataagagatttgacctagcttttgacagaaaacctggcccaaaaacatcaaaacgtacaattaattgggagaaatcagcgaagaactcacacggagaacaaagaaactaaccacttatggcggcactatcacaaggcatccttacggatcttaaaaaaaagtagcaatgactttgtttgaacaaacatcaacacgaactgtttaatagtttcacattggttataaaagggcaaggggcctaatatataagtgggagagcccctcaccttaatgcctagcttttgaggtgtgaaagatcctttacgattctataattggtatcaaagcctggctagttcagtatctctggctcgagggacatagtgtgtaaaggcctgatggaccgtgggtgcctgtagggcccgtatacctgaggagccgtgtggaaacggtgaaggggcggtgaagggctgagggataccaatgtgtaaagggagagattgttgaatagtcccacattagttgtggaagggcaagagatctaatataagtgggggagcccctcacctcaatggctagcttttgggtgggaaagatcctttatgatcctacacgaacaaccaaatcgaccaaagaaacattggtttgggtcttatagacggagcttccatggagaatagcgtccaagatgcgtataatgactatctgaacaatggaactagctaggttttcacctgaagaatagaggagagtgaaaacaatgatgccttcatgaaggataactgtgcccacgggcattgacatcatcggcattagtcaaagaccatgcaagactttcgttaggctcccactccctgccaactatgaagtcccaagccaccacagcactaccgagacaaaagcagaagagggttatcgttgctaagctttccacccaaacaagcagatccgactcctcctcaacatacaaactcatggacgtggtgagggagccttatgcaccacctctccaccaaaaccaaacgcctaactagttgtcataagaaccttcaaagcctaatggccactcattctccacaaagtaaaacccatccaatcgaaccaacatcttaccccttgtaatggaactccctgcgaccggagtctggaaatagatccgacaaaagagggggaggagctctaggcaacgagagaagaaccagccggtcggaggggatccctcaccgtcgaccagagaacaccatccacaccattgtccgctttccggcgaacaatctgcatcggcgcttacccctcttcagcagtctatcctgcttatttgggcactaaattcatcccaatgtctggtctctccatgcgtcaaccccactggcaacaactgcacttatactagctacctgcactgacaccaccttaccggccttcgtacctgcagctccacctttgacaccatctcggccacaacaacttcgctaaccagcggtatcgatgtcaatacacaccttgtccaccaccccttgccaaatctatttgaggggagggtgcatttggcctcgaagaggctgatctggctgcctctccacctctatccattgaatccaccttgatcgctgcctccggtcatcgcttccttcttcaccaccttcgtcccatctgccttcaactttcttcatggtcatgtggcagcggcgagacggaagaagggccggggagtgagaatggtggcgggcggtggctagggtttcccagtctgcctgtgtcatacatgtttggaacaacaccgacatatagtgttcctttgccagcattttggtaacaaagttataagggcctgtttggtagaccttcaactcctaaatttagctctaggagctgtgtctggagtagagttatggagctgcctagctaaacacagcttcacctctctagttcattttgtgaggagtaaagtccatcaccggtccctaaacttgtacccctgtgtcatcccagtccctaaactcgcaaatcgaccgtttaggtcctcaaacttgttcaactgtgtcatcatggtccctaaatttgcagatcactcatttaggtcctccaactttttcagttgtgtcaccccggtccctaaacttggatttaaatatcatctgggttaaatataacggtttaaagactttatatttaaaaataattcataacattttcatgtgaactgtaataaagacaaactttatatcaaacttgtagccctcgacccgatctacaactttgtaattgaatttttttattgtaagtcattttttgtcccaaaatgtaattttaaaattaaaatttcaaaatctataaacatgcaataatattttgggaccctaaatagttttaattcaaaaaattttcaactacaaagttgtaggtcgcgtcgagggctacaattttgatataaaatttgtcttcattagagttcacatgaaaaagttatgaattattttttgatataaagtttttagaccgtcctgtttagggaccggggtgacacaactgaacaagttggaggacctaaacgagtgatatgcaagtttagggactgagatgacacagtcgaacaactttgaggacctgaacggtcaatttgcgagtttagggaccgggatgacacagcggtacaagtttagggaccggtgatggactttactcttttgtgagagcgctacacccaactgcactcacattttaggtgaaactaaaactattgagtaatgctccggtgcaatctacttgcagtattctactccaagtagaattaatcttgaccgtttattttaaagggcaggtaagtaatctcctaatattgtttaggggtaattttggcatgggatgttttcttctgttcgcatcgtatcaggtccgaactccgttgcacgcagtcacctcgctattcctcccccggcctcgccgccttgtccgccccctccgtcgccatccgtattccccgccgtcgccgccttgtccgcttcctcagtcgcatcgtccgtctgggagcggacgagtgtggtggcgtccgagcgagcgacaatcttgagcaagagttctggcggtagtaaaaactccgacctgggcttcggcggtagcgtcacgcacgcacgcaatgtcatttgcttggcggcggcgtctcggctcattcgtcttcttgccgtttccgatcactgtgttgtttcatagattacatggatcgattaagatcttgcacgaccaactccgacgaggatgacatggtgatcgatctatggatcggaaaacaataataccccttcacgaattatttttcctggacaaaaacacccctccacatttctacttccactaattctggtaggagtagaactaaatcttaactctacaattaaatatgatagagggcctagattactttctactccgagtagaaagcaccggagtaggactcaaaactgtttagctgacttgactccagcttcaggagagagaagaggtgtagcttgagcagtgccaaacagacctgaagattaacaatatgttgttatatttccagaacgat

SEQ ID NO: 1467 - DNA, 5407 bp, Oryza sativa
  Intron number 3 from transcript LOC_Os08g12430.1 (locus LO C_Os08g12430) derived from phytozome v7.0 (chr-ID Chr8; po s 7340724 to 7346130 reverse strand)
tggtaataaaagtccctgttttcaggtatacgctgactgtagtgttttggggatatacgctacactaataatagagaacacatacaaattaatccctataagtgaactggaactactgtgttattagtgtgttggccagatttggatgactaaggtcaaatgctaaaaatcatttggaatctttcaaaaaaggaccatttggattactattccgtacatgctctcaggcccttccacgttctacttttctaatggcataagtaatgtatctgccttgatttgcaccaccaatatcagctaatactttagttcctgttccatctcctgaaaacaatggtccttcaatttcgcagtatcagtcctttcactgtatgctttcctacccaagcttctccttcatatatttaaaagaatgggtaaatatagaacagaataaagtggctacactatggatcagtccggtgaacaattattgtgacacagtttttttcccaataaactgggcatgtcttgtgaaacagagtgatctctgtctttatgatagacaaataactatgttggagtttgctagaactacttgtaaggaagatgccattaagtgaccacctgaaatcgtgttgtagtgtcattccataacatttatttaagatttctccaatggaagttgtatctaaatatgcctaatattttgcatatgtagtgtttgctctttggaattataaatcattctaggatgctgttccaatcagtttgggaagctcaggttttcatcaaagacgattagtaaaatttctgtcagtctgcaaaatttgtggtatggtaaaattcctttaaagtatagaaaatttaagctgacaaacaaaagttagggccattgtatattacatcaaaagattgtttcattctgttgctatcaatcttaaataacgatttcagggtgcaggatccaggttcccattgggccacgtggcactttacaaatttttgtaaggctactctgaaattgtgccacgtggcctcccctatgcatatttaaactgcattctcctgtccactgaactgttaggaaaactctggagtcaataaatcacctttgcctgacccttgtgaagaagttagagatgtaacccatccgaagtctctagaaaaattaaggtattacatggtccttcacgtgtattaagtataggcagtcaaaaaggtaaaattctctacacgcacaaactatttcagtactcacatagtcacatattgatttccaagaccttggatgctttaacttttcaagactggttttaacttttaatacaaagagtaatcttttatatatggctctgcgtattaagctgacaattagagtcatttgcctaaaaagttacgccttaaataaatttcgtaattttcctataggttgacaaattctgtaaatcatactaattcaaaagacacatcttccaaagtatttgttcaaggtatgtatatacgcttaaacaaattaatcttccattagcaaaatttgttttcaggttgaattataattatacaccagacaagtacagctagctaaatgcggcagagaagaattagccatgcataaactaattaaccatattactctatttgttgataatattgctctaattatgttccattgtacctatgattagcttatattatttttaagatgtggggggtatcgtatatgagactacagaggggactaggtgacactggtagattagcacaagaaatgtctcttagagagacttgtcaaaaactatatcctttagttttcagtccactaatcatctaatcttactaattattaataggtgttaatcactctgtctaatggaagagaaaaacaaaggtttgaaagtaaataggcaagtactacacataattttgctttctgtattaattcttttacaatgcttaaatctttacataaatacggttattattacaggttaatcgttcgtcaaccttttcaaaattcattaaataggttcttctaaatctacaagtgtatagattttttttaaagaaaagaaattatcaagtactgcatttgaaactttaaacaacaacaacaataattgttctaaataagtaaatatatcatagctataagttggtgtgccgatggtgcgccaattttctacgatatggaagcggcgaattgggaaaggatagggtggtgagattttatatttgtttctaatttttagggtattcagtgtaatgttggactactctataaatttgaaaaacatatggactaaagtaagaaatatgattgcccgacatgaaaaatcaaagctatctctagagttactttgcattatgggataaacaaatttgagacatgttacctcatcctacatgatactttgaggtcctttataggagggtcttgcactatgaatgtccaaagagaggtggtatagctatagttttccgaattatacatatggagctacgaattatgacatctaaatggtgtactacttgcaatagaagatatggaggcgtgtccctatccattcacatgtggctcttcaaatagcacgtgaactttgttgccctctcgtagtcatgacaatattttcgactactgagaagataagcaaatattgagaaaaaaaagagagagcgtggtagatatacaaatgataagatttttaaccatcaaaataatggatttaataatcctaaagtaaaagaaatagagagaatttaaaaggttataattaggccgaaagaaaataaaaatatgggaagaaggaaaagaacaaaatattttccatttctttcataaccagttaaaaaaacaatccaactgttagggcaattgtaagaaacctctaattattgaagtcccaaacgattttcatataaaacttcgccttttagccttatcttattaataataatcaaattgaccatcaaccaacatatatttgacatcattctttttttcctctgtaatttaaatatttacaaatataatgttttcataaaattgaaaaactgctaaaagatctctttaaaatgttacgcttttacgaataacaataaatagtacgtgtagtataaatatggtttgctatatggatggtgcgctaacggcgcaccaattttctagtgttatctaattgctgatcgatcctgatcgccaagggaccgatcaggtcaattcatcgtcgatcagccttgattcatcgtcgatcagccttgattaatcgacctgatcgatactatgtataccagaacctatattctatatagtgcacagtataaagcaatcacagtgcataattgatggcaggatggtcaattacttgccgtagtataaagcaatcattgtataaagcaaccagcagtagtagcacatcttcacatgtgctaaaccctaagacttgttctaaaaatgatcataggtgctctgatcagacgattaatcgcgcctgattgacgattaaccggacgatcagatttctgatcgaatgaatgtccctaatcggattcaggggattgatcaggacaattaattgcgattaatcggacgatcagataacactgattgctatagcaatagcagttgctttcctctctccagtctccaccataggttgtgtggagtccacccaagaatttctcttgttcccttgttcactctttctttttttcttcgtccgtgtttatctacttttgttgaatcgacagttgttcaaaatcttggatttgttggccagttggtagactcatggtttttaaggcagtaaggcgtcctaaggcgaccccggactgccttatcgccatagcggtaagacgtaaggcgaggcgacaccttaggcactccatactaattaggtggcaaacaaaataatctaatatgctagcaaatcaaagttgcattttaagagcagtacaacgcgcatatatataccttgttcttggcaactcttgagcccactagatggttataataattacttaacaagatatcaatttattaactactaacagggagtcagggatgcaggggaggggcagggagtaaaacagagcagtagaggaaggagtttagtagatgaaatgtagaggagagagaggaaagaccacaacatagtactctctccgtccctaaatatttgacgccgttgactttttgaaatatgtttgacagttagtcttattcaaaaaatttaagtaattattaattcttttcctatcattgattcattgttaaatatactactactactcaagtttttgaataatattcacaaaagtttttgaataagacgaatggtcaaacatgtttaaaaaagtcaacggcgtcaaatatttagggacaaagggagtggcaaaagagggagaagagtacataggatgtagaagaggggggaggaaacaccaaaacagagcagcagaggaaggataagagcagagcagaggaaggtgcaaagcaggatcacgtagagcagagaaagaaacagaggaaagtagagggtggagggaagagaaagaagagcatgcccgcttagtttttgtgtcaatggaggaccaggatgatggcgcaggtgccgaggaccaggatgatggcgcaggcacaggataggcacatgtgacagctgggattgccgctagggatggagaagtcaccagggatggatcgccatcgccacagcctcaggctccagcgaccctctttctgttgttttctccctgatttggtgggatttggtgcgtggggaccttttcacccctaagattggcgcttctgttagttctgtttcgtgcccagggccgcaccaatttttttgggcccttcaaccaatcgcggcaaaaactgcgccttcaacttcctctggcgtcgcctttaaccgttgtagcacctaaggacgtgatatcgacgtcatagcgacgccttgggcataaggcggacgccataaacaatatggtaaggcgggctagacgcagtgactcctggcactggcagcgccttacctccatagcgacgctatggcgacgccttgacacttaattttggattttttttaactgtagtacaaaatacaagttattataaaatcccaactaaattgattgagttaaattgggttttggttgacttacgaagttatggtcatccattggattgttgccaggtagtcagctgattgtgtatatgactcaactatacattttgtttgttggtatcagtatatgatactatcacttattgtgtcctttagatgtcaatctgcatttttactctgtccgttgcagcacacttacttttctttctttatttgtatatactcatctctattgaatccttgctagatggtatttgctataggcctggacctcattattctattttccaggatttttc

SEQ ID NO: 1468 - DNA, 1914 bp, Oryza sativa
  Intron number 2 from transcript LOC_Os02g20490.1 (locus LO C_Os02g20490) derived from phytozome v7.0 (chr-ID Chr2; po s 12086674 to 12088587)
cgctcaaccgccagaccatctccgacagcttctcggtcagctctcttccccctccacaatattttagtatttttcttgttgcaacaatatacatgttttttttacagcacattaaattgatttaggctgtttagggctcctttcaaactaaggtttctttgagaaattttttagaatatgaatatccttttaggaagatttgcctatgttctcctttggaacaaaggaccgaaccctttgaacttccattggaattgccaaattcatataagttttggaggaaatctagcatgagtaacagggatcttgaggctgtgctgtatgtgtccgattgtgtctgtgatgacaagtatctgtgttgctttgatttttgtcagacttcactttatcggttaatccttttgttgttccgacaaataaatgtataattgtatatacgccattgtttggaactagtttgccatgtctatgcgccattgaacctatgtgaatagctacaaataaattttatggagtcgtggacaatttaataaaggttgtgaactaaccacatggatgataattcaatatatcatagtggacaatgaatgctggtttacataaaccattaaggctgtgtttagttcccttcaaactttcaactttttcgtcacatcaaatgtttggacacatgcatggaacattaaatgtggacaaaaaaacacagcttgcatgtaaattgcaagacgaatcttatgagcctaattacgccatgatttgacaatgtggcgctacagtaaacatttgctaatgatggattaattaggcttaatagattcgtctcgtagtttacaggcagaatctgtaatttgttttttattagtctacgtttaatacttcaaatgtgtgtccgtatgcgtcaaatttttttgccaaaacaactaaacacggcacaagtgaagttgtgttagagctatgcagttttctggtcaaaggctgaaagtgtaagtgataaagacttcaacaaaaatagtttattgcaggccaagtttgccgatgaaacttgtgcggctatgttatctaggccgtgtttagttccaaaataattcttcgaacttccaacttttccatcacatcaaaacttttctacacacataaacttccaacttttccatcacatcattccaatttcaaccaaacttccaattttggtgtggtgaacaaaacacagccctaggtcgacacttcaattttcgtagcagctctgatgaagtgtggagtgtggaccataattcagtgtggtaacacttattttgtgggaataattctatattcttgtaaggattgcagattagttttgagcaatttgaacccctctaccttatgctgtttttgacatttttttggtttcaaatgaattttccaacttgaagtttgcttcatttgtattattacctgccattttcttgttatccttcgttaatggtctagtagaagttagcgctactgctatgcaatgctttgagtaattgtctgctgtaatcaccatccatttttttgtcgccaatgtgccttgaagtttacagcaaggaattgaatcccatttcaatattatttcacaaatggagaataaggcatggaaaatgcaaattattgttgtgttttaccaacacatacaaattcaacaatgatgcagggaacaaatactaagagagctgcaacaaaaattatttcttgttgtcctcccgtgggtcggttaacacatttatgcaccgtaaaatgtgctatttcgtgctaccaactttccatatacttacagaggaactgaatttcagtcttcgtcatattttttgtaactagcacaattcatctaatggaatcctccttttgttttctgcaggttcgtcaaataacaataacaataaggtacaactc

SEQ ID NO: 1469 - DNA, 1692 bp, Oryza sativa
  Intron number 1 from transcript LOC_Os08g06430.1 (locus LO C_Os08g06430) derived from phytozome v7.0 (chr-ID Chr8; po s 3612576 to 3614267)
caggtaaccccccacctcgccgccctacagcctttctccgggtgtgtcggatccctggtcctctcgcgagcctgataacctgcccggccgcccccgcgtgtagcgctccccgattcggtggggggggggggtggggggggggatctagtcttctttaggttcatgtggacgtgtgcgtttatggctctcgattttgcgtgcaatcgctgtgtaggcgtgtagctcgcgatgatcaattccattttccctatttaggtcagcctgggcgctttaattgatggacatagtcatgtatttgtttctgcaagttgtaagtgtttatgcccccccccccccccccccaatagcttttcttatgttttcttgtttagatctgaagaccatgttcaggtttgaaaggtgtattgcttgtacgagtgtatgtaaagcatgttgtaaatggattgcatggagtttaggctgtttaggaaggatggtttggtttttaggcactgggattctttgtcataataacattgcagacagataagggtctatgggttcattttcatatctctgtaagatgcataccctgcatgctctactgccttgattcctacagtggcaccatccctagattatgagaggagtcctgttaagttatttaacgatatctaattgcaggaaaacacatactactgattagtgacagcctactcaaatactccatgttaccttaagcatgccaacatagggtttaggtggttaatacatatcaacacagctcgtgactcaggagtggaaccgatgttttattagtgcagttgtcaatttttcatgcatcttattggatgttatcctcccctgaaggaaggtactgtttgctataggtttgcagactcaagtcactcgactgtccttaaattagttgcgctagcctcatctgtaatatgcatgcttattctctcgtatttaagagaaccgttatcttgatgaaatgtgcttgccttggtagatagtggcatgaccttattgggtagttctcacaagatgtgcatcatatgattttgtatcaaagtaacttatgttcagtcggaaaattacatatccccttcaattaattataatgtcactcacaggctcactgcctacattgttttgtcatgcttttagtgtatatattttcacccatttgctgagtaggctttagatggttggaatttacttgaacttctgcgtggataggctggtgtcttggtccatcccagcccatccagaaaaggcctaaatgatgaatatccatttgagttaggctttcagtaaaccaggagccagcaaaccaataataggtgatgagccaccagtttaattgagtaaagattattgttctgattgcactaggcaggatggtggtgcctagtcaaaccatacacaaacagtgaataggtgaatcattgccttttaaaacagtgttaaagacttatgttcgttgttgcactgagtaagaatctataaatcatctgcgacgcaagtgatccccatatcctcaaaatttttaggatttgtatatataccaggttcagaccatgataaagtttatgagttggttatgcaatatttgcaccttagcacttgttgaatcatgagctcattttctaaattatgttcattcatttactttattcattgcaggacacaagcaagaagtcccca

SEQ ID NO: 1470 - DNA, 2086 bp, Oryza sativa
  Intron number 1 from transcript LOC_Os12g03899.3 (locus LO C_Os12g03899) derived from phytozome v7.0 (chr-ID Chr12; p os 1610017 to 1612102 reverse strand)
atctgcctcaccgccggtatgtatggaacattccccccctttttgcaacctgtgacattcagggtgtgtttggatccttggctaaagattttctaaccagtcttggtttttggtacaagtaaaatatcctagctttcaggagcaagctagccttgatgggctagaaaaaccttgctcagcaggacagccgaattggctctctctctctctctctctctctctctctctctctctctctctcaacagcaacaagcgcatgcgtgaggggaaaaaaaaatctggcaactgtttctcattgtggggtaaaagcaaggaaaccaaatgtggtgcttgggcaagagcagcatagctgaaatgagctagtttgcacatttcagctatagctcaacctagctgaacatccaaacgtaccctcattatgcagaaagttcttgtttttttttttaactcatggttttctaggatttttctttttctagtgtagtacgaatgagttgactgaatatcgccaacaaagagaatcttggtaccacgtaggaacatgacagcatgtcaacattggggatcttggtacctgtaggaacatgtcttctttcttgcaaatgctacatgttactgcaatgtccatgtgcagttccatatgggtttggtcggtgttcagtcatgtcaatgattcctgttcctgtggggaaatcgctgattctctataatagtagattaacaggaccaagttagttaagccaattgcctcaacaagatttctataatagggggatgttgacatgttgttgctgtttttactacgcacttctccatatttgctttcagtgctgcttacaaccgttaattacaatgtgctgtgatgctccgactcatactacacacgacgaccgtttacaccggtcattacgttgtccatggtgttacagttgcaaactagtaatgccacgtcctggttcatgtgatgtgggttagctggggggtctattatgttaactagaaaatttattgtttgagggagatcactgtgcgaacaatattagatacgcaattaattcctgttatgtcatagtgccagtcatccaaaccttattgggcacataattaattcctgtaatctttcattgcaccaatagcaacttcattgataggatctccaatgatgggactgtaggtgatgctgattcagaccttgtagatctttaggttcttcgttgtgtttgtgatcttttttacctacctcggttgctgaaattttcacaacactacatggcatctatgtcaacagtcagcagaagcatacactgaaatgtcctactccgtgttagatacatagcattcagtctgcaatgcaatattgatatgcgaaaatgccttttaactgattttccttaatgatgtaatgttttttaacagatttttttatactgctccaaatcgtgataaaggtcatttatgtaaactgtaaacttggaactgatgcatgacttgtttcccacgtgtcctatataagcatatgtaattgtgcatatttttaggggtgaagttccatgtgctgttctggtgttctgcatgagctccttcatcatggttgcattgaacagtagtctttctcttttacaatagtggaacatgaaattaatttgtctacttgaacactgtgtcctatctgatgttgaggatactgagtgctatcttgtttccttgagagtattgcttaaaaaaatgtgagtggaacagtcaaaatctgagaagcatctagcacttcaaattttcttcatttcaagtgcaactagctctatatctagccataataccttcttttattatccctgttctcaccagcatcatgtagttgtttttagagaagttctcaagtagtcccctgatatcatcatctaagtaataatataataaatattgttatcaccatttgtatctacaaaagttttaaatgtatttatcgtaaccacatatcccatctattcttttttttacataaattttcagtgcatactcaagatttctaattctgtccctgtccttttcagctttaccaatatcatcattgttccccttcttgtac

SEQ ID NO: 1471 - DNA, 1869 bp, Oryza sativa
  Intron number 1 from transcript LOC_Os04g22380.1 (locus LO C_Os04g22380) derived from phytozome v7.0 (chr-ID Chr4; po s 12652744 to 12654612)
catcgacggctcgggcctcgtcgccctcatcaccggtaagcctcaactgtactctcatcccctgattcttggttgattgactcctctgaaacatggctttgctcgtagaatttctgtttttttggtttggtagctaagtaattcatcagcttgcaaagtggtccttaactaatcaatctattagtgtatttctccaagtgattcatctattagagcatgcaaagtggtccttaactaatcaatctattggagcatgctaactaattcatctattagtgaatatattgtgtattgctccaggtcgtccttaactaatcaatcgagccacttcctccgttccaaaataaatttatttctagcttgtgataattgctacttctattatcttacctgctcttgctctataaattaaagaaattccattcattcgatatttgttacctattgcgaggtgatcgtaccttaattaggttacttgtggtggaactagcccactcgggttcatgtcctaaacttgatatgcatgctcagatttacggctatctgttcttcagtggtaagcgacgtatccatcgataacgggattcccgtggtgacttcgtcaatctcaagatatgatgaccaagtctcccagagatgctcataaagatagtgtgtgagttttcaagggtaaatgtatgtgttgtaagcgccttcgtttataccgtgtttttttagaaaatatattatcttctgtttcaccaatatttattttctattaatcagagacacttggttttatttgctcttcatgcatgctgattttgggactgatacagtataaagaaatcttagccgttactttttatttcctttatctattaacaaatatattttcacatcctaatttaataaaatacataacaaaaggaaaacgttagtacccatagaatattttccaaaatttaaccatcagagaattttaatagtggttgcaaggaattctaatgcacagaatgaatgtgcaaaacaaatattatactttacaaaagagataaatgaatgacttaaaaatcgttgattccaaataggagacataaaattaaaatatgattcagattataaatactagaattttgatatccattcaaatggattttttttctagtcaatcttagcattaatattctagtgtcgaatttgaattatgcggatttgaaaattctcattcaagattttcacaattcgttttgaacttctaaaagtatctattttgaagatttaaagctatatatgtctttacataatcatcctaatttgaaaaaaaagcaaaaaaaatatttaaatcaaagtttcgttataaaccaaagctttgttgttcaaaatataatttgggcactgaaatttttctagagattgattatgaagatttaagagtatcgctttgcataatcatctgaattttgataaaaatcaaacaactattccggaactatatacaattaaaagtaatttattttaacttttgttataaaccgaaccttccatgttcaatttttccgctatggaaatttttattcaatttggaacatgatttttgtatttttatagtattagaaacctgaatgtcaaattagttaaggaaaatttggactacaataattgcctttggtagaatttaaatagtaaaaaaatatatgatattttaccatccatgatgtaaatgcaacattaatccctttggtcaatgggtgatggatgatgcacagtaatttaatgcgccataaaaaaaatcctaatcaaattgtattgcagacctgaattactgttggcatcattgctgatggatatgtttcttgcaggtgcctccagtgggattggggctgaaac

SEQ ID NO: 1472 - DNA, 1367 bp, Oryza sativa
  Intron number 14 from transcript LOC_Os07g28940.1 (locus L OC_Os07g28940) derived from phytozome v7.0 (chr-ID Chr7; p os 16979159 to 16980525)
aggatctacataactctttagaggctaaagcggcagtaagtcattttctgattactatcttggtttcctgtatggaagtaataaaacacattgattgctgttcactgattaaatgccagctgtgtcttttgtgagatatttatatttattcatctcgcttatatattttaaaattcatatctaatcactaacaagtaatggctcgtaacatgccatttgtgaagccgataccaatattacaaggaaattccattgatatcctccaatccaatcttctaccatatataaattaacatatgttcttttgatgccatgaccatctcctgacattctctgggaacacattatgtgcacagtacagtttccactctgcatcagttctgtcaaacaaatgtctaaatcctactctattcctttttaattttttggttgtagtttggggtagatttggtgagtgaagagatcagtagcaaaaaaggccgcaaaaatgagtttttgtgaaaagagaaagtcagcagtaaattttgtgcaagtgtgcaacttctgtgttattttcgccactaacaattatagtcaccccttctttctgtggtaccatgtcctgccactcgctacaatatgcaatgtcctgtgtccagtcacttgaagcttctgctggctgtttcctcacatagtcacatcctagagagcatactacaactcgcaactgctgcatgctgtcaatgaatgcatttgcaatcatcacatgcatgtttctttttgtctgtactgcatgaatgtgtaagtaaatgatgactgaataggaggaacattttatttttctggtgtatccttttgtgactaataacaactacaggctatgtgaggaaataagtaatattttactctttcctggggatatatcatttggagtggtacagctatgcagctagaagtagtcgagtatctgaaaacccatggcatgcaagtaactagcaatttgaatgatgaccaaaatacccagaatatacattcaccatggtgttggagaattgtttctttgacactttacattttcatactccctccctcccatagcataaggcgcacacacattttaagattcaacttttaaaacattttattttatttgctaaaaataatatcatcggattgacgttgaatttactttcgtatggttataatcttgttgctaaaaatcttatagtatatgagaaactataagtcaaagattagttttggagatcgtgtcgagtttgaccgtgccttatattatgggatagaggcagtaaatgataaatagtaagcaaaatttggttttgagatttcgttaataagattatttcacttgtcacaggttagcatca

SEQ ID NO: 1473 - DNA, 433 bp, Oryza sativa
  Intron number 3 from transcript LOC_Os06g30800.1 (locus LO C_Os06g30800) derived from phytozome v7.0 (chr-ID Chr6; po s 17865455 to 17865887 reverse strand)
ggatttttttgtggaaatcgaagagaaagagaaaggtatactcctcaattccaatctttttttaattttaatcggttgaatttgtagattggagggtaaccctagaactttttttttgcctaaatttatgattttcaacatccattcttgggatttgcttattatagtgatacatgtgtgcaatgtactcggtagtgccatgattttttgaactatatatgtggtaatgtggatttttaaatggttttgttggatggatggatggatagatggaggcattaaagaattattaatttgatggactagaggctttaggttaaatttttaggtatgaattatatgttcacttagatcttccgaaaaatgttcacttaagatcaagctcctcttgtacttatatgttcacttagatcattaccgcaacgtctctttg

SEQ ID NO: 1474 - DNA, 2074 bp, Oryza sativa
  Intron number 1 from transcript LOC_Os03g24960.1 (locus LO C_Os03g24960) derived from phytozome v7.0 (chr-ID Chr3; po s 14248118 to 14250191)
gcaggatcaccgtcgacttcctaggtaaacacacatcttaactcttaatatatataacgggatggctatttggcagtcgcatgttttttcttgggtctatcattcgttttttaagccgtcggatttctttgtgattcgtactggcttgtagttcattttgtagtatcggtgtgtgggcttatgagctttttatttgtgtctgggcttttgggctttttttttgtgtgtggtaattatgtgggacccacatcagaaatttttttcgacagcttgtgtgggacccatgggtactgttcgaattttgaaatccgcgcttgtcttttttgtgccgacggagagagagtgagtcagatagagggagagagagagagagatatatttctctcgttctcatcgtctcaggcgacgcggcggcgattccgtcgggcggagcggtggcgtttccgtcgggaggagcggtggcgattccgtccggtgattgtgcagtcctgttgcgcagtttgcgggaggtgaaggtggcagatttattttccattttttatcgatttcttcttctatttgttgctcttgtgttgattcatctcttcatttttctcttctcgtagtctttgttttgctggtggctacgacgtggctgtgaagttggagctgatttcggtgagtttccccttcgtttttctgatattcccttgtgttttaggtcgtcaattcgtggggcttgtagatctgagtttgtttcgactcggaatctatgcatgtgtttgatatggtgaatccccttgattcatattcgtttatgactcggtgatctctgtgttcttagccctatatattgtcttcttgtgcactagatctgcgcttttgcttttgtcttctatatgaaaattacagaacatgatgtggttgtagttgtgaactagatctgtgcttttgcttttgtgaactagttacgtgcttttttattttgttctagaactgtgttttttgcttttttctgaactagatgtgtgcaaataagggagtaatgtacatatgttcacctatctgtatgcactgattgtttttgtagtaatgcattcaggatgtttttattctagaaatctgcaaatgctatatgttaattcaatgacaaccttatatgagcagttaaatttgttattgatattatcagttgtttttttgcatgactaagatatgctggtttgtactaagtttcaagttttatgtctttattagaatggtatttatggttgttaatttttttttgtctctgatgcatgttccatgttcaggttcagtattcaaaatgagaagagtactgttatgtttatggttgtgatttgtgttcttagccctagatattgtttatgtggactagatgtgtgattcatttcattttagatatatctttttgtgattgcttttttgcatttgtgaactagatctgtgcttttgcttttgtgaactagatgtgtgcaatgtatatttgttgacccttctgtatacccttgatttgcatgttctgtgcactgattgattttgtagtaatgctttgatgtcagtttctaaatctatgcaagaaaatgctatatgctatttaggtggatgtttatgcactgattcaggatgttttttttttctagaaatccacaaatgctatatgccatttgcattttagtttggtatttttaatctttcaatgacaaccttacatgagtaaataacacaagttattgaagatttctgtactagaatgttttttatagtagtcaatttttgtctctgcattttgcatgcttaggtttagtattcagaaggagaagagtattgttaatacatttgttcagaaggagaagagtatagtattcctagtcatcactatactctgatatatgacatgagtttgtgctacacatttgacactactctatgaaaataattatttctactatatgaaagtaatattattttcgtatgacatggtgcatttaacttgtatgttttattctgttttgttatatattttagtccataatacttatgttttgagatctttttttctctccttgcagtc

SEQ ID NO: 1475 - DNA, 2514 bp, Oryza sativa
  Intron number 1 from transcript LOC_Os01g65080.1 (locus LO C_Os01g65080) derived from phytozome v7.0 (chr-ID Chr1; po s 37773016 to 37775529)
ttttgctgccctgtggagcctcaaattctactcgcgtaagtccatcttttttttttactgagtatattacacgcttcacacgaatttctcttttttttaaactaaacgaatttctcaatcttgttaatttcatccgtgctatactggaacaactgtaacaattttgggggcagagaattttggggggagggaatcaatcttgcaccagttggtctcctttagaatctggatatggttctttagattctttctgatgtttttgttagaggatggtgtgatggtgcctttctttttagtgtttgtttgatctggaggggcattagaggtggtgtttttgggttagatggggatcttgaagtgtgtgacgataatcatttgggggtagttttagatctgccggttttgtgtttgtgttcttggggttgattgtttccagattgttggtgtgcttatagggcctaggggtgagaattgagataagaagggaaggtgatatgctgaaattatgtttgatttatctctgatttgtactagaccatcaactttgctacagtactttatttgattaatagttaggctgtgaatccatgaaaatatgcatcatttggatttgtcaatattttttttgcatgtatgcttcaggttcttttgcatcttcagctccacatcaggagtgatccctgttacttggtgccaccactttctctgctaagtgattctttatttgtgataatttaaaattaaaatacaaaacactatttttttactacaagaaatatgtagatgcatgcacagaaaaacaatcacagttgcctagccatatgaactaaaattttagcatatcactacttataacaaaagtacgttggcacatatatatatatgaggaggcgtttccagtagaaattttgattgggtcatagatttgttgttagactcttttctttgagcgtcgtgaattggagtaggaatttacatatgttgtgattttctttggaattaaagtggattacttttaaagtttgattttaaagaataattttagatagacttttatatgtgttctaagaaattattaaaatagaactagacaaacaaagtggtaaagaaaacccttgaaataaatttagaattaagtcaacttcgattatatatattcgtagttcaaccagcattcatcatgcaataaagtaatgattttatttataccctgagtaagttttttttaaaataatttatcacccatataaaggaggcaattctcgctctcactaacatattgaactatttttgtcactaaatgtggactgggatagcaaattgtatccaacttaagaatgtcatattaccaaatgtcccagttataaaataataattatatttacacaccatgactttgtaaaataaaatactgtaccttttttttaagatgacttgtcattttcttttcatgcagccttattagattatgttgtactatcaaccaaaactaatgtcttgccttgtactgtttccacgttcatggctgatggcctcatgggccaatgaccttgggggttgctaaaagtcagaggagcctgatcccaatatctcatattcccagggacccctccgtaaatttgtgtttttgcccacgaagaaataggaaatcgtctcgccgttcgccaccacggtgactcgactagtatttcccctcgctcgccgtcgactcctccgctcgccgccgccgccgccctcgccgtcgccgtggcctccgccgatccgatcccaatccatcccggcgaccgcgagcagggcgcggggcttcgtcgttcgtcctgctgattccgccgcatcgcgtcgcggtatagcatccgatcctctttttctcatctttttccccccagtttgcgttagccctttggtcatttctctgcgtcatagacatggaggaagtttttttctctcttgatttgctttaaccttgatatattaataaaaagttttttttgttccacccaaaaagtttgggggattcaactgaatcccctcatgtcccatgttagatccgatccttctttgttagcaatagcatatatcaagctggttgaattagtggagagatgatgatgatgatgagctgagagttagttccgagttctgactagtcagcttggtttgttggttggttgttctacttgttgataggcttttctccctgtgtattaattatcttctcgcttgcttccagaaatatttttttattaaaaaggtttgggttttctactagagataggcttaaaaaatatgttttctttagttttttttcctcgctcttttgggctagaaatgtccatctatttatgggagtattcatggttaatttcatcctgtcagcgacatggaagaaaaccagaaaatcagcagtggcttctttccaactacgacctgtttaattgattggtctcgaactgttggttgttgctgcgttcagtttggtgttctaacaatctttatcatgcatcccaggttttc

SEQ ID NO: 1476 - DNA, 5171 bp, Oryza sativa
  Intron number 1 from transcript LOC_Os08g25799.1 (locus LO C_Os08g25799) derived from phytozome v7.0 (chr-ID Chr8; po s 15693084 to 15698254)
cgtcgacgccgtcgcccagctcggcgggcccgacagtgagctcctccctcctcttccctcctccgctttcatctcctcttcacctcacaccctgttttgtgcttgtgtttcctttggcttggctgtgcgccggattggcacacgattcatggcgattttggttttggggggggggggggggggagggtttgaaacttagtcgaccaggcgaggatggatttggttagaggttgatctgttgtagctagcagctcgattcgagcggaagaatgaatgcggcgggaattcaacttagagaatccgagcatttttttttcctcatgctgcttctttcacatgaatcgttgagttgaccccaagtttgccgccaaattaatcgctgagaatgtgcggctcgctttatgaccttctctatggcgccatttcttcacgcttctggtgctaccatctggtatcatatatactctcatctcattggtgtggaaatgggaacttctgtgcaacgaatttgttggtttgattcttgaaacgcgtaactgtcagttcagtcattggatagatagggcgtgtgttgatgtaaaggtaatcgaatctttgatgcaagtaagttcagttcggagcaatttggggattttattccctgaaaaggcactttaccagttgtgctttattacgttgttaggtagctttatgttgagattactctcttagggcatctacaatgtgagccactcctagagagtcctcactaactgagggcatccatggagtggctctggagaaccgtcctcacagtggaaggtacccctgcctagtagcttcaaaatctgaggaaatttgggggcactggttgaagagacgcagaccacagtgggtgtctcggaccaagtagccatgcgcacaaatgtcgtccgtgcccctccatggccgcccgtctgtttcgtgttgaagctttgtagcccatcaagcacgtacggttgtttgtctgttcaataagtcgcttcaatattgtttcaagcaaactaaatcagcacatacaatgattaatgattaacgattctatttaacgcaattctgagtaaatcaaacaaaagatgtggccttcagaagaagctcaccgatttcagattattgtttagtttcagcaggtcgtcggagacaacctccaaaagtgaagaaacagaaattcgctcagggatcattgttgttgtcgtcgcattagaaatcgcctctgctggcacatcaattgcagcaaggcctgcgcaaaaacgctaagtcgttagctcactccaaaacacagctgctcaacagaccaataagaacaagagctgcaggatgaagaacctggctggctcggtgaggccacgaaacaaacacatggcatgcaccgcctcggggccacccgcatgctagaccggccggcccaactgcaccggcaggaggccatctgaccgaaatccagcgccttcctgctcatgtacactctcgggcagctcacagacaacatctcccacaatcagtaccgccaatccaagaaaagaagctacagcaacttggagctccctagaacaggcaaattctttggacaccaagaacctcttccccggacaataacagtcaagaaattgaacgaatgctagcttgtgattggtttcgtgtgagaatcttgctcaatttggtggctatagattttttttcctctcttcctttttggctgggaaagaaaagccgagggaagtggcggctctggatggagggcgtgggggatttaaatatggagcatgcggaggaggagaaagcgggatttgtggaggcgcacaggggaggctacctcccgccgccgccgccgcggcatcgaggaaggaccagtccttctccactacgtccgcgacggcgatgccgtctgggagcgcggcaaccgggccggcgcgacgggagggcggtgagcgcgcaaggccatggatgggggagagggtggtgttcgccgggaaggtggagaggtagggggagaggggtggaagaggaaatcttcgctgggacggttgcctggagcaacctacccacgcaacgggtttccttggaccggtgcctgggcgaaaaggagctgggggtcgcgtcccccagcgaggcatcgcgtggtcttgcaagggaacggcttttttgcttttttgaacggaagcaaacggcgtcaggtgaggggactagctggagacacccattgctgatgaccttatggattgctcacttgtctgattctttttacagtttcacatggagtttttgtttaaggcttgagtttgctgttcccgatgcaggatgctccttgtagtggatcagcaggagttggtgcattttcttgttgcccttttgttatgcaagtctgccttgtttcgtttgaaagtggattccggtttgtttctggcagtgaacttattattgaagcttttgataagacaaatgtattgattctgatcttcatgcggttgatcaagaagtttgaagttgtagttcctgttactgtgttagtccaagttttcatatgctaattaagcgaagaaacttaatatggcatggtagtaattgaatttttggtgtaatctttggtaggtttcagagaaaaaagaatataggtcagtttctttttgcagttttcatgagttcagatacattataggaagctcggaaaaagtccattttacatcctcaaactcttatgcttgtctaaaatacacccccgaactccaaaaccggatataatatacccctcaactgtcaataccggacactttaccccctggagctgttttgccggtggtttttgcacacatggacgacactttggatggcacatcagcgcacaggatgttttgaccaactttttcacaagctgcagcggcagcggcgcggggaaggagcatgtccgacaagctgctgcggtcatcggcggaggaggtttgcgcgccagcggagatggctgagcagggaagcagctccgcgtggggaggaagccacagcaagcaggtggtatttgcggctgagtcggccgcggaacaagctttggcggcaccacgcacgctcgacgccttcacgcggccgttcaggcgcgccgccgcgagcgcggggtggaggttcaccatcgtggggactaggaaatatgtgttcccgagagacctaaccaggacgtcgtcgctggtcatgatgtgcgtgatcctagtcgccgggaggaaccgcgcgacatgctccaattgctcgttcgggacggtgaggatgacctcctctccgcggttcaccagcgatcgcagcagccgatggtccgtgccgctgctgaacacgcgcacatgcttggtctgcttagactgaacaatcttggcgaacactgacgatgagttctccggcgaagggatcgtgctggtgccaacaaaagtccatgctcatcattggagtagaaaattcagtgtaggatgggcaaacacaacagatgatttctgaattctgaatctctaattactggcaaagtgcaaaaagataaaagttcagttggttctttagtataattaagtatgttaatccatgcatattagtaatttcgtcagacacaacagggaggcctcctttcagccggtctcggccaccacctgagccggcggtgagaaccccagctgccaccgccgccccacgccttcttcattgcttcaaagacgcaagacgcgcctgcttcctcgctgtttcaaagaacaatgaacagggagagagaaagaacgaatgtataaaagagaacgcattatttcatccgacccggcgaaggaatgatgtggcatccgaagtgtcgtccacgtgtgcaaaaaccaccgcaaaacagctccagggggtaaagtgtccggtattgacagttgaggggtatattatatccggttttggagttcgggggcgtattttagacaagcataagagttcaagggcgtaaaatggacttttccctaggaagctcaaactttcttcaatattcatgagtttgagctgggaatgtcctatactgtgtctatgattgttagccttgataaccgattcttgcctgttagccttgactgttgatttcagtgaatctttctacagtattgcagttgtttgactgatttattttgttgtaagcatatgaatgcttctgtggccctgccttttagttagcttaagcattccctttttcccttatgagttactccctctgtcctaaattacaaggcctacatttttttttcacggtcttcaatagcatactttgaccattattttattccattctatgttctcgacaaatatgaaattagcatcacatgaaaggacttcaaaatatgaatatagtgatataacatgcataatagttagtatgattattagtcaaaagctaccgagtttgatttttcttaaaaagggggcaccctataatttgggacgaagggagtaggttgtaacatctgaaatgtgccttcaagctgtttggtctccaaaatcaaatattaattattttttacttattcattatacatctgtattttcacgtatcctcttttctggacctaagcccaatccatgcaagtctaatttgttggttacttagtttctaaccttctataatcatattttgatgtgctacttaattttttctatagaggccagtggttatttcctgtttgctgttcagttatcttttatccatcacaggctattatctttctcttgatcgtctcgggtcttctttttgttacgttttcagtatcctactttccttgttcccttctttctaacaacattggtaagagttttgaatgtatgttctagtttggggccaattgcaaatgaggttatgaggatgccttgtggtgtgctgcaggggcaaatgttcttctgttcttggtagaatacctgttggtatcctaggtgcttgaggtcttctgtttgtggtctgtttgatgctgttctttctgtttgcaacctctcttgcacactaaactgctggcatgctggcatgcgtgtagtgaaatgctcctttatgtgatgcttactgttataaatagtgtagccttgtagcttgacatttggctaatgacatgttacttactcattgctatactgattataatattaaccctgcagaagcaacacccaaaactatc

SEQ ID NO: 1477 - DNA, 472 bp, Oryza sativa
  Intron number 8 from transcript LOC_Os04g56850.2 (locus LO C_Os04g56850) derived from phytozome v7.0 (chr-ID Chr4; po s 33706258 to 33706729 reverse strand)
cgtctaaaagcaggggactctgtcttatttataaggtgaaataagttctataaatacatgcaaagtctgtttgttacttaacctgtgtgtgctatcagaaaattgaatctgagattgttaagccttttgatactaaaccctatgcaacaattcatgcattgaaataccacaagaactgcttatgttatttgctctttcgaaagaatgtccattaccagtattagattttcctacagcggctatctacttaaccttaaccaatatatacatattcaactttctagaatattaaaatctcaacaacaataacttttctatttcttgtcagttctaatgtgaatatgactgttataggacaccgcactttttactcgctcggactgacaacagcttgtatgtaatagtataatattttcttcacaaatatgtgaggatgaaatgccatttttgacagaagttcctgattgcaggg

SEQ ID NO: 1478 - DNA, 1069 bp, Oryza sativa
  Intron number 18 from transcript LOC_Os02g06500.1 (locus L OC_Os02g06500) derived from phytozome v7.0 (chr-ID Chr2; p os 3240681 to 3241749 reverse strand)
cttcgtcaacccacgaagacaattgagtgagacattaacctatcttcatgaaattgataccatgggtaccaatgttttcaatgcaaatcctacttaaaaactgcaaataaaaactagcatagtttcattgacataggaagttaacaaacaaggatggttgtgttcgatttttgatttggacatgcaaattctagatacaccatccttggtagaatagaactagcacacacctttagcataagagatttggcacagttaactactacctccgtttcatattataagtcgctttgactttttctagtcaaacttctttaggtttgaccaagtttatagaaaaaattagcaacatctacaacgccaaattagtttcatcagatgtaacagtgaatatattttgatactatgtgtgttatgtgttgaaaatgtcaaacgacttataatatgaaacggagggagtagtaaagaaagaggtgagagaaaataccacagtaggcaaatgtgtttggtggaggttgtctgaagttttagaaaaagagaatcatctcttcctaggtctcactctgtagaaattatctcattgacgaatatattaataagcaccatcatttttcacacaggacttggtgatgttacatagatgtagaggtttagatgctaaatctgggagtagccttaggccactacgttccagttcttaaccgcatcagaatagggatgggggtacgactttatggaaacatctaggggaaaagaccaagtatctggttgggtttgcgcatatagcagtcatctgtcgatctttggttgttaagaaaatgcagcaggatgtttatagaattccattgttgtcttcatatcttttttagtgggcttttaaccattcctttgcaatattatctatgtaccattatcttacctgcactttgttttgataggcattgattgtatgaaagtacccatgaaaagtagcacctagtataatgcgaacaattaacttcttctatatgtcttgttctttcttatattatcaggtgcataaaaggagagccggctattgaagaatact

SEQ ID NO: 1479 - DNA, 2389 bp, Oryza sativa
  Intron number 1 from transcript LOC_Os02g10100.1 (locus LO C_Os02g10100) derived from phytozome v7.0 (chr-ID Chr2; po s 5263853 to 5266241 reverse strand)
tgccggcgccgccgcgagaccgggacgcggttttggtaagcacgatccatttctttctcccccgaattccgacccgctcgtttggttgattggtttcgattcggtcgtgcggcctcgggtcacgtacatttacttctactacgagcaagcctaataatacagccgacttgttggttataaggttctgtgtagcattctctcagcctacccatataatagttagctccttacaattaatacagggctcacatgtctctctcgtagagtttcttggttcctgtgtctaagccggctgtaagtttatagcccgcttctcctctctctcctctcttttctcctccacctcaatatttaaccggcttatagtctactattatacttgctctactacgaccatagcagtacaagcgtgcagttttggagtttattaaactttaaagttggagtagttgtactactatccgaaacgtaattagtaagcgcaagtcaattctactatcggacaagtaattacgtttcggttagtagttttttaatatatctctcgtttaatgcgagtagcggcttataagacaaagacatgtgtacaagcggcgataaataactatagactatagagtatggaccttatatttctactagctaaataatcatgcttttatacggattaaaacaaattaaggtttttgggacaatttcattctagatgaaataagatagaatcatatgtagaaggattattttataacattaaagcatgtagagtaattggaagaaaacatgatggggtagtcggtaaataaaaaaaaacttggtgaggtggcaacattgctctcttttataaggagtatagattcttagcggcccaaaactaaagttaaaaatggaaaattacgaaaaccttaaattaattatatatctcatgggatttaaatttggttgctgcttataagccaacgagggtctaggaaccgataaaatttgtaaaaccaaagggcgataaataaatctcagggatacgaacacatatgcttcagccagtgcccggtggatagaaaggctatacataggaaagggaaaagagacttgcaaaaatactattgttctagtagaaagtttcatgttggtaattaatttaactttttttttgatcaaagggccttaaccctccatttccattaaaagaaatgtcacagtttacagcagaaaaaaaaaacagacttaatttaacatttgtctcagttcttcagcaattgaaagttgtttcgtctggagttgggataattttactagttttacaaaggattattctgtgggacttgaatatattaacttgcggttttgagtttgtgccgtgtgatgtcgattgaagtgtggattggtcctttctttcttgaatatgttgccatctgcttttgaaatgttggcactcttgacaaattgacaaagaaaatattaggcttgtttgctaatcatttcttattttcttgtagttgtatgtagtcgacggttccagaaaactgagtagctgacaggtgctgcctttttcttgttgcaggatttatttctcaaagactaccatttcagattactgaagttgggcgatctgcataactagcacggtgccacggtttttgagaagaagaacgagcaatggttcgacaggtacctggtttaagttctttctttcagctgtttgcctggacacttcattgcattgggtcgatgttctgggctgtcaagaactctgctgcctgaacaatgatgttttttttgtttatctagttagtttgcatgtgaaaatatcattagtttattcatatttatattgaatttttattagacatatttactgcatttctttagctttgctattacatttacttcatttgttgagcagatatgcataagctagattcttctatctaaaaatatgtataagctggacagcccccaaatacatagccttgagtagaaaacaatactatatctcaaaatataagattcatagtatcagctatgcctataccatacacatcaaattcactgtatcataaaaaacgagatttggagggagaggcgttcctccaacaattaaataagaaattgtgagcgtgttggggattgaacacgggattttggggttaaaaccacacatcccttgcgctgcattatcaagtgcatctcaaattcactgtatcatagtctacctgtaattgctgagcatttgcaaattagaaccttgaacataagtcaagtgttataattctttccttcagctgttggtattgttattgattttgttacctgaataacgatgcctttcattgtaactctccctttcctttttccagtatcacgtttgcttgttcactctacttctctgctt

SEQ ID NO: 1480 - DNA, 718 bp, Oryza sativa
  Intron number 1 from transcript LOC_Os03g24910.1 (locus LO C_Os03g24910) derived from phytozome v7.0 (chr-ID Chr3; po s 14190136 to 14190853 reverse strand)
agccaggtaaaaaggacaagaaattcttgtgccttgataaggtttccgtctcgccattgatgtaggttcgttccagtccggttcttggaccgcgggagctcagctcaagatttgggattgttactgagctcagttttagcaacccggttaattaagaggggttcggggattcttggtatttgtcccgattttgaggcttttattagtatatgtagctaaatttattagtatttgaggcttctctaagttgtagcacatcaggaagagatttatttatctgcattgtgttgctgctgaagcctttgtgaatttcccaatgtttcgactttcttggttcaagttaaatttctaagttttgcttggtgatttgctttgagggctgttgttcaagctgttcttgagggcaattgagattgcctatctgttaagtctgtagaaaattcagtcctttttttttttgttcctctctccttcatattgccttcagtttcagatgcaaagtagttatgctgcatgccactttactactagtcatcagcgtttgtgcaattaaacctgacatggcagcaatttttaatgcaaatatgtcctcacaaccattttatacaaccgttgtcgtaattgttgtattctgccttttatagctctgaatcacaatttcagttaacattaatgcgctgtaattttattcattaacaaaaggtgagctgctctagca

SEQ ID NO: 1481 - DNA, 4403 bp, Oryza sativa
  Intron number 1 from transcript LOC_Os05g07070.1 (locus LO C_Os05g07070) derived from phytozome v7.0 (chr-ID Chr5; po s 3720830 to 3725232 reverse strand)
acgagccgtctactggatcggccgcccacgaggaggtattgcccccgttcccctccgattcgctccccccaaattccccccgcgtaataatccaagggtttgtgttgatcgggtggggttttctcgccgggtagaccatttcctgcggttgattgttggtgcgtgacgggagcggagcgtgatcgggtatcggacgtggtcggattgatgggggaatttctgggattactcgtcgtcggcttaataatcgatgaggcgggtgtgatgtacagcggcgcgattggtcgattcaggtttcagagtgcttgagatcatgtgatttccgctgcgaaggaagttttcatctcctgtgactggaatcacgcgctaatccgtaccgaactctctctattggggcgtcctgttggtgtcaaacaagccgttcacagcgatcctgtctgttcataactattgtttgcctagttgcaattaactgtttatctttgtcagtctaatcttttggccataggttgttctcgccccctaatcagttgttggaacttatctttgtgctttagcttctatggatgagtcgtaggtgtgattgtttagtagtaaaattatttgagtttttgtcttgttcaaatcacgcatttaattggaaaatgttcctcaccaccactgagtctttcagttctatcaaggagtcagcatcttctggcccagccttttttgcgttgctacactttagttcgagagtctcatacatacttgagccaccaactatatacctttggagatttttcttattttccctcttaggcacaatattgacatagtaaaagtacatcataaatttaacttcaagagctaagctctactaattaaagtggtcctttattcttcttattgtccatgtaagaatagttcagtgagaagagttatttgacccgtgtaacttttaagtcagcaaacatttttgtttgactccttgtcctgtctattagcagcctagcatggcatctttagttgaactcttctacaagggactacactatctaatgtgttatcacagtttcttatgtaatagaaatgcaattcatgtcatttcttagcatctaaatgatcaacggatagaaaaaaaattatatgacgtgtataactcatgctatatctgaaccttcaagtgtaccttcttctcatgatgcttctcccaatggaaagcatccctttaacccttccatccatattggttcttaaatttccatgtcttccatcagacagagaacatataagttctacaacctcggtttatccttagaagcagaaatgttcaatatgtcaaaggtacaactccgtgtcctttgctttgaaattcaacatcacttgcacaacatgtcttctgcatcttcaggtactccttattaacatttcaagactatctatatagtattttattttattagaaatgccacgaaaccaccatttattatgcaaatgcaggctatagtgagattcggcttccacaataacccacgaccttgaaagctgttattaagatctattagagttggacacaatctttggaacatgattcagttatgttgtgtgtttgactccacatttgggacacgcgggaattaggttgggtaagcaattgccatttcttccaataatctgatggtcaggtattcaggttagtgaatggttccagacatattagttgcatatatataatgagtaaattggaagttatcacttttaatcatcttaatcctttgtgtcattctcacctttacaaaaggacatataccttctcattcttctcccttttctcaaactgttataaacttataatagtttcctttgttttctctagcccttatagtttgttgctgttctaactctaaaaatgaaaactaaaacaaggggaatttatatctttgggaatactacctagctttttatcatacaaatgttgtgtaatacctttaccagggtattataactgttaatactttgaactgagctactaatgacattgcaggtactaattgattcttccctgtaatggagagttttattttccttgatttaccaaaatcaagcttacattaaggtgtaacaaatgggtgttttgggctccataatcattttgttgatgctaaatgctgactactggtgcagcaaatggaagagctcttccagttgatatatgccatttgaggacatgtgctttgtcctcagtataagaacattggcctaacatcattgttggagttgcattgcccttagagtggggaaagcgacacctcttgcaagatagtaacagcaattatatcataaattacaagtcaggccttccaatgtggttttggatgaggcaattgatacattgtcatttgatgctgaattttttgttcgtctgacgactggaaagggggcacctacgacgattagcttagtacttagtgatggtgtatgaagagcattgatagtctcatggcccattgctaacatgtagagaaggattttgagttccttggaagtattgactggaggagtgtgaactacttcgcaaatagatgggtgtaaaatctgggaaagaaaacttaaagagctaaatgttttctaccatattagttgatctgaaggtgctttccaagtcaaaatcagcttagcatatagaattgacttggtgatggcggtacctggacccttgaagcagcagttcagaactgattgcactgagtattttctctggagatatccatttgatggaggtggaaggaaagagaggctagtcaatagtaggtcaactgatggtgtttgaaacaagatgcacttactcataagcagaataaacaagcacaacaatgccatgaagggaaccttagcaatgccgtacatctggcatcatttaaaacggggcttgttccactgttatactatgaccatccgccttgatggttttgcctggctattctgaagctattagttagcgttacaccttttaagttttacacatccagtgttgttcttttgtttttctaatattatgtacagatatctctcccacatgtcatagctcaatatgacaagggctttatccttttccatgtaaatatttgagattcagtcagattcttatacttgctacttgctagaatgtgaatgataactgtactgttggaagagtgttgtcatacatacaaattagttataaatttgtttctacttttgctacttgtattgtcattgttacataagattgcaatgcatttgatgttccttgatgttctgatgttgtcttgttatcggccatactataattggggaaaaaaagaaatataaagctattttagtatccacaaacacatttttatgttttttgtgaaacatggtattcatatgctgttgtaacatgtatgccaatattatgttggtttgtcctttggagaaaagatgaatgtagtcttgatatttggacctattttgtctcaaatcatgcctgaagatgtaaatataaccatattaataggtgaatagtgttgaaatgttgtatgtttttgagcttgaagtcaaaacatattaaaacaaccagaatgcttcttagaatctacacatgcagcacaaccaatgttttgagctatcacttttactgagactgctgcaatctatcaactctgccttttcttgattatatcttttcccccatgaaatataaccaacatcatgtatgaaaaggtgcaaataattttatgtgtacaacacaaacatggatttgggcacaatatatttttggtactgtttagactttaagttgtcatggggaaatgtaatcggtgtcatagttatcctgcaaagtagtcatgaaattttggtggatttcgaattgttcaacagctgcacctttatcaaagccatgtctttatgcattggttcttaaattaagtgtcgaactgttgcttcctgcaacagattggtatgcaattccatttctggtttatatctggaactgctattctgcggccaaaacagcctttgttttggcttattttttgtctgaatacaatgctcagatttccttcgaagtgttcctggatatgtatgacaggaactttcatatgtgtagaatgctttgtgttaaattaagtaagacactggacatgatgaatcatttggcccatggcatctcagatctgtgtgactcaggtctcaaatataacgcttctaaggttgaaatgctttgttcctgaagtttatgaatttgtgattatgcatatattatcttgcccttctttttctagtttaaaacttcatgtttacagtccatttgcagctgcaatagatttgctggaaaactaatagagcaacttgttttcccagattaagccaagtttgatcagattgttcacgtgtta

SEQ ID NO: 1482 - DNA, 1493 bp, Oryza sativa
  Intron number 8 from transcript LOC_Os01g43050.1 (locus LO C_Os01g43050) derived from phytozome v7.0 (chr-ID Chr1; po s 24560904 to 24562396)
tggcccaaggtactcatttcccttctaatttcagaatattaccttgtaatacttgcaacattttgtcttcatactgcacagccacggcaacaaacttttgcatataatttagagttttagacttgattaaaaaatcttgaagttgcgatggtcgactcagaatggtgcctttttttttcgacatctatcccaatgactttttatgcaattttcaatctttaatctctcttcctctcagtattatcctgtggaatcgttttctgttgtaaccgtgaaatcattcctatcataaatgcaaaagttgctcgatagttgcctgttctgttggaattctttcttgtgactgtagcagtggacattgctatgttgtactgcttaaagaaatggatggtagtgcatattctgcaaatcagctatttattttgtaattgctgagatatttaaagataaagaatgataacacgttgctgttattttgttggcgtgttgacatattagtgccatggaatgatgctcttctggaaataatatgtagaatgatattagtagtttatagtcaaacttccttcttccacttgtttatttatttatttgcatatgctttctgaaaatgaatgccattggactaaaaaagtattatttgctgcatgggattggaagattatttctagctagtatatggaccatgacaattcatcccctcttagaagcatcatcatctagaagaatcagcttcattattttgttgttataataattttgtaccatactacaaacaaatcctgcatttataccagttcattcagaattcagatttggtttgttcaatgtaatgcatttatgtcttcagcaatatgttttggaacctaagtttgttagcactatgcttaccgttcttactagttgcatgaatttgaaaatgtttgccttatataaccatggcctttagtttcttaccatgaaaattgcgtagcacctggtatttgccactgtttgatgaacaccccacaattcattgtgtggcatttacaactgcagaagctgtcttgctctgcaaagtccccccttagcattactttgcagactctaaattacaaacatttgaaaacttaggaaatagacataaaccgtcagccataacattttattacaagctaataaagtctctgttattcctatatactcttgctttcatctcttatcgacaaactcaatcatggtattcaagacattaaaataggatatgcttttgtcaagcactagtatcttacttcttttggaaacttgttatgttgtaatatcagaggggactttgcaaggaataccttatggggacaaatggcacaaaataagttgtttttctttctttttttcatgccataacaactgagaattctattttccaatttctagtttcttcttcttttgttgaggtttaaagcacatttttcttcacagataatccgatccatacactggaaacacccccagaa

SEQ ID NO: 1483 - DNA, 1745 bp, Oryza sativa
  Intron number 1 from transcript LOC_Os11g41570.1 (locus LO C_Os11g41570) derived from phytozome v7.0 (chr-ID Chr11; p os 24471269 to 24473013 reverse strand)
cgtcaagggtacagcgtgttctggaaaggagcactgtacgtgcattctggaggtcattttgttacaaggtccctctgttttatattataagtcgttttggtttttttttctaactatttttttaagagtaaatctcacaaaattacatgttttatggttcaagttgcataaaacaacacatattttgacacttggcacttaagtacatatattttggtagtttagtttcacaaaaccacactatcgatgaatggattcacccgtaagatgacgtggttgttccatctaggatgatgacgttgcatcctattaatttcgtgtgatggctggtaatagaatgccatgtcctcgtcctaggtgaaacaaccacgtcatctcgtgggtgaatccattcattgatagtgtggttttgtgaaactatactaccaaaatatatgtactcaagtgccaagtgtcaaagtgtgtgtggttttcttcaacttagaccacaaaatgtgtagttttgtgaaatttactctttttttaaagtatgatcaagtttataaaatactttaatagcagttataacaccaaattagtttcattacaatcagcatttaatatatgtttgttttgtgtccaaaattttgctatatttttatataaattttggcaaaattgaaagaagtttgattggacaacaacttataatatgacacggagggagtaaggcaagtaagcatcaccagcctatgattcatacatatataaagggtattttgattgaattcccaaaataggatattgatttcttcctcttgttcttgatgatactataatatcatggcgaacgtatatcttcgcttactaatccgaattattctgaagaatagaaggatagacaaaatcccaatgaccatcggacatgattaaatctgacattgaataatcgagaatttccttgtgtttttttatcaaaagtatccaacaatctatgcttacctcattatcagccaatagggatggcaattttgcccattggtctagctatccgcggatatccgaccagatacatatgtattagctaatttcgactcatctctcttaaggcttatacccctttatcttggttcatttgtgatgctaacggataataagttgtgatgtaattcaaattattgttaataactaataatttagtaaattattgattttatttctctttgttaaattaacctctttcgagttattattcatgtgagattcattgggtacccgccagccacgcatacccgtgcccgctaaccctactgggtagctagggttcgggcgggcgacgtcgggcgttgggtcgggcatggttttgctctacccgtgcccgacctgacccattgccatcccaatgagccaattaatacatgctttggttaaattgtcaaccttattatcagctaattatacatgttggctaaattgtcaatgactagctagtacacctacaaagcctagttcatgtataataaaataagtattgttcatgaagtttgagttaacactaatgcaatggtaaagaaactgaattagcagtaggtataagcagtaattatgttcagatctgtagataagtttggtttgttacaatcctttttcaaacacttattattatgtgccttatgttgaccagataaatatttttgaagttgtaatgtatcatatgcattatttatatatgcaatactcactcctctttttttttcaggttttca

SEQ ID NO: 1484 - DNA, 2136 bp, Oryza sativa
  Intron number 1 from transcript LOC_Os01g57890.1 (locus LO C_Os01g57890) derived from phytozome v7.0 (chr-ID Chr1; po s 33471001 to 33473136)
acggttttgctggtgacgggacggcaacactaccggtattttctcccaaaatttcatagttcttctcttgagaattttgtgcttgtgttccgaaagaattgggatagaagaatgatttttcacaaaatgtgagcacataagggcatacttctgttctgtaaataagtttttttttggtgagcgtcatgtttccttggtccattatctttgcatataccgagctgaatcttgaagatttgctggcatgcatggttctttgatttctagtgttatatttggtatgctcttgaaatagtttggcaagatttctgtttatatgttctctctctctatatttttttttgaaaggattagatgctcctttctaactctcgtttctcatttttactgtgtttcactaactacggctatgcctgtctattgcaacgggatctgcgggaacacaaacaaacggttttatggggttcagtataagtgttttattttgttggtgaaaagtactggttttgggtagggtggtttttttgggtataatttctttaggtgtggaagtacgatggtggagtaggatttcgttttaacaatagtagagatctcaaaatagcatatgcatgtgtttttatgttttttttacatgttatgattgaaaagaaaaggggacacatgcacaaaattcctttgaaaaccacattgagcggtaccttttcatgatccttgtgggaaaaaaaaaacaaatcctttgttgaaatcttctgtgagggcatttggtgtatgacatgtatgccacatacatgcaatgtttaacatatgtcccctgtgtttactgtggaccagtataatgaaatgctatttttaacacaatccttcgattctttctcatgtaggtaaggcgattcctacttttttgtcatgttcccttctttttcttaatttatacattccaaacaagctctaaaagacaaaagagtagtaaaggtttaaaactaactccagaccataataatccatagacacttgtacagctataatttcttcttttcttttctgtacatcctgttgtcaatcctgcctttcttcttttttacccgtaaagtttcgatacctctggactgtctaaaaaataatccttagacaagttgttttagttgtttaattaccctggcctgcttattttgatgtttaggatcactaaagccatcttttctagaagggttctattaatattaaagtccgaagggatcgcggcaacgattccccagctctgttccgccatgggggatgaatgggagacttggatagctgcaggtcttgttagccccatgtgtcactctgtagcaactcattctgtgagattttagctttctttttatgtctgtaatggtggtgcattgacgcaccgcgctaccttgtacattccctttcttactcttaatatacattggccggctattcgccggcccggcgaaaaaatattaaagtctcgtgaggtatatcataaatgagatcataaacaaggtaagtggttggtaaaaggtaattagtgagatctatagtttctgttcggtttaggattttaagttgactttttgacttgtacatttttttttgaccggaaatactgccggggctttgcccagcagtgtacacttttgttaatcggtggcttttaagtcttaagtttaaatataatatcctaactctaacttacgtaactaaaaaatctacttaaatttagcatttgacttaataatgtgtgcctataaaaaggatatttgtttgtttagatatgggccaaaacaaaggggccttaatagtacgtatacaatttcaatccagatgcctttattaaatatactagtcattggttttccttttttactgtacctaaacttatgtactaagtcagagaggaaggattagaaaaggcagtgtataaccaacgaacaaaggtgaatgttatttttggcatgttatagatgccttgtacattatcagtttctgatggcttttaaattatttgtttttttttttcagttcaatgtgccggagtattatgttttagctctctgactgactataatttgtagaatgaattgtgaatctagcactgagagtatcttgtttcttttaatcaga

SEQ ID NO: 1485 - DNA, 2111 bp, Oryza sativa
  Intron number 17 from transcript LOC_Os08g22864.1 (locus L OC_Os08g22864) derived from phytozome v7.0 (chr-ID Chr8; p os 13742488 to 13744598 reverse strand)
gaggtatgctaaattgccaattcactttctgtattttgaggatttattttgatgcaacctttctttttgtacatcaacaattttgttgtttgaaatgattatgattaatgtgctgggaattttatcgagatagagtaatactccctccatctatttttgataggcatatttcaatccaacaacctatcatcttaatgactttctcggatttaatgcgtgactcttcattcttccacacaagattggctacatgggcattgagaaatgtaaatattaatgaattgcttgtttacgatgaataattagtagcatatttaaatggatgataagtagaattacttattcttggtctgtgtgcaaagataaaatatgactatcaaaagtagatggagggaataagtcccatcctcatatcagctcacatctgtttcctgttacaaaaggtgtagccctttctagttacaaagttgtagttcttatctaatgcaccataaaacagtaaatggttcaatgaaaaaaacctcaatgataggaatgttgtcaagcacaaatactatcagaaaatatccatccaatatccatccttgatgaatattttcatcaaacttctctccaatagacaacatgctggtttcatatggtgccattcctccttttgcagctaagtcaaaacccaaatccagtgggtgcacctaaagactacctgcataggagaattaacatttgcattctcaaaaaccacatcattacgacttcttcatatagatcgacatatagcacttgccagttgccccaaccaaaattagattctttagatttttttttaaaaaaaatcggtggtgattttccaaaagctatttgaatcatgcaccctatgaacctaacacagatacaatttaaaatagaagattctgtacagtttaattagaataaaaaacaacatttagaactacatcttcatttttgtttttactaaaaatatctttggctagaattactctggtttggaaccataagaaacttttatgtctaagggagtttgaatttttccaaatgtagcagttactcggtatgacaccattatttttcaatgctctattatatgtatttgactgagaagtgtccacattgatgtaaaggtcatcgcatattatctttttgatcgttgagctgtaatgtgctggaaactatctgtcatgttggtgcgtttctctgtgcattgtacattggcttctctgataggtcatacattgtgtgcctatgtactttagacaaataaataccagaatggaccttttgtttggagatagcacatgaagctattccgatattcagggttacaagttcaaaaaatgggaagtctctaaccaatctcctagctagaaccattgaaactgctatttgcatcgtagcactcttctcttctgaaagtagtaggctgatacaacacattttgtagttttgttgcagcaggtgaacttctgtgttttgcttccatgtttgtaattagataataaatgagcatataaaggctggttggcaccgtgtctatagttagataattcaatagtaaaataagagaacattggtggactaaacatttgaaccttccctgtttgaactttgaagcactacaaccatggaacaaccctatgttaagttctgtactacatcattgttataacttaacctatcttccttgtggttattatggtttaaccattttggaacttcatgtgaaaacaattattctagattttatagtagttttgtgaaacttgtgaataggtctaatggtaaatgttagttttttttgttccgaataataatgtaaaacaaatttgtatatgttgcaatacctaagcatcagtacacagtattgtatgtaagaggcggcgcgatccgatgtactagtggcaccctcctgcctaggccttctagccacctacctctgcctaggctcacctaatcattgatttggcttacgacaaatcttaaaagtgggtagttcatactctattttcttccttgatgtatgtagcttcatgatccttttatgttgtgtaaaaattgcaggctgtccttgaaaaacaaagttatattctcctctc

SEQ ID NO: 1486 - DNA, 5148 bp, Oryza sativa
  Intron number 3 from transcript LOC_Os02g45054.1 (locus LO C_Os02g45054) derived from phytozome v7.0 (chr-ID Chr2; po s 27312881 to 27318028)
gagtaccgctgcgactgcggcaccctcttctcccggtaagcccacactctacccatctctctactacgtatatatgtatggtgtttttcgcagcttgatttctccatctgcatgagacgttgcatgtgtgtgcgtgctagctagcgaagaatgtttagtagtgtgcgcacaaaaatggcagcatgcacgttcggccggggttagggttttgtctgggtggtatagtgtagtactttaactaatctgttcacgagggttaatggctagtgggaggagaagaattatcgatgtcgtacacacgtgtacgtaccgcgtggtctgcaggatgcatatgcatatgtatgggcgaagagcattagggctactgctcgcacgtgatcttgccattgtcttgctgatgcaaatgtttccaagcgttcttgtgctggcatgcatcgtcgtcaagcctggctgaaaaggcctcccgtctcttcctcatgctatatatattacaagtcacacaaataaacgcgatatgtttatatatgtgtgcgcgtgtgttatactgattcatggccccaattcgggatcgatatgcccggaacgtcgacagctagctagcacattcttaattcgttgggctgtctgtctattcatcagacaactgaattttgaaatatctaagcggtcagaattattccaagatccgtgcaataactatatatatatatatatatacatatgtaagagcatgaccaacagttctctaaatgttaataattaaatatacactgtaagacactctcctacagttttttccttaaaaaaagacaatgctcctaaataaaatccaaccataaaaagatgggtttttctatgaaaattaggatccaacaattcccatgtagagatgataaaaaaaatttagcatccccaactccgtttttatcgttctccacatctagggaatggcacacccaaaaaactgatcatgcgtgggatgagagctatcgagatagcggcatggaaggtgggcgagggagatcgcccatgaggagagaagggcccctttttattttaggaaattaagtttagactatctgttatagagatcaaggtatattttatatccttaaattcttattagagatttcaaataagatatttattagaggagaatattggacatttgttggggatgcaataaaccacttcgatgcccggaatcctgatccatctctcgcctccgctagctcttcgatcgatctccaccttattggaaggcgccagaaattccagctagttgtcctctccatatcaaatcctccatccacaccatagcgttattattggggtatatatagcttcatctatgatatacagctcatgcagctgaagttcggatgtcgctggtgccaagagggcttaccaatgaagtcactagtgatgttcttagtgagtcatcctgttgcctccctctcttcctcgcacctctctcggtcggctagaggtagaagatgcttgccacttgtcgaatcgtcggatcaagatcttcatagatcaattggccaagatttaagaaacaaaatcccagtggactagtaaatagaaaaattgtcgtccatatatataaaaatataattaaacaagcttatatgtgtggcactacacgtctgcactatatttttattttaatgaatcagcgagccgtcaattttattgaatatagaaggagtaaattgtacaaaagaaatgagctgtacacgtctgcattatacacccccatatgatcgtaattggctaatctgttttgagctgccatatagaagagtatggatatatatagtctttcgctgtgtatatccacccgtggattgagccgactttctatttatatctaaaaataatataatgcaaactataacttatatcatgcagaatatgatatgtgaatgtgtgtgagctggccggctagatagatgtgcggtgcagggcctttcgttggccttacgtgtcagaagagcctgtggttcacgcttcacacggcttagatttccctcggatacatgcatactccgatccaggcccttacatctgatctcacgagtcacatgggtgcaacttcgcttgctagcagcagtgtcacgcatactgcagactctctctctctctctctctctctctctctctctctctctctctctctctctctctccagaatagcagcaagtgttcacccctatctttcacaactcgagcattttcctctctggcttcatggcatgacctctgcatgcagagttcttagcatcaataattttgatgcaatgggggcctagccctatatatatgtgtaggcttttgtagttttgcatgtgttttttcatccatatatattcttgttggatcaccctttggttccttggaaaatgagctttttacaaagtcttctcatgtctccgggcgagttggcgtgtgcgtgtgctactgctctctaccatggcgatgtccaatatgtctactactagtactagctagtagtagaatttcttttcccagccctttctccttggaagcttcttgcaccatatatattaattaagaacctatatatatcggtgacgccatgctatatcaatctgcctactcttttcctcgttttcatccctgattgacatgagtttctgggatctcgagcttcaattgagtgtgatagaagtcaagtgatgaaacgaacaggttttagtcaaccccacacttgaaaacatgtagaatcactggtagatttagattttttttctaaaaaaaagatttataattttttaaagtacatgcaaacacaagtacgaacaattatatatcaatgttattgaacacttcaaatacaagacattataaaaatgtgattcattgacaaccctgggtggcctaggagctacccggggtcgctaggcatttatctgcaccttggtagaagttgtacatattttgagcctttaaaggtcattctaaaataagaaggtcattgccctccttttgcgtgtcgcttacataatcaataaaacattaataacgtatattgggttgtcatatagttaccctacaaatatgtatgttcaaacttaatttgaacaagtgggaaaaaatataactgcgggaaatacacacacacactactttaatttcatagttaattaggtttgttttttctttgatgtaaatgaatttggtcgtggatgtctgtacagtaatacatgcatgtgacggcataatctatatggccaaatcttgttagcttataactatttagatttcatacatgaaacgagggcgcgcacgacacacattcttgatttaatatagcttaaaatacttctcccaagattttttttttcggaatactaacagtaggagttgttacacgcaatagataaaattcacttacttgtagaagaaagaattaaagatatttcaacgatagtatatcacacagttctactgtttagacgaccattatttctcgtacccacctcaagtcatacgcacagtgtacacacattcatgcatccttgccaattactgtactagctagtactccagcttgtaactttttccgtacaaatatatggtcgtcctgtgtatggaacttggaatcttatcggttcaaggcaagaatggaacgtacgtactacgtctcctaaaagatgcaaatatataattcttgaatacacattgcatctaattattatagtgcttttttgcatggatttctgtactgttgtgcttaacatgcaattgattagagaaaaataatcattttctcgggagtggattttaaactctcgagaggatatcccctcgttatttgcatgcaattcaaatagttacgaaaaaaatctaaataaaatatgagaagatgtattaatatgtgatatatcgctccacaaacatgcaagttaaaattcaacttttacatgtcgtaacgaaaaaaaataaatttaaccatgaatatgcattaactagctataatttaattttttttcgttgtgagatatagaagtcgaatttgagcttcatgtttgtggagtgatatatcccatattaatatatcttttcatttttttaaaaaaaacaactagactatttgagtgacatgcaaacaattatgggacatccttctaagagtttagaataaaaatactattttctcaactctctttgagagtttgaggagagggggattgagaagattgggaagatacacaaaacgaggtgagctattagcgcatgattaattgagtattaactattttaaattttaaaaatggattaatatgattttttaaagcaactttcctataaaaaatttttacaaaaaatacaccgtctagtagtttgggaagcgtgcacgcggaatacgatgtccttttctcacccaatcccccagaactcatcacaaagaacgcagccttagttgttagtatcgatatgatcaatgccttctttccaatatatagtaaactagtcgatacaccgctttttgctgcggaatatgtcgatgaatgcatgttatatatcatagaaatggtaatgtatatgtttaaataatgtaaaaataatgtggagatattgatttgacattgtttgcatattgagttctaaaaatacaacaaaattgtataagtcttttgtttttttctagtcaacttatttaattttgaccaagtttatagaaaaatataatagtatttaaaaaataaacatattattagaatatatcaaatgttagatttaataaaattaatttgatattttagatgtcgctaaatttttctatacatttaaaagaaattgacgagggaaaaaaaatcaaataacttaccgtataaaatagagagagtactactacatttgcacggatgacacagcaaaaattttgcatctagctgtctagctgatgagcaccacttcacgtgatttctgtatcagtacccgatactgtagtgacatgcactgtccttcgagttatcttcacttttgcgtcgtacaatttcacgtgcaaacttgtgccgcacggacagtgatcagtttgatggtacatcgcatgtgtccgtcgtcgtccatgcaaatgcaggagggacagcttcatcacccaccgcgccttctgcg

SEQ ID NO: 1487 - DNA, 752 bp, Oryza sativa
  Intron number 1 from transcript LOC_Os08g43170.1 (locus LO C_Os08g43170) derived from phytozome v7.0 (chr-ID Chr8; po s 27299763 to 27300514)
tggacatctacttccctcccgcctgcgtccaccaggtgagctttctctctcgcacgagttttgttttttttaaaaaaatcttaaaaaaaaaacaaaatctccgttcgattcgttgtttttttcctctcctgctgcgatgtgatgcgatgctggcgtggcgagcttggctgatccgaggaggcttgtggagatcatggatggtttgtttgttttttcttttttttttcaaatcaaaatttgacaattgtttgttttggggggaaattaccgcggcgggggtttatgggtgatgggtgaaaacctggatttggaggagatggctgagatcgtcaggagtgggattgtcgtaaacgtttcaaccttcgtttcccaatgctttcactttcctagatttgtggatcattagcgcggcggttttttccccatagagtgtgtgaaatcagctctcaactgcattatacctggtgcctggtattcagaaagcgaacagagcatggcatttggtgttgcattagggaagagtccgatgagtttatctactaacaatgcatggataattgtatcaacggataataataatattgtaatattctgcgttggttctagattttatcaatgaatgataatatgctatttatgctgtgttggttctagttttttagagcagattacccttgacagaattttgttacacttagagttgaatgttcatgtgtttaacaaattgctgcaggaagcgctggaagcgcacg

SEQ ID NO: 1488 - DNA, 4043 bp, Oryza sativa
  Intron number 2 from transcript LOC_Os01g52514.1 (locus LO C_Os01g52514) derived from phytozome v7.0 (chr-ID Chr1; po s 30173226 to 30177268)
gcaaatcgtggactccagttggacaccggaaccaggtaagaaaagaaccactattatacagtatactccctccatgctagtaaaaaaaatcatttggaacaatgtttaaatcaaaccttaaaaatataaatcataaataactctcaagttgttgagtttgaaaatgtaaaaattacatgaatagatttgtcttgaaaaatactttcatcaaaatatacatatatcattttttaataaatattttcatagaaacaagaagttaaagttctgttttggagaccgtgtcgctgtccaaaacgatttcctttacggggtacggagggagtatatactgtctccgtcacatattacttgtcgctttgagttttttttataatgtttgatcattcgtcttattcaaaaaaattggaattattatttattttgttcgtgacttgttttattatcaaaaatactttaagtatgatttatctatttttatatttgcactaattttttaaataaaatgaatggttaaatgttacaagcaaaaggttaaagcgacgagtaatatgggacggaggtagtattaatttactccatccgtctcgcggtacagaatgttttggtttgtgtaactcggttgacaaatataaaagtatagtaatatatgcaacactgaattaataatttataaattctactagtaaatattcgtttcgtcttaaaagtgttgctgaatcctcctgtaaactttataaagttaactaaatttaaagaagtttgatttagatccaaaatgacaagatatgaaatgggaggagtagtgatctatttattatactataagattccccgcgcgttgtagcggaaattttagcagtaagataagtatgatatttatcacatatcgtagaacaaaaataatatatgtattttgcaccacaagcagaatacaacatcaaatcaaaataagaaggtttaacttggaggaaatgtggatcgtaaagaccatctctaattaaaggaaaagaaacgcaggattcaggataggaacttatatttcagaactaacaaataattactatccaaagaagaaatgttcagtacttgtgctggcagtgctgctatatagctaagcttcaaacataaagggctttagaacgacaatcataccttgtagaagatttgagaatgaccaatattaacaattcaaatcggtgaagggaaactttctttttccttttctcggagatcccaaattgctgcagtggtgtcaataatccaggcgtggcaggaaggatcaaatattctatcttgttgctagggaagttttggacgacatacacaacacaaagaaaagagtgcctaaatggcagagtgctatatagtggctttagtggggagaaaaaaaatgatagcaattgtctgataattaagccttctaattgtctgataattaagtttcatgcatatggcctcttagcttcttggatttatggacatattctgccgttttagaacaacgtagtaatggcgccagctacatacatgaacagtgggggatagatagcaactttgctcgtgcaaatgaatggcgtttaattgtaatccaacgactgtagctaaatgtaatgacgtggctaactcatagtgcagagaaatagtaattaatgttgttagtggggatgaactatataagatatatagatatagataatagtgtacatccattaatctatctatagctagctagcctccaaaagaaactctcccgttaaccacaaaaaagatatggtcattgatcatcatcagatgttgatgatgacaaatattgtaaactgcatgaagactctatcgtgttaatgcggaaaattaagttacactatgtataaataagatgtaatatgtttaatagaacaaaaaaggcttcctgtgttttatatagtttgcatatggttgcatatatagtgcgaggtgaatatattttatgtttaattgatactaatgaattttgacctaaaaatcattaagattgtatggttttacgagagaaggaagaagagacgatttaaaccatatgagttggctttcaaaatctatacttcttcaaaaagtagtagtagttgtatgtggtggtgagtgatgaatctgccaccaccccaaccaccacctccctattattttagaataaagaaatgacatgtggggctagaggacccacatgacaaccaccaattctctacttatgggaatggaaaaatgatagtgtgaggtcaaaaattcacatgtcggtaacaatttatatagaaattaaaagataatgtatataaaaataatggtaataactagttaatgatattttttttattaattagaacccctttgcaacacgtggataatacgctagtaatagaaattcaacgaggccagtgatttgccacttagacccgtctgtctaagagtttgctaataggagggcgcccttatggacatgcgtgtagtgtatgtgcatagtcatggagtgcatactctggttacaacaaaaaataaacattaataatatgtactctctccgtttcaaaatataactacttttagcccccaggatttgttccaaaatataacaacttctctatcaacattctcttcccaaccaatcacaaccattcactattcacttttatcactcacctccactactcatccaatcacaactttccaccattcacttctaattactttcttaataactgtgtcaaactttaaaacttcttatattctaggacggagggattacaaggcgcgagttgagctaattgggcacttaagaaagttcttgcgctacaaagatgattaagaataccatattatcataaccacgaattgtatcaagaatttgtgttaaataaatcgtaccattagataatttggtacaatgaattcatatattcccttcagttataaatatttaggccctgtttagttccaaaaacttttttccagaaacatcacatcaaatctttggatacatgcatgaaatattaaatatagataaattaaaaaactaattgcacagctaggaggaaatcgcgagacgaatcttttgagcctaattagtccatgattagccataagtgctacagtaacccacatgtgctaatgacggattaatttggctcaaaagattcgtctcgcagtttctaggcgagttatgaaattagttttttcatttgtgtccgaaaaccccttccgacatccggtcaaacgtccgatgtaacacctaaaaattttcttttcgcgaactaaacaagcccttaacgtttagggcaagtgggtaacttgaccatcatgtacaagacaagtttttcatacggttccacttccaaagtcgcaacatcactgaatttcctgccaagactccatttgaaagatgggcttgaagaacgaaggtgaagggaacagcctatatgagggtccaactactaaaccccacaaagagaaacatcccaggcccactcccactcccaccggcccgtgattggtacgtactccactttcgacgatatcaaatcatcaaatccctggacaaatttaccgatgtcgcacatcacgtcactactccctccgtcccaaaaaaaaaaaactcaatcctgggttttttttgggacgaagggagtatatgttaggcacgcagcctaatgctgcagaaaggcccgggtttgcgctgacagtgacatgacaaaattatattgaaccatgactgtgtttagttcagcgcaaagtttgtttgaaattgaaaatgatgtgactgaaaatttgtgtgtatgacagattgatatgatgaaaaaggactgaaatttggatcgaaactttggatctaaacacagcccatatatatatatatatatatatatatatatatatatatatatatagcttgtgcgatttcgttgccaactgttttaatttgttgttagtattacacaactatacgttactcaaaagctcctaagtactcttctgcaggatcaacggcggtcaagaacgaggaagacgccgac

SEQ ID NO: 1489 - DNA, 2140 bp, Oryza sativa
  Intron number 1 from transcript LOC_Os04g52000.1 (locus LO C_Os04g52000) derived from phytozome v7.0 (chr-ID Chr4; po s 30691828 to 30693967 reverse strand)
atccgggtatgtttccctgcctgcctgcgtgcgcctcttcttttttttcctacctttttttttctttaatttgactattttgagttgtcttcatgcggttcaattcttggctgcgtagcaaaatttttgattttttttaacttcgtttaccctctttgatgtgctggtgcctgcctgattgaaaggagcttcgtttttttagcatctgattaatatccgtgtttatcgaaacatccactcagttgagcgctcgaggtcacaataggtagtaataattaattaccattaggaaaaaaaataatcattacctttaggggaaaaatcatagtattttgtttttaccggaggaggttaattaaaagctaaacatagtgcaagttgttaacttggagtcacaggatctccaagtatggggttgcaacttccaagcaaagtcggacttgtgcaaccctccgcttcctcctttttgacttagtacgcgtgcgcccatgctgccgtgccagccgtaagcaacttgtactttcttggagccttgctgtgcacctacttaaggaaaaggatatacctagtaacttttttttactaaatttttactaacactgttatgctatgagtgcatctagatttttttgtaacttccatctacttaaatcaaacgattgagatgattgttagtaaaagtttagtaagaaaaatttagtacgtatagcattgctccctacttaagcttgtaaccttgctgtaccaaaccagaccagttcatgcaaatcattagccttatctgtggttatcggaatgatggcggtagttgtcttcaagcaatcagattatgatattagtgcccttgtttttatattttaatgttatgtgtttctgtctgtttatgaacccaaacaagaaagaaaactgtcatctgttcttgcctgccttgggaaagttgcctcttggtgtgtgtagttgataattggtttctcaggatttgattacactgtggttaatgacgtgcaagagtcagtaacttgcggtgctagacacctgttttcacatgcttacgagtgttatgagttcagacctggaccacccgtaaagtagctcttgaagtatccctattgcagatatcgagcagaggttgggggattatcggcatgatcctcaggatttgatcatgtgcgttgtctactaagttaggagattacatcacctttggaaacaaaaaaggatgaatactactcgtctatcgcctatgaagtctaatattacctgcaaattgtgattttattcttgtttgtttttcagttctatgccgtggccccccacttggaccttagaaaatgtcctgttgttcatctaataaatgttttgcagaatattgtttcggaataatatagctgctccttgcatacattataccactttacagatagtgatgttctccgaatagtttggcaataggaaggctagtactggaccatgtgcttttatctaaaaaaaaatatgctattgactatttctgtcaatttgtgcaaaacattttctgacaaaatacattctatgttttagaactacaaaaatggtgaaaatgttatattactattctcagcaatcacaatccgcagtcttcattgatgaaaatggaactttcctgttcctatgaatagtctattactattattttcagggatggattattctccttttttaaatcatggtttgagatttcttacatttgtctatcagcggcaaaaatgttatttgtcatacatagagacaactagacattgctgatttatcaaggtcataacttgtttaccaaaaaaactctgatttgcccacaatttcaaatgaaagttcaaagccaaggaaaatggtgttccacaagactagttttttctgttcttattcattaacacgaacaatactgtgaatgctgctatttgatacgattacaaccttcaaccttgtttgtacagtgaactatttttttctttaagtttttgagaacttgtgcatgctgattttggtgccattttcatggaatcctcacacctcctttcttcattggtcttgtttgggttatcatcagtgtgtactgacattaatttggtttgcctgatttgtgtatggtcttaaagagtgcaac

SEQ ID NO: 1490 - DNA, 2089 bp, Oryza sativa
  Intron number 1 from transcript LOC_Os08g18820.1 (locus LO C_Os08g18820) derived from phytozome v7.0 (chr-ID Chr8; po s 11224914 to 11227002)
cacaggaatacaagcccaaaggtcaatgaaacattctgattataatttttgcaataaaatagttcaaatacccttgtcatatggagaagacaagcctagaagtaaaaggatttataaacatcaaaatagaaaccataataatattagaacaaagaaaaggtatttcttaagaagatcagataatagagcacccttcttacataaaagaaatgtaagaagatataatccaaagaaaacctatgacaaaacatgcagatgttttatatgcaactcgccagatcatttaagtagaacatgcccaaataaagatcaaaagagatattctagtaaatatgaagaacaagagagggttctaattatagatagcgtaaatgaaaatatattagtatgtgatgatgaaataaaagatgacgagtcaatatattctatcatagaaacagacgaagttgaaaccatcaacgaagaatatgaatcatccgatgaagagttagatttaattgacgaattagcaggtttaaaggttgaaatgatggatcaattaaattgtgaacatgattggattagaggaaagggtgactataatatcaaatgtgctttttgcatatattatccaagtcaagaaaatagagtgacttgtagtatatgtctaaaacaagcttgtgctgaatgtataaaagcaaataaacaaaaatggagaaaagaaatagaattagaatcagatgaaaagactttatctagtagagtacgagtgttagaaaatagactaaataaactagaagtagaattagagaacctaaaaaataattgcgatattaaggcactaccagagaataaggacatacaaaacaccgaatttaaagagcaattgataatattaaaagacagtaatactgctaaaataattcaactaagagatgccataactaattttggaaataaatatatagtaagattgcctttcaaagaaatattaggtataagaattcctgttaaaataaaattgacacccaaagtatcttataaaatattagcactagtagacactgggtgtacaaagaatattattcatgacaaatatttcacaagatgtcctgaaatagttcacacaattgacgacaataaggcagaagtttccacagacatgtccggaataaagaaaattcataatcagttagcttataatatggaggtttacattaatgcaactaaatatataatagatgagattacaataagagatttgtcaatgattaatgatgacatgataattggcctaaggttccttcaacaatcagtacaaaccacagtaatacatgagcaaggaattacttttatcccatatcaaaatactgttccatatatctcagaggtacgaaagcgtggtggaacctccccctccccaaaacccgacaaactcgacaacttagaagtacccaatcttgaatatataagataagagtggtaccagagcgtatattttctgataagtgttaatataagagagaaatataagagtggtatcagagcgtatattttctgataagtgctcgtatatcagagcgtatattttctgataagtgttttctgagaagagtggtatcagagcctggtaatcatagagaagctaaattcagaagctaatattggaaaggtaattactactaaagataatttgaatataaggtgtagactaaatcatattgaagaccatagttggcactctaacaatagtcaattaaatttaattgttgatctgatatataatttttatataaattgggataaaaagcaggtagatttagagcaaaagttagaagatatatataaagaacaaaagcaatttgtagaacaatattcttttcttaataataagctaaatactacattagaattattagaagattataagataaggcaaaataaaatttcacagaatagtgattatattaaagaattactagacaaaatcaactctagtaaaggtaaggaaatagttttggcttcatctggcatagtctcgtcttcacaagccattaattctgaaaaatggacatatctaggagtctctttagaagaatagcaagcagag

SEQ ID NO: 1491 - DNA, 2707 bp, Oryza sativa
  Intron number 2 from transcript LOC_Os06g14550.1 (locus LO C_Os06g14550) derived from phytozome v7.0 (chr-ID Chr6; po s 8193980 to 8196686 reverse strand)
ggaagctcgtgctcaaggtcaccgacaaccacgaggtactcggatcgaacttactttttttttttctggatttgtttcgtttaactaggccacgggcgcctcggcgaaaatttgggtgaaaattggcaagtaaacgcgaacggatggagcggaattgatcagatagagagaattctggatatgttgattctattcgttcatatatgtaacttcctatggattgatttcgttgtgttttgtgtagattatcgatttcgttgtgttttctgtagaatattcattggttgtgtgatctggttatcagcatgtgtaataccatccgccgtgagaacactgctttagcagggtcaatttgccaattacaatgcacctcctgaatatgctatggtagctcttgttatgaagtagagaatgtataataaacacttattgcatatgaaattggaacggctgctgtttgtctgagtgatgtatgattctgttaataagtgtgaaaagctaaagtaatttatgtattccattatagtttcccatatatgttcatgcttacctttccattctactttaagacaaataatttgtgtttaggaagtacacttgtgctcatcggtttctttttatacaacaatatgcaatatgacctactttatttgattaattaattattgaagggtgaatgtgagataggatatcaaacatattaattatacatctatttctctactagaaaaaaaatgcccatgcgttgcaacgggtgaatgttattttaatcttattattgttatacggtttagctaggatgaaattcaatgtgggaattcgcttggatattttttttttagaaaattatgagctgcaattaggagtccgactttcatctcaagttagcatgcaaatttttctaaagagatttcttatacgactccttttgtatttccaaaagtaaacgaacctaaaatccgactcaaacacggatctatatttccaaaagcaaacgaacttaaaaaccaagtaaaatacggatgacgtatcaaaataccagcaaaaacatcttcaatttttataatagtagagaagagatagagatatattctagtccagatttgcaactgttctatgcttgtttgacccgtggtgtggctgaatttattcatcgttctatgctgcttgttgtctgctatatatgatgttcaacaagacaggattgacagtatataatggatgcctagctgttagttctgtgctcttctggtactactaggaaagctttgactgaaagaatgccacaataaataaatcactgtagtgtcttttaactgcacattgtgatgcatcagttttcatcagtttgtggttgaacaagaaggctaggattttgatatcaccatgatgaaccctctactctttactataattagtttaacccagtcaaatggaatgagaatattgccctgagtttctactgcaaacaaggagctgaaaatctgacagaatgttcttcagctgattgctctggcataattgacaactacttgttacttggtagtcctttctgtgtgtaaatgtttattgtgtgttgatgaatgccttgtcaattatattccacacaagacacaacccaataggtagcgcttaataacactgcgaaatcatttcttgcttacagagaatgttagagcttcttctgttgccatctatttggctggcaggtgtatattgcatgggaaagaaagtttttagctgtacctatgaacccccttggcaaatactgtgactcagaaggtgtggcgatactagatttaaaattacaatatactaaaccatggggatacgaggcaactgacataccattattttgacaactgctgcacattaggagcattattaatgttagcctcatattgtgcatgtgtgggaagtggtactctttttcttagcattttcacagcaatgtgtctatccaatgttaatgtcgtactcaactaaggaattgtgaagctacacagtgatcctctattatgctttgctggtgtgcttttgatttctagggcaatggattgtcataaatggctttattttcctttgttagttgcacaaaagattagcacatgttttcttttaggaacaagagtagcaattacaagaaaagcagcgagaacaccgaagaggccagctaatggacaaagtaaagtctggacgagagtagcaattacccacgtggcatccaccgctgttgtttccaagtacaatttgtgtaattgataattcgaggagtattaggccatgatttgtgttgaaaattccagggcttcgtatttggcttaggatacagagaatacaattagttcctgttgttttctttttgtagcaagtttgtgttcgtgaactccaactggtaaaactctagaacaaatttggcccgtagctaatactactacttgcttgaaatactatttttatgttttattgcagttgtagatgttctgctggaatcttgcaatggatgcttatattatgttggttgcagcaaatttgttataacatgcgctctcctgtactactgtaactgttgtaatattccattgtatttgattaaagacattgtattctggtgtcaattgcgtatatgtatgatccaaataggaactactttgctgaccgaaatgtatactgcagtgcttgaagtttaagacagatcaagctcagg

SEQ ID NO: 1492 - DNA, 5129 bp, Oryza sativa
  Intron number 1 from transcript LOC_Os06g10710.1 (locus LO C_Os06g10710) derived from phytozome v7.0 (chr-ID Chr6; po s 5588290 to 5593418)
ctgtcaggggcctggggccttaagtgggggtacaacttccacctcctatgtgctctgtgaaagtgagcaatttcttctggacttttaactttgccttggattaattacttttcgtgtttctggttgccggcaatttagtggtggattatggtacaatttttttttaaaaaaactgtacttttggttgttggcatgttgtgtcaactgctaggacacaaatacacaattttacctgaatgagcatgcttgcattggtttacattgcttggtagactggtagttttgattttattcctgtcctacctttaggctcataggcttggcggtattatggagtaatagcttggtttgagatcactggcataaccttgaattttggtaataggctagctggcaggatttgcaagtgttgaaagggtagtgctctagcatgatactagtctatagaaagtgagtcttttccttgattccttctgtaggttaatttctctgggagtgtgtatttagattgttaaggttgtggcctcttgtttaaatctccagcatgaagtattaaagtattggggctcgatttcaataatgtatcaaattttgtttggtttactctactggctacttgcaagctgcaagtatatcgccagatcgtttttcccatcctagctctagccactatgccaaaatagccattctcagcattagcaaaatatggcatcttcctcataagctagtttttttttggtttgctactgctgatggtagggctttatggcagggtattggtctatagaaaagtgagtgacttctttctgtagttaaactttcctgggattatttgattatttaggttacatttcttgctcatcttcaatttaatattggatcaagttaaaatatgttctctatttaaatcacattttctttactattggggtgctaaattttccattgtggggacaaagtgccttttctggtttactttatctggaaagttgaactgtattggcacttcggttaattttgtgttgttggcttctacgatcctaatatcactcattttacatagtgaaagaattaaactagcacattttggcgaagtcctgatataccagtctttcatgacatttgttatcatatgtctgctagcctttaacagcattggtagtgctaaattgctacttatattcaattctgccacatgcccacattccaattagaatgatgtgttctgggagctcaggagttggcatgaacgtgtcactttcactacatgttgcttgcatagttgctacgagggcatatttagcccccatgttggcaatattcccttgctaaagcaaactaggatacctccaaagctagccttttggagaatgttacactcatacatgcattattgctaagatatagtataaatccatttaccaatctaggaaaacgaatctggcaagtactgtagcaacacagttagcattatgcctttgcctctttggtaaaaggtgctttgcattgtcattggcatgaactatataatttatcaactagcttgttagcttgagtagcatgccctactgtccaatccaaaagagcatgcataacttagtttgtcttataagtcaagcatgattgcatgaagagagcaagaaaattactgaatgatgctaaatagttgatgattgcaccttggcaggtatactgtatcggttatgtttagaattttagatgctactctatttgctgtgatgattgatatttgaagacagatatttcacttggatttgaacctcacggttctatgggctatgggattatgcatagttctatgcatacctgatatgttgaacttattttctttatttgtttgagtaggcagtgttatgcgcattcatcttttgcatctctatagtcttttcgctgtccaataatggattgcttggtttagttatggatggatctgcttatcctaagcaccgttgaaacctgcatggatcttttttgcttcgcactttggacattcatcttcttgtttcgctttagtctcagccacacccatacagacaatcttgagttaggcaggagctacatagtaacataggtaagcttggatttaagacctaagtgggaattttattgaagcatcttctttcatgtacaaagttgctctgtggcttctattgcatgaccatacctattcccacatggttatgctctgttgtctttcctcttctgttgtgccatttgttactaatatttttcaagtcgtccgactaattgcgtttagccgattagtcatgataagtcatcctagtcggtactaaggcaacttgattctaaccacgattagttggaaagtcacccgattagttgcgattagatatcctagtcgatactgaggcaatcagactcgattttttgatttgaaaacataatattttcctgtttcctccgtgttaactgtttcccatcttgtttgctatttggcggttgacactttcgtaatggaaagctgaattaccagatatctgtatctttttttccatgttggtctcttgaagttctaatgcaaattgcattaataccttgtgtaaacccttgcagccttgcaagctatcaaagccaacattaatttaggaaaagaaaatttcaatgtagcctctagctcatcaccatttgtacatcgtgacattgaattggggcctcatatgcctctgtgtcctcaatgatgctaacagcaattgatgcaaatacatgggaaacagaagtatatccactctttggatgtttgacattcacatggtcctggactcgtaggtcattatcttctgcatacatcttggctaggtcttaccgtcttaatccccccccccccaacgtcttatgccaccggattggtttggcctatgctcaagtcctgcttcatagcatcagtgggacctatatcccataactgaaccgctaatcaattcaacgaggtgtataatatgtaatatcctgcttagccaatatgcaaaatcaaatgccaaaaaggtaaatgaaacaagtcatataaaccttaattatatacaacacccacgccttatagaaatactataacactaacaaaaatttcatgaattccaatctatgtccaacatggtaaatacaagtgagtctcatgacaaacgtaaggcgagtctcatgcatgcctgaaatctagatttattagcccatctccctatatgactttggtggttatcatgatgcaaatttgcgtagctgtcctgttctttatatgttaaagatggttattctcatgcagtaaatagtctgcccaaaacctttggtgttgccgtgttgaagaaatgtatgaatgcattaatgcttcgatgcccattgcttccccaccatgctttgggccaatcaactggatatgcttgacgcggagtgccagagtccaccatagatggggggttttaaagggttgggcttgggcttgtttgaagttgggctgaatccatttcaagccaccttccttgaggactgggattttgaagaagttggtgaagatgagatacaaaatcttggtttatctttgttggttgaagacttgcttgatgattgatcatctcacagcgagaaaattgcatatctaccatcgcataggatgggactcgctggaattccatcgcttaaatgggcttctctagaataccatcctcaaccagggtgtcttcggcaaaatgccatcccggacgggaatgcctctggctcttcttcttcatccatcccacgcttgaagagctcgccggtggccacggccagctccaccgccgtgccaccggtgccgcctcgccggtggtgattggggcgctgccctccctgccatccccgcctcccatcctgcgctaggacttgaggaggccgtagtgatgtcagagttggaggagatcggtggcacgggagatagaggaggttgccgccgtcctgctccttgtcttgcccactggctgccgcgccttgctgccaccgctattccctcatcgcgttggagttgaaggaggctgacttcgtcaccgacgctgacgacgaacatgccgaggacgggtcgacggggacaaactcaccggaagcaagatttttatgcttttgaaaaggctacctgatgcatcggaagcaaaatttgcctagcacattttacagtgactataagcacattggagtgaaccaacacttggggtgaatgttcgtaaatgctgtctggtagtgaatagttaatactgtccagacaatcaaaattagaggtttggtctctgtgctcagactgctcatggtcgaggggaacgaatggctacgtagagtaccacgtctcactggaaagaggtcccaggcaccacttgtcaacctcacattggatattatttctgttttttacttctttatgaaaaatagctttaatttaggcctagctttctatacatgaattccatgttagctttctgtcagtggatataagctggattttgttattcgtagaacctttttcttgcagtgtcacgacatttgaaacctatgcgtcatttcaatgtgtctatgacagtttgcttaatttgtcatttcctagcaaaactggcattgggaaggtagtctaatgctttgttgccattttagtataggatgctacatatattctgcatattcacatctggcattctggctagtaacagtggagccttaataagaccctactgtccatttgccaattgtggcatgctacactacaaacttactcctacacacgtctaatcccttcagttattgatacagtatcttgcaatgctcatcgggtttttacttcagaaagttcatgttatacttgacctaagctgctgcaggttttgtgtgtgcaactcaaatctatgtagaaccaaagcactgaagatattttcagttcattgcccttatttcatgtttatcctcatcacagttttggtattctactacgtgcctaagtcttccgaaacttcaatttggagaataaatttgttaatattctttgaatgtttacagttgtttttattcatattaataattgctgacaaaactaatttcgtgatgcaggtgcattttggtggagtacatagctggatacatag

SEQ ID NO: 1493 - DNA, 1520 bp, Oryza sativa
  Intron number 12 from transcript LOC_Os12g21890.1 (locus L OC_Os12g21890) derived from phytozome v7.0 (chr-ID Chr12; pos 12319801 to 12321320 reverse strand)
attttgacaaggtaattgtcgcttcatttttgaagctattttatgaatatgcttgtcaaaacctctatcaagctatttccactaggcacgctacaaagcccatctatctataaaataagtttgattataaaaaatggactagggatccaattgaccccttcaaactttggtcataaaccaagttattgccaaatcttgatcaaatctaccaaattttcatatgttaacattgccaagcattttaagttcaaatcaaacacctgtggccttgtttttcaagcaattgcaggcaaggctagtcagaatagtgcatacaaatagatttcagtgttgaactgttagtcacatgaaagctgttctaacatctactgtagagatatgacaattgcaacttaaagagagacggaaagctgtagggaagtcatggggcccgaaaggaccctaaaatccctttgggccaaatacatacataagtgctctttcgccaaaattctttcttgcagtctatatgatgtttcacacatatagagcacatgaggcccttatcaagccatgcggcctcagccttgttgaacaaattgatattcaataaatattagtctattgttgcccatggcagatatgtttccttgatgtacatcacagtatgatggtcagttggtcactatgtttgtgttgtctgagtacaatgatgcaaatatttaacatgaatgatgaaatgttttgagttaaacaaggatggcaaccagaaagtatgcattgagtgctaatgcgaatttaaagtttgagtctatatgttatagaggaagggtcgtataattttctctataatgatattaatccttaggtagattgtttttcctgtttgttcgtcgattgtaggttgctatgggattgtgcagtagatctttcacaattttgaccattaatatgttaggatgttgattgactatatgggattgtgcagtagatatttcagaattttgatcattaatatggtaggatgttgattgactatataactattctgacagattgaacatatcatttgtcaaggttctctttttgatataacatagatatttgaatatggaactctttaaatccacacggtaatatttgtagtttcgtagcaccatgatgcatgattgtacatcacttttctgagatgagatcagaatatcagatacgtgttccctgaatccgttctttatgatcgggagtggccttatttggaatatgcttctgcttctaccctttcattatttgaaccatgtgttgtcgtgctaacaattttcgcttctagttgagctatgtcatattaaagtcatttttttctgtctttctgaattgcaacaatttattagcagttgttgaaggggaaaaagaaattctaccaacaatgagttattgttactgagttttcgctttcattcatagttcttttttatttatacatactaacactaactgtatgtcatccagaggaaattaccatcacctggattccaggttgaggt

SEQ ID NO: 1494 - DNA, 2056 bp, Oryza sativa
  Intron number 8 from transcript LOC_Os02g56950.2 (locus LO C_Os02g56950) derived from phytozome v7.0 (chr-ID Chr2; po s 34899904 to 34901959 reverse strand)
cactgatatttcagagtaatttattttccaaactgaccgctgtagttatttccatgtatgatatacatttttgcgtgatggaaaatttagccagatgacacattgactgacagttcatgcagattgtcaaactggatattgaatagattttgcctcttctctgtttgccttttaagttgagaagctatgatgaatgtccaggccatgttgatttttggtgatctatcagtgccatatttgtcctcctttttgtttgttttctgaacaattaaactgaaaccttatgagtgacttgttcaacagttgtggttttactgacaataagcttaaggcattagcttcctccctatttgggttttcatcccatctctctctttctattgtagccctactaaagttgtaaagcatctataatccaagggagaccaacaacagcaggataaggcatcaaccagagttttcttttttcctatgataacttgctggaatccaaacaatgctttgattgacttttttttggtcaattctttttttccctcttagtgcttctggattccacctgcaccagatcagaactccaaaactcaattaatagaattttgtgcaaacttccagttttctattcctgctattctttatttataggtttggatgatggcaaacataattattaatttagaacaagacgttgccaggccagcttttcaatgaaagcttccgttacatgccaaattgagtttgtcaactccaaggcgcctagtagccataaaaatactcctagattgcaagcttgttatttggattcttttatgattattgcttcatccacacagttagttcaccaagaataaaagccttgtcaaggtagaggtaccatgtgcagatactgctagcgaagagttcactgtattggaatttttattacagctctataactaatcaaccttatagttcggtttacgaaatacatgttttggttggaccatgcaagcagaagtgaacatatctgaggccataggtccgtgcactgtgctactaatctagcatttatatctcttttgatactttcaaagcttgtaaaaactgaaggaatctggcattggttgcttctggggatggttggtgcatgtaatagctggtaggtttaatatttacattacagaggagtggtccttgtggtcccatttacaaaataaaatggagataatttttaagtagtaacagatcattacgtttagtggttataaaaaaattggatactttagcagattaagtacttctctagaaccataaccccacccaccaagatacacacaacaaactaaacttcttagcccccaagaggatcatagactcttagtttcagacctttgtttcatctttcatttcattctgggaataggctggtaagtagcttcacaaagttcaattaaccatttagatttagcaacacagaattcaaatcaaattactcatttctgtaatcttttgtctgatttctctctaagattttcttttttgttgttctgtttccttctatccttcagtgtgtttctttgggaatcactgtaataggcgggacttgttctattcaagtctttaatgcattcattttctttgtttctgtttgagcagtggtttaattctgcaaaattatgttccattcatgcctcaatcgtgcccctccccgcccctctttttttttgcttcttcaaatatacttctctttaccctctattcactcttcacatcagtatattttggtccaattacaattttctttgctaagatgtatagcagcatacttgatgttcacccttctaagtgctcaccaaatcactatttgggagtcatagaaatatatctagctgttgggttacgaattgttgtaagacaaatctttgctctatgtggaaaaaaaacacttttaatatctgaacaagaccagggaaaacttatttcgttttcaagtttgatgtaatagacttctgcatttggctgatgatatgaccagagctccactttaacagattgaagtgaatcatcttaggggtac

SEQ ID NO: 1495 - DNA, 1478 bp, Oryza sativa
  Intron number 1 from transcript LOC_Os03g12840.1 (locus LO C_Os03g12840) derived from phytozome v7.0 (chr-ID Chr3; po s 6901511 to 6902988)
agcttccttcagcccaatctgctgttgctggcgaggtaaaaacctggatcaacgctcaaagagatgaacctgctgattcgtggccgtggtggaggattttgggagacaatagagtatttttgttggatttcttgttgatcgagtggcaacgaaatttttttcactaaaaccagaattttttgctgttggagggaaatggtaaatgatttgaggggggaatgcatggtttatgagatacagttttgcattttgagtctttgattaaatgctgtaattggttctatttctgaagcccagaggatttttgcgagaacaggtaaaaaacttggtagttccataacaaaatggggggtgggaatggaatgcaattctattccttgtagcactaatcaagtagtgatcgaatcgaacctctactggagtataaagttagcaggggcggctagtgatagtggattctgggcgaagcttgctgcatttgcgatatattgtaaactgaagaatatggctagtgtttattaggaattctggtagcatttgtagatgcccccttacgtgcgtctcatgttgacagttccactgcatgcgggggtctctatagtctataattgtatattatcatgccaacttgtcaaaaatgggtcttagcatgcaaatctttgctacttggtgtctgggattctagtttggaatattcccataatcccatggataagcacatcacatggattacgacagctttagtgatggcaatgccttttctgggatcgtttacaatttagtgactgacttgctaggtttgatggcaacatggaccgctgacaaacgatctttgtgattgtcttgttagctccctgaatcaagatccaagctgactagctgagtcaatcatttgctagttgctcggtaggctgcagacataagcaacacaagctgaaatatagaagggaaatgaaattaatatatgaaatacttatgcaaaatcaaaatgtttttgcttaaaactatttgtgtattgcatgcctagtttgtgcttttgtttcgatagatttattgtttagttattccaagaaaataaaggaaaaaatatatatttatgcaaaatccaactatattcattcaaacaacctgcatattctctaaacgcttttttatatccctgtagtagtcttattttcaaagtataattgagaaatactctgttgcaaggcagtttaacttttttttatcattcttatttatactatcgatagagtataaatgtagcccaaacgacatgttatacatggagagatgatgatgtactaaaaaaattcttgattctgtgagggcttggacttggtcaagatggctattgtacttccatatggatgttaggatccatttctgtttcttgccattcttcttgtataacactatttcatgatgtttcattatgtactgtgtcaggaagaagggaattaatcttgtagcaattg

SEQ ID NO: 1496 - DNA, 7023 bp, Oryza sativa
  Intron number 1 from transcript LOC_Os02g18540.1 (locus LO C_Os02g18540) derived from phytozome v7.0 (chr-ID Chr2; po s 10803669 to 10810691)
gggtagcttgaggtagtggtgccctggattctaaggtataccttgctatacactgatccttatgtaagttcgtctgtaatatatacacgtaactggtaaaatttgtccgtgcaattgcactagctagtttctaatattatttcatttcaagcaaattagttacttgctccggcctaaatatagcggcctaatttgatatacaaaggcagcaatattttaaaacgaaaaaaagtgcgtgatacatatataatataatttcttgatattgtttgttttttcacgtgccctactgcacatttatacctgcgaatatgccccctttagcacattctcaaaagttggaagccaacaggaaatctttggtgtcgctaaaattcttaaattctaggtgtgtttagttcgcaaaaagaatttttttagttgtcacatcggatgtttgactggatgttggaaggagttttcggacacgaatgaaaaaactaatttcataactcgcctgaaaaccgcgagacaaatcttttgagcctaattaagccgacattagcacatgtgggtcactgtggtacttatggctaatcatggattaattaggctcaaaagattcgtctcgtgatttccatgcaaagtgtgtgattagtttttatttttatctatatttaatgctccatacatatatccaaagattcgaggtgacgtttttgggaaaaaaaaattgaaaactaaaccatgcctctttaaaaaagttgtgtcaaaacctgcgcaattttagatactagtatttaactgtgattggtggcgtccatgcctcctgcaatatacttgccatgaatgtccacgaggatattttatattactccctccgatttcatattaattgacgttttagataaggttgaagtcaaactttataactttgaccatcaataattttaaaaatatttagtttaaaggaactagaacaatatatataaatttgtctttcaaaacaccataataaaagtaaacatatatttatttattatatatattataatagaaaaataaaggtcaaagatatattttgtagaccgtgttcttgtccaaaacgttaattaaaatgaaaccggagggagtatataaaaaagaatagaatccattccagagttttagcactccagaaattttggaagttcgattgtgaaatgccaaaactgtcatcaatttaaagctgccagaaaaagggtaggtgatatcaatatattgtcgtgccaaaaatatataaaaatatatggttgccctgattcctgtgtgaagcaacattttcactgcactgctccaaacacgccgaaggaggaatcaattcaccatgatccactctagctaggacccgtaaaaaatggacagtttggtcagcaggctactccctccatcctagtttaatcatcccctaactaaaggcgctaagaacaataacagcaaaatattcatcattcttaaaattaatcctctcatggattaagtgttccatcgcttcgtgtcttatggattgctaatggtttaaatataatataaattaatcttgtttggttgcaagtaacacattccaatgatacacatttagtactcttaatttgcacaaataaacgaagatgatgattattttgaaaaggccttaaaaatattaggggatgattaaaatgggatgaaggcagtagtatttcagagcttgcttctccatgtgaacattttgtcaagaatgagaatcatcggtaattcaattcccgtaagggctaatacgtgaaacggattccaacatatattagagttagggctccagggtgagctaggtatggagagggccagaggggacgctagggagagaaaaaaagagagtcaggagggcttttgtgctcagatggttcgggcttctaaattactgttttatattatgataactagctgggtggtccacgcaattgcgcggctagccaaaaaaatcatttttttaagtatgattttacttaaaatttattaaatagctatctcattgttaagactttgaaagaccaaaccttatcatcctcgtgtttctaattatatagttttaaaaatcacaccaattgctaccccttatgtcatcttctttatttgcttgctcgatctatcactatttctattcattcatcttggaacatttaaaaattagattttatagtttttagagtttattgtcacgttgggtttcgtttttataatttctagatgtcccgtcaaacgttgccattatactcctatacagcctgtccactatctcttctcttttattgtcattgagattttaaaaatcgaactgtgacgccccacacttttatctttagtgataaaagtgtgagaacatagattattatttaacaaccattattttgccaaataataatccaccatcagagatcgcaacagagaaatagttagaactacctttaattcatccctaggagcattaaggtcatctctactccatctagagtacactcataacattgaatagagtttgtagcaactccccgtagactcccatccaggagatagtcgtgaatcacgatttaatttagcactgcgcaggcttgtatcactgtacccatagctactcttaacatgtttgactgtcgcacttcactagatgcggcaccatgctaagagtacagaacttttcccctacttcaacttactacactccacgtttgtgttgagcctatcagccctccacaccaccgcgctactatatgcgcctggaatgcacttcatcggcattcatggggtttatatcatctcccatcctactactacgtacccatgtggagtataataaacttgataaggtaccaggtccagcccgtcttaagacgaatctatggtcgacacggtatatacggttctttgatacgagtgagggggtgattagtccttatatttatacaccgtatgtagggagagccctgacctgccatcatcatcaatcatctcatccctgagctccccctacccaccatactagtatcctgatgatctccatcatcatcggcttgtcaatcatatcatcatcgttcatttcattatattctagaaaatactttttgatgcaatactaggagaaatatttttatgaaatagatttttaagttgaaatagaattatcatctaccaacatgatcaaaagagagacttgcctgagtttctgtagccggtactatcaaatgacccaatttctgactctagccttttccctgcattttattgtatacattgattttcaattaactttcaaacttgaagaatataattggcttatctatctatattacagtgcacctaaaattctagcctgatgtacaatttctagcattccattaatttgtattgagtatatatattagttacttgatttaaactagacttgatttacagatttattgacagagttttgctaagcttaatgttagtgtagacaactagtgtgcactaagcaatttaacccttattcctgctctcctcacttatgtctctctctctctctctctctctctctcgcacatacaacaagctgcatctagttactcatccccttcttccattttcttggctgttgctgctgctaatggctttcttcttccccaactctgctcctcccttccatctacagcaccacccatggcgctgccaccccggcgcccacggaggtcgacgccagccaccaccactacacaccccaagctagctcactgcaaatccccttttctccccctcccgatttctcctcttcctcccatggtccaagccctaccaacagcgtctgctttctctctctgtgtgtgtccctctctctctctcatgctaccaaatggatgtgatgccactaatagtgatgtgaaagtgcaggaaaatagtgcctcgtgccatggctgctctatgaggtggcaagaatggcaagatttgaggggctcacctttgtctaagggacaagttcctccatggttgtgctcccgtgttcgtcctcgccaatgtgttggtctcttctcctccttgatagatcatctccttgtctagccaatttttcttctccccttcctagccgacatagagatggtatgagtatttggctgagaactaatttggctactaactattgggattgagggattggttcttgaaatggattgggcagaatcttgcattccgctgatttgtggattttgggactttggctattccctcctcgctccctattgctctcctcctcccctgatctgctcactcctcaccaagtgcttggggctcatatgcatgcatcagtgagcaaatgggcatggctgtagccatgctttgactgcttgactgagaggtgatgaggttgtgctactacctttgtggccttgtgtgagtcctcctatgtgcagctatgtgattggtggaaaattagtactgctggtgaattgaggtccctttggtgaggttacttctttatatgagatgtgtgacttcttagtgttaattagccggagccggatgacgaacccaacttaagggaggggtgccagacggtattagccgatctaggtatctcggtgaatggttgaatatacaccacttcgtgtatgggtctgacggcaatatttatttacatattaccttttgtgcataaaagggtcaagctatgcatgtcctgtgcaaccgtatattcaaatatatgatgtattgtattattagtgtaagtgtatgtatatgctgactgtttacagtggcgtttgtttgtactatatttccaattatcactattatattgtggttgtatattggacattgtttgtttgtttaacttcgacgaatgtgaatttcataaattttgagtggcttattcttatttccaacaattttgctagttaactaattaattagtgatatatgccacttaatttttaatttttaaaatagcttaaatttccgggtaacataattatagtttgggtttatttttactttccaaaagtcccgccaaaccatcagcggttttgccattgtactcctctacggctcgctcgctgcctcccttctttattgccttctttattgtcattgagatttaaaatagaacatgattatcattggttttttttactttttagaatttctaaatctttaaaaattggacttgtagttttattttttataatttttagaagtctcatcaaacgatgccactatgcccctctgcagcccgtccgccgcctactctttattgtcattgtgattctaaaaatcgaacataactatcattacaattcattttttattttctagaagtcccgtcaaccgtcggaggctctgcaactatactcttatacaccccgctcgttgcttctcctttttattgtcattgagattttaaaaatcgaaaatgattatcaatgtggttttctttctttatactttctagaagtcccggcaaccgctttacttgtttacttcacggcatacctgatgtccctccttttaatcgtcattaggattctatttggtgttttattaataatttttatatgccgtattaaccaccaccaactctactactttatagccatgttacttaatttatttcgtcatgtgttttagatggtcttttctttcaatagtctttatttttatcacaaattttagttatttataaattttattcctaatataaatcttttttttctaatttcagaatttattttttctaaaaaattagttaatattgtattgtgttcttttaatgtttttattttttattttgaattttatttgtttcaaaattgtattcctacttgaactctgttttaaattttctaattttggatattattatatttttattcgaaattttaattaatcttgtattgggttcttatatggatttttctttcaatattgcttctttttaattacgaatttcagctaactacttgaactcttctttattttcttttgctaatttcatatttatttttatttttattccgaattttaattaatctcgtattgggttattagatggactcttcttttaatattccttatttttaattccgaatttcagctatttttaaattgtattcctacttggactctcgtttccttttctaatttggattttattttatttttatttcaaattttgattaatctcgtattgggttcttatatggaaacttcttccaatattgcttatttttaattccgaatttcagctatttttaaattgtatttctacttagactctcctttccttttctaatttgtgattttattttacttttatttataattttgattaatctcgtattgagtttttatatggaaacttctttcaatattgcttatttttaattccgaaattcagttatttttagattgtatttctacctggactctccttttcttttttttttctccgattaatgtgggaatttctaacccccacagcgaacgtggtgcctcctttcaaagctattttaataatataatagatagatagatagattaccgtatttctaaatacaccaatatttattatctatttctttatttgacccataatttagaagcccatcaactcctcaaccaaatatatgagtgcaaagttaaaagggagacaatttgtaatttgcatagtgtatccttgaattaattttcttatattatatggttatgcgaaataaaatgtgtgattttagatatttgttattgatttttgtcgataccaatgcattttcgttcatattgttctgtttttggtttccgatattattatactgtttttattttcgaatttaccgttttcgtttccaagaaaacaattgggatgttttcggacctttttcatcccaggtaagtggtcaaggcgcgcgattgtacgtccattacacgcactcggtaattccagatgcaaaattgatttaccgctagtttccaatttccaacgatgcaggtaagatccacagcaacgcc

SEQ ID NO: 1497 - DNA, 1008 bp, Oryza sativa
  Intron number 4 from transcript LOC_Os08g01080.1 (locus LO C_Os08g01080) derived from phytozome v7.0 (chr-ID Chr8; po s 59118 to 60125)
ttatcagggtcaaaacagcctgcttcataaggaaggtcagtcagtcccacagttaaacatattacgtttgttccttcaaatgtgatcacttgtttttgtgctagtgctttatatggcatatttgaacttaagctgttggtcaaagttgtttgaagagcaattcattgatattgtcgataggataaatggtgtagataggttatttcttcttgttcactttgggtagttcaattctagtgatttggtttaatcctgtagcctagcgattacagtgctcaagtagcacctccaggtcctgggttcaactccccacacaagcgaattacaggcctagttaaaaaaagtcactcgctggcccctcgtaaaaacgtgttaagaatcgacttatggagggtgggccctcgtgtagggggtaggtgcctcaaagcacaggttaaggactgatccatagggagcgagcccgcatgtggtgggctagggctcgtggcttttctcgaccggtttggttgaggcttcttcttaatggaaagccatgggggcggtcattcccccgctgatcgagttttttctctggtagcttagtgttgcacctgatagtactagcacccagtggctaggatctatcggcttctcctaagtttgtgtgcctagatctatgggcttcactaattatctgagagtttacactgagaaattatatcaaccttatttgaaaacacagaatcgtgaattcgtgatttgatcatggttgtgaagttggtgctctttattattaccctagtcgttacatgccaatcctgatgcttgtatctgttctgttgacacggttctgttcttttgtaccatggagtagtagcaataactctgcttagagaagataacttaattttttttcttatgagatatcctgtagctatttcctgctggttatatttggccctgatgatgttcgtttgttcccattctgaagcagtccctgttttagatagtgcaactcagcatcttttg

SEQ ID NO: 1498 - DNA, 2065 bp, Oryza sativa
  Intron number 5 from transcript LOC_Os06g22919.3 (locus LO C_Os06g22919) derived from phytozome v7.0 (chr-ID Chr6; po s 13386774 to 13388838)
atcgtgtacgtaacgtaaacaatctaagctacctaccatgcacataacccactgaggccttgttcgattaatccctgtgagggagggattggaggggatttattctatgcctattgtggtgtggaattattttccctcaatccctttcaatcctcttcaattcccgttaaactgaacaaggcctaatggatccaaaagagtaatacaatggtgtcataatatacataccaatgctatagtatgctaattacatttagactaactagcatggtggcccgcgcagtttgcgcggctagcatcattattttttctcttatataatagcatagatgttttctcattatattattcaaatatattaaaatgacaacataattttaaattttgcaataactttacaaaactactaatgtgtaatattcatattatattttatatacgtgatagttattaattatttttaatatcaaattttagttatttgtaaattatatatattcctatatggattctcgacttgtcttttaatatttttttttaattctgaattttctgtaaattgtatttctatatagactatatgattttattccaatattatttatttttatttctgatttttcatattatattttatatacttgttagttattaattatttttaatatcaaattttagttatttttatattatatatattcctatatggactctagactcgtcttttaatatttctttttttaattccgatttttctgtaaattgtatttttatatagactctatgctcttcctccaatattatttatttttatttctgaatttttattatttctaattgtatttctatgtagactctaaactcatcttttaatattatttaattttttaattttgaatttcagttacttctaaattgtattcctatgttgaccttaaactattcttcccatgtttttcttaattttgaattttagttatttgtaaattgtatttttatacagactctaaacactatttttaaattttattatgtttattccaaattttagtaagttttaaattcatatatggactctatactctacttgtaatattccttattttttaattccgaatttctattttttttcttaattgtatttctatatggactctatactctacttctaatattccttatttttaattccaagtttatattatttcctaattgtatttctatatggactctatactctacttctaatattccttacttttaattccgaatttcagttatttcctaattatatttctatatggactctatactctacttctaatattccttatttttaattccgaatttcagttatttcctaattatatttctatatggactctagtctcctcttctaatattccttttttttaattccgaatttcaactatttctaaattgtatttctatatggactctagtctcttcttctaatattccttattttttaattccgaatttcagatatttctaaattgtatttctatatggactctgccttttctttttctccgattaatgtgataatttctaggccatgagagcgaacgtggaggctcctttttcttttctatatggactctagtctcctattctaatattccttattttttaattccgaatttcacctatttctaaattgtatttctatatggactctagtcttctcttctaatattccttatttttttaattccgaatttcagctatttctaaattatatttctatatggactctgttttttctttttcaccgattaatgtgagaatttctaggccatgagagtgaacgtggaggctcctttttctgttcctttaataatataatagatagatgtgttataatatatgaaaatagtttaaccacaggttttatcaaaagtcatcagtatcgtctgaccaaacaactaataatattccatcatctctacgatcagatctcactggacagacgactcaattgagagacacaaatatttttgtttcaggtggttcgtggacagcatcccaatcagggtgttcc

SEQ ID NO: 1499 - DNA, 11361 bp, Oryza sativa
  Intron number 1 from transcript LOC_Os09g16458.1 (locus LO C_Os09g16458) derived from phytozome v7.0 (chr-ID Chr9; po s 10073089 to 10084449 reverse strand)
cgcttcctcgccaagttcaaagaacgcgtcgatcggtaaggcgatctcatattgacatggtgaattttggtggttttatacagtggaaaaggacgtcacaatattctgctcgagcactactacacgtaatatttttttactaatagtcatctcaatgtaggcttttgaagttagatttttagcgcaagtaaaacaaaaaaaacttcattagcacataattaattaagtattaataattataaacttgaaaaatagatttattaaattttttaaaaccatttttatatagattttattttggcaaaaaacacatcatttaatagtttgaaaaacatgctaacagaaaataaggaagttgaagtttggagttggaaaagaactgggccttagttagatactccctcggtctcattttaagtgtaaccataagcttctgtgtccaactttgatcgtccgtcttatttaaattttttataattaatattttttattgttatgagatgataaaacatgaatacatgacttatgtttttaaattttttcgaataattttcaaataagacgggtgatcaaagttgggcagggaaaatcatggctgcacttaaaatgtgacggagggagtagaagttacaaaaaaaatttagatacactcatagcatgacacgtccgtgttagtaagaaaaaattaatatgtatagccttttcatttttttatgttgtttaaatagtcgtaaaatgtttttctttcaaaaaagtagaagatctaaattattactgcctcggttcgattttaagtgtagcggtgggtttctgcatctaacatttctccatccatcttatttgaatttttttatgattagtatttttattgttattagattataaaatatgaataatactttatgtgcgacttttttttataaacttttcaaataaagcggatggtcaaacgttccacacggaaacacacgactacacttaaaatattggatggagggagtatatggtatatgtcttcacaaacatgcaagcttgatttgatccaaaaagcttgaatatgtcttcacaaatattcaaatctgaatatgaatggtcggcatactagtgtttaatctgtgtcatttttttctcgagttgtagatcaaatttagaattgagttttaataggatgataaacaactattgtataagtgttattaaatatttcgagattttatatattatacctacttgattaatattccaatggttagaataaacgagaggatcccttaaatgccaataaccagttgtccagctacatatcatatcatattaaatccttagatttcgtaacccattaccagcagtgctgtgattagtataggtatatatttctattttcactatattgtaagttatctactacctccgtcccattataagtgcacttatgaattttcgtgtccaacatttaactgtccgtcttatttgaaaattttataatttttttatagaaattagtcacaaataaagtactattcatattttatcatctaataacaaataaaatactaatcataaaatttctaaaaataagacagacggtcaaacgttcaacgtaaactctgcagtctttatgggacgcaggtagtacaagtttgaaaatatcactaaatcattttatgtgaaatttatttatttttcctgaaatattacttgattctctaactttctatgttcaatttttttgataaattccatgctaattttacttcatgtttaacgtttgcaaatgatcatttttgtatgaaaagtagtaccagaccttgcctagtaaatacatatatttaaataaaatatttacaaacggagaaccaatttatcagaatttttgcaaagtgggtgtagctccatcagttaggtttcttgtgatggaacctgcccacggagatcacatttacggctaattatatttttattcataggcgatgtacctatcgatagagagacaaccgtggtaacttggttaacctcaaaatatgtcatccgagttttacgaaggtgctcatacgggtagggtgtgcgtgtgcgttgagggatgagtgtgcgcgttttgagagcacatgcgtttgcattgtatttctaaaaaaaaatatcatattttttatgaatgttgttaccaatcagaaattacaaggctaattgactcattaatccatatgcaagaaaatttcctgaatgaaacattaaacttgaatttccggcttaaaacagtcaagcaataaccttcatatagcaacatatttacaaatattttttttccattcgtcctcgatttcaaaatatgtcgggaggctatctatacctatactaatcgggcacttttttggagctctcacgttaaccagaaaaatctaaccattgattagatggattgtaaaatcatggccgtacattgaaatctgtgttatcatgggcttttttaagcgaatccaacatgtatagagagtccctctattatacgtattgttaactacctacattgatatggatattcaatctgttaatatatctggacgtatcctatctccagttaggtcaatagatcgggctgtgttaaccacgtacgtacgtagcctagctgatgccgatcggaattaatggcggattaggcagcacgatatgcaaccgagggatcgtcgtgaggagcgaccattcgatggaatcgtccggcaagacggtcagccccatcatattcatgatttccaggttcgaccgctcctggccggggcttcatccatggtactaacaacttcttcatttttcaatttattttaattccgaataaaaattaataactgagtagacgaggaacaaggcaacatgtatgtgggatgatggaactgtcaacagcagtgcaatcatacagggtaagaaaaatacagcttattccctttggttctgatctgttaatgtcattgtgtacatatattttcaggaacatatttttaattttatttgaaattattacgatctttggcgtatcgatagagttattttatcacggtcgactgacagtaaaaatttattagttcaccaaagattaagttgtttcataataattttgaagcaggcaacttacatatcgatttatagtttttctgaacataaacaagcattttgtcctctctatacgccaggttgtgtaatgtgcaattgaactacttcaaaaaccattttcgcaggtatccctttactacgttctttttgccgtacttctgtattctttttgttggaaaatagctttcttcgttttggtaaaaaaaaagttttcgtcagattctatggtataattcaataaaatgtgaatactactatttgaaggtttgcttcaattcaattagtcatgaatatttactcaggcacccatctgtattccttctaaatagattttcaagccaataatatataggaaaagatatatctatatattattgattaaaataatgtatcaagacacatcacagcttcctaattgttaaaattacattaataaataaatgaaatactaaaattcagacccctaataggaggacgatctcatattttcaattctaatttacagaattattaaataaaaaattacgactccaaggagagttcaatttcgtatgtattaactctgagtccacattatctatgatttttctattttgaaaactattaaattagaaaataaaaaaactagaaaaaggatatagaaaagcataaataatgcatttggtactccagtactttgcataaaagcgagtgtcgttgtggagtaagattttgtatatattattattatcaaaattcacaattactttaaataggaaattaaattacttggtttttattaatctatttgtcaattaaaaatatataattctatgtataaatccatttatacattatatatatatatggtagttctgagtgaaaatcaagattcttttaaagttgatctccactcaaatccgctaatatgaaatcaactaattgcctttatgagatatttttgaaaataaataaccaatattctagcatatgattaaaatttttaaaatattaatatagcccgtgcaacattcttacaaattaacattctcaaacgcaggtggggtacactgtgatttaatcttaattttctttaaccttcaacttattgagttaagtggtagagatttagatttcttttattgcacatagtagttctctaatatttaagcgaataaaatctataattgggcttaaactaaacaaatagagcactctggggagctcccacatttattgtaattgacatctgatttatcttttagttaaaccgatataattaaaaaataactaatgatttttctataagtagaatctaaacattataatattaataataatagcccgtgcaacgcatgggttggcgactagtaaacataatatccaaaaaaagccatgttgcttgaactgtggccttgccaaaacgaacatattctcatttcatcttattccaatatgttccgaacattatctactgaaagggcgcgtgaagaaaagatgcatcatacttatcaccaattttttagtatggccggtcaaaagcttctttaataaggcaaaacaatatcaaatacaaggctaattgagcatttgtttccttctataatattcaatcaaagttccttgcttaattcaatgatactcaaatctcttgtgtgttcgaaaaaaaagagagtaaaagttcgtttttaccatgaagtagtgaatgatctcagattagctcctttttttagagttattgggcacatacaatggcagcatacattttggctttgaaaaaaaaaacataagattttctttgctgtcccaacttttttaatggatataggtgagacacaaactgtctggtggttggttagatatattagctataaagtatactagaaagggactaggctttgccgcgtaatgggtcatctagtaagaaatattaatgggccatcgtttataacgtttgtgtagtgattaatatttattagtaaatatatatgctatttgttatatttgtttgtttgcatttggtatcggtggaaattcctgggaactcaaaaaacatgacaagcgtggattggttgactaagtagaccatataaattttaatactgaattttagaagagaaagattacaaaaataatagcaacaaagggttgccacttttaaccataccataagttgatagtaccgaaattttgataactatagaagttttcactctcaaaagttctaccaaatttgcgaagtgagcatagctcaactggttaggttccttgtggtggaaccagcccacccgggttcaaatcctagatttgacacaggtgctcgcatttacggctaattattctttcagtggtaggcgacgtacccgtcgacagcgaggcgcctgtggtgacttcgtcaatctcaagatgtgccggcccagtcttccggaggtgctcataggggtagggtgtacgtgtgtgcgttcataggggtgagtgtgcgcacgttgtgagcgtgtgtttctcaaaaaaaaaagttctaccaacttttggtaatgcataatttaaaaagtacgaattaccccccccccgaactatcgcggtcatccgaattacccccgaaccacaaaaccggacattcttcgcccccaactatgcaaaccggacaaattaccccctcgaaccaatttagagtggttttgtccaacgtggcgcacacgtggcaatccagtcgccccccccccccccgaactatcgcggtcatccgaattacccccgaaccacaaaaccggacattcttcgcccccaactatgcaaaccggacgaattaacccctcgaaccaatttagagtggttttgtccaacgtggcgcacacgtggcaatccagtcagcgttttttaataaaaaattgtggggcccatctgccatacttttctcttcttcctctctctcctctctctctctcgctcttttctctctcgcggctcgcgctgcgcacacggcgaggacggcgcggggacgggtggtcggcgatggcagaggcagcgagcgcggcggaggaggtagcggcggcggcagaacgaggcggcggcggcggccggcgaagtggagcaaagtgcccgcagcgaggggcaacgggcaagggcgcggcaggcggagtggagcgggcggtggcgagtgaccggagcaagtgggcgagtgcgcggccgtcggcagagtggagcagagcagtggcgggagagggggagaggaggccgagcacgacatcgtcgtcgcgctagacggcgaggtgtcggcgtgggtgatcggcgttggcccgttggtaggaaggcgagagcgtcgggagatacctcgtcagggtggtccaagtcatcatccggagcggcggcggctgcgccccctccacggtagacccaccggcggcgacgccgactgccgcgcctctcccctcccccatctttcgtcggctgcctcccctctccctctctcctcctcccgtcgcgaggccctcgaggcagcggagctcgaccgggctcactggccgcctctttcctttctaccgccgccggcctatcccctctttgcagcagaggagcctagcgcggcggcggaggcagcgcccacgatgaagcggaggaaggcgcggccgtgagatggggctggttgtcatgcatggcgtcggccaccgcctcccctcgccgccgccgctgcctccttcaccgtaccccgccatcgcctcgcctcctccgtgagcagcgtgagctcatgccaacgcctcgcctcgccgccgccgctacctcctccgctgcgctcactgcctccgccatcgccgaccacccgtccccgcgccgtcctctccgtgtgcgcagcgcgagccgcgagagagaaaagagcgagagagagagaggaagaagagaagagtatggcaggcgggtctcacaattttttattaaaaaaaggctgactggattgccacgtgtgcgccatgttggacaaaaccgctctaaattggttcgagtggggtaattcatccggtttgcatagttaggggtgaagaatgtccggttttgtggttaggagggtaatttggacgaccgcgatagttcatggggtaattcgtactttttcctaaactaaatacaatcaacactaccaaaatttggtagtgctaaaatataccatgcccataatctttagttagcggatattttggagaacggtcggtgctcggtaaagtcattattttgtcttctccagtagctattctacatcccatgccatgtatacactccacagtggcccactttagataagcaacaaaataaaaaataattacgtacttttttttaaaataggacaaatagatccgttatgagtcttctgtaggataagatcggtttggtcttgtgataggggtttgaggaggaacaagaggggacttctaaaaacataaaatggatctccttatttacagggaacaaagtgagtgatatcttttgtgagtatccaagggttacttctcagtggcgtagctaggaatttttcgttgggtagtcctattgcccatgatggaggatgcaaaaatttaggtgtggccaagtaactggtagatagcaaatataatgatgcaaaagttatactacgaaatttacaaaatttgtccttggtcgtgcctacttatgctacaatttttaatatcaccatacaatataatatgcatttacaaaattgttaaagaccacctaatttaaataaatcatcgtaacataagacacaatgataaaaaaaaaaagacaatgaacaaagtgagtgatattttgtgagtatccaagggttacttcattacttctttatgttctaaaagtgctaggtatgatttttctagacatttctgataggatacgtacacgggagacatgtaggagttcttgccaatggatacatatgttgcatgttactccctcctttccagaaaaaatcaacctagtactggatatgacattatctagattcgtagtactggaatatgtcatagtcagtcctagattcgtttttcgtgggaatgagggaatatatggcttattttcagcaggacacatggcagaattttagagatgtctaacttaatttttagagactttttacagtccttgaggggaggcagtaccatatcttggccattggtttcgcccaatctaacggctgaaaatggttggtaccgcgcggtaccgtgccttcctccgagccggtaccaaatgacttttgaaggtgggagggcaaaattgtacattcgcataccgattaggagtggaacaccgcgtgtctgccccagtcgtcgccacaaactgagcaaccctagaggtggccacgagctcgtggctgatgcggcgacctcccgagcggcggcgacctcccgagaggtgggccgatgcagggttgtggtcccgccgacgaactatcctacctcctctctcctctcgtacaatagaggcggcggccatgggagttgcgcagaggccgcgagaaacctctcagatgcagaggtggcggaccaaagtcggctcctcccaccaccttttggagcctcctccacctttcccatctgtgtctcccttcctcatcccctgcccctagcgccttaaccatcccgtcgtccagatccggccaaggaccggagcagggttggaaatttcggactgaaatttttgaaatttcgaaaattttggtcatttcggtcacccccgatacgatattatttcgaccgaaatttttcattttttcatgaatttgggtaatatttgttcaaattcaactaaattttgcttaaaatttcggaaatatcatatcgaaatttccgaaaatttcgggatttcggtgaccccctatacaaaagcgtcaaccgatagagtcaaccctggtctggagcgccagatattgccatgaggtacacggcgacgagctcagctcggagaacagattgaccttggggctgcggcgcaacgacctaccactatcctccctagcgctgctactggaagtgatgaccgttgggctggtcgccttgtgtaagaagaggatggggaagctgcccggcatccatcaggtacgaagctgatgccagcagcagctgtgagcctgcaagcgcatcaccgtccccatacttggggtcaccagtcgatgtcgtctatgagtgtatgacttgatctgtaatttttttaggctgtacatagtggagtatatttcgctgtaggtgaaatctaatttttttttcctcccaatatctcaagcacggaccttttcttcagcaaattaaccatgatcaaagaaagggtaaaaggatttgtaagatcttgtagtcttgcccttgtttagttccaaactttttcttcaaacttctaacttttccatcacatcaaaactttccaacacacataaacttctaactttttcatcacatcgttccaatttcaaccaaacttccaattttggcgtgaactaaacacaccctttgttcaggcacgatttctacctctgacatgccaaaacctggcgattcttgagtgctagaaggaacttgcatggtggaatatgtcttggtctattctgtcagttactatgttttgttgcagaagctattttgtcagttatgtatgtggttgccggaatcgatattgttggaatctgtcttgagctattttgtcaattatctacaaataggtaattgacagaatgacaatctgtcatggatgtccataaatattggggagattttgccaagatattaaagaaattcctagtgaactctcttattcatgtaaaactgcatttggttgtgaggtttagctgagattttctgagttctgaaaattttcgaaccttttcggaactagtgaatcgagccatgcacagggagttccatcacgccaaaggaaggtcaccctggagacgtctctttcttctcctacaagctcctcccaaatgctgtgtttctccaatcactccatcgaatggcctccgatggccctgcaagagagagggcagggatcttgagcggagcagggctggctgtatcgacatgacccggagagaaatacgaggacgaagacttgggaaaggggtaaaaagtcatggggacttgttgtgtcaacaaatgtccccataccaatcttacccctgtgaaatcaacggtgggattgaagtggtacctcaaggtacctggtacctcgtatggcccgtttggttggagggagtttttaggagggattgggagtttagagggatgaggctattaagtgttttgtttggttgggagacatgaaaattttagtgggatggggatggggaattgaggaaggaactcccttcttttcaataccttggtaggggcaggtaattgggaggaaattcctcctttactttatgtaagcaaatctcagccatccgtttttattaatgataatctccaactaaactctctatcaatttccatcacctctatcaaacaagatattgggattaaaattaaattcccatcttaatctcatcatcaattctctcgtgtaaactcccaatcccttcccttgagttaccaaacaagccggtagtacctcctcaaggatggtaaaaactctcagagatatgtttagtgtgggagtttccggattctcctctcaccctgcccgtttggttggagggagtttttaggagagattggtagtttagagggatgaggctattaagtgttttgtttggttgggagacataggaattttggtgggatggggatggggaatcgaggaaggaactccctccttttcaatacctgggtaggggcaggtaattgggagggaattcatcctttattttttctaagcaaatctcagccatccgtttttattaatgacctaatctccaaataaactccctatcaatttccatcacctctaccaaacaagatattgggattaaaaatcaaattcccatcttaatctcatcatcaattccctcgtgtaaactcccaatcctcttccctcgagttaccaaacaagctgacagtgtatcttcttctccttattaatcaaacaatgcacagatctcctatgtgttcgaaaaaatatattcacatggttacgacattaatttggaaggcatggttaaatataaggaaaataactaggtttttccttttcatggataaccatgctaaattcaattggaaactttgattgctaagtctcctatttgaaagatgtttcctctgtgcagggttggaattaagctaccgacggttgaagtgcggt

SEQ ID NO: 1500 - DNA, 2855 bp, Oryza sativa
  Intron number 1 from transcript LOC_Os10g07556.1 (locus LO C_Os10g07556) derived from phytozome v7.0 (chr-ID Chr10; p os 4076839 to 4079693 reverse strand)
gttgcatcggtaagtttgttaattgctacatacccattcgttcaagaaaaaaaaaactccctctgtataatattatgagatattctgattttttttctagtcaaacttattttaagtttatccaaactaatagaaaaaatagcactattttaaacacaaacccaaagtttgtcaaaatataatcaatgttaaatctaatgaaactaacttgttgttgtggatgttattaattttcttataaacttgggccaaaattaaaaaaaattaatatattttgatagtatgtttgttttgtgttgaaaatattgctatgttttttatataaattctgtcaaactcaaagaagtttgacgggaaaaaaagtttaaatatcttataatgtgaaaagaaaagtaagtattactaaagtttaaatttattatcttaatatgaaacaaataaatgcattgagtactactcctacctaaccacccctcttttaattaattttgacccaatcgatcatacccactgaaaaccgatcacccatgttttctctttattcttgatctctcgaaaaaaaaatactcggaagtacttatatttatggaaggagggagtactttcatcattcccataaaaaaattccatcctaggaagtgcctttgttgattcttggatccaactccaaagaattcgtagagatgtgtgtgtgcacactatagtttaaaagtagagtggtttaaattccttagtccaaattatgaacttatttgtcccttcaatatagttataactagggatggaaatggttatgaaaaattcccaatcgactggcgtgtgcttccgatttaaaccggccaagctaggtggaaacagttaccaacgaaaacgaaaatggaagtggtaaaaaaaaatggaaatagatatgaaatgattttgctgcgtaccaatcgttaccaacttttaccgtgttcttactgtaattacccgttcttgccttatttctaaatatgctagtatttatggcctaattcttagtttgactcatgctttagagacccatcaactcctcaaccaaatccctaatctgagtacagtatgaaaaggagaaaatttataatttagatagcataccttaaatttaatttgtcgtattatattgttatgcagagttaaatgtgcgattttatagttcaatgtttctgatatttgttatttgcttccaatcgataccgacatgttgctgttgccgtccgtatagaccatttccggttttctgatattttcgatatcttttttttccggctttaccattttcaaacaaatatgggtattgaaatggttgagacgttttctaaccatttccgatgttttcattcctacttacaatccacttcatgttaaatctcagcatgtttatgtcctcaaccactaccaactatttcctccatcccaaaatattgctacctaggacaactaatctaaaaagacccatttggccttcaactaatccaaacggactgtgcagattagtgtcctaggttgggtcaaatcccatcctagatagcaatattttgggatggggtaatactgcatcttaaatctcatgcgaccaatatcacatcatatataatttattacattctatataaatataacatcatagagttcaatatgtaagcatgtcaaatcatcatcctccatatcattttacaatattaatttcaacatatatccatctatcgtaacaatatttaacatgcattgatctacgtagtcctttttcttacatataccacatagacatgccatctccctccgtcgctttaaaattagctcaaccaataacagctaattttcaccatcattgtttgttggaatataggttttggacacatgaaaatgacataacaaaatttattatgagaatagaattcataatattacactgaggcactggtttttgatttatgcaaaagaattgagtgttcataatcatggctaatgctgaaaagtttaaaacaacactagttcatttatgactaaagagactatttgctcaaaggttattgattatgaacaagtattagagattgtagaggccatgcgctttcaagtatagatataaatcatagacatgggcgtttcttaattaggggaaacaatcttatatacccctaaacttagaatgaaagtccattatatgggacactctaaatttgtcgcatttgatctacagcattttagttttgcggctttgtcactggacactagaagacacttggtctattattttaatatatacccttcaaatagatgattttacccttgattcacctagcatattcaaatttgaacaaatcttagctagttctaaaaagtacaaaatattaaagttgtcccaaattatggaaataaaaatattttacgataaatttctaaaagctcagaaaataatatttacaatttcatgtttttgaaaatattgaatactttttatttcaattattttgtgacaagttttgagttttccaaaatatgtttaaattcagcaaaaaatgcatttaaatttgaatatgcaaggtgggtaaactcgttttcttttcctcacaaagttttatctctcaatttgaaggaaacatattaaaataatggttagagtttctttcaggaaaaaaaccacaaattagagtgtcctatggtaaagccataaaactagagtgtcttagataaaatatcacaaaactagatcaagtgtgctagactgttatattagttattccaaaccgcatatatatgtctgttatatggtaggcatggataaatgattagtttgttatgttgggtatacttgatgttcgatacagatattg

SEQ ID NO: 1501 - DNA, 8816 bp, Oryza sativa
  Intron number 2 from transcript LOC_Os01g38229.2 (locus LO C_Os01g38229) derived from phytozome v7.0 (chr-ID Chr1; po s 21414436 to 21423251)
caaggacaagaacttttactgctttgaggtccaaggtaacaattgaatatataaacttatttttttaacataacgggtaatctcaaccttttacttctgaaggtaaccactcgctatatacctccgttaatatatgatgttggttagttcaaaatagagtaatatatattgtttgcagctccagaggtataaaacataacaaataaaggaagacaacaacatgtgaacataaataaactgatgctagcaagctctcttatactccctccgacccataaaaaaccaacttacactactacaaaacatcaaataggtatcgccagatgccagtagtgtttaaactggcacctataggccttttcccaccttcgcgggttgaaattgtaaaaaaagggcacctttaagtaataataggtgtcggttctaattaaaaaccggcatctattctattttgtgctggttatttttaaaaaccggaacctttaatattaaaaactggtacctataataaattataggtgctggtttttttttaaaaaaaccgacacctataattgagccgagccggcgggccccaccacgacgcttcgagactcgataggagataaggtcgaccgctcgctcgctcgtctcctctcagtctctctctatctcgttctctccgctctctctcccctctctcctcttctctttctcctctccctgcatggcagcggttggaggagcggcgtgcggcggcggccgcgccatcccctctgccggatctggcgagggccggcccagcggcggcagcagcgggaggcggcatgcggcggcgaggggggggatgcggtggcgacctggcggcggcgccctcccctctcgaccctctctcgctgcccacgaccgacggccgccccccccccctccgccagatccggggaggggcggcccagcggcgggaggcggcatgcggcggcggaagggaggggggatgcggcggcgggacaagaggcgatggtggcctagcggcggcgctccctccgtcggatctagcggccttgcagcaaccattttttgtgatgatttctatgatcaatgttctgtgatgatttctgtgaaatatttttgtgatgttcttttctgtcaatgattggggatgagctcgatgcatcgagcttttttttggctcgcgagtggtctaaaggtgtcggtttttaaaatgtgatttgtgccggatcactcatctgtgccgtcttcattgtgccggttgggaaaaccggcacctattagggtttcccaaccggcaccgtttaccctttctgtagtagtgttagtactaaatgtgatacattctagtactacgaatctggatattacctctgtccaaattcattgtattaggatgtgttatattcagtaatagattttttttttgagacggagggagtatatagtacccactcattcgacatttggccctgcatttattttctcaacaatttgctagtttgagtggaggatttctgtttacgtactgtatttattgtctctgtgttcagacaatttcaatcccaaaaaactcctattcatatatgagaaatgtttcagatcgactagtctctaatattatttaaaaaaacacaacgatgccatcgacatgaggagttttttttaaataatattacaaattgcaatattggtgggagggtctatgcgaaatttaaataatattacatgaggagtaatattacgatgtcaacgatgaacatagtctctaatattatttaaaaaaacacaacgatgtgggagggtctatgcgaaattttgtatatacatgaggagttcttttttttttcataatagtcatccatgtataaatctttccaaggagaaaaacaattgcaaaatctgatgaaaccgaaatgggatgaagtgttatgagctgagagtaccaacagaaacagataatactttgcacgaagttttcaactattagtaaattgtgttcataaccaccaattgttagttaccccataattcttcacgtttcgataatattaagatcaaacttttcaactttgactatccataacttttttaaaaagtagtttgaaaacaattgaaacatatatagattagttctaaaaactactataataaaagtaaatatttccaaaacataaattatggaaccggggggtgtatcaatgcttaataagttaatcaacctatcattccagattaactccaatctaaaattgttcttaattaagttaaatatagttagtggtaaaactattatctctgtcataaaataggatttctaggcttttttagggagataaataacatgctcgtgcgcacagcgcttatgactagatttcttcatcagttctgtctcggtttatttcctctcgcgctatgcacggatgacgggatggaaggagaacgattcttacataggattttcgcaagcggtgaagcaaccacttgcagaaatcatcattttttttttcaaatagatagtgcaaggatgcaaatctactgctgtactacatccacagtatgtgtcactgacatgtgggtcccacctattccgggcccacatgtcagtggcacttactgcacatgcattacagaagagaatcccaactcgtagtgcaaccgcttgtgtaaactaggaaggtagcccacgcacatgtgcgggcagctgcttgaatttttatcgttgaagcttatgtgtggttgattatttttgttgaaatattcattatcattgttctaaacctgttttcgtcaataattatttcttttacttatttagggcactaattcaagaacacacaacagagaatttcccaaacactatagtcaaagcctctagctagatgtgtatttcagatcacacccagtgtttggtacagattggcatctcaattcctaaggcctctattttcatatttgaaaacttttgggtggagcttgagggattttttgagctagtgaattcttcatggagaaatcatggttgctgaaatgatgaagaagaaagacaagtttagctacaggatgtcgcgacttcatgatttaagctgtagaacaccgcacgtgatcacttttgtgaggaaaatactctctaaacatggttatttgttagtggacatcgctcccattaaaatattaattttcggctgaataagagagataaacggtgtgaaaggtcaaaatatccctgaccccacttgtcatattcttcttcctccttaattccctttttctcccaatcccacgccgtcgtcgacgacggcgtcctaaccatgggcttctagaataacaaccgcgtcgggctggcgactctggagtcgacaggatgtgtggcatgttgaggaggcgcggcctgccacgggaagaggcggctgctgcgattgcaagggcggtggcggtggcggtggtggcaccgggtggtacttgtggagcagtggcattggtggtgggagcaaggacgacgttgtggacaacggaggtggtagcgcagccacaacgccaccatgtccttcatgtgttgccgccgcactgtgtagtcctgctccaccatagacgttgtgcaccctatcaacccccacgaactggtgccactactgccaatgccgacccgtgcaccacatgccgccgatggtgctccccacatcctcctcccgcacctcacttgatctacaccgtaactgtcgtgggcgtcgtcgcacggtgtccccgctccgctgctgtcctgactgtccccgttcctccgttatcgtcgcacactccacccgctggtcgcgccactgctcacggctcgcagtgctcaccggagaagagagaaaggagagagatagaggatgagataaggaagaagatctagaggatgaggaagacaaatgatggacaatttggtcactccacatataaatatggcccccctatcgcctcgttaacacaaatgcattattttaatggacgcggtgtccgctggcaagtaaccacatttagatagtgttttccctaaagattgagttcgtgtggtatcctacaactaaaactaagaagtcacgatgttctgtagcaaaatttgccaagaaaaaagtattacagttaaatttaagtttttgaggaagacacttaagaactggagtaaaacattgtcaaagctgaataggttgataaaaaactgtaattcagtggtggattctattgataaattagtggagtcaagagatttaaaagtagaaatagaatgggacttctgaaagctgatcagatcaaaagttttgatctacgtacctgaagtacaaacaggtctatcttctaaatgaaaaaaggggtctatgcccaaaccacatattttcctatatagcaaaatatgagtaatattgatctcaatttattgtttaattacaaattaaataacaattttaaaaattaaaaactagagattttgtttagtacatgaccactttcatacgtacaggagggagggaggtggggatggtcgtacaggagtgagggaggtgttggtggaagggatttattttttaaaagatttgatctaatagttgaaaatactgggtccaccaaattgagtgaaaatcaatgattagatgtttttattttcttagaatttttaggatttcctctaatttattagagtggcacttggtgacttaaaagcgttcgtaggatactacgtagcggcgtaagagcgtttataagaagtttaatggactaaaaacaattgtttatgtatagtagcattgagacgctagtgattgcacgttcactacccgctaaaactccttggaaaaacagatctaatcatttatggtaacaaattatggtgtctatcttttaactgctttaattaggaaagaaaataagagaatgagggggaggaaatggatagatcgtgcacatggagggatttgtacgtacgtacatacgtgtggggccggccaggagagaagggtgaaggggatttagttttgatctaatggttaatattatcgggtccaccgttttaaatgaaaactgacggttagatgtttttcttttttacagatttttctataatttattagagcgccacatggcggtttaggagcgtttgtaggatgctacgtgacggcgtaggagtatttgtaggaagtttaatggacttttagtatataatagaagatagatagatagaagatagatagatagatagatagatagatagatagataggattatcgctgaaaacaattttgtcgtctgtctatgaaacttttttttaaaaacaaaagtaatatagaaaccctagctcccactcttaggaaaaaaaagaagtcgtcgccaccacagtccaccatcatcattgccgctatcgctgtcaccgctcgcgaagccaacatcattgttctgcctggatccgcctacccagccgcaagatgctatggcctatgcgcatgtttagatacctgccaaaaattttacataatattacattaaacgtttaaacacctgcatgaaatattaaatataggtaaaagaaaaaaaactaattgcacagaatgcgactaatttacgagacgaatgtttgggcctgttcactttgccattttcaaccttaccaaattctggtaaagttgtaaaaaaaagtggctacatttagtttgttgccaaattttgataactatataagaaatcctaccaaaattttggcattttagctatgccaaaattttggtaatgaaaaaatttggtaagttttttttggcatcaaagtgaacaggcccttttaagcctaattgctccatgatttaacaatattgtgctacagtaaacatttgctaatgatggattaattaggcttaataaatttgtctcagagtttattgacggatttttttattagtgcccgaacacctcgtacaaaggggcggatccaggaacaaaaaatttggaaggctcaattatatactttcttcaacctccagccatttacggacttttagtttatcattcatagtgaaaaaattgaagggggtgatctagggatatccataggtcttgggtgtagggaagactcgagtcctcctacacccacattggatctgcccctaccctatataatatacaatgtgatacgtcaaaactttacctctagccatcccctgtgaccctatcttcgtcaggctgtcggtaccagatccgactgtacactccaacaacggactgcccctcccgaggccagtaccggcggacccaccatcccttaggtcgtcgtggttgcctagttgttggcttgttgccacccctccccaccctttcgttggtgccatctaatccacccgtcatggcaccggctatgatggatccgcccatcacagggccggcggcagtggaaccgcctgccacggtgcaggccattcagggatagagggaggagaaggagaggagggacttacaggaaaacgaggaagacatggagccctatggaaggaattttgtatgcgggccgacatgaagccctacgggacgattttcgtatacgtgtctctggtcaagtgcatctgtaaaaaataaacttacatttttgtaagtagattttttgcaaacaggtcgttactcggcacctcccaaatatagaattgtaagtagattttttttgcaagcgtaggcatgaagtatataaccaccaaaatctcaaatccaaaataaacttgatctgggcgaaaaaaaaggaacaaatttgtttttttgtcccgactgaaattgagtttatacaagatttggggtaatgtagttcatgctgatgatagtaatttttctataaatgtacaaaattttttggtctagttttttatttatacttttcattggatatttacccaattacaaatccatatatattgtgtattaaggtgattcttggtttagggatgatcgagttaagatgggagagaaccatcctattttaagttgtttggttgggagttaaaaaggaatgaggtgttccttcgggaagaatatcccccaatatatatacggcatgtttggttgggtggaattgtttggggggaatgggagtttgaggtgtgaggattattaagtttattgtttggtacgaggacgtgtgaattttaggaaggattgagaaggggagtttaagagctagcgcactctcaccttttcaatatctagatagagacatgtaattgagatggaacttctttccaagtacgccaagataaatctgagccaacatcatcatttaaaatctaataccttctcatctatgctactaaacaaggaactggaagtaaaaataaaactcccatgatgaatccctccaccaactccctctaaactcccaatcccttttccatctcttgccaaacaggctgacaagagctgaaaacttatgaaccactccatcctattttctctatcgttgacatgcgggccacatgtaccatcccatccctttcatcctaaaacaataaaaataggatgggagagccctaacctaccacgcagcatgaccatcccattgaaataaaaatatagggagagccctaacctaccatttatcctcaaaccaaacccaccctaaacttaaattaatagattcacaaaatgttgattaaataaatattaagaagtatgtttatggaaaatcaatgaagagtcgttcaaataaaacgtggcacaaaattaacggaggtagtacctaggagccaccctctacataccctactctattcatatctataccttctatatagttacgacccacttaatttaaagcccaacatataaaattgttatatcatcatctactagccataattacatatcaaacatcatgcaaatatgtaacatcatctataatttattaaattctacaaattaacatacaagtatatatccccatcatcgcctctcacattatttgcacaatgtttcaacatatccatccatcaaatttataatatttaatatatattccatatattctatatcaaatacagggtatcagttattgtttttatcatgattattactaataaaccctaactttttatcatttttttcctaacttccgctttttccgatataaatcttcatcaactatcctaatgttttatctacaatctcggtaatcctacatatagtctactacgattatttgttgttaataacgagtatctttttactcccatcttgattgttgacgagagaaaaaaagattgtaatgtccacagcaaagtacggggaaccacttactttcaaaagaaactcgtccaaaaaattaacgatgttgtgaaaataattattgctaaaaatgaataaatttaataaaaccccaccaattatggtccaactttcacaaaatcacagtatttcaacacataacatataatccctccctagtattatgattctaaagtttcacaacgccacaccatccactttgacataatcctattttaaaattttaaaaaacagatgtaacatttatatgatggatgaaatcctcataaacttgagacgtgattgcaggacacaaaagtgttgtaaatgaaaatcaatatgatcaataatgtggttatgagaaactctaataccataatagctgagattatatgtcacataccaaaatttatatggttttgtataacttgtaccataaataggttgagttttacaaaatttactgaaaaaactaatgctaaattcctaaagctttaatttatggtccgtgcaaatgttcatgcgcagttcacttcactggagaactagttgacggtacgcag

SEQ ID NO: 1502 - DNA, 2064 bp, Oryza sativa
  Intron number 1 from transcript LOC_Os12g22489.2 (locus LO C_Os12g22489) derived from phytozome v7.0 (chr-ID Chr12; p os 12690152 to 12692215 reverse strand)
ggtcaccgtcgccgttgccgaatccaccccctccggtgagtaccaacccaattccatgcatcagtagcatctctggggcctctctaacctcatggacacacatgcatgatagttcttggagctgattgagccatcgccgttcacccggaggttcttgccgccgccgagccgttacacgagccaccgtcataaacctagctaccccagccatgtctaccatctcggtgagcacccttcagcctatagaacatacatgcatgcacccaattaaccaatacatgattgtagaagcacatgcatcaccacccgaaaacatcctcctttcggactcgccgccggcgttactccgatgtccactgaccgagaaaagtagaggaatggaatcgcaataacatgatcttcattttgtattttggttgcacccccaaacgagccatcgtttgtcgccggtgagctcgagatcgaactcagccatggctgttctgcctctgtgcgtgagaaaagaagtcagggaccttgtttcgagaatttaaacagctataaggtttaatgtgcaacttttcaactcactgacatatgaggctaggtctgtgggttgattcttagaaacctcagggatctttttgtatattgatctttcactgacagtggaccccttggaaacaaaaatctgaaattataaaaggaaagtacctaaaacttgtaaaatccatataaaattaaatatagctcattttaagatgatacaaatttctgtcaactcaccaaattgtgaactttagtgttatggaataaaaacttgcactcacagtacaaatttagcctctaaaatttatccaagttaaatcacacataaagcatgcacaaatttataaaatgcatacaaaattcatttcaactcattttggagcaaactcagtttctacagatccaccaacttatgttctcctataaagcaaaatgaaatagtatacatactatacatcgaatgcctctaaaactattacctttaaaatgactagttttacataagctgaactttagaagtttatataaaattcatcttagatcctttttgagtaaacccaaattcagtagaatcatagggttgtgcacttcaatgttataaaataaaaagacatacttacagtataatgaaaacccctaagtatttaagtaaggaataagcaacatggagcataccttaaattgtaacatttgtagaaaattcatctatagtctaaatgaagtgaaccaaattttctatagaaccagcaagtaatatacttcaacctagtagagtgaattatagcaccctcttacagaccatggctctgaaccttaatttggtagaataggtactaaacacatagtaatggttaaacaatacatatgaaaaagtatatatatgcttggtagctccaaataaatccaaataaaacttgttgaaccagtgaaggcatagatccatccccttccaccaaaacttagtatccttaacttatataataatctccagattgatatgttaagtttctaacatagaacatcccctagcttataaaatgtgaagtaaagtaatttgaacactaaaattttataaactaagattagattagttaactaaaatactcattttatacaacactagcaagttagagcaagttctggacctaaatctccatagccatgtacacatagggaatatatgcctagaacacgttaaaacttgtaaaatacataaataattcatattaactctaaaaattatgaaaccaaatgtgttagtcttagaaaacaaatatcttcaccccagcaaacataaacttaataagaatcaccttacaacagcatttcacaatagtaactaagtaaatcctacactataccgacgaaacttctaaaattcataactcccaaataaaatgagataaaatagaaattctttcacctaaattaattttagaccagtacctattcactgtgcacaaatcatccattttagagcattttggatttttcgcatatttcggtgtttaattgcataacgtgtactttgtatag

SEQ ID NO: 1503 - DNA, 4929 bp, Oryza sativa
  Intron number 1 from transcript LOC_Os01g64030.4 (locus LO C_Os01g64030) derived from phytozome v7.0 (chr-ID Chr1; po s 37189815 to 37194743 reverse strand)
attcttgccctagctcattcgagacataccatcaggtaatcctggtttttggacttgaatactatttttgtatagcctcatacaattttaaccttatgcagttcaatcactgtaacgtgcattgtagagatggttcatattgcctcatttttcaatattttcctgtgaagtagttcagtttttttctataagtaaaatatttcattgctgcatcagatttcatgaacttaaaaatccaacttttgggccttgattgttatgcttagattctgacgcacagttgctttcgtaaaaccctatgtagggcttcttcagctcctgctaattgtgacgtgatgttagcccttggtgtaggtttgctattgatatgtgctgttctttcagtcgttcagtgcttacttgaaggcccatatagtggaggggaaatcaatcatttatctccttaggacagcaatgtagcatttaccactcctcaagttgataaaatttcactcttcccattgccttttataggattcactacttttaactgaatttccctttcacccacacccttttttcttcattcacttttttttgcctttactgcggtgttaatcgctttgcttttatatttcctgtcccttgtgcacatctaccttgatgagaagggcatcattttgtgatttggccaggtcataccttggttgtagcttagttttgtttctggtaataaaatatttgagcttaaatacatcttgtggacacaaaccatatgattgatgctcctaactcataagtcatactcataccaagcatatctggttggttgctgcattacatggtagacaaaccttggaccttgccaggttgtattattgacttattgtcactccctctgtccataaatataggcctttaatcattattgtcttacaattcccgatacaatattttgagtgcatttttcatgatattaagagagcaataaatgaatatctatacctaattaaaaaattcataaggtttccgttagtccgcttcgtccgtcatcgtctttttgagtccgagtccgtcttcaaaaatacccaaatcaatcaatcaacgagacaacaaaaaacagcatgaaaataccaaatttaatctggagctcatgaatttgatcccatgaaacctaaacccccaatccgatccatctgagccaagacaatacataaacgattgaaaatgaatcaaaaatccacttaatcacgaaatcaaaaatccaaaatcatccaggaaaattaaatcacaaaactaaattaccgacgccactgctcatcggagccgaggacgccgctgccctgagaccatggtggcttggcgggcgcgccgccgtgcgccgcgaggagggtgccaccgccgaggcgctaccgtgaagagggtgccaccgctgtgctgaagaacagggtgatgctattgaggagaggacgccgccagccggggaaagggcaccgcaggccaaggggaggacggtgtgagggcaccgcggctgagacgccggctgccaggggaagggcgtcctggctgaggggcaggggaagtggcgtcgcccgtgggggaggaggggaagcggcgccgccggttgggggagagggagggcgtgctggctgaggggtaggggaagcggcgtcgccggtgggggaggaagagggggagcggcaccgccggttgggggagagggactgagggagggcgtcgctggctcaaaggaacgcgcagcagaggagataagctgggcgggcggaggagcgaagtcagggaaaagagaaaggaaagagataaggtcagggaagaatcgagacgcgtgtgcgaaccgctctcttctctcggctccgcgtggaggaagaaaattacgtaggactgtagtcttaccctcatctgaaagacttgattcctttaagcgacacatgtccggcacgaatctcagagcaaagcttactccctcaatcccctcatctctcctcttcggttctcaaatcttttgctcccgatgagatgtcgagcttggggcggccccccatgcggcgctattcgggaattagagtcaaggcatcaagctagctcgtgctgccgtcctactgctagaaagatatctcatgatttggaagaacccgcgtgcttgcgttataaattcaaatctacttcttgaactgcaatgcaaagagttgcctcatggtgaagttattcaatgattagattttgtttgctgttgagtttagtttgtatagtaaatttcactgataatctttgttggtgattgaacttgattgagccttcaaggatttcttcgtgcatttttttttaaaattacacagtacaacgcagacacgcacaacgcacgcacactcacccctatgaacacacacgcgcaaaccctacccctatgatcatcttcaaagactgggtcggcaaatcctggagattgacgaagtcggtgtaatgtgaaataggttgttttgaaagaaaatttacctactgtctagaccttgacaaaagattgtgtatgcgcgcaacatgaagaatattctcttaaagcgcttggatcatgaaaattatcacaatcttagttttctgtagcaacgcacaggctttttttctagtgtatatatatatatatatatatatatatatatatatatatatacatatatgtcccatatatatatatatatatacatatatatataatgaaaatgtcctgcgagacaatccaatgaattacttttgtgtagtaaatccatatatttcaatacatattaacggtcaaatgttttccttatggacaccacagtggcctacgtttgtggactgaggatgtaaccctttagagatgagaaaatataagatgtcctgaattacttttatcttggcatgatagcaactagcaagaagctacaaaaatcagtatctacacaatccaatcaatcattcctagcttatgtttttttccttgattggatacttaagtggtggtagtataatgctttaaaaatgtagtattgtattctcaataaaacattgtgtttgttgaagaactgcaataaggaaaggacttctatcttggtgtagtagcaactagcaactagtaagcagctacaaaaaccagtgcatatacatttgatgttcatccagcccttccatgatttgcttatgataaagcaggctaccaacctactgtagcgtatgtttgttaccttgattgaatgcttaagcggcaatgatagaggacttctatagatgtagtgactgtatacccaataaaaaatttctgtttgtaaaaggactgcagtaaggaaatgtgctgatatgtgcaaaagcatatatgtgctgatatgtgcagttttatctggcaatgatagaggacacacagtcaaagcatttttttgttgtttcagttatgttgctaattatttccatgcaatgtgctgatatgtgcaaaacaccactattcttttttatttttatcattatttgctaccttattgattcctcatctcctccccttaccttccatggccatctggcaagtctgcaagttaggatcacaccattctaggatgaagattgacagataaaactaagaaaagtagtaaatgacacacaaaagtacaaagtaccacagattgactatgcttcgatgcgtctggttgtttgattcttcactatttttcctagggggtcaatctgacttctctgtacgtagagcaataatatccacagaacaacgacaaagaaaaaattaggcaccacatcctaatcacatggttttaagttacaatgttttagcaattgaaatctatcaaagtagtacttatcctataagtacttgtgtatagcgttgacattcgtatggtcattctatattatttgatgcatatggagtaatattttcacaggaggatatggagacactgcattagttttcctgctatgtagtttttttttcttgtgtgtgtgtgtgtgtgtgtgacatgatctgcatggaccaggaccagtatacgaggtctcttaatggttgtgtctaactggtgaatgtacttattattcaacttctatgtttcttagttgattaactcttttagacttgaagtatgcatgtgattgcagttacagctttcagtatggtagttaaatcttttgagtgatcagcaaaccattatgattcttctgacaagtaaagaggctgggattgaatgattgatcatttcaatgttttataggctttagctttaggaagtaataatttgtttggctttgaaattctatgaccactcatcattcttgaataagttaaaatatctgtaccgtaggatctatttgatataaggaaaataaaattattagatatatttgattccatctacctttcgcgatggcatgttcctgaagcactgattctgcaaaacaacggtggcagacaaacccgctcttttttgtcttttatcttttcctttttctggggggactacctagcagttcctgttatcaactgtgctgcactgttttacatttaaccgtgtatctgaaatctatcagctcctagaaagaactgttgtgtgccagttctgggcttgaatcttcactagtttttggtgatactgatagataattgctttgcttccttatgcatcttttatgatgaatacttttgaaaataaattctgaatgatactgatagttgtagctatatttttgttgtaaatatgtctggtaggtgttaagttgttagcctcatcaccatgcatctgaagaaagatatgttaacacagatctcacgctcctccaatatttttatctgttaactgcgagtataattttattagcatcacttattatttaccccaaacctaatggatttttaggcatcttgcagatttgcttctcatccaacttcacgaaggcctgtgg

SEQ ID NO: 1504 - DNA, 1820 bp, Oryza sativa
  Intron number 1 from transcript LOC_Os08g13320.1 (locus LO C_Os08g13320) derived from phytozome v7.0 (chr-ID Chr8; po s 7911354 to 7913173)
gcggggctggccgtcggcctcctacttcgtcgaaggtgagccgctggcctcggctggccgagatcttggattcccagctcgggttatgcagaattaattgatttttgttttgtggattcgaatcaagaacattattagcgcaccacatccgtttctgtgtttggtattcattgtggaccatcattttttaagctacacctattgaactggattacattatttagctacaactattgagctgaattcttagaccaaattgcaatgttgtagtatgccaatctatacaattcagataactatgctctagtaactacaacctgtgtccaggtgcatacctagaaacagctacatttctgggacgggtagaacgatatcttgctacaagaatttttagaagcagttttaaaattctgttaggtttgttacctgtatgttgtttcgagtttctacaatacaaaagagtaagggcattcagcattggcacattctttagtcatgtgccatcatgcctgttctatttgtccaatttatccattgcctacctcggtacttttctggacggaggtagtaatatcttgctacaataatttttagaagcaatttttaatttctgttaggtttgttacctgtctgttgttttgagtctctacaatacaaaagagtaagggcattcaacactggcacattcttcatcatgtgccatggtgcctgttctgttcgatttatccattgcctacctcggtgcttttgtacttgcatgtgcagttactctcttgtgactcacgacaccatattatactatttgtatggactctttgatatgttattctaggtttgatggcttgcacttattaaaatcaccctttaaatcacaattaaataccctagacatggatatttgtaattctcttttggagatctctcttattttatcaccaactcatttgcatgtgcgccctaaattactaggtaatctagggatatatcatgcaaatattgtgtggcaggggggaaatatgaagctaaatttgatatccatatagcacttgtgcaaatgatacactatagatctttattcgcttgcacatgaaagatgaattgtgatggcatgtcttgaaacagtgttggcaaacaatgttcctcttttgttaattactctgttttgcacttttaggtctttgtagttccatcatctagaaaatatagcacaaaaatctatatggtgatttaaaaactaagaattgaacttatagtaaggtgcagacgtgcagtagttcataggcaaacattaaaccattgtagttgatttgtttacttcaggacattacttgtgtattccgtacaaaacatgaattggtaaattgtgttagtaatggctgtagagtttacattgtacccttgcagtgtctatgccatgtggtctatattacattcttcccttccagtgtctataccatttggtctatatagattcttcagaagtacatcaccttctattatatattctaggcatgaatatttatcttgttgattttttttctcaaggcattattctattatatattcctgaccctgtgtgccaacactgatcaacacaacatatcagtttcactgaacaaatagtatatagagttgacatatctttctccccaataatttgttatgttttttccctgttgttccatgtgcatgcatttcaaaaccttgttgaagattattattcttggccatttttatttgagatttagcttaatttgtcacctgactaattaattattttcaaagggaaattcccacataccaagaagaagtcaaggaaa

SEQ ID NO: 1505 - DNA, 2899 bp, Oryza sativa
  Intron number 7 from transcript LOC_Os04g38640.3 (locus LO C_Os04g38640) derived from phytozome v7.0 (chr-ID Chr4; po s 22771714 to 22774612)
gtgctgaccgttctaaagatcttgctgttctcaaggtgagaagtcttttgattagctatagagaattgtcatctatcatcactatgtttaccataggtttctctcatctcatttcggtgtgcaacattttatattagtcattcaattcatttcatctccctggtggcctggcatgtacatgcctcaaactctcattaatatccttctgtcgttagccaaggatttaactatctgctcatttttatctcacatggcatatgtcatggactaagaaaataaaaagggagtagaaagtggaagtaacagaaaaagaaaaaaatgatacttttggagttttagtttcataagtaaaaattcatctctttagccaactgcttcagtttttccctttttgttgttttgttttgttatggtataatagtttatttgtgacagtaacacaacattttcttctgttgagttaggggtcccatgctatttgattgaaatgttttttgaagagttaagttacgaaactgagggggggggggagggggggaggttcctttcagaggtcaagaatacatacttttgtttgccccgtcctttcttcttttacggaaatagtatatgtatgtttttagataccaagatgtttttatttacctactcatcttatgcctgccttgtcccaatggaatctagttcaaggacaaccaatggaagggctgtattagataattttacggtttgttagtgcgtaaagtcctgttgtgattttcacctgagctcaaatgttgtcagacatagtacctcatatatggattatggacatgcaataggtggatgctcctacagatctgttgaagccaattaacgtgggacaatcttcagctctaagagttggtcaacagtgtttagcaattggaaatccatttggctttgaccatgctctaactgttggtgtcatcagtggtttaaatcgagacattttcagtcaagctggagtaacaattggaggtggaattcaaacagatgcagctattaaccctgggaacaggtttgtagatatgtttctttaatgatttatcaactgattacccttttctggtctcagaacccaacctggaaactaccattagttgtactggtttacatctgtatattacttactgacaagcataaacacttttgtcactagttacttgatggctatactgtattactgtttatggtttctactatgcacaaaatgatagtacttgcctataacagtgcaaaacagttgactcaggacacagaagaggaagtattttacttcttactttcttgagtttctagcatcgcatctaaagtcaggacacatagattggggctaaattgcagctctggcagttggcatagtggtaatatttgttgctaccagtttactatattagggtagaatttgatcatatttgtggtcaaaatcagcttgaccatgtatgccctcgtccttgaagtgatttagtatgcattacctgtactctggggcaatgaacatctagggttaaggatcatgttgtaagtagtggtttatacaatatgtgttggatatttatgtttctgaaaatgtattatagagggttttactaagcatgtatactgatgtatgtccatgcagtggtggtccattgctggattcgaaggggcatatgattggtattaatacagcaattttcacacagacaggttagattatctcaacatgaaatgtattaatcaaatagcactgaattgtttcatgctgatttgcggaggtaacattagtagatgttcatgctttctctacagatgtcaagcactgcacttagcattcaaaagagaatatgtccaattagtaaaagttcatcctcaataaactaaaatgatcataacacattgcaaagcttgcctcgatccctgtacatcagttcatttcccagagtactctggttgatggcacactttgagtgactttctattttgatggcatgattagtgagtggtatcatctatcatgtttatattcggattcacagcattctttgaaattgttatttgcttgcatcctaatgggctgtaagaattgacataattgattatagttgactcaaaatcacctccttgaagctgtgcattagaccatttgtttttgttgttgatttggtagagcataaatcagatattcagatccaactatgtccaatgtaacttaaattcctatgttagtctgagattccattatttcttcaatgtcgcaggaacatctgctggtgttggttttgccatcccgtcatcaactgttctgaaaatagctcctcagttaattcagtttggaaaagtatgttgcatggatatctttcaataacatcatcatcaacctaataacatacgtattttctaatcatccccttagaataatgtgttatgtttatggagatgccatatgtaggtatatgtttcatgcattagatggcatcttatggattgtgattctttatcaataatcaataactgtggttgtcatgattttagaccaacatgctgtgaaacatgctcagagtcaactttaggtgttagcagtaggaggaaactttcggttgataagtttttgtaaatactatagggaccttttccaaagatagttaaattaattttggtctgagtttggcccaaaactttgccctcccctcctgaaaactctcttgaaactttgtgaacactattgcttgaatgtttttgttgcaaaaattttgagcacagataaattttagattgctattaagaaccttctttcttttccattgccgacacatgtgcttagcagttagcttctgtattctattttattttaaattatgcttacactcctctcttaaggttcgccgtgctggcttga

SEQ ID NO: 1506 - DNA, 3577 bp, Oryza sativa
  Intron number 1 from transcript LOC_Os08g32630.2 (locus LO C_Os08g32630) derived from phytozome v7.0 (chr-ID Chr8; po s 20206426 to 20210002)
ggcccgggcccgggccggcgccctccaggacccaggtgagccagcgatcgatactcgccactcgcgtttgcactttttctttttatgggttgggttgcgcttgcgccgccgtttgggagcggcggcggcggcggggggtggaggtggggatcggagcgtgttaattataaagacgatatagatgaagagaggattatatacctcatcacccgtctttccggggctaggggctttgctgtttatgagcatttcaatggtgcatttccattgtgacattgtgaaagagagaaaaagttgccaatgcctgtttagagtcaaatttttttctcatgcaatattgtggatgattcaaggctattcagcctaacgcaactgacactctgtttttgtcacctatagggcgtttcaatgtaatcagtatcttcaaatacaacagctgcacgttctgctttttatttgtccattcatgcaatgtatttttaagtttttgttttttttttttgactgaaaagttttcatgtctgtgaggggattttaaagttatttttttagataatggaatagcggcctttgctcaaacgagctacatccaattattacaccaaatcactcaaaacgagtgcaactcaaagcaaacttaaaagaactcttccaaacataaagcaaacacaaactcataaacgaaatacaattattgaattctatttgtgaatctttatccgaagttgacaaaaagctgcataattgtcgtctcaagattacgacatgcagactttaaaagcttgtagctttcatcacactttttgtagttgtacctaggattggaaccaatacgttgccttgaaaagaacctgcatataggacatagatggtgatttgtcaaaaacaatatcattcctactcaaccatagagcccaacatatagcagatgctcctataagaataagtttactggtttttatcaacccctacaagccaattttcaaagatatgggatatattatgtggaaggtataaaccagatgacaacagctctccaaagaaattttgcaaagtgacactccataaaaagatgttgaatagtcttatttttcatacagaaacatctcaaactaccattccaatttctcctagttaagttgtcctttgtcaacactacctcttaaacaggtaccacataaaaatcttaatcttaagagacatcttaagtttccagataatcatattcttcacaatgttaccattgtttattaaagctaagtacatcgaaagaatggagaactaaccattttgatgaaaattccatctaaaaaaaatcactttcttctttcaaatgaatatgaactattgatgcatataaattatgctaataagccaaattctgacctactaaagctcttctaaaagaaacattcattgggacataattcataacatttgcaattgaagaatttctccttcaaactatagcatataaagacgggtacctatctggctgtctttaaaggaataactacctatccatctatcctcccgaaatctgatttgttcaccattattcactatccaggaacccatgtttaagatagtactcttaactttcatgagacccgaccaaaaatgggaatccccttgtttcatatcaacttgaaaaattgattgattattaaaatatttccttttcaataagtcttgccaaacaccttgctcatttataagtttaaataaacaaccatttactcaaaaaacatttattttgaacttccaaattatgaacgcctagacctccttgatctttgggttgacatattatgtcccatcttaaaattatgaacgcctagacctccttgatctttgggttgacatattatgtcccatcttaaaattatgaacgcctagacctccttgatctttgggttgacatattatgtcccatcttataagtctatacttccttttatgatcatcaccttgccaaaagaaatgtgatctataataatcaattttttgaagaaccccttttggaatttcaaaaaaagatatcataaacataactaaacttgaaagcatagaattaatcaataccaatctccctcttactacatatgcttgcctttccaattactaagtttcttttcaattcttcgctcaattattttccaatctttgttactaagtgttctaaaatgcattggaatgccaagatacctaacaggagaagtaccaagcttacagccaaaaatattagaatattgttcttgacagtcctgagcctgaccaaaacaaaataattcactttgtgaaaatttaatttcgggccagataacttttcaaaaacaaatagtatcaatttcaaattcttagccttctgtaaatcatgctccaagaaaataatagtatcatttgcatattgaaaaatagataaaccatcatccaccaaatgtggaaccccactaatttgacgacgtctctggaacaacagataacttctccattggagtgtcttgagactgaactggctccaccatagaagtatccttgactaaaccatcatattcttcatccgacacattcaaaccattagactctggcaacaacaaagtctgagtagtaggcaaagaagtagcactcttctgactacactggccagcaacattcaccttattacctttgtcagaattaataaaatctgattccttactcaaaccatgcatcttacttccttcatcattcttttcctcatccctatcaccatcatttttcatatccatgggttcaggctcatcatgcccatttttaggcttcactttaaaagatagttcgtacaaataatcaccaatgcccacatcaaccacatcaggaattaaagatggatctagcactaagacttgtaaccgagctatgtcatatcttctagtaaaatgcatatcaaccattttagtaataccagatagaaccaacaacccaaatgattaagtattccctcaactcagaaggtaaccctttacactgaacccaaacctttggaatcacatatttaacctcattaccaacccctctttccactatctgcattttaatttcaccaaccttagtgtacactatacctcattccaccatgcgtttagttcagcagcagaaggaaaaatagtgcgaaaagtattgtcaccgttatcttgaacctcccacttccatttacctggaattaacctttccaactaagagataatagaattcactgacatctgtccaccagtcactttgatcaaagccaccttaggctcatactttatcttctggctagcagaaagaggaatatgaaaaatacccaaaccatccactgcataaccacaaagttcagttgaaggtttattatttgatctaaagatcggacaacgagaaccaacatggtcctcactttcacaaacctcacagtaaaacttcgaagagcattcctgcagtgtgtgcccctttgtatagcatgtataacaataaggattcttactcaagcctttactgtctacctttgatttacctttgttactgtcaacctaatgttgctaaatcatttgtttag

SEQ ID NO: 1507 - DNA, 4506 bp, Oryza sativa
  Intron number 2 from transcript LOC_Os06g16790.1 (locus LO C_Os06g16790) derived from phytozome v7.0 (chr-ID Chr6; po s 9717670 to 9722175 reverse strand)
gtcagaattctacactggataaaaaggtacttaattacatgcagtctaatttatatataccggagggtgtataatatagatataggtaatagaatacaatataagaactggctttaaatcaatgtagagccttcctttttgttctaaaacatatttatttataaaattctaaaccactgattgtagaatattttttctagtacaacgtacagaccgatcaatgaattagatattacttccacatgtgataatataggttatgagatactaccggtaatatttgtttataaaataaataaataataatatttgttttccgtacacgttatacatcaagggtgtccttttcctacccaacagatttatgaaaacggattcttcggacatcacgctagctgaaacgtataactaccaaggctagctaaaggattaaatttagaaattattcaacaaaaaaaatatgctagaaactccaaaaattacaaaaaggcatctggccttagagaagttgctccaattgagaaaacaatacacaaaccacacaattaaaaaaagaaatttactaataacagttacataccagccaactattgtagcaagacaatattttctcgcagattcaagatcacgtaatgttatcaagtaatcctttctaagtgtacttacaagaaaatcatagtcaatgctcaaggaagtcccaaccaaattattgataaattaataccattcatagaggatttatgccgtgcacaagtgtgggatgttatttaacattgcttaaaattttataactttaaatatgtgaatgtttatgtacaatgacttatggaatttgaatatgttctattttttcttaatgcgcgatcagttttcgtaccatacggaacatgcatctgtacatataaaaagtttttatactacaaaagtgtatacacatatatataaaatttagagtaaattccaaaaaactaaatttactttgatcaaattaattatcataaaactatagatttaaggtgttgtatcacaaaactacatatttaatacaagatttgttcacaaaactacatatttactatagatttaatactagagttatcacaaaactacatagtttacagcttaaatcccaaccactactgcaatgttacagtgataaatgttgtagttttgtacttaagatgatgcaaaacatgtactgttgtgataattttattactaaaattgtagttaattttgtgctcttccaccttaaatctgtagttctttgaaaaatttggtcctgaatctgtagttttgtgatagttttgtcaaagtagtatatgtagttttggaaaatttactctaaaatttatatataaaaaaataaaattatacacacacacacatacctagtttatgcacatatattttgtatatataccatgcaaatgttatatatatactccctctgttttatattataagactttttactagtcaaacttataatataaaacagatggagtacatgcatacatacatatacatgtatacatatatgtataggggacaaaagggggagttgacttattttttatttgaaagcacacctacgtatacagaatattttttgacatatatccacagttttactaagtactgccggtgctactacgaccacttctaacctaaaaaaaaacatacagcaccacatagcctttatatattcgaagaaaacaatcaaatatgcaaaaaggaaagaaattgctgatattttgccttatcatgccaaccaattatgtaggctattgatgtgctaacatacgaaagccctttaaagttattcaaaactatggaggaaatacgaaattgtttatttacataggaaaaaaaatccgaccttcaatatacccttaatttggttgtcactaggcaattagaccacaagaactttgagttccttgctcatgccattgtcacttgcagcaatattacacggtatatatatacaaatggtatgtatgataattagctagcggtagtttattatttactcgatgcaaaggttgtataaacctatccatcttctattgaaaattctgtaaatgggcttttagatatgttatgaaaaaagaccattgaatcgatttagtaggacattgtcatttgtccttcatctacaaagacataatttcagaataaactctaatattacattcaataatatagatacctgtgcatacgcgcgggccaccttcctattaatacaataattgtagaaaaaaaagagtctaagtagaaatacaatttagaaataactaaaagaaattaactaaaaagagtctaaaatttggaatagaaaaataaaaagaataccaaaagaacgatcaatctggaacacaacatgagattgactaaaatccagaataagaaataaacttcaaaatcagatttcaatatgaattccaaatgaaataaaaaataattaaaattaaaataagtatataagaaaaactcacactactaggagaataaacataatagttcaattaggaatacagccttttaaaaaagtaacaaatttagaatttaaaagtaaggattttggaaacaatagtccaactataacagagcataagtttacatcaaattcggaataaaaaatataataaagtgaaaattggatttaaattccagataaactttaaatgtcatgaatattcaacaaaataaaatagtcttttaaaaaagtaaagatacataccaagaataatccatagcaaaatacaatatataagtattcaaaatttaatagtaattcaaattcggaatagtaaataaataaattctgaaattagttttcaagactagttccgaataaactttaaaaaatcactaaaaatcagaataaactaggaatactatttagaaataagttaaaattagtacgaaattacactaattacatattaggatataaaaataaacatgtggttgcaattgatatatgggccttaaaaaacccaccaatgttcactttggataaagaaattacggattataccacattaattaatgaaacgaaggctgcaccatacggtgaaactggattgtaagattgtagataagaaaataaatagatagagttccaaacaaaacacataatacatgaaaatacatttatgataaatttagtaatgtcattttgacatattagtgttttttacaataggcagtgagcaatttttgaaaatgctactcatagtttaatttaactattacataatctatatttttagtttatttatatttttcatggatgtttcgatgacatccactagtttagaatacaacttgaaataaagtatattttttgcaaattaaaggattgttaatatggtcttcaattattagtttgttttttcatctaatctaaatgtgaaagaaaaagagaaaaatcaggacgttaatgatgtacattgttttgcatgccctagacaagctcaaccaataagctagatagaacgaagcctaagtatgagataaagaacatagacagtgtcaaaagaattttctaataatacattaatagagaaacacaaaatatatgaaaatacatctattttaaattttgtaatatcattttgatatgttagtattttttatagtagggagtgagtaaattttgaaaatactactcacagttggaaatgtttttattttttaaaatgcaagtctaatttaactattataatctatattttcaatttatgtatattttttttatgatgtttcgacatgcgcctaagaatagaattcgaaatatcatatgctttttacaacttaaattatagttaatattggcttgaattattagttttggaaagaaaaagaatacgtgggacctggcatgtgcatacctacatggctacatagatacatgtagaatggaacggcattataatatggggctttttagataaatttaatgggtaatggttcgaccagattaaataaaatcaacttttatttgcttttgtcatagaaattttaggatttattagagcgccacatgacggtctagaagtatttatatgtgtactatgttttctaggatttattagagctacacatgatggtttcggagtatttgtacgggtactatttggtggcttaaaaacatttataggaaatttaatagaattttaagtatataatagatgtatagatagatagattttctataaatttagtcaacgttggatgagtttcacttaatataaaactacaacacctttataaatatatagaatgtttggagtatacggtactccctctatcatcacgtaagcaaataacgcagagaccaaatacaattgggatgaactacgaaagtatatagtattggacttgcgttcccttaggctttttatgctactaccgaagttatcataaaaaatccatattaaaaacctgacctgttattttttatttcacaggtgtgtggtaccagctcagaccacc

SEQ ID NO: 1508 - DNA, 5362 bp, Oryza sativa
  Intron number 1 from transcript LOC_Os07g42994.1 (locus LO C_Os07g42994) derived from phytozome v7.0 (chr-ID Chr7; po s 25753479 to 25758840 reverse strand)
ccctcctgcttcctctgggattacattaaggttaggccgcttcgttttttatctttgagatttctttttaaaattggttcgaaatcaatccctggattacattgctatcgggcattagatgaagttatagaatcacaagaggggaaaaaaatttaggcacttctagaatgctgtgctctctacagttgttagggaattatgccgaattctattccatatagaagtatacaaagtagcatcttacatctgtgttaggctaattttgctgattagccatcgaggcatctcgtgatcatctcacgatcacgaggctaatcttgtttttgcacgccattacgagggatgcttggaggcaaaagtgtattgaaccgaaatggcaaggggataaatgcagtttgtcttttgtggcgagaacatctcacttaatgtattaatattaccatccttatgatggactaatggacaccaactcactgaatgtcctctatgtggctagtttaatacatgcttagatttgattgagccaacagagcctcaaaatatttacacttgtcagtagcttaacagaaacatattgtcattttcgctttgtcttgtccgtttgcttaaatatgtacatagtttgcaaatgtggagaacagtggaaacacttgcatgtgtagggccagggtagtgacaactcgattttttcaaaaactaacagagcacttgatttgatactgcattttagtaggcccaccagttctttgcttacccatgtacattcaagtatctgttgtgtatacttcagacactgactaaggctgcgttcgttgtgatgagttctggggattgggtgagaaaaggacatcgtattccgcgcgcacgcttcctaaactactaaacggtgtattttttgcaaaaattttctataggaaagttgctttaaaaaatcatattaatccatttttaaaatttaaaatagttaatactcaattaatcatgtgctaatggctcacctcgttttgtgtatcttcccaatcttctcaatccccctctcctcaaactcacctaagttttctttgtagttcctgttagtgttttgccctcaataaatatacttgtacccagactaccgaaatgcgaacatattttggacttaataaattgcaactggattttgctagcagttgggagttcatttgaccatgcaaccatttccttctctttagtaatggcaaatgcagctcaaaagagtggaaattgtttcaagtaaaatatggcttggttgagaacattttatctaatttcacccagttatcctgggtatccattcatgtgctgctcaagaatgttggctgatgctagcaggaaaagaagagaaacaagtttttctggtgttggggagaattcaataccaggttggatagattgtttagcatcgttatactagtgggatgttgtcacgcccaaaaatttacgaaccataatttctaagctgaatgtgcattaaacccctgtccaggaccagccagggtacacaaacgacaattgttgacatacagatccacgtcttacaaaaatacaaaagattacaaatgcagcggaaaaggataaaagcgagctaagcctgaagacttgactcatgcagcgaggcgactccattccacagacatccttgacggcagcgacgaaaccaacttcatcgagagatctccaactgagaagaacttcaactctggggtgggggaaaagagagcaagactgagtactacccattgtactcagcaagtcataccggaagagaaggtatgatgcagggtataaccaaaggaggctagaggttcatttgcataaagctagcatttaaaagcagcagttgaaagcagtaaaatagttgtagcaattaatcaatattaaccaatcactatccaacgctacaccacattgcaacaggcctaaccaaccacctgaactacaccagttcattaagctaaactaggggtgagactaatcacggtgaatctggttgaccgcccgtaaccgcgggcacggctattcgaatagttttactctgatcagaggtgtacaactgtacccacaagacgcagccccacgacacgttaccgtgcgccgacatgccaccacgacataccggaaagaggccgtgacaggacccttcacataaccccctttaaccgatcgcaccacaccttagggttcgcccccgtccccagcaggcaacgggcagcccccctttcgtaccgcggtgaatccggaagccgatcaaccggacaccctggccgacccaactccatcacgcccaccctcgcctgggtacgtcgactagaggaaagctacactacaagcccagccgttgcccatgctggcttgtggcaagtacgataaattcttccagggcatcccgcgaaccggtccttaatcgccatgggcacgactagcaaaaccatgcacccacagcccaccatgtagtgtattttaattaactaacacccttgcggtggcactaatccaaagctattgccaataatcaaagtctatgcattaatgtgattcctccattgtgtactagttgaactaagcatggctaagcattccctaaaccaacatctaagcatcttaatacccaagttatcaatggcataaggtaaacaagatatggctgagtagtaggacccatcccacgtgatattgtaaaacaatgcaatacttaatagaaatgcgggacatttgtaaattgggtacaatatgatcaatcgtaatgtatggcttgctttgctctcgcactgatgagaccacagcaacgtcttcgagaaaccgcggatcgacgaaacgaccgaaatctatgcgacaaacaaagcacacaagcaaaacagcctataagactactgaaacaggaaacaaaaccatttttaatggattctacgcatttttatgaatttactgagacttgaatggacttaatcggagctcggatgaattagatatgaattttagaagattatctgtgtttattactataaaagaaaagccttactgagttttattgcgcaataaaggatcccggatgacgtcagcaaaggggggggggcgccgacatgcgggacccccccggcagcagctcaagggggaggaggtggcaccggttggtgggtgggccccaccgggcagtggctcaaggggagggggagatgcccggtcggctcggctcggcttcaaaccagccggccggttaggtgatgcggcggcggcgagcggccaccgacggcggcgaccggcggcgcggagatggcggtggctggcgaggagatggcggcacatggccaaagcggcggcgcggacaggaggcggcgacgcacacggggaaggaggagtaaaagaggaagagtgagtcctcaccagggattcggccagcgtgggtgaagacgacggcggacggcggcggcaagcggcggacggcggggcgcgcgggatggacgagacgggcctcgatctcgcgaggccaacagcagcaacggagcggcgcggcgacggcactagcgacgactagcagcggtaggcggcggcgcgcggcaagcgagcggcggccgggatagctcccgcgacggcgaagctagtagcggtggcggcttggcgcggcagtggctatagtggcggcggtgcacggccggaggcggcggcaagcggcggcgctagcggcgaacggcgcggcggcgttagagagcacgagaggagacggcgagcgcggaaaaagagagagggagacacggggagcgttttatagggactcgggaggggcggacgtggccgggggcagccggatttctcgccgacgacgtgggaggtggagagagagagtgggggggattcgaattgaatcccgcccttgcgggcgcgcgcgcgtgggcaggagatggcggggcgtgggggcggcgacgtggggggcgtgtgggcgcagagcggggcgcggatgtggaggaagcggtggcgtgggcggcggtttcggcggcggcgctgccgtcggctggaggtggaagaaggggccgataggtgggccccacctgtcggtgacccggagagaggagggagggagtgggccggcccagcaaggaggaagggcgcgggaggaagtgggccgacggcccaacaagaggaaaaagggaggaaaaaggaagaaaaagaagagaaaaggaaaaaaaggattttccaggaattatttattgcactttgcttattttaattggttaaaattatttccaaggctctgaaaattccactaaaaatcctgttagcatattttgacatgtagaatccaagaaaaattccacatgccgattccgattattatttgcatttattaatttagggattcaactctaggttaaattgaacaatttcttcgggcgatttatttaacaaattttaaagcaaggagaggaacttcagggcgtgacagatgttcatccatgtgataaactgcaaacattatgaaatgtgttaatttacaaattaaagatgggacttctaaaagaaatgctttgatcttattagacactccctaaatgacgggtaacattcaaggatacagtcttgtgaaatacagaaatcatcaacctcctgggtcaaaaaggaattagaaaactgaatttgtaaacaaaagagtgaacgattatgaagatgaggttcattatcttttgaaagaatgattctcgcccacatgctgaacttgttaattgaacctgattactggcatacatggggcataatgtatactggaagttgctccaaggtttgcttggagtttgtgttttagccaccgtagttttttctaagcttcaagtttttaattttgctttttctctcttcccctggcataagccggtatggctgattgcgttgtgtaactataactcctttcttctaatgtattgacgtgcaatccttttgcgcgttcgcgaaaatgggatgaaggtttgcttgatctgtaacaagagccaactcgactttagtaaagctcgaaacatctcaaattttgttctttgtgatgctttacatattatggattattgaagacatagaaggcaggcatttgcatatacaattgagtattttgaaaatcagcttatctttttttagtagcaaaatacccaaaaattgagtattttgaagagctcttgctcagttactttcatcagatgatatgtttttcaagaatattcatggaataatcagtgatttgggcgctctctccatagtgatttgagtagcacataaaccacaataaatagtgtactgggcttggattatgtacaggaaaaagaaattgagttacatatgttgcttttttcgtatgtatcaggta

SEQ ID NO: 1509 - DNA, 15510 bp, Oryza sativa
  Intron number 7 from transcript LOC_Os01g22954.1 (locus LO C_Os01g22954) derived from phytozome v7.0 (chr-ID Chr1; po s 12897888 to 12913397)
gaaggtttgcaggtgaattggcttcttttctttctttttttttaacttaagaatcggcttaaatttcttccactaaaaatatttagagtggcaactgtagatttgttaaactcttaaaattttatattttcttttaaatctgaagtccttctctattgcatattcagctatacatatacgaggggcatatatggaccctttttgggcctagaaccacacacacatgtacacagcccacacccacaaatatacactgcccaacagtccccctcaagatgggcgataaatatctatcatgcccatctcgctacatgacgacatacactatttaacacctaaagccttcgttaaacaatcaaccacttgttctctagaattcacaaagtttaacttcaaggttttgtcatctatcctttctttaataaagaagcgatcggtctccacatgttttgttcgatcatgttggactgaattgttagcaatattaatggctgatttgctgtcgcaccataacttcatgggaatgtttatcatcaacttcaattcagttagaagatctcttacccataacaactcgctcaaactaatcgacattgacttgtattctgcctcagcagttgaacgagacaccaccaattgtttcttgcttctccaagatactaaattgccacgaacaaatacacaatagcctgatattgaccttctatcatcaagacagttgccctgatctgcatcacagtatccctccacatcaagatgtcaattttcttgaaccataagcccttacctaggcttcccttcaaatatctcaaaattctatacacagcatccatgtgaccacttctaggatctgttacgaatctgcttgcgagtttgggaatttaggattagaggagcagattcgaacagagagaaaggggtaggaggaaggggaagaacagaagagagaacttggagcaggggaagatgcagtagttagggaggaatagttttctgttcacttgttcgatgccttttcccctctgctcactcgtgcttatatactcgcacgtttacattctggacctaagcccattccggcccagttactctcacattaggcctgcgtactcttgctggtcgcgtcttcattggattacttgccgtgagtaatgtcggacctggtacagtaccggtgacattcccctcttcttcagaaacggcttgtccccaagccggtgcttcagggaaacgcgcacgcagtgcagcaccatcctcccaggttgcttcagcggacgtctgaccagaccaacgaatcttgagttgttccacagctccagcgcctttcttgactgcacgacgagcaagaatttgaactggtagcgcttcatcttcagttaacgctggcaggtcttgaatcgacgagtcaggagctggtgaagaagcctgacagagctgtgagacatgtactactggatgaatagcacaagttgtcggtagttgcaggcgataagccacgcttccaatgcgcgccaagatctgaaagggaccaaaataacggaaagccaatttgtgattagaacgtcctgtcaaggagaactgagcatgcggctgtgccttcaggaacacccagtcaccaacttcaaactcacgatcagaacgtttcttgtcagcctggaacttcatacgttgctgagctcgtaacagatgttgtcgcagcaaactggtaatcacttcccgttccttcagccagtcttgcaaatctggaacagcacactcaaagcgatcgagcacaccaaaatgccgaggagaatgaccatataatacctcaaatggtgatttgtccagagccgaatggaaggcagtattgtaccagaattccgccaaagcgagccaacgataccacctcttagggcaagcgtgcacaaagcatctcaaaaaggtttccaagcactgatttacccattcggtttggccgtccgtttgaggatggactgtttgccaagcatgcttgggcactggaagaggctgtaagaaacctgggtaccgaacccgttctgctttggcctgtttacagatggaacaagccgacacaaactggcgcacagcttttctgagtccaggccaagcaaataacttattcactcgactgaaggttgcctgagtaccagaatgacccccaattgctgcattgtgcagtgcagtcagaaccttagtctgtaactccacattgttacccaaccaaatccttcccttatggtagataatgccattctgtaatctgtactcagggagcgcctctggacttaacgagagcttagtcaacagttgagaggaaacttgatcctgagcatatcccagctgcacatctgccaaccaaactggaatacaggaagacaccgcactgagttgaaacacatcggttgactgattgcgtgacaaagcatcggcggctttattttccagtcccttcttatagacaattcttcttatagacaattctgtattgtaaaccaagcagtttggtcagagcacgctgttgccaaggtgttactaatctttgatcatccaaatgaatcaaactgcgctggtcagtacggattataaactctccaaactgcaagtaagagcgccattgttccacagcgagaagaatcgccaagcactccttctcgtaagtggacagcccttgatttcgaggccccaaagatttactgagaaaggctaacggatgaccagcttgcatcagcacagcgccaacacccttatcacacgcatcagtctcaatttcaaaaactttggagaaatccggtagtgctaggacaggagccgaaactagagcttccttcaaggcatcaaaagacgcttgatgctccgacgtccaaacaaacaccacattcttcttgagcagatcagtaaggggcctgctgataataccaaaagagcgtacaaacttccgatagtaccccgcaagacccaaaaatcctcgcacttccttcacattacagggtactgcccagttgcgcaccgcttgaatattctttgagtcagtggccacaccttctgcactaataacatgcccaagatatgttagacttgcacgggcgaacgagcatttgcttctcttgaccttaagttgatgatcagttagcaattgaaacacccgtcgcagcaaggctacatggtcgtccaaattttgactatagattaagatgtcatctataaacaccaacactcctttgcgaagcaatggagctaagatctgattcatcaatccttggaaggtagccggggctccggtaaggccgtaggacataaccctgaattcgtagtgtccattgtgcgtcttaaacgctgttttgtgctcatcttctgggcgcatccggatctgatgatagccagctcttaaatccaaactcgtgaataaacaggagcccgccaattcatcaagcaactcatcgataattggcaaagggtagcgattcttgactgtaattgcattaaggtggcggtagtcaatacagaatcgccaagtaaggtccttcttaagcaccagcagaacaggtgatgaaaaaggactagagctgggttgtatgattccctgttggagcatatccgcaacttgccgttcaatctcatctttttgagctggattatatcgataaggtcgcaagttaacaggttttgctcctggcagtaaaggaattgaatggtcaaagaccctggccggtggtaaaccttgtggctcatcaaagacatgaacaaattctttcaacaactggtcgacagcctgaggtacttctgtatttgttgtttccttgatcagagaacacaactcaaccacttgcatcacagcttcccgatgaatcagtccttgaacttgattgacagatagagatgtacagctgctaatatcagctctaacacctcgcaaacaaacatccttttgtgcatgtttaaatctcagagtcttagccctccaatcaatttgcataggactgtgttgctcaagccaatccattccaagtattacgtcataacttccaagaggtaacactttcaggttgttctgaaaagaaacaccctgaaccagccaaagacaattctgcatttctttgttacattggagtattcccccatcagcaacccgaactcgaaaagattgcacagttttctgattgcctcttatcttgcctgccatttcttcagatataaagctatgagtgctgccagagtctacaagcatcattatctcatactgttgtattaatccttgcagcctcaaagttccagaagattcagtccctagcatagcttctttagaaatctgacagacttcgctaacagtttcagaagccctttctgtcagctcatcagttccagcggatttggtttccccatccgattcctcaagcaggtcgagtaactcctccacaacatgtaactgcacagttggcccacacttatgttccctactccatttttccccacaagtgtgacacaatcccttagccttgcgataagcacatagtgctgccactcgatcctccagaggctgagttctgtcatcaactcgcccaccagctcgcccaggagtgaaagcaacattccccacagtacgctgtccgacccgatgagaaaaacctccatcaatccgacgcgaatcccgtcgtcccgcttccaacacctcttcctgtaaacaagcaaggtccacagcagtatccaaatcgtttggacgatgtaaaattacggctgcgcgaacttcaggtttcagtccatcaaggaattcagtaatgaagaatactgaattccaggatggatgatgagcatagagttgatgcatcagctcattgaatttttctgcataactaagaacggttccctcctgcctaagcctcttgaactgtctaatgagactctgaaattcctccctcccgaacttagcacaaacagcctccgagaaatcattccaccccatcaattccacatgagcattggtggattgcaaccacactagagcactccccgaaaattgcaaagcagcaaccccaacccacacatccgggctaatcccacttactcggaaataagtttcgcatttcattttccaggctctagggttctctccttcaaattgtgggcaatctactctagcattacccccatggaatcccttggccgggagagacgttggagagaaatcatctccagacgccttcccccgattcatcgttgcaacgttgcggcctcacggccctgaactcgcgtccgcccctttggaggccgtctcctcctccttcggcaccgtcggcgtgggtagaagagggggcagatccgctggcttgacggcgagaattggattgcgggatatccgctccacttgctggcgcaggtcgccgaggtcgtcccgcatctccgtcatggccttgtccaccgccggtttccagctcgcgagctccaccaccataggcttgatttcctccaaggatcccatcgaagcttggatggcggtattctgcttctggattgtcgccatggccgccgcgagttccgccaattgttgctccatctcttgggacttgagttgcgcacgggaatagtatctaggtttgtcgaggtactccaggatggatggctctgatacctattgttacgaatctgcttgcgagtttgggaatttaggattagaggagcagattcgaacagagagaaaggggtaggaggaaggggaagaacagaagagagaacttggagcaggggaagatgcagtagttagggaggaatagttttctgttcacttgttcgatgccttttcccctctgctcactcgtgcttatatactcgcacgtttacattctggacctaagcccattccggcccagttactctcacattaggcctgcgtactcttgctggtcgcgtcttcattggattacttgccgtgagtaatgtcggacctggtacagtaccggtgacaggattatgcatatactgacttatcacacttacagcatgggttatatcaggtcttgtatgacacaagtatatcacctgtcccacaagtctttgataactctctttatttactgggtctcctaattcagcacacaacttatggttttgttcaatttgtgtagaggctggtcgacaaccaagcatacctgtgtcactgagtagatctaacgcatactttcattgtgaaagtactatccctctaggagatcttgcaatctcaatgcctaagtatttcagctgacccaaattcttaagttcaaattccttacttagattttcttttaatcttgctatctctatagaatcatccccaatgataatcatgtcatccacatacacggcaaagatagtagcgtgacatcccttatgatgatagaatgatgtatgatccccattacattgcttataacccatgccacatattcatagtgaaaaaaacgtgaccggtagatgacccggtcaccatgctggttcactggtttcacggttcaaccgtgaaccggtcggtcgaaccgcagtttactaagtacatgtaatatatatgtaatatatgtatttctgtactgtcacatacatttggatggtaggatggctacgggagttggcttgtaaccgatcgactcggggtcgactccccaccagtgcacatttccttcgatttttgctaaaaaaatcaagcctgtggacatgtatggcccaaaacacactaactcggcccagtttgtcttagtccgatccgaccaaagacggttttatgcctggttcatcgcaaaaccggctagtttaggcggttgaaagtggttcaaatgcatgtccggtctttctattcgaccgaaccgtgccaacctccagttccggttgaaccgccgatccggtccggttttttacactaggcacgcattacacgttgaaaacaatcaaaccattctcctggtgattgtttgagaccatataaagatttcttcaacctcaacacttttttccttcagtttgtgaagtgctaaatccaggtgggatatccatatacaccacttcttgaaggtctccatgtaaaaatgcatttttgacatctaattgatgcagtgaccaatcaaaattagttgtacaagtttcatcataatcaattccatatgtttgactataccccttagcaacaagccttgctttctacctttccttctttccattaaggttttgctttattgtatatacccacttacagttgacaactttcttcccttcaggaaatggtacaagattccatgttttgttcttctcaagagcctctagatcatccagcatagtttgatgtcattttggatcttgctttgcttctctccaattctttagaattcccactaaatctaccgatgctacaaaggccttatatgtagatgacaaagagtcataagaaatatagttggatatgttattctcatcattaccctcatcttgagcttcaaaaccatatcttagggaggtttacctacattgctttttacaccctttctgacggcaattggtaagttagattcttcttctctaacttcatcctcttctccccctaactccaaaggcacttgcacatgacttgcatctcccactacttaattatcctctacaacttattggatcactggaaatcttgccctccttttgtaaacttgaagattttcctcttcatgtggctttctcaactcttgctcttatataggatcattcatatcaactgggatttggccaatcacaacttttttctccttcgcttgttcatcttccttggaacccattattttatcctccctttgtttatcatgattacactagttgaattatcaagatcaacaaaaaaaagaacttaaatctattttctcatcataaaatggaacaaattctctaaaagtaacatccgtacttacaaatgttcattgttctgatggactccaacacttataccccttctggccagaggaataacctatgaagatcaagttttgcaacagaaggtctgttgtttctgacaaagcatgtgcaaccaaacacctttggtggaagaacaaatacattcttgtgaaatatcatctcatatggtgtcttcatcccaagtattcccgatggtgtacgattgataagatatgttgctgccattacagccacactccacaagaatttaggtacattcatagtatacatcaatgaacgagctgtctccaaatgatgatgatttttcttctcagccaccccattttgtggaggagtatcaggacaagaagtttgatgtaatattccttctgatgaaagaaagttactaaattcttatttatatactcccctccattgtcagttctaataaactaaacccgagcattaaaatgatttttaatgtatgcataaaaattctgaaaacatttaagcataaaaattctggaagcatttaagcacctcgtccttgtgcctcataagatatatccatgtcatgcgagagtagcaatcaataaaggtgacaaaatacttcattccactcatagaaaccacaggtgaggtccaaatatctgagtgaattagcataaagggcaacatacttcggagtcctctactcacatatgacatttttgtatgtttcccatactcacaagcatcacatactaacttatgtttatccactctactgaactctactggaaatattttacttataatttcaaaagatatatgtcccaatcgacagtgcaaaaataacaccttagctcttcttcacttgtggaagccatcaaagctagacacatggcttcattagtccttccccgatccaaatacgaaagtccatcatgcctgacaccaatcccaagtttcttccctgtttgcctctcctgaattaaacaattctcacgatcaagggagacttgacagtccatatgatcaacaagaaaactttttgaaaccaaattcactggaaaggaagaaatatataacactgatgataaagtgattgaaggagtacactgcactgtaccctctcccttaagtgggcatgatgttccatcggcaatttgaattgtttctttacgtgtaaatgggtatggtttatatgatgcaaatgccccacgcatactcgttacatgtgtaatgcactagagtctaatatccaatttggataagaaccattgatggacataaatgcttgatttgaattatctgaggtggaatgaacaaagttggtaacatcaacatttataggttcagaagaacccccttcaagagtgaccacattagctttgtgatcacctctgtactcatagcctctacctctgttatctctactttcataacctcttccacctcttgctcctcctctatcaccatttcttcctcttccataactaggcttgtgagaagcacgacaatcacacataagatgccccatttcaccacaattaaagcactctctagttttattaccttgtacaattgcataggtgggacttgatgaagacgatgtggcataggaaatagtttcttcttaagctcctcttgtgccatagttgcaatagccacatctaaggtaggaagagtggtttggtgaaacattgcatctcttcttcctttgaactccggatttaagcccttcaaaaactcaaggacccttttacgctctacccatttcttcatttttgctatgtaattagaatgctctaacccaagaggatcataataatctaaatcaaatcacaaacacttcaactctgcgacatattctgccataggcgctccccctgtttcaaagcacttatcttctcttgtgccaccatcattagcatcatattaccttcttctgagtatagattagtgagagttttccacatctcactcgcactagagatggtctcaacagttgtagcaatagcagggattagtgaggtcaactaccacgctaccactaaagagttggtagtacttcaagttttccattctacacttgtgctctcaggctccttcacttctcctatgacatatccttctaacccctttgtctttaaaatcaacattgctctccttgtccaactcaaataatttttgacaccctccaacttaatatcattttgcatcaactcaattttttgtactgattcagcatgaggaacaattgcattgatagtagtagaggtctcactgagtttctttgcaagcatatctaccaattttcccatcacctgttcaattccttgattttcccccattacagcaactacaactacatcccttctatttcttcccataacaacaatatcaagcaaaacatcagtagaatagttccaaccttcccaagtgattgatttaaccaccgcagtacagatcaagttacaatgaccaaattcctcaccttcttaagtgaccaacagaaccaagtgcagctctgcccccaaatctcgtgtgccccttcatttcttgttgtgagatctcaacctaaccttgcaatagcagacaaaagctacagcagctacacagcaaactaacccccccccctttttcttgcaacggcaacagcaaaagctcaccaaatcctcggcccacactcctctgcttcctccaccagtgcaccttgttgcatgcgctagcctctacctgtcctgctccctctggtcgccgtgagcccgtgagtccctgtactgccttcctggccgccgtctcctgcagcgcctttgcgtccctctcgcgacgctgctccagcgtgagcccgtcgtcccggcccttcaccgctggcttccgcgcctgcgccctctgccttccaacgcctccacgacgccggtgcgccacactcctgttgggctgtgtgtgtgttgtggcccaagaggcccatgtaccgatatgcttgcatatgtatagagtaagcaattgacagagggtgtgaagcttccagaaaaacaatcacaaatgtcttcatggtattagagcttggtcgccagcgactgcgtcgacactaaaccctagctggcggcggctatggccagagaagcgcggcgcaccggcggtgtacttaggggtgggcagaaaaagaccgagaccgagaaattcggtcatcaattcggtcctaggaggtgaaagaccgaattttgttcggtcaattcggttagtctcctcggttaaccgaatagaccaaaaagaccgaattaacaaaaaaaaagtataaatacaatctacaatccactaagttcaataggattaaactctaattttcacatccctacttcttctaggcatataacctaataagagtttttactcatacgtgcttacggatttttttttgtgatttttgtgttgaaaatttccattatttctctgcatatatgaaaatgttgctgaatttcggtcagaccgagaccgagaccgaaaagaccgagactgaatttgtcggtcctgacatttttgcgttgaaattcggtcttcacttttcaaagaccgaaataaccaaaaggccgaagaccgagaccgaaaatttcggttagaccgaacgcccacccctaggtgtactggcgtgtggtgctggagctcctgacgaggaagagagcgtgttgagggtggagacagtggcaactattgtggtgagggagcaaggcagcgacggttgctgtggtgagggagcgacagtgttgacggtggaggcaccggcagctgctgtggttgtgcttggaggaatccgacatggagagaaggtgtagctagctggaagcgccaacggcgaccgcatgcgcggagggcaagttgacgatggcgtgtggagtgaaggtgcgcttctactgttggcgattgtgtgtgtggagagaagatggtgatattgcttgctagcgtgtagaggtgctgattgagaaggtgcagctgccgcttgctgcttgagaaagtgttgcggatgctgcttgagaaggtgagaattttttctactgctactgttgagaaggtgaggatttggtcagattgaagtctcacagcaataaaagaaggggaacagattaacttgtggaggtgagaagaagggatatagctgctattaacttgctgtaatgcgggaaaatcaagggattgaacaggtgatgggtaaattggtagatatgcttgctaagaaacttagtgagacctctaataccagcaatgcgattgtttcgcatgctgaatcagtaaaaaaattgagttgatgcaaaatgatattaaattagaaggagtcaaaaattatttgagttggtgaaggagagcattattgatcttgaagacaaagggattagaaggatatgttacaggggagataaaggagcctgacagtacattaagtgttgagtggaagacttggagtactaccaactctttaatattagcgtggttgttaacttcacttatccctactgttacaacaactgttgagaccatctctagtgcaagtgagatgtggaaaactctcactaatttttactcgggagaaggaaatgtgatgctaatggtggaggcacaaaagaagataagtgctttgaaacagggggaacgttctgttgcagaatatgttgcagaactgaagcatttgtggttagatttggatcattatgatcctcttgggttagaacaccccgtttgtatagcaaaaatgagaaaatggattgagtgcagaagggtcattgacttcttgaagggcctaaattcggagtttgaagggagaagagatgcaatatttcatcaaaccactcttcctacgttgatgaggctattgcaactatggcacatggggagcttaagaagaaagtattgcctagtgtcacaccatcttcaccaaatcccacatatgtagttgcacaaagtaaaaagatcagggagtgcttcaattgtggtgagatgggacaccttatgcgtgattgtcgtgctccacacaagcctagttatgggagaggaagatatggtgataagggcggggcaagaggtggaagaggtcatgcgggtagaggtaacagaggtagaggctatgagtatagaggtgatcacaaagctaatgtagtcactcttgaagagggttcttctagacctacaaatgttgatgttgccaaccttgttcattccacttcacataactcaaaccaagcatttatgtccatcaatagatctctttcaaattggatactagactcgggtgtatccagacatgtcacgggtatgtgtggagaatttgcatcatataaaccatacccatttacatgaaaagaaagaattcaaacggctgatggaacatcatgcccagttaaaggagagggtacagtgcagtgtactccttcaatcactttatcatcagtgttatatattccttcctttccagtgaatttggtttcaaaaagttttcttgttgatcatatggactgttgggtctcttgatcgtgagaattgtttaattcaggagaggcaaacagggaagaaacttgggattggcatcagtcgtgatggactttggtacttggatcgaaaggggacaagtgaagatgtatgtcttgcattgatggcttccacaagtgaagaagagactaaggtattacttctacattgtcgactgaggcatatatcttttgaaactatgagtaagatgttccggcagaactgagtagattggataaacataagttagtatgtgatgcatgtgagtatgggaaacatacaagaacatcatatgtgagtaggggactccgaagtatattgccttatatgttgattcactcaaatgtatggatctcacccgtagtctctgtgagtggaatgaagtattttgttacatttattgattgctactctcgcatgtcatggttatatcttatgaggcataagaatgaggtgcttaaatgtttccagaacttttatacatatattaaaaatcattttaatgctaagattcagtttatcagaactgataatgtaggggagtatctgaatagtgaatttggtagacttctttcattggaaggaatattacatcagacttcttggcctgatacccctctgcaaaatggtgtcactgaaaggaaaaatcgtcgtattttggagataactcgttcattaatgtatgctatgaatgtacctaaatttctgtggagcgaggcaataatgacgacaacttatcttatcaaccgcacatcatcaaggatacttggaatgaatacaccatgtgagatgatattgggaaagaatgaatttattgttccacagctgcacttgctttgttagagatcatagaccttctgttggaaaacttgatcctcgagctgtcaaatgcttctttatatgctattcatctggccagaaggggtataagtgttggagtccatcagaacgacgaacctttgtaagtatggatgttacttttagagaatctatctcattttatggtgagaagacatatttaagttctttattcattgatcttgataattcaactagtggtcatgatagtcaacaaatggaaggtgaaatcttgggtccaaagggacataaactatcaaagaaagaaaagtttgtggttggttcaattccatgtcctatgagtagtcctattgcacaagagcaagaatggagtaagccatatgaagaggaaaatcttcaagtttacacaagtataacaaggtctccaataatccaacaagttgaagaggataatcaggtagtggaagatgtaagtcatgagtaagggactttggagtcagggggaggagacgaagaagttagagaagaatttaacttaccaattaccgtcagaaagggtgtaagaagcaatacagggaaacctccactaaggtatggttttgaagctcaagatgagggtgatgatgagaataacatatccaactatgtttcttatgactctttatcatctacatataaggcctttgtagcatcactagatccaatgcaaagtccaaacgattggagagaagcaaaacaagatccaaggtggcatcaagctatgctagatgaactagaggctcttaaaaagaacaaaacatggaatcttgtaccatttcctaaaggttgtatgtgtgttgtggcccaagagacccatgtacccatatgcttgtatatgtacagagtaaacaattgagagagggtatgaagcttctagaaaaacaatcacaaatgtcttcagctcgtccggccgcagcgccactgctgatatttcttaacgatattactagaaatataattcccagcaatggcgctataaatattctcggcctagaaccacacacacatgtacacagcccacacacacacatatacacagcccaacaaaatctaacagtagttgcaactctaaatgaaattctatctacacttaacagttcaatacactattgtcgtaaatcatacatttttattctgatatttagccatctttgtgaatattaggctaagtagacattaatatttatttgaattgtttaatttttgatttatcatgcagtgactccattctaaggtcatacaacttttcggtgc

SEQ ID NO: 1510 - DNA, 10732 bp, Oryza sativa
  Intron number 7 from transcript LOC_Os05g18604.2 (locus LO C_Os05g18604) derived from phytozome v7.0 (chr-ID Chr5; po s 10776679 to 10787410 reverse strand)
ggtcttcaggtcagtttcctgcccctttcttaacttatttattcttcatgctgacagataaatgaattcgtgaagaatatacatggtgtatctgtaaatattcgtcaaagttcagtgagatttgggtatagctaattaacgcgcgtgtgacgacgtctttgtttttaggcatgttcttacctcaattaaacatacttttcagtaagccgtttcaacgcattgccttcttttattttttacttagggtataaaatgatgtaaacgggttgtacaaattgccacaacacatttgtggttatacagagagagaagaaaaacggactacaaatttgtagctagctgcagcatagggttcaataaactatatgagagataggggtgaattagatattaatgacgtagtatatatctacatctaactattgtatgagtagtgagctattagattggctatagatgatattttaatttttgtagctagtagctgactatattattaaacttgctcctatcatatatagtaactagcgtgatgatccatgccgattgcacaactatagtatttttataatcttttgtcacataatagcatacataatttcgcattttactagaaaaaacattgaaatgtgaacataattttaaattttgttctttatggcatatttatttcacttcttccctacatttttatcctattaattaataggatcttcctattatgtttaattatgttattaatttcacctactaataatggcatattgtacatatatatctgtcatagtccataacctgcttcaaatataaaatatccattgtcattgacagttccttatttttttagttttatattattatattttgttattgttgctcatggcttagactctaggaactccgttgtcacgttaggacatgactaattaaggatttaatctcatctgttagttgtatttttaatgtagtttgaacaatcaagctatttttgtttatttattaacgcgtgaatactataattttcaattaatatgtgacttttctaaataatacatttattttaacccaaactaaagatatttctaaactttatttctacgtggaccctttctctttatattatgttgttttaacctgaatttaaagtatatctaaatcatacttctcaacaactctttaatttataatatttatttttcaatatataacttttatacatttctaaattgtatttctctatggactcttctatcaatactaacaaaattttaatcccaatttcatagtccctaagctgtgtttcacatggattcttatctcgttattatttatttctaaacttttaagccgaatttaaggtttgataaattccatatttatatggacacttcttttaatttttttcatttcttattctgaaatacatatatttcaaattgtatttttctttggactattttttttctaattgtacttgttggaaatttggtcataattcggcatattttaatccaaaataacaagataataaacatgatatttacaataggatttgatccagtgatagtggtgaatgtaatcaacatgagcatgcttaacgttgaataagcatcaacaatcacataatgacacaatgttgacattgcgatgaacattaacagtaaaacttctaattgaaataatgtaataaggttataccccaagaatggtcctccgctggagtttgaggcagtattgcctccgttggtgttgacgggagtctccttctccttgtctccagtgttcgacatgttggtgaagatgaagtagatgttgacgaacagtgagtagtcgcgccttgcgctccccaaaaacctgatcgcccgcccgtctgtgcaaacgtcgcagcaacgcgtggtttcggaggcctactctcccaacgcgtgtgcacacactcgtcgggatgggattaccgtagcagcaacagcttttgaaaatggatgaaagtgtgtcttcttcttctcgcgggagatcaaatctattctcattttataagaggaatggaagatgaagagtaagagtcatggaataggaagaggaatggagcaactaattgtcatcaactagccatgaaccatcctccactacacaaccatcaaccaacaatcaattaagagtaattgatgtaagttaccaatggaataggaagaggaatagaacaactaattgtcatcaactagccatgaaccatcctccactacacaaccatcaaccatccatcaattaggactaattgatataagttaccaattccttaatcaaatggattaattctcaaaactcttcatcccattgatatcccatagaagaatgaattcacatgaattcctagcataatgagccttagaatttatttgatttaattgatttaaatggatcaattacccaattaaatctaacaatccccaccaaatttcaaggctcatgagaatgctctctattccatagcaacttttatataccagtgtttcggtgaagactgttaagttgaactttcacctagaaaaggagctacacctgaccacaactgaacaatggactatgccttgaattgtcagtcttgtgcagttaggtttcactcaattccataactgatactaggcaaccattagtattccctcgggttggagcttataagtcatactccaggcctttcatgagtatctagagatcacccaaatctcatagactgtgactagcagtcgaactcatataggtgtgttccttctaagatgttctgcaggtcaacatctctgcttggaaaagccactcggatcacattaagacataagccatcctaccatgcaggaaagaagagaagcacatcatgaaaatgagcccttttcaagggtctcttctttcagtcacacaatagtttgtttcaccatccaaattcacgggatctccgatcataatggacaggtttccactattatgcaaccttaggtgggtatcaagcccatttccctcgatgcactgtctatcacattacgtggtagccccttggtaaactgatctgccagatttctagccgtttggacatagtccaatgttatcactccggagtttttctgctttctgacagatttcagtcttctcttgatgtgtctagatgacttcatgttgtcctttgaactgttcactttaataatcactgtttgattatcgcagttcattaggatagctggcactggtttttcaaccaccggcaaatccatcaggagttcacgaagccactcggcctcaactgtcgcagtatctagtgctgtaagttctgtttccattgttgacctcgttaagatggtctgcttgcaagacttccaggaaacagcgccacctccaagtgtgaacacatatccacttgtggcttttatctcatcagcatcagatatccagtttgagtcactatacccttctagtacttttggatacccggtatagtgaattccatagctcatagtaccctttagatagcgcattactctttccagagcctgccaatgatcatctcccggatttgagacaaaccggctcagcttgcttacagcaaatgagatgtcaggcctcgttgcgctagccaagtacatcaatgaaccaatgatttgagagtatctcagctgatcccttgctattcttcggtttttccttaatagcacgctgggatcataaggagtaggagctggcttgcagtcactatatccaaagcgactcaaaaccttgtccacatagtgggattgcacaagtgtaatcccaccctcatctcctctttgtagtttgatgttaagaataacatcagcctctcccaaatccttcatttcaaaactcttggacagatagtctttgacctcctcaatcacattaaggctggtcccaaagatcagtatgtcatcgacatataagcacaagatcaccccttctcccccaccatagcgatagtatacacatttgtcagcttcgttcacaacaaagcctgcagatgtaagcgtggtgtcaaacttctcatgccattgcttaggtgcttgcttgaggccatacaaggatttcaatagtttacataccattccctcctgaccttctagtacataaccgtctggttgatccatatagatctcctcctccagctctccgtttaggaaagctgtcttaacgtccatctgatggacgagaagaccatgagaggctgccagagcaagtagtactcgaatcgtggtcaagcgagcaactggtgagtatgtgtcgaagaagtcctcgccttccttttgggtataacccttggccacaagccttgccttgtacttttcgattgtaccatcaggcctaagctttttcttgaaaacccatttgcatcctacgggcttgcacccatatggacgctcaacgacttcccaagtaccattagacataatcgagtccatttcactgcgtactgcttccttccagtagtcagcgtcaggagatgaatatgcctcttctatggttcttggggtgtcatccacgaggtatacaatgtagtcatctccaaaggattttgcaaccctttgtctcttactcttgcgagtatctacaatgttgtcctcctcaggattttcctcaggcgtttgatcattgtgttctatcggtgcaaagtgctcatggggcatgacagtttctttactagaagtgctaggtgtatatttcataggaaattcattctcaaagaatgtagcatctctggactcaagaattgtaccaacatgcatgtcgggtactccagagtttactattaagaatctataacccacactgtggatagcataaccaagaaacacacaatcaacagtttttggtccaagtttccgctttttggctataggtacatttaccttggccaaacagccccatgttcgtaggtatgagagatttaatttcttcctttcccattcctcgaatggtgttacttccttatgtttcattggaattttattcaggacatgacacgcagtcaaaactgcctcaccccaccattccttggaaagccccgcagtgtctaacatggcattcaccatctcagttagagtacggttctttctttcggccaccccatttgattggggtgaatagggaggcgtcatctcatgaataattccaaactcttcgcaaaaggatgcaaactcattggaaaaatactccccacctctatcagacctcaaccgtttgattttcctttcaagttggttttctacctcagctttatagattttaaagaaatgcaatgcctcatcctttgttttcaatagatacacatagcaaaatctagtgcaatcatctatcagtgtcgtgaaatatttctttccccctttagtcaacacgccgttcatttcgcacaaatcggaatgaacaagttctagaggtgccaaattcctcgcctcagatgccttgtgaggcttgcgaggttgtttcgattgaacacaagtatggcacttggaatcttttaccaaagtgaattttggaattaaactcatgttagctaagcgcgtcatacaaccgaaattcacatgacagagtcgcgaatgccacacattagactcatcattctcgctaatatggttcacagcattatgattattacacatgtcattcaaagaaaagcggaacaagcctccgctgtcataaccttttccaacaaaagtcccatatttagatacgacacatttattggactcaaacacaagtctaaaaccttctctacacaatagagagccgctaactagattcttctttattgaagggacatgctgcacgttcttcagctgcacggtctttcccgaagtaaacttcagatcgaccgtaccaacaccatgaacagccgcaagcgacccgtttcccatcaacaaggaggaacctctcccgacctgataagaagaaaatagagaaatgtcagcacatacatgaatattagcaccagtgtccacccaccaatcaggtgaatgaaaaacagagagaactgtaggtaatattttaccgtaccccgatgttcctccgccctcgctaatgatcatgttggcagacttcctgtctttgcgctcaggacagtccttggcccaatgcccagacttgccacacacaaagcagtctccctttgcctttcccttgcttttcttcttaaaattggttgcagccttgggtttgacatcaggcttgactttcttgttgttgtgggatgcatgagggttcttcttctgtaccatattggcactagaacctccctcaacctttttgccccggacgtcctttgccctcgccttctcctcaacacccaaagagccaatgagatcaggaacactgaactcttgtctcttgtgctttagagaagtggcaaagtccgaccaagaaggtggtagtttggcaataatgccacctgccacaaacttgtccggcaactcacagttgttgttctcaagttccttagccagcatctgaatctcatgagcttgttcaactacagaacggtcatcgaccatcttgtagtcatagaactgctccataacatacagctcactgccggcgtcagaaactccgaacttggcctcaagtgcatcccacatgtccttcctagaaggcatgtgcatgtacacgtccactatgttgtcagcgagtacactgatcaatgctccacggaacaggcaatccgaagcctcgaacttagcctcttcctcaggagaaagaggtggttcacttcgtttgccccgtgaaacatagaagcactgcatcgctgtcaaccacaatagtgcatgtgctttccatctcttatagtttgaaccatcaaaagcatgtggtttcagtgcagcagcaaagccaactaccgaaaatgacctatcaggtttttggattgttggaaatttggtcataattcggcatattttaatccaaaataacaagataataaacattatatttacaataggatttgatccagtgatagtggtgaatgtaatcaacatgagcatgcttaacgttgaataagcatcaacaatcacataatgacacaatgttgacattgcgatgaacattaacagtaaaacttctaattgaaataatgtaataaggttataccccaagaatggtcctccgctggagtttgaggcagtattgcctccgttggtgttgacgggagtctccttctccttgtctccagtgttcgacatgttggtgaagatgaagtagatgttgacgaacagtgagtagtcgcgccttgcgctccccaaaaacctgatcgcccgcccgtctgtgcaaacgtcgcagcaacgcgtggtttcggaggcctactctcccaacgcgtgtgcacacactcgtcgggatgggattactgtagcagcaacagcttttgaaaatggatgaaagtgtgtcttcttcttctcgcgggagatcaaatccattctcattttataagaggaatggaagatgaagagtaagagtcatggaataggaagaggaatggagcaactaattgtcatcaactagccatgaaccatcctccactacacaaccatcaactaacaatcaattaagagtaattgatgtaagttaccaatggaataggaagaggaatagagcaactaattgtcatcaactaaccatgaaccatcctccactacacaaccatcaaccatccatcaattaggactaattgatataagttaccagttccttaatcaaatggattaattctcaaaattcttcatcccattgatatcccatagaagaatgaattcacatgaattcctagcataatgagccttggaatttatttgatttaattgatttaaatggatcaattacccaatgaaatctaaccgtactcatacatgaaatctattcttagtaatatttattttatcctggatttaaaatatttcaaaattatattaatacatggattcttcctcttagctagtaatattgcttatttctattctgaatttataatatttctaaattgtggtcctaggtgaaatcttttctccgtaatatttatattttaattttaagttgtggtatttatatttatatttgaactctttctcttaatgttatttatttttaatcgaattgtagattgttctaaattatatttctacctagactattatctctatattagttatatttaaattttaatccaagttctctttttcgctaaattgtatttttccatggattattttttccttttttaattaatgcgggaggccgtgagagttaatacagtggctctgttttatattactttattaaaagattgatagtgtctcttaatgtaaaatccaatcattaccttttcaaagtaatatttctatgattgtaatagtttgaaatatattagtgtcattttcgttaaaaaaatatgttagtgtcattttcacataaaccgaatgtttcaacttatgttagttgctattgttttaattttcaactgtacaatttctagaaacacttgtcaagataattctgccgccctggacgggatgaaattgattaatcctctgaaaggtgcacataacaaactgttggtcgtaaacatgcaagaggaaattccagattatccgtcacgtgaaatgttttgattaaacgacacgttaagaggtcttctgtgtgctctttaagaattattaagggacatataaagtatgtccatgtgctaaatattcccttgttgatccgtcattttcaaaagaaatagccataaaacgacataattcggccaaccaggcgaggaatcgatgtcttttcctcatttcttgtaagtagcttgacatttgcaaatttgtcgtcatgcaaggaaaacaacaaaacctttggatacccgctagggaccatttttttgtgaattagggatatatgttttcccttgatgggactgaactcctaaactgaagtgataatattactatagatcagtatgtggcaaggattagatagaatcattgttatggtaggatacgatcgaatagtatccatcataaaatcgaagcaacgcgtagtctatgtatatggtccatttctctcgaaaataaatataaatggttgatgaacctttatgtaaaatatacacgcatgcagtacatggactaccagtgcatatgattccagttagacgccttcctgatcttggccgccggctctcgctcgggggggcctaatgggtgatcggccccgccacaccaccccccacccccccccccacggtcccttctccccttcttctcttcctattacagtacaccacaaaaaaatttaaaaaaacaaaaagttagaaaaatttatgtataaaaaaattgaattcaaattcaaatttgaatcgggtatgtaaacttttaacttataaactttagatttataaactttaggtgtataaactttagatgtatagaaatactatatatagaaaatatttgaattatttgaattcaaattcaaatttgaatcgggtatataaactttaagtctataaactttaggtgtataaactttagatgtatagaaatactatatatgaaaaatatttgaattcaaattcaaatttgaatcagatatataaactttaggtctataaactttagatgtatagaaatactatatataaaaaatatttgaattcaaattcaaatttgaatcggatatataaacttttaacttataaacttttggtctctaaactttagatgtataaacttgaggtgtataaactttaggcgcataaatttactaaaatagaaaagtaatacggtgtcaaaaaaggaaaccagggggaggagggggggtgggcggaatcgatcgctcttcgcccagtagcatttccgctctcgctctgcccaccaccgagcccactcagccccattctgccaccattccgaaaattgaactcttatgttattttttattttttgaagttcttgtggatcggaatagtgttgtcgctgtggtgcggttttgcttgttttggggagttgaaccagattgctaggttattatggactatagacctggttcacaccttaagaattacgtctgagacaagcataattctgaagcgtccaattttagtggcctatggttagatgcacatgcctgtcgagagccctcaggcctggcaaggcaccatccaaacacaccctatatctttgtattacacgtgagggagatgaaattagatcggttttgttgttgtctttaatatttaatatttgtagccggtatagttggtgtacgttgaaatggaaaaataaagagaaatgagggttattgttggaggtcctgagataaatgtaggctacaactgaagatgattctatatctatgtattcacaggaatattttattttggtcatcaccgtgacagtatacaactttcactggtttctatagcaatatatatgcaataccctataaacttgtgatattattaaattgtttttcaagacaaccaactatataagtatatatggttctcagacatccaatcaaattatataaaaaacatattccatttgttttatatttttttataaataaaacttactatgtatttctacaaaatccgtcctgccaactatgcaacgatgttactctaataatgtagaagattgacaagaatatatgttgttattgtttattggcagtggagacacggacgctgtcgtccccttgacagcaa

SEQ ID NO: 1511 - DNA, 3114 bp, Oryza sativa
  Intron number 4 from transcript LOC_Os11g40690.1 (locus LO C_Os11g40690) derived from phytozome v7.0 (chr-ID Chr11; p os 23837613 to 23840726)
ggtggatattccagtcatatactagtgcatcaaaggtactctgctttcttgttaattttctgacataacaaaccgaccaaaaagtactccctccatttcaagttataatatgttttaactttagtcgaagttaaaatgtttttaagtttgactaagtttacagataaatatagtaatatttataatactaaattagtttcatcaaatcaataattgaatatatttttataataaatttgtcttgggttgaaaatgctactaccttttttataaacttggtcaaacttaaagccatttgactttaaccaaaatcaaaacatattataacctgaaacggacggagtaataattatattagttatatagacataaatcttataaataatgtggattatatatccatgggtaggggtgaaaatggtatggaaatttctcgaccgtaccgataccgtttccgcaaaactaatataataataataattttaccgatgttaccgttttcaaaatttagtttttttaatttctgtcagcgtggcattgaagttggcactaaatagatgaattcataaatatggaaatttcccgaccgtttctgttcgttttccaaaaaaataataaaataatgtactgtttccgaccatttccgaccgttttcatccctatccatgggggagtactgggttcgtacccactgaacacgtatcttaatactaaatgacaggttttaaactgaaatgtactacctccgtcccaaaataagtgcagccgtggatatccgtgtccaatgtactattcatattttatcatctaataactataaaaatactaatcataaaaaaaatttaaataaaacgaacagtcaaacgtttaacatgaagaatacaaaactacatttattttaggacggagagagtaataaacaaggtacgaaagtgtcaaatatggagttataattctatatgggtatggatcataaagaattctccatatatatatattactccctccggtccataataaacaaggtacgaaagtgtcaaatatggagttataattctattatatgggtatgtatcataaagaattctccatatatatatattactccctccggtctaaaatatagcaatttttaggtagatatgatatataatagtactacgaatctagataaaaggttgttatactttggaatagaggaagtaggaaatatggggatgcagttacggattgaacacatctgattgaacattaaaactcaagcacccgacatactctgagttgctgcgctctaatcatatccgcgtgcacgcatttactcttttcgctgagtttggctgcaacatacgtactccctccgtctaaaaaaagacaaaccattagtttctgtcttatataattgttttttataattagtattttcattgttgttagataataaaacatgattaatactttatacgtgacttatctttttaattttttttaaataagacggacgttggacacaaaaattcaggatttttttcttgacggagggagtactggtcactgtattctgttgaatgcaagcccgtctcctgctctcttctctaacaacactttagcaaaactttaaaaatacttttttataaattatttatctaatttgattcgattacataattgtatatgtatatacatgattatatttataattgaaatatttttatgtcatatatgaaacatcgagtacttctaattaaaatatttttatatcatatataaaacatcgagttgtagttgctaaaagagtacaaaatacttgatggaactgttggcaacttttcgtgataagttgacaagcacgatcgcaacacctaaacgcctggcggtgatcctagagtcgccaactacctcgatctagcaaaagctaaatcaagatgggttttgataactaaatcggctagcggagccgattctaaataactacccgtctcgtgggcaaaatagaaggttttcaggacaaatctacaaagaggtgtcgcactctcgcagcggcggcgtacgatttacagcgcaaatcgacaaagatggacgaactaaagcaaaaactaaaagcaatatgaaaaacgattcgattgattgattgtagattgattagttacaattgaaccgaccatgtcccttatataggggttggtcctgccctctacagaccctcctccacgtccaactcgggatagaatccaaaggaaacccgaaacatgccttcccgagtaaggaaactttgagacccgacgaaatacactcggactcggaccctgctggtcagaccggccacataccggcggtctgaccggccaacacatggcggtcagaccgacccactcgaaagaaaccggcagacttccaaactctggcaattttttctattttactcttagatgccaaatttgggtgtaaacaggaacatcaaagaacaccattgcacttacaatatttacaaatgaattagagaaatatcataaatattttgttaaaacatcccagcaacgccgtgtgcaatgactcacttttcattttcacaaacatttacaaatgattcaacccctaaataaaattttgggttattttaccagctaaactatttgacacgactcactttactccccagtggtatttgtccttttcatttcattttatataagtcgtattttgagttgaaactttgtatagccgtagatgacatcatatactatgttacaaaatatttttaaaaaatttatactatggtttgcttgtaggtttaaataagtttcaggtgctttcaacatatgcaaacagtgattaaaatccaaaaaaaaagtttgagatgtaaggtgcaatgttatctttatctcacaaatttgaacttaaaatgtctgttataaaagagaaaatggtctgtcattacttctgtattatgttgattacaattaccatataattaagtaatcttgggactacgaatgtttgtattagctgcccttctatctactgatgtgaaaaacattgtaattaagctaattgcatcttctttgtttcattgacatggcaggtactgctttaaaatacctgctgactaccctttgt

SEQ ID NO: 1512 - DNA, 1308 bp, Oryza sativa
  Intron number 3 from transcript LOC_Os05g28290.1 (locus LO C_Os05g28290) derived from phytozome v7.0 (chr-ID Chr5; po s 16503095 to 16504402)
ttcgcaatccggtttggctctgtcgaaagtgagttgttcgctcccgtcgtctctgggctaatttgttctgttgtagtcgtatctactatgtagtgtggttatccttgcttggtagtattatgttggatcatgccgtttgcttttgttcatggtggcaatagtagttttcctatctgagattccgttgaacgttgatgggttgcaatttttgcttaaccaaagttgtgcttaagaacatgttgaattgggggtacttgtgaatctattggttgtttcatatgatgtttctatgaggagtgttggatagctaaccttgaaggattttcgcacgctttggatcggatgggtgggataacataggggcaccaattcccctggtcttccctgtcattacagttttcatctaatttttaccttaataattattgagatttgtcatgttcaattttaagattctgttattagaccctatgaggtaaactggagatgggacaccatgatgtctctctgtttatgttgctacttgctagtcatgtggagaacaatcttactgaaacttaaaatgtacagaataataatgaactagactggtccatgatatttaacattctgtttacctcatgttttgttttttactccctccgtttcacaatgtaagtcattctaatatttgccacattcatattgatgttaatgaatctagatatatatatccatctagattaattaacatcaacatgaatgtgggaaatgctagaataaacggaggaagtatgtggtaaagtacacttgatatgtataattcccaatgtatatttttgtgtagctatccaggtgcacactgttgtggtagaacacaggttgtttgctcttgctggccattggcttctttaggcactattgcggtagaatgatttaggtacacactgttgtggtagaaaaaataggctttctttgtgttaacacatttttagcagtcgttacagattacattctttcattccttgtctgtaaaggtgaagtagtgaactttgtaactttcatgtgtttgtgggggcatctttttcttgaatagtacaatataatttttgccattagtaatgaacgtgtttattattatgtagctacaacattatgtctagtagcatctgcatgagcagcatcctcttcatctactatgttccatttgttgcacatatttcattctgttatttgaatcttctgaaaactatctgaatttaactgactaagattcctatcatataattcctagattgcaagaaatttaaggatttggttgaagagatt

SEQ ID NO: 1513 - DNA, 1683 bp, Oryza sativa
  Intron number 1 from transcript LOC_Os09g08200.1 (locus LO C_Os09g08200) derived from phytozome v7.0 (chr-ID Chr9; po s 4253128 to 4254810 reverse strand)
gggggcacgtgcggcgcacgtggagagggagggaggttaggatgctagtaaaaaaatacttttttttagaacaaactgaggctacagcctgagattaggattttattaagaaagctgagagtacagcaagtcttacagatggtgtggccacgaggaccgagggcaatagtaaaaagaaaaatattacccgggttgttaagggctgtggggcgagctgtttacttagacggcatgtagggtgctttgtgtgtgtatatagactggtgattccccgcactttgctgcagaaatttctaagtaacttttaatatttttttaataaatgagctaaaagtaaaaattatatcattattaacaataaataaaactggtttgcaactatgttcagagagatacatttagtagactatgtaagtagatgaaatttgatatcatacactttgattatatggatgaatatgtgttaaggattataaaaatgatagatatatactacctccatattttaatgtatgacgccgttgactttttatccaacgtttgaccatttgtcttatttaaaaaatttatgtaattatcatttattttattatgacttgatttgtcataaaatgttctttaagcacgacataaatattttcatatttgcacaaaaaatttgaataaaacgaatggtcaaacgttgttcaaaaagtcaacggcgtcatacattaaaatacggagggagtacatgttaaaaatattgtgaaaaataatgtgaaggaagatgattggatgttgatttgtagaattcaatgaattatacatgatgttgcatgcttgcataagttttacatgtaattattgctagtgtatgatgaggtggtatatttaatgtggagctttaggattagtgtgttataactttacagtaagataggatatgcgagctgtttagttagacggcatttagttaattttgtttcctgtcctacagaattatttataggaaacaatattctcgtcattcatatatgtgcagctcatcgtcagctttaagaaagacacggcaccacaatcatacaattctgtgaatatgattatagtgacacaaatagcgttatgtgtcaaatcttaattaatcaaaatgtgaaatgtgaaatcatttctgcaaaattactgcgccacgtcattaataaaatatggaccatccgatatctccatctgacaatgccaaccgttagatccttcaattggtcaaacatcttaacgattcttcagaatcttctatttgcaacaaggtccttcgacatccctccaccaaaaaaaaatcgctactctctgtgtgagaacgaacagagttgtcgcttcctcttttcatggtcaccgccgtcatcgcgtcccctcttccatcgtgctcctcatcttctactccaactccaatcctctgcctctcatgggtgtatcagaagtactgagtgcataaatagctgagacacttcaaggtatgatcttttcaaacacaaaattaaatgaaaataaaattattcctgttttctatacctgagcagtaccggtatcctattgtagaatttctttttagaacgattcttagtattgtatcttatctccctgtaatgtttgatcttaagcacattctagagaaaataaaagttccatcgtttgttaaatttcatttctagg

SEQ ID NO: 1514 - DNA, 1448 bp, Oryza sativa
  Intron number 1 from transcript LOC_Os07g46560.1 (locus LO C_Os07g46560) derived from phytozome v7.0 (chr-ID Chr7; po s 27806893 to 27808340)
aaatcaaacccgctggtttggccttccgttttgaggtagcgcatttcgctcgcttccttttggattgtttttttgaaaggaaagattggattttcggggggttttgaggcgctcctgccgttcttggttcgggtatggtgaaaatgcggtggtgagatcgcgaatgtgtgtgtctaggtgcccttggttgctgtcgattagggtttttggtcggttttcttttgggattttggggggtttgatgctttggagcggatgggatttattcatgtcgaggtgtgcttattcggtcaagtaaatggttttccccatcagtgatgtatatgtactggacttcttactaggaaagctgcaattttagatgattgatccatctcattcttggcatatcttgaccaagcatttgtgaatatttcttctcttattcgaagcttcaaccgtgtgggtcgaaccgattctatacaaaagaatcatgttctttctttttactgctattttaggcacttagctcgagatactgtgcattttgatattaagttgttatgggctcaacctgatgttcctgcttctagctctgaggtgtccatgatgtaagggagctatgtctatgattatgtctttccaatatcagagattcgtagtaatttccttgctccactgtttacgctttgcaactgccagcatcatggtttctttgaattagcaataatcataggtactgtttatactagcaattcatcattacacaaggaggaaagatgccacattgtgatgatgaactgccctctgccctactcttgttgtttctgttgttcagtgctgctgtaagtagtttcagctttgtgtgcaatacaaggtgtagtggagtttgatagaagtgactccccttttcccattccttatctgcaaatgcataattcgcctccactaccggctttcctcctcttagagctgtggtctttacagtcaagcagtagttgtttgtacctagaaccgccgaccaactaactgaaaaagagacaggccatggctgcaaatctatcatgagtttcatctatctaccaaaaccatagtccaaaaccactataggatgtaattgactcaattttgtaagtttatggttctaaacaaccagttgttcagtgtgtaaaatggacatgtttttgcaatgcttaggagtatacatgtacttctccaatccaatttcatatgaagtctgtgtgagctcataaagccttcaagtttggtttgtttgtcttatgactgccttaggggttaaaaaaatagttttgctctgagttccaaagggaaggcaaggaaatttagtttggcgacgattttttgatgagcaaacatgcacttctaccttattatctttcctttaaccactggaaataaattctctcttttttcgtttatacagggattctatatctataggcttgtcc

SEQ ID NO: 1515 - DNA, 8528 bp, Oryza sativa
  Intron number 8 from transcript LOC_Os12g02660.2 (locus LO C_Os12g02660) derived from phytozome v7.0 (chr-ID Chr12; p os 908038 to 916565 reverse strand)
caggtataaatatcctcatcaggattttgatatatgtcatttccttatttctgttgtcaacatgtttttattagaatacacttaagccaaattacatgacgaatagatggaactgtatctatcataggctatgcctagtgcttcacctaggcgccttttgctcgctcaaaactattggtagtgtaactagttcaatttccaccttatcttcatccacctttgccagtcctcctatgaagtccccgtgagtcttcacacgtatctacaagtcttcctcccctctccttagcgttcacccatctccaccagtcttagcctatcttgttgggtctttgtcttttttcgttggtttatgcccatcttgctagtgcaaaaacttccgaaaatgtattgcacataatttccttaataaatagagaatattcgtgagtagtacgtagttatggactagttaaaacataataagttattgcctacaatattatcacgagtataccattcattagaaacttccaaatattccatttgtcacaaacttccaaaatacactcaagcaaatatccttcaaaacaaataaaaatatgcacatatcaccattagctagttcaaattggtgaagaaaagtgtgacaaacgctttttatcagttttgtttagataaattgacactaaaaatcgctatcgactactaaacgagaaagttatcaaatgagatccaagaaatatgggcaacatagcacgaagcgttcacggcatctatgtttcgaggtcttgatccttgcagcctttgctctcggctctgatcggtagatttggaattgggatgactagatgagatagggttaatggaaatttggaaagatttaatttcacctccttttcaataattacataatctttttaataaaataaatagttaaacgtatgtctaaaagtcaacaaataaaacaaatggccaaacgtaaataaccgtgcataatacataaatactatttcaatcgtaaacataaacgaagggcaatgcacgtaggtttatcagtccatgaatgaatattatattaaaaaaatatatataatgtcagaagtgggatttgaacccacgccctcgttagaggaccagaacttgagtctggcgccttagaccactcggccatcctgacctcacagttttttttcacctgatgttgtctaaaccattaattgacagacgagaagtaaaagtttcattccacaaataagtaacacttcaatcggtgtacagaattgcatactgtagaatatactactgtttacactcgagttgcagcattgttgcaaacacataccaaacaaatataacaaggggaaaagggaaacatttatataaccttcaagaatctcaagtcagagctctctaaaaattaatggaacacctttcccaggctcgatggtcagtctgaacgcagggcaatgcacatagtttggagaaagcttgaattcaaacttggacagcaggagtgacagaacaaccttgagctcaaccatggctagattctggccggcacatgtccggaccccaacgccgaagggcatgtacatatgagggggtttgcaggcccctgctatgccgttggcgaacctgtccggatcgaatttgtcggcactaggaccccatactgaaggatcccggtgagccatcgcgatcgggatccagatgttagttcctttcggtatgtcgatgccgccaagtttcatgtcattcagagcttcccgggcgacgaaggaggctggtgggtacaatcggagtgtctcctggatcaccattgtcagctgcacaagtatcaacagcacaccattgttagctgtaatctaatgaacggattgttttcatctcttctgttactggaagaggatgagaggacaaaacatacctttttcaacttccgtagaatgtcaaaatctagtggtctcccttgacaaatgtcaagggattccacccgggcacgggactgccattcatggtgtgaagctagaagcatcaaacaccaagcagccgtggtcgaagttgtctcatgccctgcgaagtagatgtttttgcagttgtcgacgatgaaatcctcgggcgtgcatgaagcaaagggaccatccttagaaccttgaataatggagtgcaggagatccttgtttactgaggtcgatgaatcatgttcatatttctttgatatgtttaaaatgagggtacggatgctactatccagattccagatccctctattgctccttgttggtaaatacctagtcggcccagcacaaaaataaaggaaaatccttaaatgattaaccaattacaataagatgataaaacatgagaagccacttattttcatataattattctcatgcaatggtatggattggaaaatacatgttatgatactcttggatctactgtagtatctcacggattctagataaaatattattttttaggccttatatccatttagaatgatatgtaggaattgcaggtagatcagaccaaaatgggacatgtaagttagcccagacaaaatagaagctgtatatttctccaaaaggttattctgatactgctgcaaaccaaaacagtaacacattatctgaattatagtgatttcagaagttgaatctgggcagctacttgggtattgaaatcattcaaactaagcattatctaaaaaaagagctcaacagaggattttgagcagttcaaagacagcattcttttgagttttaaattgtctcaaattgaaatatgtgccacagtagtacatgtgtagtttctgaaatatacctacttccaggaacaccaatgagcatactttgttttgccattgctttctgaagttgtcgtatttttatgaaaatctccttgccttcactaaagctgcttccaaaacaagcccttgatatgacatcagctgaaaaggttctcaagaactcatcaaccacaatctctgcactgcctcctctgtcctcaacttcatttttccatgagttcaacattgacattgcagcctccatcatcaaattcaccattccctatggatgtcattttaacaataaattgagttttagtatatgctacatgtagtgtactagaaagttgctccaagaaaaatattgttttttgacagagagatccatggcccaatacaagtgcctgcagataattaccttaaccctttccatgaatagttcaggtgcaatcacttttctctggtgtacccatagatcaccatttgatgtcagaattcccataccaagaagagctccacgctctttttgcaagtagcaaggttttccaagatccaaagatttgcagttggctagctccttcaccatgtttggatcagtaacatttaaaacttgtatgcttccagtggaatacaggtagatggaacctaacacaacatcaatgtttcaggaacttatcagctttaattttaaatatgaaatgcacaaggcatccgtcgatgttctaaaaataaatctattaggacatggttacagaacatacaacaaaagaatttacagtaatttaaatagcttatatgtaatgagggtaacaatgagactggtcgacaagatgagacagtatatggtacaccatcagaacgtatatgaaaccatgagctatccataaacaggccccaatcaaagaaattatgtttcgatggttgcagagcgaactaccatccaaaatacaaaggtacctaaaactctctgaattcaagtttgcatcaccccaaaataaaaacaatcctgttatgtgggacaataaaaagagaaattttagagaaaaaataagtcaatatcaaaacattcctcttaacaaaattccaatgaattacatttaacatcgaatataaagatgaattaataaactttattttactgaaactattatgcactacaagtttcttaacgtaccataaaccctgctccagtggaggaagtaagggaaaagagttgccacataatttgatgaaaacatgtcggtactccctgcttcttgttcatgtgctgacttggccaattgctggattctcctcatctctggtatgtttccaaagagaaaagaaggcttgggacccctcactccttggctcctcagtttctgcctcaaccgctctggtcttagccatagaatgatatacacataggagaacagaaggatacagaggatgatcggaggtagaagtgctagccattgctgtgatgagaatagctccatttttgtgtgtacgtatctgggtgtgtgtgtgagagaagagggagactacatgttcatagcatatccatatactgtatactgcatatttgctgggtgatccatctccatgtgaagcttggagctgaaaaggacataaagccgcaaagaagcgcctcactcactctgagcagttagcatgtaacgatcatacaacactgcaaatttacaacatagaaaagaaatccaaggttagtggtaggaaaacttaatttaacatgcatttttttaaggaaaccagggtctgttatgaccaaattattcacatggcataaaaaggaacaatttgggggtttcatatatcttcaacagattatgaggttgggcaataaccttgtagtaaagagctttcaacaaacaataaattaagacttttcggcatgatgttgtatgatagtttagccccattaatttggcaagaaattgcacaagatatagacatatagtagcctagaggctgctagaatatagagagataacatcaattggttgcttgaataaaaaactacgggcctctgctaagagtagaggactcaattcattccccacacaagttattaaaggaagtgttagcctgcactaagaaaataaatgagatgagatgagtgagggcacgcaccgtggcatttcgagctcaacaattgggctctgtgactctgcagctagcagctccatgcgaagaccatgctgatgagttgattgattacaagtatcagcgcgagggcgcggaggatgcaaagaggatgaggaaactgactgattaagaagaatctgcggtccagatagatgcagtctccagaaacagccctgtctgtctacttgctaagttttgtcactttgttagactcccatcaatcaacgcttggacccaaacgtcagtggcaaaccagacaaatgcctttttttttttcatacaaaagggagtgatggcctctcttactttttcaacccaaaagaatggatcgcaacaatgttctccatcataaaaccctttgattgggttcaacgagcttagagtgcttaacaacttcatctcaaaaaaggagctttattataacaagcattgctgtctgtggccagcaattataactggagctgtcatgaatcgactgggtgggtgtgagtaacagggctgctagctcatggcagctttgtcaccatgagtggcaagccgaacccgggttcaatggtcagcctgaacgccggcgagtgacggtacctcggcgacggcgagaaggcgaactttgtcagcagcctggccaacaccaccttcagctccgccattgccaggttctgcccgatgcacgtcctgggcccgtgcccgaacggcacgtacatgtgcgccgccctgcacgccgccgccacgccgttcgcgaaccggtccggccggaactcgtcggcgtcggcgccccaggcttccttgtccaggtgcagcatcagcctgggcacctgcacgatggtgccgcgaggcacctcgatgttgccaagcttcacgtccgtcagggcctcctgcatcatcaccgacgccggcgggtacagccgaagcgtctcctggatcaccatcgtcacctgcatcatttcgacatcgttgtcattcatcatcagtaaacagccattgttaatttctacgatgaacaatgcggtttaagatgttaatttctcacaatctttaaccggcgaagggcgtccacgtccaatgtcgaccttccccggcaaacctccattgcctcagagtgcgtggcgagtagcatcaggcaccagatggcggtgaccgccgtgctctcgtgacctccgaagtagatggtcttacagtttccgacgataaagtcctcagcctctgcagcgctgcgaccatcctgcgcaccatcaatgatggcgttgacaagactgttgtgtgagtcttggtagtggtgttgttcctttgcgacatccaggatcagtaagcggacttgttcatccagcatctgtatttcttggttgctcttggttggcaggtatttcctacaacagcaatatagcatgaaccatctaaattagcatacctgatcacttatagctgtgattgtgacatgtaagtctagtttatgccatgcttgaattataatactttaagcatgtgctgtttgaaaacagtttacggcgaggttttctacctatttgtctctactgaatgacaggacttgttacctactaatctcaaattaataaggagtatacaaaagactatttcttggttaatatcatgatacacacgtgaaggttctcatttcattgcaactaatttcattgacttaccacagtgcagacagaccaacaaacgaatcttgctgagcaattactttttggagctgcctaagcttgcaaaatatttcttctccttttgtgaagctactcccaaagcaagccctggcaattacatctgctgacaagttccgcaagtaatcatcgacaactatttccctacaccctcccacatcgtcaatcatatcctcccatgcttctaacactgtaacagttgcatcctcaatcagctggatcataccctgcatgcatatataaataacaactgcaatcacgcgtgatacgagttctagttttcagtccatgaaacctacaagcaatcacaatttaatggtaccttaatcttatccatgaagaactctggtgcaattatcttcctctgataggcccattcatcaccattctctgtaaataaacctcctccaaagagggccttgcgagatttctttagataattaggcttaccaagctctgatggtgtccaccggcctatatccttcaccatatctgggtgagaaacttgtagtatctccagagctccagttgagtatagaaacactgggcctggtcaaaatacacatgtaaattaacttcattaagaagaactcaacatggacattccctcaaatttgacatgaatatagggaaaatgagatgaaaagcataatctattctaagattgaaatcatttgtcaaacttgcatttttcggagcaaaggaaatgataaatatgattgttattgtattagaattctcactaccaaagtagatcagatcctgcttaatctacaagtagttgggaaatttttagttattcaacacaaaactcgagataacatataaaatgggtgtatgaaaattttaattgatggtcaactactgagtcctttatatgactgtcaagagttgaatggctattatattaagctgtaaaagggtcccacagtctaaataaactattcatcaataattatgatcctgacaaacttgtttaataatactcagtactagcatctgagcttgtttagagtctgaaacagaaacttcgtaggatggtaaatagcatccaaaatggacaaaataaaattacaaaacaaaggattagatatatatttaaaaatgtgtgatggcaccatttcgctgaaaagtgtctgatctgtttatataatttgatatcctactaaaagttgaaaaacagtaaaaagaggagagattaaaaaaattatgattgccctccaactccctactaaatgatcaattcaggcttataaactagattttaatagcaaggatactttgggatcctgcttctccatggtaattcattaattcacttcaacagttgtaggtgactaattttctccaagacatgtcattaataaacttcaggatcctatcatcaatctgatctactcatgagccatgaacatatgagtgcaagagccaatcatggacaaagtcacaacactagcatatgcataccataagtttcccgacagaggagaaagtgtgggaagagggtggagatgaagttgttggtgccttgcttctgtgaaaatttgagttcttgtcggattcttttgatctcctttgtgttgccgtacagaaaagtaggcttgggaccccttatgccttgcctcctcaacttcttccttatcttcacagccctcagccataggatgttgcacaagtagaacagagctaagctaagaagtatgacaagaacaacaatgagtgcaagcaatttctccatgaagcatagggaaccagagaagcaaagtatttctgtcaaatcttcagtacattaggtctttcgtgcgctagctttatatatttgtttaacacctcaagcatgtgaattcttttgtttgaccttttcttcaacaactgattgttttgtaggttgctttcacatcttgggatcaacttacaatcag

SEQ ID NO: 1516 - DNA, 1267 bp, Oryza sativa
  Intron number 1 from transcript LOC_Os08g39380.1 (locus LO C_Os08g39380) derived from phytozome v7.0 (chr-ID Chr8; po s 24885849 to 24887115)
gcgtcgtgccgcccggcgagctacactgctcgcaggtacacacactctttgcctcagtaaccagtagtagtagctaaaattggaagtgtaaatttgggagaatttattgttgtatgttggatccggttcacatgaacactgacttgcttaaacatttcatatatctatgaagattgcaacaatgatttgaactgtaggagtaataatgagtagagtccatggcaaaaggtgggaagatgtttatagcatgtttcctgtagtaattgcgactaaatttaattaattaatcgattgcgaggaaatttcaagaaggccagggtgtaaaagaatttgattgagtttgggtcctcagtccttgctcttctgctcctgcaacagaggactgaggactagcggcgagcaattgagtttgagttagtttggttcagcaagataacatctgctctgggtggcacccactattggatctggcaaattggcaaatagcaaggcagcaatgttagtgctggccacaggtttattgggctagtatgggaactcctaacaatgagtcaatgagctcctttctttttgtttggtgagggagatgggtgtgggcaagaaatcttacaggctataatttcagtcttcaaagtggttatagttgtttcattccctccctttcttttttgttctactgttgacttggcagtttgatggaattttctttttctcttgttaatgagaaccccatgagaaccaactggctatataatgaataaatattttgattcggttatttggtttagggagaaaaaaaaagctttcggttatttgattagtcaagttaatcgtgccgacgccttgtgcaactgtattgctgtaacatatttgatgccttgattgatgcactgtactcatgcttttggttatttgatttagttctgattggttgcaaatttaccatatcaatacagatgtagttgactatttagcgaattgcttaaaattttgcttggatatgggtagtctgttttgagctttgaagatgtatctttgtagcctttataacactagattttttatgaagaaacacatgaacctctcaagaagcagagcattgaattcattccatgactcctattgttatattgcaggattcatttcttcaccaatgtatacatatcacagtaatattttcgtaaagctcccctaggataaattcctttctaatgttattatatttgttgcagtgggttgaagaaccaacacttctagtaactcgttt

SEQ ID NO: 1517 - DNA, 3462 bp, Oryza sativa
  Intron number 6 from transcript LOC_Os10g09870.4 (locus LO C_Os10g09870) derived from phytozome v7.0 (chr-ID Chr10; p os 5358400 to 5361861 reverse strand)
caccagctcattcatcaaggtcgcgctcaacacaggtttgcaagcagaatgttttatcttctagtttgttgaatgataatggaacagcattcatcaatcaatgccttttgaacactcctacgtttggttcacaattcatatttatgcacaatctcttttgcctgctaatacctgagttgcaggtgtcctgctatcatagtttcgtagataagtgtcatgccgtagtactccaaactttctgtgcaactactccaactttgtgttaagttccatgagaaatagaagtttacattgttattgtggttgtatgtttgagatgattgtaatactcgaaaatagaatgaaccaaagatgttccataataacttgcttcaatcctaaactcttagcaagataatgtcacgaaagacgatatttaacagcaccttcaactatgtttgcgataaaggcattaaattaacaaaagtcaaaactaatcaaattaaagcaagataatgtcacgaaagacaatatttagcagttccttcaactatgtttgggataaaggcattaaattaacaaaagtcaaaactaatcaaattaaagcgagacaatatttaaattgctctgtatatttgtacaaacattatgtaatagaaaaaaacatccacgtgtggtatctaatagcaagacgtttaaggtgccgtatgaggttatagtgacccgttacaaggtgcatagggttgtagaaagaatgaccagccttcagttccacaaggttggcagccatccattgcatcactaaaagaacatagtgggggtcacaacagccaccaagacaaagcagcaagcctggtccaaaaaaaataaaaataaagacaaagcaacaagcgatcgaagaccataacaattaatttgtgatgactaaaccttccttgaactcccttatctatacattattatttatgtcacatcagcttgaatatgtacaattcaaaaacatagtaaatctttgcaataaagatgctacatatcaaaacattcaattaatgccccttaatctggaaaaaataatactaaggaataactcaagtaggtatttctatcttcaattttaatattaaattttaagcattgaaaggagatagatagagtgaacggttcaaaccgttgggtgaataccgtccaatttgcaaggtgggtgctacttattccgaagtattgttatactatttatgagtagtgcaagtagacaatcatattcaaaatagtttactagatgtagcacttaatgagattttgctacggtagtatttgatgaaaatatacttaaaaagcttcttcatgttatgtttggagatcgatactaacgaaaaccttaatgatgcactgtatatttattacaatgtcagtattctaaatagtatagtaaataatattacgaaatatcatttgagtatgaaaacaagaataagaccatgtaatacactagctccaaaatttgcatcagcataagtccttcatggattgggcatacatatgcatagacttatacttttattctcattttcgtgtaaaatagttaacccataggtattatatttaaatcagaccttcatccacctaaaattctaaggaggtattaaaccaccaattacaacatcttctagcatatatggacctcaacttcacctcttctataggctgctaacgggctagggagtcacatgctgaagattaaccaacctatggatatccaccacaggaacttctaaacttcatattgataagtgccaacacatttagttaaatttatcatagctgcaataaaatttgtcaatgattaatttggcactactataaatcatgataaaatcctcttgagtcattaaaggaaatagagaaattcaaagaataatcagttccgtattatctgaagatctcagttaaagttttattactctaagtttatatgtgtaaccaaggatccaattctttacctacaatcaaattttgaagtaccaagaccaactaactgtaccaagaccaactaactatttgtattgaacattttacgggaactttacatatagatataaagaaattttcagtcatcataaaagattttaacattgccctgttcgtttcctatgaaatttgaggataaacttttggattaaaatggcacgcttttcaaactgctaaacggtgcatttcgtacgaaaactttctatatgaaagttgttctaaaatatcagattaatccatttttcaagtttgtaataattaaaactcaattaatcacacgttattaccaccttgttttgcgtgaaacacttaatcttcatcttcaggagattcaaacaccagaaacaaagatatgcccgcgcaatcgcgtggattaccttcctagttatattaataatgtaagatcagcagactactaatgtagctgttagctcctctgaaggtcgtttgtgatgttgaaactaatatgtagttgttaccacactaataaccttcaagatcaacaataattaaaatatcagttcaagttggcatatctgtactctgttggacatgccacttaatttttagtttaatttgttggttgaaaatgctccaacttccaattcattaaatactttacacaaattgcataatgataggaaaattttacaaattgtaccagattggttcccaccaaggagcatgtactgtttttgagtaaaacatattgtattttgtttccaacttcctaatctgtagggtggtttctttcttccttcagaaaataatctgctcaacacaagatttaggtgggattagtgttgatcactcatcagcagtaatatatcttttcctatttattacacttccttatgtaagtttgagacacttaggactgacttgagcaaacacgaaaggcatgagatcatttagttaaaatatttaacaatgagaaatgaatgaggaaactgggaattaactgttagtttgatagtgtatagaaattgctgattgttttctggcagtacttctcgcttcgtagttatcttgtcaaatcgaaacatcagaaaatttccccagttttcctgtactcctgtgacattctgccccattgctgctatctttacttgcctagtaattatctgacaagtactgctagatcgcttgcccagaaattgttatgatattgtaaaaaggcttgtttcagttgaagacaaattgtagaaaatttatgattatcctatctgacatgtgaaaaaccttcgaagctaatggtaatatatgtcatagtggcattagtagccttaacacattctctaacagcatcctctgttatttctcacgtaggttttgtttgtcattaacacttgttattttttttttgtgttttcactaaagtttttcgtgttgaattcttcttttgatattgttatagcagcaatcgtatccacaaaaacagcagcaagcacaacc

SEQ ID NO: 1518 - DNA, 1010 bp, Oryza sativa
  Intron number 5 from transcript LOC_Os07g09580.1 (locus LO C_Os07g09580) derived from phytozome v7.0 (chr-ID Chr7; po s 5073953 to 5074962 reverse strand)
cgatatacgtgtcgaggtacgtgcttatttttcttgtcctttcctagtataaaaccgaaggaagtttgtctaaatgacttgattttttgaaattttctaatacgcgctgtagtatattgttataatcatgttgacattcttctgaataaaatctcatcccttgtcatttgtatcccgttatcccacattcgtgtccttgcaatgttgaaaacaacacttgaatatgatgactggtatttcatccactaatccgcttctgcataatattgttgaaacattttcatcgacctgtacaattctggtgccaaaggaaattcttcatcaattcattaaaaagggaacaataataccctttgtctattcctgcatatgaacctgccagaagttaaagatacattgttgctaaacgattattcctttgaaaaatgaaagcagctgttacttttctatgatgtgcattctgtgtaagggataactactagttccaattaaaattgtagaatttctttttcaagatacacttcctcttttatacatatgtgtaggatattgcctattgtccctttctccttgcacaactgtagagtagaggattctgcattaaccctgatgcttcatagtagaaaaataaaattgaagatgatttgaactacttcctgaagtttaataaaaatacatgcttgatagttgatagtgaacacataatttgcctgctctcttgggcaattaaataaagtggagcaagagaggcatgagcacaagtctgttgaaatcttaactcaccaaggtatgcaaaaatattaaaattttatatgtgaaaaaaacagaggtactatctgcaggggacatgctcgtaatagctaggttgggattattgttgttttggatatatctggaaaaaagagagaggcaattttaggttttgaatcgcatgagcttaactagatgactgattcttaagcatatattttgcagcaagaggatatccggaatttcattgacagttccct

SEQ ID NO: 1519 - DNA, 719 bp, Oryza sativa
  Intron number 4 from transcript LOC_Os08g38400.1 (locus LO C_Os08g38400) derived from phytozome v7.0 (chr-ID Chr8; po s 24310307 to 24311025)
tccccatcggcatcatcaccgccaccaccaatcaggtgactcattcattccagactaactccgtaataattaggatatgtttagagagcttaaaattctaagaaataagccgtttatgagtatgaaaaaagttatgtttcttagctcctactttctagttcatattctaaattctacaattacaatttttcagaatttggttgctttctactttattttctgaattttaatttaaacaatttatcagaattcggttgccttcagtttattttctagattatataattacaatttatcaaaatttaaagaaaaaggctacttattcgggaatacgctagatgcgtattttttgttaagaggaataaaacatatttttacagcccaaaactaagaacagcaggggacgggaatactagataggaagagctaaagcctattctcacaacagaagaagcgacctaaaaaacgacctagctctagagacgtagcgccggcactgcggcgttattttttcaattctacaattacaattttttagtatggccaaaaaagaaagggattatttgaaagagactttgattctaggagaagaagtagctaccaaaagctccctcagagatgttcttaaactcatgaatagtgaattcgtgatcaatttatggttctttttggtttcttggacagcaacctgggctgaacgtgatcaccgagctgatcat

SEQ ID NO: 1520 - DNA, 3875 bp, Oryza sativa
  Intron number 4 from transcript LOC_Os11g09474.1 (locus LO C_Os11g09474) derived from phytozome v7.0 (chr-ID Chr11; p os 5078686 to 5082560 reverse strand)
agtgtaagttttctatacccgatcttcaggcatcctgtttttctactgttctcttttatatatctgaaaactaagcagagaaactcctaaactgtagaatatatatatatatatatatatatatatatatatatatatatatatatatatatatatataggagttggattttttgcacgcgagttcacatgtacccacaatctacaccctatatgtagcttgcacgaatcttagggcaagtatattaggtgctaacaaaatgtaacatgcatgatatttacgttatactatattttttacaagtgtaaaataccttgtttatgtaatttttgtatttcttgtatgcaaaacttgtttatgtagtttaccttgtttatataaattatcttgtttatgtagttattgatggtaggatatatatcattttgaaaatatcatttttgcaagatgacaattttatgatatagtagatatattgttttctcattttgactagatatcatgttataaacaaaataagggttagagaaatacaatgcactagatatataaatgtcatatatgattattattgaaaaaattatttggtaaaaaatgcaacatacatgttatacatattgtgaaccaacctaatcctaatcatcttttctccctatagtaagcattcatttggttaaggttaggtacattttgcaacacgaatcttggaacacatcaacagtgtagattataggtacatgtgaacccgagtgcaaatctgcattttcctatatatatatatatatatatatatatatatatatatatatatatatatatatatatatatatatatataagttgggcacattcatgttaggtgcgtaatgaaaagttggaaatcctcacagttggtgagagaacttatacttatacattttaatattttattctctacttgagtaattgcaaatgttatttttaaccaaggtataatatatgttaaagtaaaactgtaacacatactcaactccattatattttgacttttttgagaatattatattttgatttgaaattcagaaattctagagtaactatgaggctacagctatcaatgctactgccacgactgttggaacataaactaagttagacttttcagttgcgtgagtatcttacctattagtagttgtatttttagtatcgactattattactgtggagagcaggcacatgagccaaccgtcatatccttagatgatgaagcaaagaaagaggtctataccttatcttaccacctctgccagccatgcgccttctcttgggcatcactgccattatgacaatgtgcctctgcttccccaattttttttccaatgtcatgctggttattaatattgtgtagaaagatatgaagttatctacgcttgcttttatctaaatgggcttctatctatctcttccttttcattttgacaaagttccgacaatctagatctcattgacacaagataagttgccaaccttttttgatttgaatctccaatatgaatttacgcacaatttattttccactgtatcattactgccactgagagtgtagaccttcgggaatgggggcatggggcttaagagccaagcacttgcaaaattagcctgaacaaaacctcttttgattctttgttgattaaacagtgctcctgccctttcccttcaaaagaatcattcaatatccaactttacctggggttctattcatataacaaacaaccaatcgaatgaatcagaagaatctcatatttgatgaagggaaaaaggtacagaatatactggatgcatttaatcggcagacttaccctcagatgcacaataagtatttgcgttgaattacatacaacatatcacaatctgacaatcacattttacattcagttgatctgagtccctcatctgcgaggctgcatgtcatataactgtgcacaccattttattgttgccaactgacattattgtaaatgtttatgattttttacttctgcagcattcaatatatagttttttttttgaatttgctgccagcctgatctatttcgtaaaaacatgtgaagatctgattctctagtgaatatatgggtccccttttctatcttgccaccacacttcgattattaaacttgcgtacatgttacagacttaccagtttcttgaatttttatcgtaatcacattcctctttttttcccccgaggaaatgacacctctgaatgcattgcggctttttcatctttttccaacaggttttaatttcgtttggacaggattcatcccaaggcagagctaccaagcatccgagctgtccatgtatatccggtctccttaatttgctatggatgtagagcaagtttgcagtcaccaggtgttgctgtctgaaaccaatgggagtgttaaaaatctgttccaaacctgttggtgaggcttggtaatacgactttgtgtagataactagatgtggctggacctagattttattagctctcaagttttgatccagattttgttaacgacttttgcaaagatatcttggcagtatcttgtgccatgactgaagctgtgtttttctcttttttgtttcttatggaagactgaagctgagtaagctattgaatgttcaggcgatttatgaacttggcattgtcttttcattcttgcatccggtctaggacagtttcatgcttagctttttatttacggcttttttcaaaactcgggataccctcaaaactttgtaggtttggaaatttaaccaaatttcactttattttacccaaagacgctagctggaatgagggggtattttggaccgaatttttaatggccgattttctggttatagcccaccggctcgtgagtagtctggcccagtacgccatttaaatcgtcccaaaatacacagcccaccgggagaaccaacaggtaaggcggctataggctatagtcccatcgattcgtcatacgccaattatacttttgggaaaatttttagatatttttagataatatttttttcggggatttttagatacgcacaaacatttttagataatgttttgttctaaataacattcattgacttaaattataattttaaaccatatattataattggcatcaatgataaaggaaatataatcttataaataacaacatgaaactacaattaattttgatcggaacgataattcaatatcatgaaaattatataactagatcctattattcttatttagctataaataattcaatacagagaaaaattataagttctcccgcgctggatctccgagctcgctgccactccctcctcccgccaacgtgacgctcaccaaccgcaacgtctcgttgtcgtcgtcaccggataagcattggcgtcgtcgtcaccccttctctctccatggaggtgacgcgaccgctcatcccacttatccgtcgctctggcggccagcatctgagtagaatattcttccttcgggccactctttatccagtcttcaccgagtaatcaaacaccttaaaaaaaaaataggcgccatcaccatgtgctatccacccaaatcctcccattaaaaaaaaaaaaaatcgccgctctccaccgtcacaaaataaaaaaaataaaaaaaaatcgccgctcaccggtcgcggaaatccccaaaacctctatatccccttcctcttcaccgacttgcttctcggcttcgtcttggatttgcttactcttcgagaagcttctagaacataaaggacctaggcagggagcccaatctaccgtgccaagtcttccactcctgcttcttcccaccagccggcggcaccggcaagagttggccgccggccgcc

SEQ ID NO: 1521 - DNA, 3056 bp, Oryza sativa
  Intron number 1 from transcript LOC_Os12g42550.1 (locus LO C_Os12g42550) derived from phytozome v7.0 (chr-ID Chr12; p os 26393186 to 26396241 reverse strand)
ccggcgccggaggggtggacgaagaaggttcgagacgagataatagctaagctttggtttcaactgctgctttaattcggttgctgttttgcttttgttatgcttcgcttcgattttgcgtcgaattggggcggaattcgagcggctggggggggggggggtgttggtgggaggaattgagggagttggaggtcgaattcgaggtggatctagggttttgaatttaggggtttggtgcttacatcgttccattttttttttcggttctagggtttgtgcgattgggttcacgtgctcagctacggaagattaagctagggtttgtatatctgttagtcacgtgagttcgctgagctcgattggagctgtatctacacgtcgcgagctgggcgagcagtgttggagcttgtctgctatagttggattacgtctcacccacttccgcgagtaggttacttggtttggtggagcgtacgctgttcgggtgattagtgttagaattgagagtttccgagctcgattatgctctagtaggctgattcccaaatttcggctcgtactgccgctctgcattacgaggtggttgtatcgttggtcggaatattccatggcgttggttgagtactggtgtgcaggtctgcccctgttgggaagtgctttgccatttagtttgttgttaggggataagcatatggggtacttcattagcgaactctttaactgtgtagtatttgtagtgaagccgaaatgggaaatgttctgctgctgtgagctgctgcaattgcatttagtgggattagggagtgcaccgagatcgttattcatatttgtactttattttggaatctggcaatatcttaggtttagttttagtattactattagagcttagcactgttaaggaggcactgcttgagcagagtgatctgaaaaatgcaaagcgtgatgtaacagagcagggcactggtgtgtcacatgttggcagtcatttgtttccctgagaatatgttatgtttgtctaaaataaggtgtcggtttggaatgcttctgctcactcatccacttagatattctctttagcccttttctattcctctagggtcgcatcagaaaatcccagcgacaatgaccttcttgagttcaggaacttgttagcttcttacttgatactttgtgtgcttatggtgactcgactccctggattttctactggataaaagaagcatgcataatgtatcaactagactattcagtttagtttggctgtttccctaccatctgtttctattttccttggataataactgtgctgggtgatcgaggttgcttgtgacttgaattcagccagtaacacctaaatttgtcaggtaggcccattacctacttgttttgttagttagttggaactcgacctatttttttgtggtatagttggcattatctattattgcttacatggatggatattggagtttatttttaaagcaatataggtgggattctggttggtgcttttgtcatttactcatctattgctaaatttttgtttgaaaggggaataaaatggtttgctaaatttgtggacatttggcatgcttgccaaattagtggttaccttgtcattggtgcttgtggtgtttctgtttttccacttcaccagaagttctgttttacaaactgtttacatttatgtgattttactagaaattggtgaaatgccccttgaaagtgccatttttgaagttggtacaaccgcacaagcttagcagcgctagtcttttgtgctacaaaagcattggttttcttttattacataactgcaaatgcagaacatgctgccttcgacatgtctgttgccttttgttatgtttcacaaatggagataaatctctttttcctcatggcagagttcttagtctcactctgttctttttcttcataactgtgtttgaagccagtgtcacttcccaatactgaatctgggcttttttttgttaactttgtgttttactgcctaaaaggagcccttttgtgcatactgtgcataaagtagggtattactgataagcaataccattaatagcagtaacttgttgtccctaatattctgcagtcatattcatgttaaagtcaacctggttagtacttattgattctgtaatgtactatatctctttaatatactttgctggagacaattaattgaagtaacttgagaagttgaagcaatattgcctatgaaaccaagtcgaaacaccaaataccagtattagatttagttttgtgcaattcaatcattcatggtgaaagtattagtccatatgattaattctggagatgtaaaccatatggattgcagaatggtttacctttctgaaactgtttattcaattaaattaattcttgaatttggtcactttggcagcagtgtttgccagctggcagttgtttttattatatatagttggatttgtattttttttaggatcattttaaaacaattttcttgagattgtcacattttaccattttattgttagtctataatttctgtttaggcaatagccactagttatccacagctttcactagtttggtagaagatgtcttaatacaagcaagtatcagtaattatgggtgaagtcggatttggtattttgctgttgtgcacaaacaagtctacgggattgttctttattggtagttgtctaagggcaatgctaattctttttgtggcattctttgttaaccatgtaacttcaaaagtagtatcaagcatgcaagcttgctttgtctgacaatattagggggacttgaataggatgcctgcctcgtagaaggttgtcgattcactattaaacattggatagcactaggatctgttttgttcagcaatctgttgctggggacatgttgatgtgtttattttgtttaatgttacaaagaaatgtttgtaggcatatgtattgcattcatcatttgatagcatcaattaacatccttgatttctttctattgtagtttactccccagagaggggggagatttgagattgt

SEQ ID NO: 1522 - DNA, 1264 bp, Oryza sativa
  Intron number 3 from transcript LOC_Os03g20700.2 (locus LO C_Os03g20700) derived from phytozome v7.0 (chr-ID Chr3; po s 11715349 to 11716612)
gctcgggtgtcttcagagatcttttcatcaaccaggtatgaattctgccccagccttacatatgtagaactagcatggtggctataatagcatatgtgttttctcattatattattaaaatatattacaatgacaacataattttaaattttgcaataactttacgaaactactaatgtgtaatattcatattgtattttatatacgtgttagttattaattatttttaatatcaaattttagttacttgtaaattatatatattcctatatggactctagactcgtcttttaatatatttttttcaattctgaatttttattatttctaattgtatttctacgtggactctaaactcatctttcaatattctttattttttaattttaaatttcagttacttctaaactgtattcctatattgactttaaactcttcttcccatgtttttcttaatttcgaattttagttatttgtaaattgtatttttatacggactctaaacactacttttcatttttattatgtttattccgaattttagttagttttaaattcctatatggactctatactctacttctaatattacttatttttaattccgaatttttattatttcctaattgtatttctatattgactctatattctacttctaatattccttatttttaattctgaatttcagttatttcctaattgtatttctacatggactctagtctcctcttctaatattccttatttttttaattccgaatttcagctatttcctaattgtatttctatatggactctagtctcctcttctaatattccttatttttttaattccgaatttcagctatttctaaattgttttctatatggactctagtctcctcttctaatattccttatttttttaattccgaatttcagctatttctaaattgtatttctatatggactctagtctcttgttctaatattccttatttttaattccgaatttcagctatttcctaattgtatttctatatggactctagtctcctcttttaatattccttatttttcaattccgaatttcagctatttctaaattgtatttctatatggactctgttttttttttctccgattaatgtgagaatttctagaccatgagagcgaacgtggaggcttctttttctattcctttaataatataatagattttgtgcatatataaggaaaaatcattgctgaaataatgtacttatggaacacactgatgcag

SEQ ID NO: 1523 - DNA, 1480 bp, Oryza sativa
  Intron number 1 from transcript LOC_Os10g10700.1 (locus LO C_Os10g10700) derived from phytozome v7.0 (chr-ID Chr10; p os 5922510 to 5923989)
ttgtcgtccttcaaccccaaaaccagacacaaccggtccctgaactgtcaaaaccagtgcaaccgaggttccttggcagtttggaaggcgtttttcgctaacgtggcgcatacgtggctggtttgactagatcttcgtcccacgaggcattgacgtggcgctgagatatagtttttaaattatttttttgtgtagctgagatatagttgccacgtaagcgtcacgtcaatgccacgtgggacggtgacctagtcaaaccagtcacataggcgccatgttagctaaaaccgtcttccaaaccgccaaaggacctcggttgcactagttttgacagctcagggatcggctgtatctgtttttgaggttgaaggacgaaaattagatttattggaaaattaagggacctcagatgaacttatttcggaatggaatgtaagaaaaaaaaatctatgatccttacctcaaccatggtcatgaaaaataatatgaaggaagatgattggacattgatttgtagaattcaatgatttatagatggtgttgcagatgacatgtttacatgttgagctttagaattagtgggttataactttacagtaagataggatacacgagtcctaggcctccactcttttttggcacacaaaacatcattgcagcaggcagggaagatcctgattcactctagcatattttgaattttttattcggtggaagcagtgatttattccacaaactagcaatcatctcacctattggcttaggctagttcctttcagattatttatcgaattattaaatcagattattcgctccatgtgtctgtaaatatatttttaaaaaacttaagtttggaaggtgcttgtacgagtagagtgtgtacgttagtattggttagaccaattattttaggttatttatcaaaatatttaatttattcatagaattaagtaactgatctgtttcaaactaagtcgagtagcttaattaactcgcagatcgtacgtgcgtcctccatatataagtccacaaaaatactgtgtcataaatgatatactgaaaaaagaacaaatgtgcacgaataaactttattcaaccgctgacttatttaagcgtagattgttcacattttgtacagagaaattaaagctgtaattattctttgcatatatatatacggagtatgtacaagaaggaaccgccatatatgcatccaaagaacatgttaatacaacactagagataacaataacttaatttagaataaaacaagttgtcatcattttgccttgtcttacaaagttgaccagcggtaatgcacgccctaattaattaaacatgttcatctcaagatggcaacgataaaaacggcgtaccaagaaaacctcaagcttctgtttttctccatttattgccctaattaaccaccaacctcataatcctagccatacaattcgctgctaaacctgtccttgaaacc

SEQ ID NO: 1524 - DNA, 2553 bp, Oryza sativa
  Intron number 3 from transcript LOC_Os12g01380.1 (locus LO C_Os12g01380) derived from phytozome v7.0 (chr-ID Chr12; p os 243160 to 245712)
acaatttctcctcttcacaacaggtgatcataaaacttgcatttctgatttctctatctcttacctcctctctacttcctctctagttcaagcaatggcggttcgttacgaacatcaattagttcctccagggcagggcctaggaaaacttaatttggtaaccttgaaatctttaatgttgtggaccactgtcggtttgcaataggacaccctacctatccctgataaagtggtttgttactcctaattacgttctgtacaagcaagcttcctcttgttccagtctgcagagcacagccactatgtcattgtccaccagaaaatgaggtcagttggacccgtttgttaggtttgcacgtgataaactaggaacaaatttgcctgactttctggggttttagagtctttcaaattccatagttcactagttggtcttggaataattccacactagttcactagtaggtcttggaataatcactcctgtatccgtatatgcatcagaatgacagaaagtatggtgctatgcacaaactagttacttcggaacataccaatgtctgaaatcagaaggcgtggtgctatgaacttactggattaacgcacctcattcctcaccttttatatatattatttccaaatatttaagaacaagtgaaccaattttaagtactttagtttggaaccactagtattatttcttgttttgtgtgattctcaaaggctctttgttcttttctggtttgttgcttgtgaagcacaaggtgccacaccattccatcacactatgcacgcacccatgtgaaaacaaccctccttttgttgttgtaccagatggtccaccaagaaatttgttgggttcttatattgtatatagacacacatatatatagactgggagtgcacccttggtgattcttttagtgagttttcatggtttcttcaaacaaaaatgcttctgtgcttgtgggtgtgggcaagcaatttaaatttcaaatggaacatttgggataggcacagtatagcctacaagattttgcatgctttagtgattctggcccattttgacaagacaattttcagcaaacataaaacgacgtaatgttcgaaatgttgtacctcaaggaaactgttcaccaatctcagagaaactgcaatgatgtggataactaccatacccacatacacaaatctcactattaaaaaatattgatattggctttgcctgaaagaagagtttctactgttaagaataatgatctgcaaaactaaatgcagtgtaaaaataggcttaatatgcttcttaaataagtctttgtttgatactccctctgtttcatattataagttgctttgacttcttttctagtcaaacttttttaagtttaatcaagtttatagaaaaatgtagcaacatctttaatacaaaataaacatattatcaaaatatatttaatgtttcatttaataaaactaatttggtgttgtaaattttgctaaatttttctacaatttggtcaaacttaaagaagtttgactaagaaaaaatcaaaatgacctataatatgaaacggatggagtacatgtattgggtagccatttttggaaagttgaatttgcaatcttttgagttaggttggtagttggtagatggcaaaaaatttgggggagtgttacttccaacaaaactctgatgcttttgctaggagaatttacatagaaagattagtctatgtcgatgtcacctagaccagccagaaaaaagaagctgtggtagtagattctatataaacagtaacatgaaactctcatgtatgctctttgatgtcaaaatctgatgtttgcagtagtaagatcggtataggtggccgttggttcaacactgatgctgtcatcaccttttgccaatttaatatagacgagccctgcagtgagcttcatagtcgcactctgttcagatccattgctaagacattttaaaaccaccttactgttgaagttagtgctactggaagtctggaactgtggaatatactaaaatataggcatcgtgtgaggtggttgtgagccttgtgcgtcatgacctgtgcaaagcaaagtactatgtgtactactagtatactttgtgaagttagtgtcggtgtcaaataatagtaatatttcatcttcatctgacatcttgaccccaatcctttcaaccatgagacaaagcatacatcatttggtgctttaggctttgattttattccacatcatttgtacagatattgatttgcaaatgatttgagcacagttgcttataaatcaagtcgctttcttgacatgttgggacatttacattctgatgcactcatgtaccggttgaaattaaggatagaatttaaatcaatcgtgtgtttgtgtcagcaaaagacctgctactgtttgttgttgtattgaactaatgatatctgctcttgaattaacattatggtacatgcatttctaatttatttacatcgctgaagcattttttcccctcttgtgatgctatcttaaaaacagcccagcaca

SEQ ID NO: 1525 - DNA, 11120 bp, Oryza sativa
  Intron number 2 from transcript LOC_Os09g02690.1 (locus LO C_Os09g02690) derived from phytozome v7.0 (chr-ID Chr9; po s 1198685 to 1209804 reverse strand)
caaaggttttcttttctttcttcctgcgctcatagtttctcagttccatttttatctgcttcggtgtttgttgtgcggagcaagtgtttaagttgcagtagtgagtgacgcaactagtaatgtagcaagaaatttttcattaggtagtctcacttcaaaagttcatatagtaacatcacataccaaaattttcggacaccgtaaatcccatatatagatatgagtacaaatttatatatataaaaaagatacaaatgtagcaaagtgcaaaacaaatagaagtcacaaatcaaactttgttatgctctccgtttagggttattttgtcaatattgttgagcatgttttgcaatacaagtgaacatctcaagaagatagactctttatatctgttcatcaatgaaaatgaatcatgaacgtaatataaattgcacgaagatagtatagtaacattttactaccattaattcgggtttgcacatatggacttatattttcagcagtattaaaatgttaaaatgccagatgcatacgctaatttggagtgattagagtgatcaaataattggccaggaaaaaaaaaccagaaagctattaaaccccagtaccccacctagttttccatggacagacaagtcaattgtacttcctccatttcatattataagactttatatcattgcccatattcatatatatgttaatgactttagacatatatatgtatctagattcattaacatctatatgaatacgaacaatggtagaaagtcttataatataaaacggagggagtagctcacaatcgtgaagcgagagagacgcgaccggcttccaccgacaaatcagctagatgagccctataggaagccaggaaaaggggcgaacggtggccgaggggttggcggccaacgacaaacgccgtgatggcctgatggttgacgggcgggaagggagacatagccgggttctcaaatggcctcccgggacctccacggctcgaggagaggtggactagtggagagagatgttgacgcaccgaagtgagtgtaggatcgagatgtcgactagagggggggggggggggtgaataggcgatttaaagaataaataacacctaatcaaatctaacctaagttgctaggcttggtgagggtgaactctaactaagcaactaagttatgttttgcaaacctagggtgatagtggctcaattatatctctaggaaagtaaattgcacaaatgtaaatgcgacaatcaaatgagacaatgagacaagagatttttcaccgaggttcggaaactcgccggtttcttactccccgttgaggcaagcccaactccaccgctcaaccacgaagccaccgcacgcccccttcgtcaaggggtgggcaaggcgggagccggcccacggagaggactacccaagcctcgatcactcggggtagttcttccttcactccgaaggtggtgaactccaaaccactcacaaaccggcactgggcctcctccacaatcttctcggagaggtcaccgggcaactcctccacaagccgtctaggaggcggcaacctccaagagtaacaagcaatgacccggtgtggagatgatcaagtgccacactagctctacaatggaagcaaatgcacttgactcttggctaaacaaccctctaacacactagatggatgaacataaagctcaagtgagtgtgagagaggtgcaaggagtgtatgcaattgaattgggtgccaagagagcccccttgctgctggtgggggagtatttatactcccacccaccaaaactagccgttgggggcgaaatcccccaactctgtgctctgccggtctgaccggaggtatgtggccggtcagaccgtgctactcaactagccgttgtagccctgtcagagggccccattggcctggccagtcagaccggcatggggtggccggtcagaccggcctcggctcggtcagaccgccatcggctcggtctgaccgaatacggctccgtcggctctgtatcggccatcctgagcagcaccatctcggcctccagggggccggtctgaccgcgcaaatgccaccggtcagaccggccttatgctccggtcagaccgccttcttgcggccggtcagaccggccagggcacgccggtcagaccgccactatgtggccggtctgaccgcccctggtcaggccgaacccagtgaatttgcaagtgaatgtgtgcgtgatgaaaaaaagagcacaaatgaaaatgcaatgacctaatgtggcaattataatcatctctttgctaggtcattacccttcttaatagtacggcgaaactaaaaataaactagcaaatttgatcgccctacacctcgatcaattctaaattaaagcgctagttttaccgtcttctttccctttgctttgcgtcgtcaattttaatccatcgataatcatccatgcacacatatgacgtggacctaacttaaaatgtatagctcaaagacaacggttagtccacaattagcacttatcattaattaccaaaattaacaccgggggcctagatgcttcagtgaggcaacacgatgaatgtgtacaccacggtgccacagcaaagggaaccacgaggctcaggcgctcagccctagttaggaatgacaacagctctgcacctgtcggtttcatcaccccattcccaccctgaggtaaagggaatcatccgttcccatctccatccccacgttgttgtaggttttcccgtccgtccctgcagcgggtatgggtcacccatgggtctttacacccgacaacactatcaaaatataaagtgcaagccaggaacaatccccaacccaggtgacaattagcctattattaatgtattgagtatgcaattagcagtgaaatcatcattaaatcggctgattgaacacaaaattgacccaaaagaataggcacaagcaaacagagtgtaacttcagtgcttgaaaacaagtcaaccttccgtgctgttagcctgctacagagcagcaagatgtttccttcaaagagaaagccaagaagttaacgtagataactaactctggtagcatacaaatcaactactagctgactgctggttggtgatgagtccgcagtagtggagctagaccttgggcgtgcggcctggttgccttgtctcctagagacatgcggcgtggcttggatcccttcacacgaaggcgtcggccatcggtatcgactgtcgatctggtgtcggcctggaggtcctgtaggctggaggcgacgaggcagcgcatggatctggatggagggaagcggcggaggagaggactctatcaacaatgtgagtgtgggatctagggttttgggggcgtatatggtggtgttctttttttctaaagatgaagatgacgtttttttacgcaaaacgatgtgatattaatgtatgattgattgagttttaatcattacaaacttgaaaagtagattaatatgatattttggagcaacttttatatagaaaatttttacacgaaacacaccatttagcagtttgaaaagcgtgccatgaaaatcttaatcttcatctagctcttgttggagaaagaacgggacctatatctgaagtagatcataacagttgggtttttaatatctatatgggtgtgagttaggccaatctagattgtaggccttgacgcgtccaagtaaagtgtcactattttggcaaactagaccattgggcctaggactgctgcatggccatattgtactaggtaacctactacagacaagtcaactacaagccaacatcgaggcatgcatatgcatgctcctaatgatatagtcatgtatcctcgcactagaaggatagaatgagatatggtggcacatgcctggttcatttgaatgatcaacgtgcaagtatccctcagcagggaaggggatccttttttttttgcggggaaggggggatccatttgatcatgcttggttcctcaacaatggaacaacaagccacacgatgggtgtcgtgatgccttctccaagcttggtagcttttgtaggactgccaagtttggggacgtctctagggtctgcattgatggtcttggcatgatgctcttcttctataagttcggcgatcactagcaatgtcaagagtctaatatatttcttgactattcaacaactgggagaactcactgaggcttgttcggtgctctgggttcccaactcctgtcccacgttctccgcgtgcacgtttttcaaactattaaacggtgtttttttttgcaaaaagtttctatacaaaagtttcttaaaaatcaaattaattcatttttgaaaaaaatagctaatacataattaatcacacgctaatggattgctccgtcttccgtgagaggatacaggttactaaccccaagttacgaacacaccctgagtctagatgaaaagctatggttgagaacgatgtcacgtaggttcaggatcctaagtggcacagcgtggctgtatgttctcaacatcacgcttgtatagctggtgtgccatggaaagaccttgatttcacctatcctgaatttattcgcaatagatcaatataggtctagaacttctagtctcggtccgaaagttctcgtcaaattactgaaagttctagttagcaagaatatagcccacgaaggggaaatcacaataagcatgatttgcacaaggtagatacaacaatatgctatgtaaattgataggtaaacattgcacaagctatcacaatgcaacctcacgaagagaatagtaacccaaacacaataacggtagagagagagaaccaattctttttaccaaagttcggatccaacgatcctgtctccatcgagaggctcctacaagctgagttgcattcaaccctaaaacccaccaattaaattggttcttactcagtttaccccttttacttatggaggtggagtagaacctccaaaaacttcccaggctgtccacaatcaccagatgcttgcgagtgacatctagttgactaggaggataacctcgaagagtaagaaatgcgctaaggaacaagctcggtgctgatcatgcccccatgataaatccctacttttaacttgcactcaatcccaaaaatctgtctaatccctgcccacttgatacactagaagctttagatccaagaataagagagatgggaaatgtctaggaggctatgataatccgagcaatatacagactgcttactaaaaagtataatgcgcatagctataagctaactacatctttaaaaattgcatagtaaatgactttaataaaaagcctttatgcaacgaataaaggaattttgtaaggtattgggttcacacagtgcgtatatcgccaagacaaatatgctaagttcctataagacacacaacaccaccacacttgaaaatatattgcatatgtggtgtaaaatctgagtaaaataacactcataaatggattcaccaaccgcctaaaaatgaccaatatatattcaacctaaaccatgatattggttgtatcaaaaaatgcacgcatgtgacgaaaagcaatgatataatataaaatcaattgcttcatgaaacccaaacaatgtctctaacttataaaaagttaacagagtagctatatatataaagatttagtgcttgccactgtttaaattgtactctgtaccaacccctaacaagttgtataacaactgctgtatcaacccctaacaagttgtgtaacagctgaataaaaggattttaaggtaataagtcacttgaactcgcacatattgccaaaaacaaatatgcttaagtccatagggacatgcgatagaccacacctagaatatgggttgcatacatattgggattagccccgaaatatgcccatcaatgcccttgctatatgacatgtatagcatacctattaataagctcttgagtgatagattttctgggtaatgtagatgaagtgcatctcaccagagcgcccaaagtagatgcgataatcaaatccggactggagcaagtactcaaccgatggccctcgtagggaataatgattggtccaatctttgagcgtaggaagtaggcacatggccatgaattcatgtcacatatatccaaaacaagtccaaattgaaggtatgatccttgtgcttgagctggtaaacccctaaaatccttgtgcttgtgattgaaggtatgaagtaggcttgtccttctgttgtagttgaaatagtccattggcggcagctgatgtagttgtcatggaggcgagatcaccaacgtgaagatgatatcgcccatcagaagtgacggagatgttggtggtggagacgaagttgcccatcaatgatgatgatgaaatccaccaaccgtggagacggagaaaccagtcagcgatggtatacgcaaccaacagtaatgacgactggtggcaacagagatggttagctgtgaagacgaagttgcccatcaacagcagcagaataggctaggtcaaagtggcatagcaggatgttgatgaagatgacaatgttagtgatctagtcagattttaacgttgatgaagtccagcttcctgaagtaaagaacctgatggatagtagttgaccgaagatgaagataatgccgatgacgaaggtgtcgatggtgacgtcaatgataataatccatcaaaatgtcgagaatatatccatgctcgagcagttttcttgacgttgatgtgtgcgtgacgaagattgatgcaacacctcttgattatgaagatgacattagaacttggtattgtagctattggagatgcttcacttggaggaaagtagatgttgatgctgctgtccaacttgccgaatctaagtagattggttgataactccaaactccataggcccaaacttgttaagctcaaagtcatatacgagttgtactccagagggcagagttgaatctaaccaggacatgtaaattaaatcttgaacttgatatttgtgaaactcggagtaaaccgtggaagtagctgagatccaatgttgccgatgagaatgtcagagttgttgaagtagaacgcttgctctagaatgaagatgaagataatgactcccaaagttgactcgttggctggttaattgattacttcatcttgacataacgtttgtcgagatttagacgtgtttgtgcagcccccgactctatacttagttgggaacaactgaacatagagtcaagaaactatagcttcttattgtcgagtaaccatcacttgagtaaagatatgcgttgaggatgttcgagtagaaatcttgaggattggagcaccacttgtagtagattagcacgacgtcatatttggtggcgcatgctgagtgaagtagcaaagctggtgaagtagaggcgatcggaattgctggtgatgaagatgatcggctgcaacagaagcaacaatatgtgaagatgaagttgtctaataatgatggcgaaggcgctcacccgtggaagtgagagcaccagtcggtggcggcgtaaacaagctggtggtgaaaacatggtcacccatcaatgacagcataataggccagcggtaaaggcaaaggcactagccggctgcggtgaagacaaagatgcccatcagcagtggcataatctcacaaccgtgggggcgaaggcaccagtcgacggtgatgaaggcaagctggcggtgaagacgaagacgaccatcagcggtggcataatcgcacagccgtggaggtgaaggcaaaggcaagccggtggtgaaggcgaatacacccattagcggcggcataataggccagccgtgaaggtgaggacatcagtcggcggcggcgaaggcgactgacggtggtgttctgactgatgcattcctgaagcataagagataagcttatagacatgaatccctactatgcatatctggatttggatcctatagtataaacatgtaggatgagtagtctttgatgttaatataatactcgaggaaaattcaagcattttgcaatatttataaatatgtatttctcctcgtatcaattttagtttccttgagtagttgacttcctatgtttaaacactatgcccaactagtcatagcccccaagcaccgggagtcggctcaaggcaattcccaaacatgcataggagtaacatgaattcgtcattcatggaacagagctttatagatcaaaatatgtgctaattgggtacttcaacaattatcaatagcagaaaataaatgattttatctctatgcttttgatttattcgagtaatactactaacgaaagatctgcgctcgtcgatggtgctggaactgtgttggcgcgaactaagtcgacaaacacaacgacctgggagatctgcttaactccagtgcatgaccaaaacttgatgagatgtgggtgtgctagtcagtttgatcctacaactgacaagatatataaattgaagatcaccaaagagctgatcagctgacaagccggtggactagttccagccgatgcccataccagctgatgtcgatagggttttgagctatcggctatatgtttgatgtagaatctgacacttgatgtaaataatgatataaagataatcggctgatgataatgtaatgtaacaataatataatccaatcggctactaatggtaaagtgttgattcgaaggttaaaacatgcatcagctggaggtccgatgtcattaaatccaaacgactagataaatagtaaaacctttgttgtgatcggctaaatcctacttgtatgtaatccttgtaagccgatgcaacgtccagattactcatcggctgaaaccccaatgaaacccttattggcaatcaaaaagcaggcaagagattatggttctaaacacgactagggcagttgcagcgcaaagtatgaaaagaaacaaaaatatctaggcaatcaagcctttgactgattttctgggtggtggcaggggcggatacaggcatggggcagctagggcttgagccccatgcctggcttcatgatccccattataattttgaaaaataccatgtaatttctaaaaatatttgaactctcattagttcagccctacgcgtgtagattttctggctccgccactgggtggtggataccttagttaatctaatctagcaagataatttagtcgatacctgcataaaccctaaaacgaatctcagccgatatgagcaaattaagatgctaaactagatttaactaagatatatgataactagcggttgtagaagatagattagaacgtctaaaacgacgccctaatctgccaatgcaaaccgctgagacaagtcatacctcttgtcagaagatctaagctgataccctaaatcgaagtaagaattcgtcgaaaaagtagaaatgtaaaaggtggcgatgcaccgaagttgtattgatcgagagatagtttacaataaccctgggtgtacatatttatacctataggtagatactagtccttcttggacaagaaagaatcttttctaaagataaaaggaaaacataaagtccttatcggacactaaacacactttcctaaagataaaaggacactaacaaactattcctaattaatagttaaactgccataccgcatcctccttgaactcggtcacttctggataagctttcttcagtagattaatttccttaaccgaatctactaagaatccgactattggcgacttgataattcctataagccgattcaaatactctgaagccgatactgactctaggccgatgatgactttggggcttaccaaatttcactgttaacacatgccccccaattttggagtatgagaactcatgcttcaaaattatcttctttctgattttgatgactccaaaattgatcgtcttctgtatatcacaatcaactttcatgagctgatactgtttgcatcaaatgagctaggctgttgaactcgtggcaaaagaatttgtccttggtaggtgttgatagcccttggaatgcaagatctgctagctaccccgatcacactcgttgacggaaaactctcgacgcgacccctacctggcgcgccaactatcgaatctgaaaatcggcaataataaaaggggtagtgcatgagacctaaaagtggatggatgcggagacaaggatttagaaagtttcatgctctctcgatgataagtaataccctactcctgtttggggattgtatccgtcgagtgtgtattattctgacgatctaatagtggttatgcccttgaggggctccctgcccaccttatataggtttggggagggtggggggaggttacatagccaaatatggcatcggtttacttaatctactgtacaatattactgaaccaggactttagaccgttcctttatatacaaggaaacataatacccaagtcatgatgtgttacatattccataaacataatctctcccatatatccagtcggttaacccagccgtgtgggtatatggcacccataatctccacataagagatcaagaatcagaaaatgctgaaacatttcacacaacgctaaaacatctgtgcccattattgtctcaattttgtgggtgattgtttgtgagagttgacggcaaagctgacaccattcccccctttttttttttttacctttttgaccgtcagcttcattgccaataatatcaagtgctacttctatagaattccagttcatattgttgtgcttttcttcctataacctggtgtaccttacatttttagttatcaaaattattggtgtatctaacatttttagttaaccggattgtttgtttatctaacatttttggttaataggattgttagtgtatccaacatttttagttaataggacatagatcagtgcacgttagccttcaaacctccttgatgtattctttccttttagacctctcatgttgtttctactctctaatctcatgatattgtaagttatttcctatcataacatgtttagttcagttggttgccaaacaagtcataattttccattgggcttcccttgtttaagcagc

SEQ ID NO: 1526 - DNA, 4019 bp, Oryza sativa
  Intron number 1 from transcript LOC_Os05g19910.1 (locus LO C_Os05g19910) derived from phytozome v7.0 (chr-ID Chr5; po s 11610376 to 11614394 reverse strand)
caggtatacacatgtcattctcttcttgattaacctgaaaacgttgccttcaaacaaattttcaactatatattgctgaaaaaagaaaagtttaagctagtagctaatgattggaaatactcggtttatgtatttacagttttcattcttgcacaaacgtacgcatcatgattttctcgtcatgtgttaattatagtacgtgatactttcactgtgataaataaaacttgatggaaactttttgatggtttatgcatactgtttttctacttgcatgtggtcaaactgttagattatctaccactatactgtgtccaaagtattatctaatattatattcaatgtggatttaataacctataccattcctccctgttagttttagttacggtagtgttttgtgagtctacataattacatcattagttttccatctatagttgtaattaaagatttatgggaaatataaatgaatgtatgaaatacacaaatttaatctagtgatgcattcttatcatgaaaaataaacatgagttatttttctaacaattcatagttgcacttcatagctaaaactacaaagtagcaatgtcgtttaatttctagcaaaagtttgggtgaaactaagatatttaacttgaaattgaaaaaatatacttgacgtggatccttacaaatatgaaataaaatattatgatcttaataagaatatataacaaccaattaatgaattgaaggtatatccagaacagctgaacctactaatgtgtttgttgcacaacacataacagtaagggatagtgcattaattaaccttatactacaacaaaaatgtcttgtagagacatttttctaatactatagagccactttttaaatgtctcttgaatactctataggcatttttaaaaatgccttatagtgaattgtctctgtaaatgaagagacactttacaaaatgtctctatgccttaatagaggcacttttttttatctctgtaagagagtatatgctcatagaggtacttttttatgtctataagatagtataggcattagaagcattaaaatctatcacaaccatagcaaacgaactaaaaaagaaaaaaaaactatcacttcccttgcaattgccaatccttgaactctagatcacttggatatataattttcaacttgaatggtctaaccctaaaccctaaaatggtctaaccatctcaacctcatgtcatatacatatatgccccgtgttacttttatctagttaattaccttagattaagtgcctctgtagagatataaagattgaaatgtctcaagaaaatacctttacatatcaggcaaattttaaagtgaaaaaaagtacctctacaatataaatttaataaattgtgctaaaagtgtctataactaaaagtgttctaggtaatatttaaagtgccttaaaatgtgtcaatccattttagaactcctgattttaaaggcgttttaaaaattgcctctacatgatgtttttgttatagtgttaacttttatacacatgatctttgcctctttggcagttacgttgaatatttcttgggtgatgacgtgacatgcacgttgttagttggcgggagcttgtcagttgtcagagcacactcatctaaactattatccatatatataattacaggctttatgccaaccttgaaacttattgaaatatatggacaccattgcacatctaacaaaaatcaggcaattaaaaagaacatctctccttctgtgcttaattaaataaatgatacagtatattgaatgtataatttaaagctagccaaaagtagaagtgttaactcactacaaattaaaaagattattaagacgtgatatgtgaaaatgcattagtaaatttatcataaaaatgtttaaataattatatgttttaaattattttcagaagatatgaatggaataataataataataataataataataataataataataataataataataataataataataataataataataataataataataataataataataataataataataataataataatcaaagaatattgaaggctgcatatacgttgatgtcgataaacatcatcttaaaaaggacagatgcttatatagaagctcggtttgcgtttttcaacagacatatatatatctacctcaaaaccattctttttcttgacggatagaatacgccaggaaaattttcatttcttgtcagtgctcgtatgcccggccgtcactaacaaccaaatccgtcaggacaaaatgcatttggggtgcatcggttttagataaaggaagaatactaccgcgcagtcaacaacaggatgtacactttgttttttgtgtgaagaactgtgaagatagaacaaaaccatcgctgatctcggtaggtaaactcaataggaatcttcgcggttgtacgtgtgactgacgatatatatttttccggagattcagcgcatgatcgaagtcattgctattgtctaatcatacatctttatcctcaagttcaattaagtaattgtggaggcccccttctaagcattgtagtgcatatgccatggttttctttggcatggagtgccacttgcatctctgagggaaaaaaaactggtcagagtaatctagacgtttgacatagctacaaattttgtcttccataggaggctatcatgaacggtgaaaaggaccacgaattaactagttaaatattttccaccttaattttgcagaatagtcagtagatttttcaaaccaaatgcatgtgaaagtgactttaagtgtcgatcgattttcagacccgagccctaaattatcgtggttgtgcgtgtgttttcagaaggatcaatcctcacgtcgtcaagataacaaaatattcattcttgttttttcgctctgactataaattaaaaaggcaatagagagttgaaagctctatgtatgtcgtcgtgcatacgctgcgtgagggtgtgttttattattggattggcaagattttcattctactttgggtgtaaaattaattcgtatccaataattgttaccccggcccggtcaagaatttgtctgtcttcaatgatttgttgctttaactcggtatatatagtatacgaacttgcattaatcatatctcttaattaacggatgggctgtggcaaactggcatgaccgcatgacattgagcaggagtcaggattgaggtgctttagtcaactagaacatgatttaaattaattgtttcttgagattggatgttttctaatccctccatgtattcatgatagcaacaagacccagggaaaaaaaaggtggttgagctaaaatcatggacctaataaactatgataaatttcaagctaactatccacacacatatatatgacgtattagacaaaatctttggattgagaaaattattccaaagtgcatgtgtacttgtcatgacagtggggtggagaaactaaatacggagtacgagccaacgccgcatgttaattaattaatttccaaccactggaagaccagtcttccacaacacatcgctttaggtagctagtgttctagttgtgactgttctagctagctcccttaatcaaattcgttccacacaacaaatgcatatctatctaatccatgtcgcgtccaacgtgttgagagttgttcaacgtcttcaagcatgcttgttgattatttcctccgtattaaaataaaccaacctacatatctagattgatgtaataggtaattttccatcatatatcatatgttagtttattttgggatggatgtattacttttctgtagcctcatcatcctaatatttaatttgtttgttatactatataaaatttatttccaaattttaccttattatgaacttttacggtaccttacatgactaatgtctgaagtcgagctaattaatgttaacaatatatataccaggtgactgaattcacttgtggaggatttatcttggg

SEQ ID NO: 1527 - DNA, 1063 bp, Oryza sativa
  Intron number 16 from transcript LOC_Os02g32690.2 (locus L OC_Os02g32690) derived from phytozome v7.0 (chr-ID Chr2; p os 19401360 to 19402422 reverse strand)
taacgtcatccactatttcgaggtatcaattaataacttgaacttgttcattgtatattgcttgtacaaaagtatctagctataaataaaatttgtttcgtatcaccattcatattatgtgatgaaaaccaattaaagttgacctagctagctacatctgatttcattattttcatgacctatatgtttttaagaagttacaaactaatcactagttatgatttttgtctgcatttccagtccattattttctatctagcatcatgtgcatgtgctataattaacggatccaaactaatatatattaagtctaaactacaaaattatattccattaaatccttaacatgtgtgcataattatgaggcaagttgaccagaaatgtatgtacatatgcaaagatgcaatactttcctacaaaagttttacaacaatacacatattcctacatatttacagccataaaggtttttaaatgggcgtgggtgaagaacatatcatcaccctcaactctctctacgtatatatataattgggtattgtatatgtagagcgcgttattcgtataaatccattctccagatgttgcatttccaatgtacattgcatatgatgaagcaagcaatgtggatattttgatttccttgataaatatatgtttttttgtattttcaataattaatttatttatgtcacattattcttacaattcccttctccaagcatcactatttccaatgtacattgtacattacatatatattacgtgtcattaaaaatttattctctggatgtcatgatttctaatgtctgtagtagatgatgggacgtgcaatataatcataaacacacttcttttgaaccgtagaataagaatatatcttttttttaacacacaaacatattattaagcaagaacagagtttaggggataaaccccagtacattgccaaaagataagatatgaaagcaaagagccacccttttgaaaagggaggagtacctaaccttttctctttgatttttcagacaattcccggggtacccaagatcaaggataatta

SEQ ID NO: 1528 - DNA, 16821 bp, Oryza sativa
  Intron number 1 from transcript LOC_Os02g19924.1 (locus LO C_Os02g19924) derived from phytozome v7.0 (chr-ID Chr2; po s 11717210 to 11734030)
tacgcgccggccgccggaatcgcggaggcgtgcaggtacattgttttccttatccgtttactcaggtagtgtactttttgctgccgttgcttactgtcatttactcttgggctggattagaaggctcgggacgaaagaagtccaggcccaagttacatacatgggcccaagctaccaagtactatagctagctacgctgcttctggcctttggacctagcaaatatcactctcagtactatcattgtcgtgaggaataagttcaccggaggtccctccacttaacagcgagatttttgaggtcccttaaccacaaaaccagaaatctccacccctaaactatacaaaaccgttcactcaaggtccctaagcagtatatatgggtggtttcgctgacgtggcatcctagtcagcaaataaatttttaaaaagtatgtggagcctacatgtcagctgtacatttttttcttctctttttctttttcttctcttctcttttctctcctctctccttttcttcagcgagggaggcggcggcaggcggagcagtggagggcgagcgcggcagcggagtggaggcgggcgcgagcgcggccgcgggcagagaagtgggcagcggggcgtgtcacgtcgctggacgtgtccatgagccgcctcgccggtgagctctcaccggccgtcgccaacctcacgtagctcgagctactcatcaacctcacctccaacgccttctccgggagcatcgccgatggcctcggctggctccggcggatgtggtatctcagtgtcacgcccagaaatttaacccaaattttcagactatttttcgtattaaatccctgtccaggaccagccagggtacacaaaacgacaagtaatatacagttctaaatgtaaataaagcgtaaaatacttacggaagaggcacttagtcctcacaccgaaacagaacgacagcagcggaaaaaggcgatcctagcggggcttcagctccactccacaggcaaaactcaactggggtctgagacttggtcctctaactccatcttcagctcagaaacacaacacttctgaaaagggagaataaaagcaagactgagtataaccaccgtactcagcaagccacactaacgatgcagatgtgcaaggggatacaaggatggtttgtggctatttgcataaaggcggttgtaaaacattttattgagcaaaacagtaaaactgttgagtaattaaagtaacattaaatctccactgatcaacgctacaccacgttgaacaggcccaaccaacccacctgaactacagtgtattgggtcgatttattaagatgggactaatcacggtgaatctggtcgaccgcccataaccgcgggcacggctattcgaataactttactctgatcagaggtgtacaactgtacccacatgacacagccccacgacacgtttccgtgcgccgacatgccaccacgacataccggaaagaggccgtgacaggacccttcgcataacccactctagccaagcacaccacacctcaggtttcacccccatccccatcgggcaacgggcagtcccctctcgtgcctaggtgaatccggaagcgacagaggccgtcgcagggcccgccccgctccatcacgcccacccttgcctggatgcgtcgactagaggaaagctacactacaagcccagccgttgcccagccgtccttaactgccatgggtgcgaccagcaaaaccatgcacccacagcccaccattcagtcgcattttagttggataattacgaccatgaagcatggccagatgtctcgagcacgcagctcattctgatactaaaaggtctaatacggtaattatcccatcaactgagctagtggtaattaagcatggctaagcatatagttctagctaggtcacataagtaacatgagctagtcgatttattacccaatgttgacaaaggacatatatcaagtaaatatggcacaagcgagcagataggtaaaaccctgaccccatgtaattagcaaaatatgcatatttatttgcaaacagtaaaacatttataaattggaatcaacatgctcaaggggaatgtgtgacttgccttgcttcttcaaacaatcttccgaactcttatccttgcgaccgtgatcttccgaaatgacggattctacacgcaggcacgcaaaacgaggaaaaactctaataaaaaccaaggaaacagtacataaaaagtaaacaaacatgtagagctcaattttagatgaattttgcaagttgaatggctcaattcggagtttgaatgaattagatatgaattttagaagttttgagccatttaaatgaatttctagaattattaacgaattattgtgcaattgttaattattttatcaaaggaaaaggctcctgctggcgtcatcaaagggcagcggcgccgacaagcgggccccacatgacagcgggcaagggagtggtccaccgtgaactgggaccacggggtggtccactgccggtccacgggaaccgacggcccagatcagcccgagctgatcgggcggccacggggtggcgcggctgagcacgggcacagcttaggccggcccggccgagcaacggctcacggcggcgcggcctcctgcggcgacggccgacgcacgcgggaaagcggcggcgcggcgcggcaaggggatccgggcggcctaggcgagcggggcggcgacaagccggccggccgacctaacggcggcgacgcacggcccggtggtcgccggcggcggccaccggcgcggcagcacgcacgggagacagaggagggaggcaaggagggagaggaggagctcaccaaggacgcgacgacgaggggcggggaaaagcgggggagctcggcgtcggcgctcctcgggacgaaggcggaacggcggcccggcggcgtagggtggaggtggcttgggatgcactgtggaagggtggttgcggcgattaaatagggaaacggagcggaggccggggtgcggcgaggcacggagaagccggcggcgcaaacggcgcggcgcggcagtggctagggcggcggctagaggtggccggagcacgccggggaccgatggagagagggagcacggtggagaggtggttcgcgtggtggaaggggaggaagaaacggcggctgagcgtgcccttgaggtggcaaagccagcgctggcggcggagcagtgcggcggcgaccctagcgacgggaaacggcggccggagttcgccggagtgtggcggcgcgcgggagcggcgtggggagagcgagggagagagtgccgggcccgggaaacaaggggaaatggacgaggggagcacgggggtgctttttgtgggctcaggaaggcgggatcgaggccggacgtggcggaatcggccggcgaagtggggcgccgacgtggagtggtggaggggttaaccggcgccgattttcgcggggagagtggggggaaaggtggaggaggtggaggggatcgatttcacgcgctcgtggggcggggtggagcgcgggagccgcggcgtcgtggggtgaaaccggcggccatggcggcagttggggcgacgggaggttggggaagaagatgacaggtggggcctcgggtcccacctgttggggagagagagatgggaaaacgggtgagggaggtaaagcagacttcagggagagagagccgagcgggccgagggaggaggccggcccgagagggagagaaaaggggcgcgcgggccgcgggagagaaggaagagttgggccgaaaatggcccaaagagaggaagggggattttaattgtttttctttttatttagttggttaaaatgaacttggtgcttttaaaattatttcttgagctccgaaaactcacggaaaattctagagagtacattagggcacaaagaatattacagaatattcccggccaatgatttttaaaggaaattttaattccctccataattccacttgattaaattggtttaacttttatttaatttctagaaaatgcattattaaatgattttttaaacccgaacgaaaatcgaggcgttacactcagcctatgcgacaacgcgttcgccggcgagatacctgacgcgctccacaattgcaccgccctcgacgtcgcgtacctcaaaaacaacaacctcgatcgtcggcggcattccacggtggcttgacgcgttgccgaatctcacggtgctccagctcagccacaactcgctctccggccacttcccgccatcgctggcgaacctcacgaagatcgtgcagctcgagttcgaccagaaccttctgggaagttccatccccgacggcttgtcacacctcccggcgctccgcatgttagccttgtcgcagaacagcctcaccggagagatcccgccgagtttcttcaacatgacgtcgttgcaaggtctcgcactcgcgaacaacgtgttctgtggggagctcccagccgatcgacgtgggcgcacgtggaccagcacattcctcccaagttctaaacgcagttcaaaccatacaagtgtaaaacttcatcaccgaattcgcatttctatctactccacgattcgaacgtcaactagcgatagcactttagtctgtaccacgagttctgttgaaattataagcacataataatttaatttattctataaataaatcatgacattgcagatgtaaactagattgaacgcatcattagatctacacatgtaaattaagcagtaaaacatgaacagatcaaatatgcgcaatatgttgaacacgtaccgaggtgacggaaagaccggttgctcggcaggaactactcgcggttgcgagcgtcgacgaaggcgcgaagcatgcgagcgaagaggaaggcgagccgtcgcgaacgaacagggagcagtcgcgcgaagcgcttcccaaaaaccttattgccgccttctcccggtgcaggacgtcgaaggcagaggttccggagactgcaagagtgtaatcccattctcacctctaattagcttaatgtttaagataacatcagctactcccaaatccttcatatcaaaattttgagacaagaatgatttaacctcatttatcacctcaaggtttgttccaaatatcagtatgtcgtcaacatacaagcacaaaataactccctcacccccaccatggcgatagtacacacatttatctgcctcattgactgcaaagcctgcagatgtcaatgttttgtcaaatttctcatgccattgcttaggagcttgtttcagaccatacaaagacttcaacaatttgcacactttgccttcttgaccttcaactacaaacccatcagattgatccatatagatctcctcatccagctctccattaagaaaagctgtcttaacgtccatttgatgaacgagaagtccatttgatgaacgagaagaccatgtgaggctgctagggaaagtagcacacgaattgtggtcaatctagcaacaggtgagtaagtgtcaaagaaatcttcgccttctttttgagtatagcccttagcaacaagccgagccttatacttttcaatagtaccgtcaagcctaagcttcttcttgaacacccacttgcaccccacaggtttacacctatagggtcgctctgtcacctcccaagtcccgttagcgataatggaatccatttcactatggacagcctccttcgagtagtctgcatcaggagatgcatatgcttctgaaattgacttaggagtgtcatccacgaggtacacagtgaaatcatcaccaaatgacttagccgtcctttgtctcttactccttcgaggagcttcactgacatcctcctcagagacatgttcatgtgtatgttcagtttgttctggtggtgtgattgaactgggaattatttcagagggttgcctcgaaccactatgtgtatccttcattgggaaaaagctctcaaagaaggtagcatcacgagactccataattgtaccaacatgcatgtccggtacctcggatttaactattaaaaatctataggcaatgctatgatgagcatatcccagaaagacacagtccacaatcttaggtccaagtttgcacttcttcgttattagtacattgactttcgccaagcacccccatgtacgcaaataagaaagtgatggttttctcccaatccatatctcatatggtgttttgtccttatttctgttaggaactctgtttaacacatgatttgaggtcaacaatgcctccctccaccatgccttaggtagtcccgcggtgtccaacatggcattcaccaagtcagtcagtgtgcggttcttcttttcagcaatcccattagactcgggagaatagggaggcgtcctctcatgtatgatgccatgttcctcacaaaataagtcaaactcattcgagaaaaactctccaccacgatcagacctaagcctttttatctttctgtcaagttgattttcaacttctgccttataaattttaaaatagtctagagcctcgtctttcgttttcaacaagtacacatagcaaaatctagtagcatcatcaatcaacgtcatgaaatatcgtttttcacccttcgtcaacaccccattcatttcacaaagatctgaatgtaggagttctattggtgccaagtttctctcctcggcagccttgtgaggcttgcgaggttgcttcgattgcacacacctatggcacttagaacctttgacaatggaaaacttaggaattaaacacatgctggaaagccgagacatcaagccaaaattaatatgacataaacgtgagtgccaaacattagcctcatcatccacactgccacaaatatggttcacagacttattgcagaaatcagaaagggaaaagcggaacaggcctccacactcataacctttaccattaaaatatccatgtttagacacgactactttattagactcaaaaaccaacttaaatttgtctctagttagacgggagccactaacaagattcctgtcgatagaagggacatgctgcacgttcttcagctgcacgatctttcccgaagtaaacttcagatctaccgtgccaacaccatgaacagaagcatgtgacccattccccattaggacggtggaaccccgtgcgacctaataagaagaaaacaatgagatgtcagcacaaacatgtacattggccccagtatcaacccaccaattagtagactgattaactgaaaaaacagtaggtaaattaccatacccgctcccatctccagtgttgccaatggtcacattagcagacttagaagtctgccctgcaggtgccttcatccccttgcactgtggacacttcctagccagatgaccaggttgcccacacacaaagcaagtcctctcatcctggttaggattgttgttcttcttctgcttcttgaagttggtggtctgttgagctttgtatttccccttgctcttgttctgggccttatgcacaacattggcactagactgcccaccatcgcccttagacgcggcgtctttttcccgagctttctcctcaacatcaagagacgctatcaacccctcaacggagtattcctatctcttgtgtttgagtgcagtaccgaaacttctccatgatggaggtagtttcgcaataatgcacccagccacaaatttgtcgggtaagacacacttaaggagttcaagttccttagccatggtttgtatctcatgagcctgttcaactacagaacggttgtcagccatcttgtagtcatgaaactgctccatgatatacagatcattgctagcatcagtagcaccgaatttagtattcagtgcatcccacaactccttagcgtcggtcatatgcatatacacctcgaccagacgatcgtcaagaacgctaagaatgcatcccacaaagagtggcttcctcgaattgcttctgctgatcagcagtaagaattccttcaggtttgccaatactcacccagaagcatttcatagccgtcagccacagagtgaccctgatctaccatctcttaaagtgcacaccggtgaatttatccggcctcagtgcatcggcaaaaccagccatagtaaaatcacagcgcctataataaggtttttggattgttgaaattataagcacataatgatttaatttattccataaataaatcatgacattgcagatgtaaactagattgaacgcatcattagatctacacatgtaaactaagcagtaaaacctgaacagatcaaatatgcgcaacatgttgaacacataccgaggtggcggaaagaccggttgctcggcaggaactactcgcagttgcgagcgtctacgaaggcgcgaagcacgcgagcgaagaggaagacgagccgtcgcgaacgaacagggagcagtcgcgcgaagcgcttcccaaaaaccttattgctaccttctcccggtgcaggacatcgaaggcagaggttccggagacctgctctcccgattgccggtgcacgccggcgagcgggatggagtagtctacgagcgacggcgcagtacagagtaggaggcaaaccctagattgatttcgcgtgtgttgcgtgaaggcagcggctcggtttatatagagatagatcgcctgatcagggcgtccgcgtaaaccgaaccggataagtcacgcgtaacctatccggattccatgccgttttcacacaccggattttttggaatgtttccaaaacaaaacaaatccgaatcccgcagcaaaacaaaactgcaaaaggaggctgcatctgcacaagggtgaggagccaattttgcggaccattcgacgcgtacgtcgtgcacgtgcgccgcctgccctgccaggccaggccagcgagcgcgcgcgtgtgtttcccctcttctctccaccacacatgctttaagtggctaggagggcatcctcccttttaaggaggtccccctctcctagaataagcaaggtggtactaaactccacatgcatgccatcccatgaggtgggcttttgtgattttccaaagaattaatcttcgaatgagccttagcccatctattaattccaacaagttcacgactcgacacctccaggctctatccctaacccgagtaacaaccaaaggaacccaccaaaccaagacatctcgagcgattcccacacggatctgcgagggctagcgaatctatcgacactacataaatcagagtaagtccaaagaagcactttgcggcggaggtgctccttggggatgccggagaccatgcttatctcgcctggcttgatcttgacgagggcgtcggacgttgccgcggagagcatccgcgcgggcgtgggagacgatgagaggagcccccgccccagggaggggaggcttcacaggagcggggcgtccatctcgtcggagccgtacgccgaccgatgatggcggcgcctgggagttcttggacaacctgaccaactgcaacaccttggctgagatattcctcaacggcaacatgttcgccgacgtgatgttgagctccgtcgtggttccatccgccattggccgattggcgacctcacgcagctactcaagctcgacctgagtggcaactcgcagctcgctccgcgccgctcgccgcctaccgcgcccgctccgggcccgcctcctctcctcttctcctgcttctttcccacgccccgccacgcccgcaccgccgccggtcgccgcacccgcatctgcccgcctctccaaagaagagaagagaaaagagaatatgcagctgacatgtgggcccaagtacttttaaaaaaaaattgctgactaggatgccacgttagtaaaaccgggcaaaaatactgccgagggacctccgatgaacggttttgtatagtttaggggtgaagatttctggttttgtggttaaggggccttaaaaaatctcgctgttaaattaagggacctccagtgaacttattccttgtcgttatatccggtttgcaccggttttaaaagttagaatagtcgttatatctggttttttggagttggagtccagccaaacagtttcatctccacccaaaataaaagtatagttggttgaagtgctcttgcaaaataaattaaagaagtggagttgtgtttaggttgcttcataactccactttattctcagctcttgagttaaatccaggaattggagccttactaaacaccatctaagatataaaccagatcaaaaatatacagatcaaaaatatatttaaggaagttaaaagttgactattttcacaaaaatggtacatagcaaccaagcaagaaccagtagcaaagtatcgtatcaccttattaatttgttggcaaattttgctacagtacatcgtgactttgtggttttagctataggacaacgcgcgaagtgacttttgggggagcactctcaaaagttggatatttaccggtggacactgcacctattaaaataataatttcccgttaaagagtagagggaaatcgcgtgaaagttctgaaatgctcttgggcccgcatgtcagatttgtaatctctctatatcatctctttctcaagcacacgaggcctcgttttccccttcttcttcctcttctcatgcgcgtgtgcttgagaaagagatagaggcacatgagaaagagatagagatagagagattacagatctgacatatgggcccaagggcatttcagagttttcacgtgatttctctcttctcttaaactaaaaattattattttaatgggtgcggtgtctaccagcgaatatctaacttttaagagtatcttccccaaagtcactccgcgtggtgccctatagctaaaaccataaagtcacgatgacctatagcataatttatctaatttgttagtacactactacacgattgattttcctggacgcccccccttttttttccatgcggtctgtaagtggaaccacacggaaaaatagggaaccggcgctggggtgtcgtccgcatgggaaaaatcgattttcccgtgcggacgtcctatcccaaccgcacgggatattcctccctcctttccctctcacccacttcaattttttcctatctctctcctcctttttcccttttattctccctcaaccactcccacctaaccggctctctaccttatctcttctcaaccggctcccacctctctctctctaccttatctcttctcaacctcttctcaacccctcaaccggtcggcttcccaccctcctccccggccagattcccctcctcctccccctcccctgggcgaggcgggggccgggcgcgacggcggcggctgggcgaggcagccgggccaaggtggcggctaggcgaggcggtggcctgggcgcggcggcatcctgggcgagacggctgccgagcgtaacagcggcggccaggccgaggcggcggcggccgggcgcggcggcggcctggggctcctcaacgctcccaccccgctcgtcgccaactacgttctccaccaagccgcggccaccaccaccatcagacgctccaccggctcggtggcgtctttcctgtcggtggcgtctttcctgtccggcatggccacgctcggtgccaagctagtcacggtggtcgaggaggaaggcgaagcggaggaggacgacggcaactcggccggcaacgccggggtggccgggcgcggcggggagcggcgaggcggtggcgctcgagcgatttttcctttttttatttttggtttttttggagcgaggcggtggcgctcgagcgatttttccttttgttttttatttttggtttttttggtccgtgcgggcagtataacacaaccgtatgggataatcgattatcccgtgcggtcgacccacccgcacgcgaaaatattaattttcgcagacagccggctacagggtgccggataaccgcacagagaaatcaaaatgcctgtatggaaaaatcttttctgtactagtggtacgaactaaaactgtttagaagtcgaactcgaaaattttacgcgtaacgaatacgaaagcaagaccgttgtattggagtcgtgtttcagtaaaatttgcttggataatgagcattacatttccccttccctatcactgaagcacttagttcaaatggttggtttgccatgctcttgctcggttgccacttaacaattcttatccctgcaaatacttggtttaaattgttggtttgccatgctcttgttaattaacacatagccatgcttctatcaaattgttggtttgttgtgccctttttaatctacggttttatttggaataggttaagattctaagatgtagttggttggtagcaatacagtttctgatttctagtttattttttatataactatagattcttagagattgggtaagaatctaggttgtttggagaaccagatattctaagagaaattgcatatcactgcttctattatcagatttgataagttaccactggaacttgctaaaacggaaggttccagtgcttagttcgtactaccactcaatgttgattaacattgagtgaaacgaatctccgaaaatcactgtaacaaaaatataataaattataccttccatcacaggaagaattaaatcctcgctatgaacctgaacaaatacttatccagtttcataaccaggatttgaatttattttatttgttttatggagggagtaggtgataaaaatgtgtggagaaaaataacgcactaatagttaggttggttaatgacagttcgttctaaaaggtgttataagatagcaacttaggccaatcccaatagtagtttcatacaggagttctattctcaataaatagcatactccttccgtttcaggttacaatacgttttgactttggtcaaagttaaactattttaaatttgactaagtttgcagacaaatatagtaatattaataatactaaattagtttcgtcaaatcaataattaaatatattttcataataaatttgtcttgagttgaaaatgttattactttttcctataaacttgatcaaagtttaagcagtttgactttgatcaaagttaaaacgtcttataacttgaaacggagggagtaccatattagcagatttggtgacatgacaatataattataaagagagataaaaagtttaatctcatccaatcccatgtattgctattaaatgttatgatgaacctacgaaattgcaaaatgaaattctatgttagagatcttatttcattcatcaattcaaatctcattagatgacatgacactcttggtaaccgtgaaatgaaactctccacttcccttaaaatgacattattgtaatgcaggtcgatacgttcgtatcgtcttaattttcttgtttcttttctctatgcacgtgtttagacgtagaggctaaatgtaattttagaatacattacctttaaaaaatacacattgcttgtgttaatggcacgttggcacacatgacacgtcaatctgaagcatcatggtcataccagcactcggagcattgcccatgtaaattttgtgctgaagaatatgctctaacaccataagttaatcatagaatcagttaattgacaagtagtgtattattaaattgatcaaggacatgatcgcccccaacaagattgatcatctcgagatccttaaaaaattccagcaatatgggtcaaatttgatccctacttacaaaaactacaaagaattgaaacagattgtgacacgcgctgtacgcacaccaccctcttctggtcttctcccctgctctgctccaccaccatggagagcggcggcgccggcggcgaaggcgagacggcggggtggcggttcggcgcggcgaacccggcgctggcggtggcggggtcgcagagcatccgcgcggccgtgacacggatttaccgctgcctcgacgggagcggcgacgcgcggcccgtggcgccactcgcccacggcgacccctccgcgttcgcgtgcttccgcgccgcgcccgccgccacggacgccgtcgccgccgctgccgcctccggcaagtacaactactactcccccgccgtaggaatcgccccggcgtgcaggtacgtcgtcgcgtgcaaaagtggatgacagatcatacgtttttcttggatgaaatatcgtgtgaaaaatgtgaatacgcgtggtgaattttggccaaatattcaaatttatatatataaattagcacacactttagcatagggtacattgtacatatatttttacagaatttcaaggccgaactcaattaatcacatgaaaaaaaaagagaaatagctaaattttatgacagaggagtagacactagctagctacataattaatgtttgatttaatttattatagaaaaaatcgcatatcatataattttatatacgataatatttcttcaatgaaatcaatcttttctatggttttcatcagaagataatattttagactaaagaagtcactactcaatcagcctgattttaggagtgtattttattctctaaataaaaacattccaacaactcaaactacctctctatacctatctttctatctcctcttgaatcattccaactggaacatgaagtgctaattatcctccatgtgcaaataagtactttctctatttcacattgtaagccattttagttttaaatacaatcatccatggatctatttatgtgcttcagatatatttctaagggcctgttcactttgatgccattttcaaccttaccaaattttgatgaagttgtcaaaaaaaatagctacatttagtttgctgccaaattttggtaactatataagaaattcttaccaaaattttgtcaactataccaaaattttggcattaatttggtaaggttttttttggcatcaaagtaaacaggccctaaattcatatgaatgttagtttagacaaaaaaaaaagagaggctaaaacgtcttataatatgaaataaatagagtatcttcaattaaggcctagttcaaatgtgaggttcaacttagctttatgacgacgcacaaaacaagataaacttttgatgcatgattaattgagtattaactattacaaacttaaaaatatgtttatttgatttttctaaaaagaaacatcaatataaaaagttttcgaaaaacgtatagaataaaagaaagcaccaaacaatgaagttgtataagcgaaatgtagggaatataaaagcaccctaagacaagaacaaagctctgacacaaatcgttttcttatagagcgctataagaaaactgaatgctgaagtggatgagagaggagaggagagagatgagaagcgggctgtaattttacagccagcttaggcaaaggaaccaataaaatatgtgggaaagataggtgggccatatatttatagtgaaaagttaatcactatatgagtaagctgagagataaactataaatatctatatagtaagtagttggctatattattatttttaaaacagtgatgtacaggcacctgcgttcggcagccggtaatagagagaagatttctcttgtttaccgcgtgcacacttcccgaactactaaacggtgtgttttttataaaaattttctctaggaaagttgctttaaataaacacattaatctatttttgaaatctaaaataattaatactcaattaatcatacagtatctttctaatattctctaccccttctcaaactgtctacactgttcggcgctgcttgttcccatcctctattttttttccacgcgcatgcttcttaaattattaaatggtgtaattttttaaaaaaaattctataggaaagtcgcttttaaaaagcatactaacccattttttaatatttttttagctaatacttaatttatcgtgcacaaatccattgcgctgttttctgtgcgggaggtgagggtttccaacgctcacccaagaacacagctgcagagtagtaacatagccctgtggacaacctagaaaatgctcaactacaaatagtactatcaaatcaatatgcggacaaaaaataacataaataagactcttcaattatttcccattgaccagccactggcaataaaagatatagggcgtggtgactagtgatcgatcagtcggtaattaactaatgagattccaatcaatcagtccagaaatagtagtatttcagtgtcaagactccagagatgctagcttctgatttgatttccgatctgagcgatgatgcgatgccgacttcatgccaccccactaattttcagataaccatgtgcggattgaggggattttgagattttctttttagactggcatcgtaacaaaggcatctgaaattcatgatttttaagaatttttccaggtcaccttccaatttcagaagtaatagaatatatttcggtaggaattagcactttgtctacatactataaggtgattttcaaacgcataaatctcatactaatagaatatatttcatgaattagtaccgacggttatgggctcaattttgtggctgccttgaaaaggagaaatatccgttacctgcatctcatattataagggcaaatatttgtttgttttttgagtttcggttcaagaaattctttcgtgacaggaagagatgaaattggtttgaactctaaagagaagtcgatatcgtcctcatggctagctttgattgaatatgtgcagcgcggtggcggcgcacctgtcgcgggagctcccct

SEQ ID NO: 1529 - DNA, 427 bp, Oryza sativa
  Intron number 5 from transcript LOC_Os12g38800.2 (locus LO C_Os12g38800) derived from phytozome v7.0 (chr-ID Chr12; p os 23809798 to 23810224)
aggtactacatacgaatgataagctccttcattgtgccctgaaagggtcaaatcagagttaaccatttactctcgcacttcagtccactgttttattagtctgtgatgtcacaaggttcattctgtagttttttatcagtttgtataaactagactatgttttagtttgttctgtaggatttgttatttgtaccggtttctatgaactcaacaatttttttagttcacttcaaaagcatggcacaacctattccagcttcaaacagttgaatcagcaatttttctgtcctttgtagttctggattttatatgaatgcttagtcgaaggaataaattgcatataattcaataaggaacgccatgtttgttgacatgataacccttttctgccaattttcttttttgcaggtgtctgatacggacccct

SEQ ID NO: 1530 - DNA, 826 bp, Oryza sativa
  Intron number 12 from transcript LOC_Os03g05200.1 (locus L OC_Os03g05200) derived from phytozome v7.0 (chr-ID Chr3; p os 2518223 to 2519048 reverse strand)
taagaccattccagtggcagagtttattgcttcctgtaagttctatcatactctttcctgtaagtttcaggtttctgttcaattatgtactttttaatatcatatcggtaatttcagttttgtttgagtggccccatgggggcctgggctttgatctgactgattctacctttttttggtggctcagttttgctccttttttttctcatgtttatcataccttatcattatgatgtaatcatgcaggatccgtcttctttgtaactgaataactttctataaattagtgaaaatatcatattgcctttgatgctaaaatatacgtggctattgtccttctgttttagatttcaacttttgattttggagaatatgaattggtagttgaagtagacaactagtatcaagagggtatggcctttgtagagtttgtgttttaataaaacttgggcttttcaaacccagtttaaatgcactcgcatggactcattgtgctcctaaatgctgtgtgcaacttagtaataactaaataaattgtgaaagatgcaacttttaatgtagtgtataaatagtctgtacataagagcggtattttaactgttggactgtcttttctctatttgcatttgtcatccgaccgtaggcatttgctttctctgaaacagatgtattgatgtctagattctatacatgctttgaacattggactaataccctaaaagagtgatagatttgtagctcattcatatatctcatgttcctattctgctctgaagtcaaacaactgcttttcaggttctaccaagaaaattggtggattttcttg

SEQ ID NO: 1531 - DNA, 711 bp, Oryza sativa
  Intron number 1 from transcript LOC_Os05g24010.1 (locus LO C_Os05g24010) derived from phytozome v7.0 (chr-ID Chr5; po s 13776910 to 13777620)
aagaatcgcttccgctgacaccaatccgcaaggtaaagcttgtttttcctggttcttgcagttcttgcatgcagattagtttgatgagggtttttgcttgtattcgatgtcccattccgacgattcaccgtgaaaaataaaggttcaattccggaggtcaagttgtttttagggggaatttttagcgtcttataagcatatttggattgggaattcagttttagtagcttttggtgttcagaaatcttgggttgtattccctcaaaagaaaaaaaaaatcttgggttgtgatctactgttcaatttgtctggattctttggattgggtttggtggagatggccccaagaaaagatggtagaggggagaattgccttcctcttcttttttccaaagtttcttagtttcatatttttacaaaaacaaaaataaaaataaaggagtggccattgactcccttgcaatatgatattgttggatatacgcatagacatgatgcatcccaatttttgcagccccagaatcaatgctgattgattttcttttaccaaatagattttgtggagctttaattcagcaagtaataataactcacatttcactatgactctaatctagttctaattttagcatccgtggcttggcctaaaagttggttgacaagttgctatctccctctttcgcactcgcagcggctgcgctaagatctttg

SEQ ID NO: 1532 - DNA, 1867 bp, Oryza sativa
  Intron number 1 from transcript LOC_Os01g19610.1 (locus LO C_Os01g19610) derived from phytozome v7.0 (chr-ID Chr1; po s 11109401 to 11111267 reverse strand)
gcatcctcaagagcaacctcggcagccacaaggcggtacgtacgtacacaaattattaagagctagcccagggttcttcacgaacttggaaagaaaaaaaaattaaacgaaaaaaatttgaaatttcaacaggaatttgaactttttttgtaaagaaaacaaattcaagctttctctttcttccaaaaggcacatcctaggatttaagttgaaaagggaggatatgttgccatagtttggtagtaagcccggtaaccatagtaaaccgtgtggttgccacggtgaatagtgagataaatagatatgatttatcaaaaattcaaacttttacttaattgtttttaaaactttaaaacaataggtccagttgatggtaagaaaaacactgatcctaataagatccacaagtaaacacaaaattttggaaatttaagaaccaaattaaccctaaaaattctcaattcttatagaagttttcaaaaactatttaggccatatgtttcatattttaaaatgttttaagtttatcctaagtcaaaattctttaggtttgatcagttttaaaaaatagcaatatctataatattaaattagttttgttaagttcattattaaatatatctttgtagcatatttattttgtatgaaaatgttaaattttttatacttagtcaaatctaaaagaaggacatatataaacctaaaacaccttgtaatatggaatagagggagcgcatgctatttgagaagctctaagtgtgtatatggggggcatgacaccatggattaatcatgcatgggctaataactataccattggtctgaaaataagtcatcattttgggctcaaagtttgcaccaaaataactgatcactttaatttagaacttgggaaggaaaacaacccacataatccttgtcgctattttaatgcagccaacaacgaatggaatagtaccagtccacatgggtggagctagaacgaaataaaagaggtgtcatccacatgctttactctatttcaatcgagtttacttgatatgggtacctgaatttagattgaggagtacacatatagtaaaaatagatgagctatagctaaaatcttttcttaaacggattcctgggcaactcccccctcccccctcttctacgttggcccgcccctgccagtccacgtgagaataaagaaaataaaaaccggatgatacctgttcatgtgagaataaaaaataatataaaccaaacgaaatcaatctaccttgcactggtttccctgcatgcacaattattgaaccttttgggtatccatgtttgaaatagctaattagcgatcagtcgcacgcgtatcctcccatgcactcggtttctggacccacaaaatattctattctccgtatatatacatatatgaagtttagatgtacatgtataaatgtacacatatataaagttttatgtggatgtataaaaaatattttatatgtccaaagtgtatacatatacagacataaaatttatacatatataggtatatatatgaagtatgtacatgaaagacatagggggagctgaccgcgtgcccacacccgtgccgcgcgcggtcaatcgtgtatcagtgccccacgcatctttccatatcataaaaagctctaataaatattacttatttaattttgagaaagagaggtatcattttggttgattactgatttgtcacttattttgagaaatatcattttgcttaataagtattaatttgtcacttatttaattttgagaaagagggagagtaactcaaacttatgaaaatggctgcttgctgttgccaggtggtgacctacttcaacaagctgtgcaaggggaa

SEQ ID NO: 1533 - DNA, 2284 bp, Oryza sativa
  Intron number 1 from transcript LOC_Os05g39530.2 (locus LO C_Os05g39530) derived from phytozome v7.0 (chr-ID Chr5; po s 23136308 to 23138591 reverse strand)
ctccgactccgattggcgattggacaacactgaaggtcagtgactctgtgacgtaactcaataattttgcctcactgcttattgtcatggctaattagttagctcatagcttaggttgccaatttgtgatttgtgaatggctgaatgggaataaatcgctgctgttattgtaggattggaattagcttattgggtgaaacataaagaggattggggattggtattgacctattgtaatatttgctcattttgaacttgcttgttaaattagtcggctattgatgttataagatactattgttatttatgtgtcgccttttattcaaatttgtacttgtatatgagatttgccgtgtttaaaaaatttggtaagtgatttgaactattgaagtcggactagccaagaaaaattcctagctacaccaatagcccacttcaagatagcaattagtcttggcctggggttcggcaaaatcctgggaccagggcggagggctcagtagggcgaggtgtggcgctcgccgtacctcgtgccgcctgctgaccacccccccttcccccttcctcgtactcctccgcacagagcaacaaccgggtcagagagaatggcgacgcagcatcgtgagaagacgagcgacggccgagacgtgctgtggacgcgtccgcgtgtgccagtgctggtcctcacactgatagctagtaggtccattaggcttgtttagtgtaaatgcggcctgtcttgttttgtctcttgaatcatctcctccaccctcccccaatccatcaatccccttccccaatccccatcagtggacggcggctgctgcggtgctcgccacgcgctggagggctgggtgaggtgtggagggcgtggctgccaggcttccggcctccagggcgcaaagctgcggctgcggcatcctctccaaccaggcggcagcgcgaccagccgccagggaccaggggggcctgcgagcagggtgggacgaagggcacaacatctgtgcaggcgtgcagcaccaagcagtgacagcaagcaagccaactagccaagtatccatcactccatcaacagattctacatatgtgaacattaatcaatctttggtactagttgttttgtagattccacatatatatctatctattcttagtactgtagttcctatatgtgatgtgttgttgaaaacatgaatcttgagaagatgagatattttctgagaacctattcttctatctacacttgtttgcaaatggatgatgaatcatgaacttgtgagtagttcttgtttgccatgcttaatgtagacttattgagatgatattgtgtcgtataatgacgtgcattgagatttttcgttctgtgctaacttccgtggtaattcataggccacacctaaatttttttccttcctccggcactggtggtaatatttgctcattttgaacttgcttgttaaattagttggctatgatgttataagatactattgttatatctgtgacgccttttattcaaatttgtacttgtatatgggatttgcagtgtttagaaattttgattagtgatgtgaacttttgaagtcgaactagccaacgaaaaattcctagctactccaatagcccacttcaagatagcaattagtgttggcccagggctcggcaaaatcctgggtccgccagtgagcctcctagctcttcctcagggaggtctgcaccgagggctgcctcggcttggaggtctcttcttgccaagctgctgcaagctggcaaggtaagttcctttgcagaatcaatgtgccaccggagggagggggaatgaggggcttggggctggccagtcacagggcatagggaggtctgcggcctgctggccagggggagaggatctcaccggcatccagccctgctggagagagggacgagagaacttctggagtgggatgatggaaagagaggaagaaggtcataggggcaatttaatcaaccaatttagcttcgtagtggcatgtttcaaaataattccactttggagtggcatatttctaagtccaaactttcaagtggcatgtatcttaagtgcaaaccttgcattctatgcatcaatttatttcctatcatcgtctagagtctgctgcttgttacttatttttgttggtttgcagaattatcaaacttgtggtatggaaggcgattcctttcttatatgttcatttgccttgtgaactgagattcctctcattcgtgttgaactgttgattaaccacagatctttcttataggc

SEQ ID NO: 1534 - DNA, 9123 bp, Oryza sativa
  Intron number 12 from transcript LOC_Os06g28820.1 (locus L OC_Os06g28820) derived from phytozome v7.0 (chr-ID Chr6; p os 16400054 to 16409176 reverse strand)
caactagaaacaggcgagtttccacaacaagtgagtatttaatagttttctattttcttaaagcaaaaacatattcggtacatggttttctagctatttcctttagcaagaacatagatagtacatattgtaggatcgaatcacaagaactaagccaaccagaggggggggtgaatggttagtatatccaaaaaccaaaacttttagcggaaataaaagttacccttaaattcgacggatcgcggtctgaccgaagtagctgcgccggtttgaccgcctgatgaatatcggtctgaccgagattaaactccggtcgaaccgccaagattgcctgctatcgtctgtcaccgccgccggtctgaccgccgtgtgcccgccggtctgaccgccgccttaatagaagtcctgatccccgtaggaaaccttctcgtacaagaaacaaactttacataaccaattctaccaaatttagactccttccaaattcgactccacatcccatacgcacacaattcctccatcgtataccataaggaaacttcaccatccacgtgcattgaactctagccttagtatcccacatgatctctaaccaccacggacgtcgtcttatccccaagtcggactcccggtccatcaccacaaatactctcccggcatctcgagtcacctacacatggaacaaacaaagaaaccatattctgagaccaagctatccccaacttgactcattagtagcaaacaacagtattacatacgcatagtatccatctagaagtcatattcatgaaacaatcatggatatccaaacaaacgacctgaaaccgaaaccgacacagcgtcagccggtcataccgcgagctggccggtttgaccgctcgatcaccgtcggtctgaccggcatacacaacccggtctgaccagacccaaatccagcagtatcctgtagatcacatgtgaaatccaatcatctctaaaaccacttcgcaaataaattccaaatatcaaaaccaataatctccaatgccaattgttcatcacagaataataatctaaaatacctttgattttacaatctcccccttgatgaacacattggcaaacccatcaaaatgttttggtgtttggaaaaataaaaacaaaagtggtaaaaagcacatttcgtataaatgtacacatcgtgctcgaaaatccaaatgaaaacctcattcacttttgaaaagaaagaaattcccaattgaaccaaaagcatgctcttctcaaaagctcatgtgcttcccctaaaatttcaccttttctttcaaaactcattgcttctcccccttttgacaatgatttcatcaagcataggaattatgttcattaatatttaagagctgagcatacatatagcatatcatgtcatgtgttgcaataaaaagaagatgaacccatctataatataacaagcatgtattgaagtataatcatgaatcaaagattttacaattaagcttgagtcatcaaaattcatgatttcatacgatttataatgcaacatattaacaagcacataggttgaaaagtaaacactatacatatacacatagtgcatttatcactccttctcaaattaggtttagcacaaaacaaccaagataattttttaaacttttctttttcttgagcctttttgctcatttttttcttgattattccgggtacatccctgtcgtcaagactgtttctattgattcgacacccattattttgctcacatcgaatacgtctttgtcgtcaagactgtttccaaggattcggtattcattttttttcatatttttttattctttttgcaaaatgagcaattacaagctatttgaggaatatcaattcaataaagcatatatatatagaacatttataaatcaaaccatatgctagcatcaatattgcatatttgcttaattcaagtaaagaatttaagtgtcatgcatcatctcccttaaaaaaacaaaatctaagcctcataaaaatactagaatacgtacaagctatgctagagacaaataaaccttcatagtattgctagcatgcacaagaaaataccatatgtataaacaaagctctcttttctcaatttttctcattgtcatatttttacttgataaaaccataaggtacaaactccccctcaaatcatgccaaaaggatgaattattcccaattcaccacgaagaaaagcaaaacgattagaatccaaaggtttagtgaaaatatcagcaagttgcaactttgtatccaaaaactgcaattcaatatctcccttctcaacttgatccctcaaaaagtgaaagcgaatatcaatgtgctttgtgcgtgagtgttgaacatgatttttagcaatgttaatagcactagaattatcacaaaagagaggtactttctcaagaataagaccataatctttcaaagtagaaataagccaaagaatctgtgaacaacaactagcaacagcaacatattcagattcagcagttgattgagcaacactagattgtttcctagaagaccatgcaatcaatgatgtaccaagaatcatgctccactagtattttccctatcagttctacaaccagcaaaattagcatcggaatatccactcaagcatatagaagatgaagtagaataccaaattctaaactcaagtatatgattcaaatacctcattatgcgcttgaccgcttgacgatgtgaagcccgaggagaagcttgaaagcatgcacacaaacacacagcaaattgtatgtctggcctagaagcagttagatacaacaaagatccaatcatacttctatactccttttgatcaacagcttgaccatcttcatcaggatccaacacaactgtagaaccaattggtgttgaaattggcttgcaattctccatcttgaaccgtcttaaaagatccttcgtgtacttcgtttgatgcagaaatgtaccttgaggtgtttgcttaatttgcaataccaaaaagtacgataactcacccatcatgctcatctcaaattccctgtgcatagtctcagtaaactccacaaataaagcgtgagttgaacaaccaaagatgatatcatccacataaatctgaacgaacagttgattatcaccatgcttaagaacaaaaagcgttttgtcaacctttcccattgtaaaacctttctcaagtaaaaagttcttaagcctatcataccatgttctaggtgcttgtttcaaaccacacaaagctttagacaatttaaaatcatggttgggaaaatcaggattttcaaaacctggtggttgtttcacataaatttcctcatgtataaaaccatttagaaaagcacttttcacatcaatttgatacaatttaaaaccttttgaagcagcaaaagccaacaaaagtctaattgcctcaattctagcaataggagcaaaagtttcaccgaaatccaaaccctccacctgagtaaaaccttgagcaacaagcctagctttatttctcacaatcaaaccatcctcattttgtttatttttgaaaacccacttggttccaataatattatgcctagaaggtggtttaactaaagtccaaactttgtttctctcaaaattttcaagttcttcatgcatggcattaatccacgattcatcagttaatgcatgtgacacatctttggcttcaaaagaagcaacaaatgcagaatttgcacaaacatcatgagacgttaccttagacctagtagtccgctcacctagagtaccaatgatttgttctggcggatgttatcgttgaatgtgcaaaggagcagcaacttctgaagttgattcacgtgttgtatcagtactggtcaaagttgtaatctccggaggaccatctcgatcagcatcaacagtaccggaacccgacgaccctggccggtctgaccgcacgtcctgcgccggtctgaccgaaggtgtgccggtggtctgactggcttggcactcggtctgaccggctgaaccgacctcgtcgtcgttgccgctctcgtcttcaaaaatatgaccatcttccccctgaacctgtgacaatgtacctacaatatcgggtctagtacctggactagcctcatcaaaagaaacttcgcaagtctcaacgattttgttagtctccaaaataagtacacggtagccacgagagtgtgcggggtaaccaagaaacattccatcggtagagcatgcctcaaacttaaccaaatttcctgatttcaagacaaagcatttgtaatcaaaaacacgcaaatgtgaaactttgggttgacgtccaaatcgaagctcataaaaagtttttccaagttttgacctcaagaaaacccgatttgaaatatagcatgtggtgttaaccgcctcagcccaaaattttttagtagtgtgatactcatccaacatcgttctagccatctcaactaaaacacgatttttctttcaacaacactgttttgttgtggaacacgaggagaagaaaattaatgttcaagacctctttcgttgcaaaattgttcaaatgaagcatttttaaattcaccagcattatcacttcgaattcttttcaaagaacaaggaaatttaatatccaatcgaagaaacaaactacgaaaatgttgaaacgcctcatccttagttgtcataaagaaaacccaagaatatcgagaaaaatcatcaacgataactaacacatactactttcctccaacagattgcactctagctggaccaacagtgtccatatgtaatagctgtcccggtgcatctgtcatcacagaaacaatagaagcatgtgaagaagcaaccatcttagcatgacgacacggtgtacaaaccaaatcaagatctttcttaagtttaggcaaaccacgaacaagatccaaaccacttaacctagtgagatgatcaaaaccaacatgtccaagtctacgatgccaaaacatcacatctttatcaaacttagcaaccaaacatgttatcacaggtgaaacaggattatcaaaattagctttaaacacacttccatagcgagaaatatttaacatagaatcaccacaagaatcaaaaactttacttccatttttcttaaagtgaacctcgaaattttcatcaacaatttgtgaaactgaaagcaaattttactttaagtcctcaaccaaagctacattcttcaattcaaatttctcatttaccttaaccaaacctgtagcgagaacggcactagtagaagcatcaccaaagataattgattcagtcttggatgcccgtttgagggaggagaaccaatttttatcaccggtcatgtgccgcgaacaaccggaatccacgatccacacgttctccttcctcgccatcaaagcctacacacaagcagaagtcgaagcctcagtactagggttagatgataataaaaatttaggaatccagtactgagacacacgaccagaaaatccaataggcatatatccacgtgcaaaaacagtttgagaatttttagaaaaatctctctgaggccggtctgaccggtcgccggtctgaccgggggacccactacggtctgaccggtttcctcgagggaaaccagatttttgccacttcgattttggaaaatcaatctctctcctttttctgtttatgagctaacctgaaacaaaaaccaacaatatgtccatctttgccaaaaaagaacaagtatactattctttagaagaagatggttttgaaagatttgtttttgtttctttcagtgttgcagaaagagaaggccaaattccaacagatttaaaaattgttttcttagcattaggttttgtcaaaatttcaccacattcagttatactcaaaacatttggttgatttttggtgaaataatcatgaacactaaaacctacacccgtattgtaactagtcactttagactgatcaaaaatcatgttaagttgtttcttacctttagaatatatttgcaaagaacttttcaaataagaaacctttttttccaaattagcacaattttcacaatctaccatgacacctttgcttttacgacatttggggcaagaaagcacttcattggttttcacaacatcttccatatactcaacacgacctaaagcatcttttagtttcatcttgtttaatgtgcaagttgagcaatccaaaacatcatgaggttgttttaactttttagcacaaatcatgttaaacatcaaactagcatgaaaagcaatttgatatttttgcaacaactttttagtcaaaaacaactcatccaatgtgcaaagcaaatccaagagctagagaagatttatttttcaaatcatgtgtagcattgacatctctaattttagaaatttcattcattaaaacgtcacaacttttgcaatcatcatcattaggaataagagattttaatctagcaatttcagaattaagagattcaatgataaactcatgatttctatacatcttctcacacttcttaattttctcacttaaaataagaatagcttcctcaaaagtacgtacctcattgtcttcacactctgaatccgattcaccatgcgccatgaagcaaacaccggagatgttctttcccttatcttcatctccactctcaccatctacatcgcttagtggttcaaacgcggcgtagactttatcaaacaccttcttgagattctccttgttcttcctccctttgaatctacccttgggcttgttgtcattggtcttctcatcgtcattatcttccctcctacttctcccaagcttaggacaacacgaatgaaagggatccgtagacccacactcaaagcaacgatttggtccacctcttttcctgtacctaacattagtcacagctcgataaagtctgttagttaacaaaaccaagtcctcctcctcgaactgttcgagttgatcatcggacatggcattaaataaagcaaatacggaagacttcaatgaagaagaatcagcatgcaatgaagtggaggaagaaaccaaaacactcgacttagaatcaactttacgagaaagaatattcatctcatgtgttttcagttttgtgtaaagcgaatctaaagtcaaagtagacatgtcaacagactcctgaatagatgtaactttcatctcccaaatagacatgtaagaccattcaaaaagtggcgagaaacctcagattgtgtataattaacatcatatgaagaatcaacagatctaagatcactcaaaattttattaaatctaccaagataatcatccaaagcttctcctggtttcatctcaaattttatgtacttttttgaaaagatctcagcgaagttcttttatattagtagttccttgatgaaagtttttcgaagcattccaaatctcattggcagttttaagatgtgaaacacgatcaaaagccgaacgagaaattccactcaaaagaatattacgagctttgcaattgttattaaactcagttttcaaagcaataatgtcaatctgttcagaaatcacatatggctgtgcaaccttttgccaaacaccataatctttagctataatgtaagattgcatcttatcacaccaataagcaaaatcagaactatcgaaaacatgaggcttagttgaaaacttattagctatggcaaaaactctagatcggttaaaatccaaagaagaaaacaaggctctgataccacttgtaggatcgaatcacaagaactaagccaaccaggggggtgaatggttggtatacccaaaaaccaaaacttttagcgaaaataaaagttaccctcaaattcgatggatcgcggtctaaccgaagtagctgcgccggttcgcctaatgaacatcggtctgaccgagattaaactccggtcgaaccgccgagattgcctgctgtcgactgtcgccgctgcaggtctgaccgttgtgtgcctgccggtctgaccgcctccttgccgccggtcggaccgccgatgagtcgccggttagaccgtcgcacccgagaaaacacaaatcaaagaactcttaaagtggatgacgactttattgattctctctatgtttacaaagtgcaccaacagcactccttacaaaaatctcgagtaaactcgaaaccctaactaaactatcaactcaatgctcttaaaagcgataccgagaagcctcacgctccctctctatttatacccgaggtaggcagcctaaagccacgaaccaatctcatacagaagtcctaatccccataggaaaccttctcgtacaagaaacaaactttacataaacaatacctctatcgtatgccatatggaaacttcaccatccacgtgcattgaactctagccttagtatctcgcatgatctctgaccaccacggacatcgttttatccctaagccgactcccggcccatcaccgcaaatactctcccggcatctcgagtcacctacacatggaacaaacaaagaaaccatattccgagaccaacctatccccaacttgactcattagtagtaaacaacagtattacatacgcatagtatctatctagaagtcatattcatgaaacaatcacggatatcaaaacaaacaactcgaaaccgaaaccgaaaccgacacagcgtcggccggtcagatcgtgggctggccggtctgaccgctcgatcacgccggtctgactggcatacacagcccggtctgaccggacctaaatccagcagtatcctgtagaccacctatgaaatccaatcatctccaaaaccacttcgcaaatatatttcaaatatcaaaaccaataatctccaatgccaattgttcatcacagaataataataaaaaacatctttgattttacacatatataataaattgaagtactgactacatagtatatggttttttatttttattgtggttttggtatccaccagaatgaattaggaataattagttcatcaagttataatggttgaggcctactgtttctagcatgttctcttttcctcagcagccatgaatactcttgccatcaattcttacgtacaataatagaccgggtttctactttgattacaggaac

SEQ ID NO: 1535 - DNA, 13561 bp, Oryza sativa
  Intron number 7 from transcript LOC_Os11g08569.1 (locus LO C_Os11g08569) derived from phytozome v7.0 (chr-ID Chr11; p os 4528332 to 4541892)
gcactcgatacatctgtttcggtggtgtacccaaggtaaactgactatgattgtttgttattttttacataatagaggtgctgtcttcttgcttagaactttcttgatgctaattgacgcagctacttttttagtgaccttgccaaaaaaaaatacatgagtgggtagtaacactccatttattttaggaacaagaagtccatctttagtcttttataatatgacagtgcatatacacatagcgtccctatccattttcatggggcataaacaagaaagtactccatccgttccaaataactattttattttgtcttttctaaattaattaatagtaatttggaagggagggagtactatggttgatgactatatatatatgacttatgtggactgcacgtagcgcgggtggcaggagccagtggctcgctcggtgctaaccagcgttcaagtctcaagacttgacactcgtccctcgcccgtggggaattttcccctctttccccgggactgtctttggaaggtcccgggtaggtaataagatatacacacgcgtacacgttcagtgggactgcacgttttcaacgtgcactgagacctagtgcctacaatctctttcctagcgtgtgttagggacgtgcacgcttgtgtgtgcgtgtgtcgtggtgtgagtgtggtgtgtgtaaagtgtgtgtcctaagttgtacccttcttaaaaaaagatatatatggcttataggaacaatctaatctcacggaagattgttttgcggtctgagttggaaagtgttctactattagcaacgaccactagaatatgttcggtcatctgtaacgggtctaaagcctcatctctatcggatagcgcctccgtcactaagcaaaggtcactgatgtgagaaaatatctcaattaggcatccggccatcacggatgacacacatctcaatcgggccaacactatagcccatcacagatgactctcatctctaacggacctaaactatagcctgtcacggatgactcctatctcaatcgggcctaaactatagcccgtcacggataactctcatatcaattgggtctaaattatagcccgtcacggatgagtataataaaaaataaataaattatgtttttttggctagcctcagcacacataaccgggaagaatttctcggtcggtcacccatctcaaaattgctctaacataaacacgcttgaccttagagttctttaggatcaccttccggagaagaagttgtacgttgattcacacacacaaccatcaatatatttaatacaatcacattcacataacatccattttgatcacatatttcacatccattcacatatttcaccagcaaaaccgagttaatttgatcaaatatatatttagcaagtatgaggaggaaaatcagacttctaggcaaaaataaatttcgaattgaattttataatactaaatgaactcatatgaaaaaatcgtcaaaaacaaagttgtagaactcattgagatctaccaattttgttttggtcatttctccatccgggtttgattgaactatataaaatttgaattttaaaatataagaaatttaaataatttttcgagcagtaaatgatttcaaatggaaaaattgtcaacaacaaagttgtataactcatcaagatctataacttttattttggttattttctatataacattttttgaacagtttgaatttgaatttgaaaatatgataacttcaaataatattttcaaataccaaatgatttcaaatagtaaagtcatcaacaacaaagttgtataacttatcaagatttacaacttttattttggtcatttctctatataacatttattgaacaatttgaatttgaatttgaaaatatgacaacttcaaacaacaatttcaaatactaaatgatttcaactaaaaaagtcatcaacaacaaagttgtataactcatcaatttcaagcctgtcacggatgacacatatcagtgacggaccgtagtttaggccagattgagataacattgcatatctcaatcgggcgcttttttggcccgattgagattcttgtgacagtcactaattccaagcatattagaggccgtcatagatggaagattctgtactagtggacattactatgtggaagacaaattgtgatcatcaaaatgcttggtagaatagcttaattagtgagaaaatattgtaacggcatcttgttatttatttcagcatatacattaggaaaaagtagtatccataaaccaccactactatttgtaggagcgcccccatctttttgcaagggcggacaaaaagatctgtcacccctgtaaatatatttaccaagggtggacgtgggaggcaagccacccctaaaaagcaactccatttccaagggcggaacacgtacacataggggccgagtctagttccaaattttttcttcaaactttcaacttttctatcaccttaaaacttttaacttttccatcacatcgttccaatttcgacaaaacttccaattttaacgtaaactaaacacaccaggagatacagcttccaatccaagtaattaacaagcaatgaaaggtgaaccgctttaacttcgatccggtgctggaattcacacagcacacgctccgagaaaccgatcaattaattttctcttgatgaatgggttcaaattcttatcccaattggggtgtgtttagagcaactacaatagcagactattagccagctgtaaacatattttaatgagataagggatgagagagaagagcagcgggctacagatctgtagccagctgcagcgcgggctccaagacataatgtgtgtatgacacgtgagaccatatattaatagtatagtaagcaactattgtataaattggttattagattagctatagatgaattggagctagtagtgggctatactatattgaacttgttcttagttccaaagttttttttcaaacttccaacttttcccatcacatcaacctgtcatacacacacaaactttcaatcacatcgttccaattttcaaccaaacttccaacttcggcgtgaactaaacacagccttggttaaaattaataccgctccgttaaaaaactattctaaccagttaatattcaagctggctagcatataggatatatgtgccggtagggaatagcaccggttgtcgttggtacaacaacaacgatgtatgtttagttcattattcgtacaacaacggtggtacgtttagttcattattcgtatcggttgtcgttagcaccggtgtgaatgtactaaacacaaccgtgtactttggaccaatacgtatgagccgatacgaatgacggtctctgcactagtgatattttaacaccaagataaacagatgcgtatgtacagcgcatctgttcaagctctcattatctcttcacccaaaccgaagaacccgtgctttgaccaacaaggataatgttttaatacatgcagtgcagtcaagaaaagacagatgtgaggttccaatacccatcttataaaggggcaaagtgcctctgaacgaactatccaagattgacccttttggacaatatggttgttatcagggtcattgtatgctgttgttcataacatcgctcattccaaggattttataaatgaatgtcatgcctattatacagtaccatatttagaatatatggttctatagttcagtggcattagagagaaaccaggaaggccatggaagtactgacgtggagtagtggacatatactgatataggctttaacaccatatgctacagctagcttcattaccttgaggtcgtgtccttcacacaacggatagtatgaacaaacatgttgaataattttgctaacttcaaatcagagagatccactatctgtctatccatctctattctaatcacaacctctcaagaaattccaaggttagtttgagaaaataattgactgttaatccaatgtggggccaagtaataattaatggtgagtgttggaaattttttgtaacaagttgacaagcatgatcgtagcacctaaacgccttgcgatgatatggtgttgccaaccaccctaatctagcaattgctaaatcaagatgggtttcgatagattaaaccggctagaggaaccgatttagagatcaaaatcagcctctaggccgatttagatcgatatgaggataactacccgtctcgtgggtaaaacggaaggtttttaggacaaacctacaaagaggtgccgccctctcgcagcggcggcggatgatttacggcgcaaatcgataaagatgtactaaaactagggtaaagtagaaaacatggctaaagataaaaagaaaaagcgattcaagtatattgtgtattcagggtattacaatgagctggccttgtcccttaaatagggattggtcttgccctctacaggcccttctccacattcaactcgggatagaaaccaaaagaaacccaaaacatgcctttccgggcaaggaaacccgagacccgatgaaaacagactcggactcggaccctgacggtctgaccgaccacatacctgtggtttagacacggccctactagccggtgagaccgcccacatacctgtggtctgaccagccctgtgaaggaaacccggcagtttctaaactttgccaattttctctatttcgtccataggtgctaaatttgggtgtaaacacatgcatccctgccttttttatgaacatcgtgaatctaaaagcatagaacatgttgtcttagggcgataatccaattaccagccacaggacttcctaagcatctcgccaaacgctagggaagtatttcttcaagtatttcccatggattgttttcttgaagtgcatccatctctttcaaagtcttcaaacgcttatcgatgacgtcttcaaaattgcctcccatcaatatcttgtaatcttcaaccgacaagtcgtcttgcttgaaataccgaagatagccaagatttacctcaattggcaaaacggcttcttgtccacagaccaattcaaaagaagtgactttggtaacaccatgtttaaatatcctatgagtccataatgcttccgaaagcacctcatgccacttcttttggtgttcttcaatctccttttcgactaatttcaacaatgttttattactcgactcggcttgtccattagcctgagcgtagtaagaagaagaactcaacaacttaatatcataagattcggcaaaactcttcacctccttggacataaaagaagctctttgatcaaagtttaaggaatatcaaatctatgaacgatatgcttcaaaacaaagtcaattacctccgtgtaagtaatattcttgagcggcacggcttcggcccacttgatgaagtaatccgttgcgattagcacgaaccgctgcccctttgatgatgaaggataaatttgaccaatgaaatccaaagcccaaccttggaacgaccatggtttattgataggattcaacacagtggtaggcactaattgaacattgccgatccgttgacaaacttcacatcctctatattacttgaaacaatcatcaatcactttcagccaatagaatcccactctcctaagcaaccaaatccatcttacgggccaattgatgagttccacaaatcccttcatgtacttctcccatagcaaccttagattgatcattatctaatcacttcaaaagtactccatctatttttcgacgatataattctctatcaagcaaagtgtatttgaacgcttgtcaccgaattttccgatcaatcctgagactaggatctttcaaatattctattcaaagggattctccagttttcttctgactcttcggcacaaatatccgaattcacaattaattcagcctttgaatcaattataacgtgccccttagctttttgcccgggatcagttagactggccacgcaatgccggtcggaccgccctatctgcccggtcagaccagccatgcaatgccggtcagaccgcccctggtctatgattttgtcaatttctcccaaagatttaaaaaatcaagcaccggcttttctagtttcaaaaagtaatcctttcttcatattatagccagatgtttggtgtatcaaattactagaccaaaatttcttctttctagacatatgaaaaattataacatccaactaatatatctagatgaatactaattcaagtggcttttgaaacaataatcatcaaggcatcaaaaatgcttagccgcttgaagtatgatcaataatgaatcaccaaagtcatatgtgtcacatgcatagattccaataaactacaaatgtaagtaatcgacttaagcatgtatgcaaaatattaacaatgccaatgttcctaaaaaaaaccactctagagcaaatcatcacattgaccattgacattagccgaattactaagcaaaattttcatggtgcaataaatatgaaatctatatcttatatggtgatccataaaaacatacatgatttggcttttaataaatatcaaagaaccatgagccaaatcatacttcaaacaaattatatgccaatttaccaattccactacttagaactggcatttgcaacatgtatgtataatatcaatttgataagcaaaaacacatgtgctagatagcaagcaatgttctaacatggcataggcatataatataatggtaaacataataaacacataccttgtcttagcatccaacaaacggcggctcaaagatgtgatgttgtacccatcgttgttcatctcttttgatttcttcatgagcatattaatgtcttgccccccgagcaaaatcggctttcttgattgcacgatttcaaaggcaagatgaataccgcactaatacccatagcatcatatgaatgagacttatctctaatgaccgatgattcttctctcatcaaattggatttatcactactttgggaaatcaccaatctcttaacttttatctctttaggtctccacgctcgcttaggtgtcgttcgaggctcaaaattgttacatattttgttctccacatcttcggcttctttttctttttgacctatggctcgaagatgttgtagcctcctcttctgagagcgagataagccagaaggtatccacttcggctgtggttgtattccaagagctaaatgatgattcttgattttttttcagttgaagtggaagttcttgtgttgttcttaactttcccactcttctccaatgccccccggtcagaccagcctctgggcccggttagaccggttgcaagccgtcggtcagaccagccagctgtctcgatcagaccaccacttttggcagtcacggcgtcggcttcagtcttcttcgcttgtatagttttcaccgcatctctagtaggtacttgaacgtcttgagattcctccttgatagtgacgacctccggagctttggcttcttttctcacccacaccttcttcacctgtttcacctttgatccaccggaccgactcttttgtgggaaacggtcttgactagagttaaatgaatgacttggtactgacctagatgattgcttccattcttgatgaaacggcatatatggttgaggcatccatggcatataatacataaaaggataaccatatagtgacattggatatggataccatggcatcacaatcggaggtttgtatggagttggtatagttgatggctccgattgctttggtgtttgaccaaatctcttcctacgatatgatcttggtcttttcaaatcactagtctgattatcgaattgttgaccagctaatcctttcttgtacttagccataagcatctcaaaagtgaggttcagctttttggtcttttggaaactagatgactcatcctttacaactttatgatcgtcggcttttgtattattgatcctagtcttaggccgaagatccccaataataacacatttcccttttgtggattcggcttgactaggccgaatcactactttctcgttatctaaatcaataggactaatagggagaggattactaacaattctggtcttagcaaaaggtataaccgaaatagtatcacaagtgaccgatgaattatcaatcggattttgctccatcaagcttgcatctttaaaataatcatgaaactcatgctccatttgcgaccatgtagaaattgaattgggagcaagtaaactataccatatagatgcaaagtttgacaaagaaagagaaaacaattttaacttaagcaaatcattactaccggtcttaccagattgttcaataaattggcagatatgctccattgttgttctagcatcctcacctgtgaatttcgtgaagttgggcacctcaaatccttgcgggtatgggaccaaatctatgcgttcaggatacggcctttgatatgtatgcatagctactttggattctatttcactactataccgcaagacattgtcatcaccttttccaacatccacatgattgatttgtgactcgatcttaggtgacaatactatttcactttcgcttgtgatacaatccgaaccatcatttagttcggctatattttcaatggcactattgtctaagctagcaacacaatccgaaccaacacttagttcggctatactcattatggcatcattgaccaaattattaacacaatccgaactatcgcttggttcggctatacatgatattgcactatcatctaaactagcatttaagctattgttatccactcggctttcctgagccagagcttcatgcaacacatgatcaacatcaagaaatatctggccattcaatctctctttaatataatcaagcaatccatcatatgcaatgtcggccaaatctttgtcagttattttcaaactaaaacatcggcttttaatatctctaaacctttcaatataatcagcaacagattcattgtgtttgtgcctaaccgatgttaaatcaaacaacctaagcccagttttaccaatgcaaaaataatcatgaaatttttgttctaattgagcccaagtatgaatagaatttgccggtaaagaagtaaaccatgtaaaagtagtaatggacaaagataaagaaaataagcacaatttataagtatcagaactactagcctcaccacgttgcgttaaaaactgacctacatactcccatgtggtcctactatcctcaccactaaagttggtaaattcaggaactctataaccacgagggtatgggatattgtcataataatcaggatacgacttttggtactccctagcacgatccatcgcttcaatcccaaatttatccctaataatgatactagttaactcttccatattctcaggcctatgctgatttggtggtgggtttggtgacctaaaaggttgtggttgtggcgcaatataattatattagccatacctagtatcgggaggatatcccctagtaggatcattgtaaacattagggatatgtgggggaacatagggattaacagtagatacaggagaatcatgtaccggaatatggtataaaagcacattatttgtcattggatcaatcccctataccaggataattacgccgatctgaccggtctagggcccgttctggctggcatccagaggtgcggtcagaccggtttagggtccggtctgaccgctgggaggaaacccggtctgccggtctgaccagcggcgagcgcgcggtctaaccggccgtctagcccggtcggaccggctgaatgcgcagctcctccctcgctggttgtttgcatatttgccccatcggttttggggtaaatttgatctacatgggcttaactagtactggtagaggctttattttaggttggaaatcggctataaaagaaacgaatttatttctcaaaaaatcagcaaaacgagattcaatagatgcatctaatttactatttagagcagcaatggatgaatctattgtagttgctatgtgttgttggataggaattgatacctcttcagtactcaccatatcaaaactaggtttgatcaacggttcaggcttgagaaccacaccttggtgggtcctaaagcacgatctcattagcgcctcctgcgtgatcgctttgatgcactcctccgtaatcttgcgtgcttccacatcaagatcctccaatgagatcttgttgatctcgttcccgctcgtcatgattgatgaagaaactccttaattaatttcagccatacagctcataaccaaaatattttgaccgaataaattaatatacggtctctaaatttccttgatatgctactgttcttagccaattttgtccaaaactagcttttgttgatttcctggacgtaacagtgaattcggtactgtagcaaaatatacaaaaattaaccgatctgaaataagatcggctgctctgtttcctattttctttttggtaacagtgtgctacaataaaaaggaaacaatattcttgctgctttttgtttctcagcaaccgtgtataacacgtactagcacgattaatcagactgatcggctgctgtgccgctgttaactggttccttgcgtgttgatgctcctgcttcctgccgactagatcggcgactgccctggtcaaaccggactgaatacgtcggttagaccggtgcaatatgaccggttagactggctcggctatgtcggttagacaggcacagtgagcggtcaattaattgacagatagatttcggccgttgggccgaaactcttgattggatgaaacgatagacaattagattaaacgaaattcagccgtgatatggctgattagatcgttccccagcgaagtcgccaaaaaatcgtgttggcaacttttttgataagtcgacaagtacgatcgcagcacctaagcgccttgcggcgatatggagtcgccaaccaccctaatctagcaattgctaaatcaagatgggttttgatagattaaaccggctaacggaaccgatttagatatcaaaatcagcctctaggccgatttagatcgatatgaggataactacccgtctcgtgggtaaaacggaaggttttcaggataaacctacaaagaggtgttgcactctcacatcggcggtggacgatttacggcgcaaatcgataaagatggactaaaactagggtaaagtagaaaacatggctaaagataaaagaaaaagcgattcaagtatattgtctattcggagtattacaatgaattagccttgtcccttaaatagtgttaacagtgaaatttggtaagcccgaagtcatcatcagctaagaataagtatcggctctagagtactggaatcagccgatgggagtcatcaaatcaccagcaaccgtatttcccgtggagtcggatcaactaaagggaatttatccataagagtccgaattcaagaaggatgcggcatagcaagttatctattaattaggcatagtttagtttccttttatctttaggaaagtgtgtttagtgtccgataaggactttatgtttttcttttatctttaggaaagtttttttcttgtccgacaaggacttgtaccaacccatgggtataaatatgtacacatggggtctatgtgatcaatcaatcgatcaaaacaactactctcgatgcatcgccaccctctttactgaggtttttacttatcttccggcgaaatttgggcacctgacgcggggctacatcggttcagttcgatctccggcgaaggggtaagtcctacgttccgttgggccctggtgaatctgtcatctacgttggcgtcgttcaaggctgcatcagtacattggacctcttggattgctccggtttggatgatatgtttgcctacttatttatcatatgtctctgttaatctagtgttaccatatcaatttagctctatcgattgcttttcgctttagggtttctaccggtatcggctaaatcgtgttgctagattagattagcttaggcatctaccaccctgaaaattagtcaagggcttgattgtctagatattgtttttctttttatacttagtgctgcatcagttaagtttgatctactaagtcgtgcttagaaccataatccctagcctacttgttgactgccaataagggtttcatcggggtttcagccgatgaattatctggacgttgcatcggcttataaggattgtatatataagttggatttagctgatcgcaacaaaggtttcactgtttaatataatcttgtggattttatggcattggatctccagccgatgtattatttaaccttcggatcagtgcttattctaccatgttattattagccgattggtttctattggattatattattgttattttattacatcatcatcagccgaatacctttatatcatcatctacattggacatatagtcggttgcttaagccctatcgctatcggctggtatcggcatcggctattatcggctatcggctggaactactccatcggcttgtcagccgatcggctgtttgatctactgtttacatatcttgtcagttacaggatcaaactgactagcacgcccgcttctcatcttttgaacctgcactggagctaagcagatctcccaggccggtgtgttcgattttttcgtcaacaaatagggattggtcttgccctctacaggcccttctccacatccaactcgggatagaaatcaaaataaacccaaaacatgccttcccgagcaaagaaacccgaaatccgaagaaaacagactcagacacggaccctgatggtctgaccggacatatacctgcggtcaaacctgccctactagttggtcagaccgcctacttacctgtggtctgaccggccctgtgaaggaaacccgacactttctaaactttgataattttcccttatttcgcccataggtgctaaatttgggtgtaaacagttaggaataaagatttgaagttagcatctctattctaatcactacccacgagtccatatccctcacgttttattcaatgatattttttcctgagatctatctaaaatgtactctaagaaatcagagtcatccctccaagaaatccgaagccctcaactgtaatatcccctgccctatgtatcactgtagtagtagttgatggcctatgtggcccaactgtagtagtgatatggtggggttggtacaatgttctatgtttagggggtgaggggccagcaaatactcgtcattgctcgaaatgtaaaactttggtgttaaccgttttacatgaactgatcctttacgatttattactttgtgtacttcatagttattgaacttctgtcagaaattagtttatgccctagtgtggttacatttgtttcccatcagcttgtcactaatagctgaaaaataaaataactaagtaaattatacacaggcattaaatatccttgcttgctggattgaagatcc

SEQ ID NO: 1536 - DNA, 1023 bp, Oryza sativa
  Intron number 1 from transcript LOC_Os04g48940.2 (locus LO C_Os04g48940) derived from phytozome v7.0 (chr-ID Chr4; po s 29002054 to 29003076)
gtccgggtctcctccgcctcctcctcccgagaatcgtaagctccgggcatcctactccccctcccgctcccagtccagtgtcgcgtcctagcggcgctttgctgtgttcgtttggtagcttcgattcgcacgacgtggttcgctgtactgcttcgagatgccgcgatcgctcgccctggagatttatcgcggctccggcgtattcgtctcgtgcgggtttttgtggcgcggtgctcttccgctggttcggttcggcgtcgcatcatttcaagggtttatgctagtgtagctttcgggaggtgggagtggtcgccgccggtatttcgatttctctcttcttatttgacgcccaaatgtgccctgttgcttaacctagttctgattgtgctgacgaattctaacccgtcgtgagtgtgattttggggttttgggtgctagttgtctcctaagatattataaggagatatctccgttgttttggtgttatggactgcggactacttgtttttaatgttcgatttctagaagtgggaacccaattagtcgatggaattcacagaatctggtatcgtgattgagatgcaaaatcgtgtttatttcataaagcagatggatctgttcatggctgcactttactgttcgatgtctataatctgtgtagctagatttaccatttatcacacaagtttaatctagttggcagtacggatctgcagttttgattatagtggattcgaatttttgtgcactgtgagtttcattttggtatttgtacatctacaattaagagtttcatgtagtatgtcgtcatgttgatctactgttctgcatgttcaaagtttgaagctatctctaagacatactgtattatggttcgttatgcatttcaacaggcttttaacacttctattactgggatgaatttcatcttaactgagcaatgtatgaagcattgacgcatgtattaatgaaatttcacgtttttcaggacttctattttgcctctgcatccaggttatttag

SEQ ID NO: 1537 - DNA, 2335 bp, Oryza sativa
  Intron number 6 from transcript LOC_Os02g34600.1 (locus LO C_Os02g34600) derived from phytozome v7.0 (chr-ID Chr2; po s 20741560 to 20743894 reverse strand)
acggcaaggtcagtctcagtcatcttgctcctctagcttgcctgtctctccagttgtgtccagggcagctggagactttgtgcttaatccttttcttttctttccttttttggtgtgtgctcaatccttgtgttatcttaaggcacctgaattttacacgcaaaattttaatatcccaaggtaactaagaagtttcacactagaaaatgtattgtaattttttaaggatggtgaaattaaccttgtgtgggtcacctatgcttgtgctagcttgctgcagtccctccggccccaacccaaacgtagtctgaacttttcatgtgaatgccaggactggagttttagtatgtgaacccaaacgtagcagacatatatgccttgtagaccaggctcatggtatcatgggggcacctctctaatcagtggttttacattcttggaattttgttctgaggtcaagtagacagggaatggacctgaccccaattgccagtgtttttctttgtccttacctctgtggggtggggattccagttttccaagctccaacttccaagtgctcctccaattatttgtgttgacaattttgtcaaaggagcaaagaggggggaagagatatcctaccgaaatgttcccgatgttgtcgctgggacatttttctttttactacctccgtcctaaaataagtgtagtcgtggggatccgtgtccaacgtttgaccgttcgtcttatttgaaaaatttatgaaaaaattaaaaaaaaatagtcacccataaagtactattcatgttttatcatctaataacaataaaaatactaatcaaaaaaaatttcaaataagacgaacggtcaaacgttggacatgaatagtgtaaaactgtacttattttggaacggatggagtagtaatcacagcatgcttgatggtgatctctgccccctccgggtgcgtgcctgctttaattgttcccttgatctggttcacagttggtatacatggtgaagtcttgtctcgcatggtgttgttgatgtgatgatccaaaaagaaagttagatttgatagataagagcaccagattctgttgatggagatcttgttatcatgcttaatgatctgcttgatagtgaggattaataaaaacaaaatcgctgtgtgctttgttgtgtggtgaatccttgaccagcaaacagataggattcatattgcctaaaaaaattgtggagttccaaaaacaataatgtagttatttcttcagaggtagtacatagaaaaaaaaaagcatgaacagatttgaaatggttgcgcgtgatgatctatgtatcgtggggaggccccgtggacatgttccatgaatcgaattgtgttcccattcatcatgctttatgtccttttctggaccgtatttccatcatgttgatgtgtacaataggggccctcagacctgatcttttcatgtagccatcttagactgaacatctggttggtaacctgtggtcctttgggactgtttttcttcatccttttttttgggcgtttcattttgccatctgtagtttgtctggttaatattgatgttatttgaccaattgctattgcactttatttcatacttttttgggataccatgccaaactaccaattgaatttctttctagcatgcaagattggttgcctttgctggtagaggctatcataaagcggcactgagattggttcatttttttaaaagtgacattgagatcagttaggagaatatatggttgtttctagacgaactgcccaaatgtccataggtctctgccatattttctattttcttcggctgctcccagaactccgctatcctcaaattgtgttcttcactttatttcatctgtcagttgtacatatttttctttatttttgatttcaaagataatgaccttcatgaatacctatttgcatattatctttttaattaagtgagtgtaactgatgttctcaagccaccatgttgtactcacatgtgaccaactcctaattgactcttgctagtttcacttaaattcgttgcttcacattttcctgaacaatagacttaaattcgctagtttcacttactggatactctttcaaagagctctgtccttgaactgctgggacttgggattcttctgctccttttttctgtccaccaggattcttgagttcttgatccgttaatatagtgccttctgttttttttttttttgactactctctaatttcctatgctttttgaggttcattctttcttgaaattatgcttctcttgtttttgtaacacactaacattattgtttgcactatgtgcag

SEQ ID NO: 1538 - DNA, 1405 bp, Oryza sativa
  Intron number 1 from transcript LOC_Os04g23220.1 (locus LO C_Os04g23220) derived from phytozome v7.0 (chr-ID Chr4; po s 13212854 to 13214258 reverse strand)
ctcaacaacctccacgccgtcgccaccaccacgaggtacgtgagcacccccatgaatcttacgcccttgccttgtccgccatttgcacgaacacctactgttcattcctttgtccctgcatgtgtcccagcagcctgattctggcactgtcacactctcgctgtccattcctcctgcttgtgcttggtgttgttttgttgtgttggctcctcttcttgctagcttgttgttcccttgctgctgctgctgctgatcagagtcagtggtcagctcactgttgggcatgcaggcagctatgcttagcatttgctttgctgcttgtgatgtgttgctgtctggaataggaacagctagcaggaccactttgtcatctgatgttgcaagaaccatctctctgaacatccatccatttactattacggcttactgcttctgtcctaaaatataagcattcatccgagttttagtaccaattaagatcgaggtgagagtgggtgcagaaaaatacggggtggttgtgatttgttgaaatgagaaaatagttacatgagtttatattttgggccaaattttgaagggtagagcttgctatatttttaggacttagggaacagtttctttttgtaagctattatgacaggttgacaaatatgcctgaagcatatttttcacattaatgggggggggcttcttcattctttcaagattcagattctgcatgctggaagatagtagtagtagttgttgtagtaaaaacttaggttcaggcttcagagagggagaagaaaaatggttgttcatggggaatgtggggaggtggtagtgttagtactggctttttttggctctgctggggttgcagagattccatctgaatcctggccagtttctgctcggcaaaaaaggcttttctctgatgcagcaaacagtggcgcaaacactccccttttggtacaaatgttacactaatttagtagtcgaaggcatcacagccttattccagtgctgctgctgctgctgtcttttgcccttttccttgcaatgatgcgtctctcatgcacaagatcaagtcacatttggttcagggtaaaggattcagataaagattcacactagatttcttacctgctgctatagttatttttatatgcactcctagtctcggaatgctataggacggacggcatcccgttcgaaagagatgatgcctcatatatcaggcgatatctcagaggtatcatcccgtccgaatagggtatcaagaggtaccaggtcgtcccgtctgaacgggataccgttctgtatcattttccaatttttggggaattttgagacaaatttcaaactgagtttcactttcttgtactactgttaagactaactgatactgttcatgtgtccagca

SEQ ID NO: 1539 - DNA, 2182 bp, Oryza sativa
  Intron number 1 from transcript LOC_Os08g25080.2 (locus LO C_Os08g25080) derived from phytozome v7.0 (chr-ID Chr8; po s 15224949 to 15227130)
gccgcggaggaggagaaggccacgaaacggcggcggtacgtgccggtgaggactctcgatttgattcttgggatttgtgctttctcggtatattccttgggccatcgagggttcgatttggtgtccggattggatctttgcttgcttgtgtaggtcctggcagcttagatgattggataattctggatcttggttgatgcgagctcttgtggaatattaattgaattgacgcttttgaattgacggtttgaaaagaattagggttcgtatgtttgaaaaacgattatgaacatcaggtccccaaatatgttggagaattgtattttggctaactcaaggaaaataattgtttgttaggagtctagtaactgtacaatttgtagcgttttggtgtaattaggttagtgcttaggatatccctggttataactatagattgtttcattacgtacagtaatttcgaactagttggtgattagtgcagtaagcattatggtgggggtgctatcaaacaggatagctaatgttcttggttaatgagaacagatctgggctgcaccctcaaggctgcaactataattgggactattcatagtactatcgttgacataattcttcatgatttccagttgttccttttacactacagtccgatgaagtgtatgcgatgcattgaagtgcgcgggacttaattacagcagcaagaaactcagcattaaactatctaagtaacaagtaaactactaaactactgacatcagctcatgaaacaaagatccaaaaacagcagtataaattgaaaatattctatttacggtaaaaatccataagcacttattgtaaatttcatagatactgtaaattttggaatttttatgtgaatttcaaaatagactaacataatcatggaaagaactgtaaaactacaaattatttgttagataaattacagcgtaaatccatcatatatacaatgtaatccaaccaagagggaccagtataagtctagaagaactccggttaccaattatttccacaatcttgtccattcaactttatcactgcttaataatgaccatattaaatatttattcatctcagtgggaaagctggtggattatcataggctcatagcatataattggaaaaattggtagagtatcatagatcctgatagcataactggtgaataggtcctgatcatgcacactgctttctcatggtctagactcctcatggttagatagatggtcatgctcctcccttgtggacggtggggcagcagccagcaggcagaggcatgcagctcaacaaaagggttgcagacttggcaatcaaaacaattgtagcacacatgcacggtaaatcagcacgaatctaaagaaaatcccaagggacaacaaaggccttgtttagttcccaaaaacttctcccaaaaacctcacatcgaatctttggacacatatatggagcattaaatatagataaaaagaaaaactaattgcacagtttgcatgtaaattgcgagacgaaccttttgagcttaattaggccatgattagccataagtgctacagtaacccacatgtgctaatgacggattaattaggctcaaaagattcgtctcgcggttttcaggtgagttatgaaattagttttttcattcgtgtccgaaaaccccttctgacatccggttgtgacacccaaaaattttcatttcaccaactaaacaggccaaaactactgcaattaagctatatctgtgtcgacacgaatatggcaaaccactttaattaatgggctgcgggctgccactgagtgaaaagaagtggaacagtttaccatccttctgaataggtgttgcatcaggtttagtcttggatgttcatttgtatacttgcaggcttacttcttaaaacttacaacagtcgtttgctagttttttcattctattgtattctagtgccaatattactaagttcactatattctagtactcatcatgaaaagctcttggattctataggctcactcgtgttcgtgtgctgaaatttcctcataagttggttcatttttgttgagaacaaatctacttttttgaggaatagtgtgtcaccatcttctccaatgcttgtttatgtatatttgctgattctggtttggcaggtttctgtagttgaag

SEQ ID NO: 1540 - DNA, 1436 bp, Oryza sativa
  Intron number 1 from transcript LOC_Os03g47149.1 (locus LO C_Os03g47149) derived from phytozome v7.0 (chr-ID Chr3; po s 26681570 to 26683005 reverse strand)
taatactaaggaaactacttccttcgtttcacaatgtaagtcattctagcattttccacattcatattgatgttaacgaatctagatagatatatatgtctagatttattaacattaatatgaatgtagaaaatgctagaatgacttacattgtgaaacggaaggagtacttggtattccaatgcattttagaaagcttggtaacaaagactggaaggttattgaacaaagaattgagaaaaaaacttagtagttggaaaggtaagtatatgtctgttggtggtagattggtgttgattaattctgtacttttaagtttacctatgtttatgatttccttttttgagataccgaaaggggtgcttcaaaaaattaattattatagatctcgtttttttggcaaggagatgatcataagaaaaaatacatacttactaggtgggatatcatctgccagcccaaagatcagggtggtttagggttcataatttggaaatacaaataaatgtcttttgagcaaatggttgtttaagttaattaataaacaaggggtttggcaagacttattgaggaggaaatatcttcataataagtctattacccaagttgataagaagtaaggtgactctcatttttggtctagtctcatgaaagctaagggtactttcttagacatgggttcctggattgtgaataatggagaacaaactagattttgggaagataaatggttatgtaacttagcctttaaagataagtatccttctttatatgccattgtccgaaggaaaggtttttcaattgctagtgtttatgagatctgttcaacttaatgtttcttttaggagagcttcaattggtcagaatcttatttttgacatgagttgtgtacttctattgtacatatccagttgaaccattcttctgattgttttagatggaactttaatcagaatggaaggttcttggttaggtcaatgtatcttactttaattaataatggctatattgagataaataaaataatttggaagcttaagatgccgcttaagattaaaatcttcatatggtacttacttaaaggggttgtattaatcaaagacaatttagcaagacggaattggaatgggagtttaagatgttttttttatgaaaaatgagaatattcaacatcttttcatggattgccattatgcaaagtttatatggagagcaatgcagtattcttttggtctatgccctcctagtagtatatcacatattttttatggttggcttttgagggtggacaagaaaaagagtaagcttatacttgtgggagcctctgcaatatgttgggttctgtggttgagcaggaataatttggtttttgacaaatcaccatctattacatatatgcaggtaattttcagagcagaatattggttccggtgttg

SEQ ID NO: 1541 - DNA, 686 bp, Oryza sativa
  Intron number 1 from transcript LOC_Os10g02220.3 (locus LO C_Os10g02220) derived from phytozome v7.0 (chr-ID Chr10; p os 774464 to 775149 reverse strand)
tggtaggattctatctgtttcagagcattttttaggtatttatatatatctctatgcaagttgcaagcaaatctttcttcttttgtggtattagttctacacctgaacttttttatggatgcaaaaaaagatatcagcatcgaaggaagcagtcttgttctttatgagtagggagctcatttcccccaggttaaattgtgggatggatcaaataattcagggctaatttttgttctgaacttgatttcgtagttttttgtgtattcgcattcaagattgaataggataagaaataggggtatctttgattctaaatatcgtagtcaaagattctagctgctggcaaatatatatggatggaagaaaaactataatatatgatttcttccttccctgcaaagtagttaatttgaccccccaaaaaagttgaacttatctttgttatcattaaatttttaagttccaagctgacagaatatggtgtttgcttgcaagaaattagtcgttcacaatatatgcagtcaatagtgttacatatcttctaatatcgaaattgcgtgatggcgttattctaagacgaaaatcggatatgagaaatctatcagaaaagaagtgtgagtcatgatacaatttgctccatataatcttcttgactttcttacattttcctatattatcttgcccag

SEQ ID NO: 1542 - DNA, 10877 bp, Oryza sativa
  Intron number 2 from transcript LOC_Os05g33570.1 (locus LO C_Os05g33570) derived from phytozome v7.0 (chr-ID Chr5; po s 19663760 to 19674636 reverse strand)
gggcagtggcggcgccgatcccgactaccaaaaaggtaaaccgtgcatgccgcagctcctcgttcgttcgttggctcgcgcgcgcgattgctgtgtttgacacaccgttgactctcgatcgtgcgagcatctatcactcactggttcgactcgcatgcgtattgacgtataggagctcggaacacaccatcgtatagctcacgaggtagcactgtagcggggatatgcgtggttggccagcccattgagccacataaggcccatttttttctacacacttgaattcaatccggccctatggttggcactgtctctcatttatttatttactcctttatttagaggatgcgcagatgcatgcgttcaacatcttttagggacggagtacatatttagattcacacgtgtgatattggaagtgcgggcttgtgtgacgctgtatccttgcactataaaaaaacatctctgctactagtaggtcataaccggcatcattgttggtttttaaactggcagtgtgctaccgacaatgatacgattggtttagggtgtgaaccaatagtgatatatggagcataactgttaattctacttacaaacaaacatacagtgattttgaacgctccaaaaatatatatgcaatgccaatagatttgttgatttgcattcaccgatccaacaaacaacttcatttcattcatcaatctaacaatcaaaagtttgtaacaaattcacttcatttcaccaatccaacaatgtggtttcattgattgatcaacaatagaataaagtgtaactttggtgtgatgaacaacagctagcagaacaatttctttccagaaaatttttattgcatcatgcagcttctaaaaatagataaaagattgctcatgcatctcttctcctcatcaccttcaaagatgtagaaggtagcagaggagcacatcggttgataataatgtagatggcactgttagttgatgttgttgagcttgtgtccctgttggcaaatcaagtaagcacaacccccctcccccccaccctccataggatttggtccaagcttgggatgaccagatataattccacatagcctcatctctatcgcatgttgttgttaaacataccatgcgacgtccgcctccattgctttgtaggtatttgccgcgttggacagggaccgatgtcatcgagatccactcttaatcctgagagtatgaaggcatggaagggggcctccaccaccacctgcctaacgagattgaggtggtggcctatgggctagatccccctccccccttccaagcagcaagctcgtggcatgctatccgatcaaaggggagcaaggcggtggccccttgttcggagagtaaggaagtgacggcacatcagttggagggtagagagacggcacactgtgcatgaggagagagggagggaaaataccaacagtggtactatcattatcaatttatatcctaaattatttgtaaaaagagtacaactacatgttctaaatgagataaacctgcagatattggaaatgatgcatttaggtccacatgatgtgatgatagttgttctttgttcagtttggttagcatacagatagatatcgacaatatttttttaaagataatgaaagctacagccaattatacatacagaagttgctagtcaaatcaccgcaaattacaagatcacagcttgacaaaaacaagaaagcaacttagaatatcaacctaaggacatacacataaaacacctattgctaaaattcatttatgattaacaagaatctgtataaccaagggtagagatgggagaagactgctagggctgcaaccctactcttaagtctaaatatccattagaattgcactataaaattaaaaaaaaaatgggacaaagttatgtaaattatattagctgagccctaagcttagaagaattctggttctaccatagcataaccatttgttttggctaccaatgactgtttataaagattatcatcgattagggaaaaaggaaacaaaagtatgcaaataaatgataataaatcaactctctagttgagtagctaggctcataggtgcaaactgctgaaagcttaatcattccatcatttggaatcttgggggtaagacaaactgtaatgactctatctatatagagctagtgactcccaatcaatttggtaggctttctagttaccttagatatttctactttttatcatgcacttcacagaggcatctcagattctggattgccaagcccatggtttcaccaaaaccagaaaaacagatacagttatatgcaaagattttttttttcatcagtcccagactcccagtacatcaagaatgtgaacggaatcgagcctggaatccatggtgagacagggaccgaattcatcttagcaatctagcaacttgattaagcatttaagccggtaagctcgaccattaggcaagtggacaaggttgtgatcacgcaagtaaataaaaactataggatttaagtacttttcgccgcggctaaatccaagtgatcacgggccctttgacagcaatctagccaattagcacggaggtgtatcaacacatgcatgaatggaatatatttctccctggtgcagagaggttcatttcacttggcatcatcacggacctaagcaaacattaggggcatatgctacgaaattcttgtctgtccatcaaatgtttggtagcaataatattcccatgttcactcgtgcatattgctaattttgttgttttgttgacgtttaactcaaatcatggtttctataagttacttcatggtattttgaggaactaccaaatcatggtgaatcatatatgatcgaactaccaaatcggccgacagtgcaatatacatggttctgttctctggttttgcccctagttcagcccatttctagttagggcataaggtgttttcttttaaaagaactaggtgattctccgcgctttgctgcgggaatactaagcaatattccgacaatcatgctaggtgtaaaaaaaaatgaaatatgatggtttattagtacttatcataaaacaaacaaatgataaatgtgatttaatttaatgtagaacatattgataattatatgttaaatattacaaaaatgatagatataattgttaaaatattgtgaaaatgatgtaaggggtgatgattagatatacttgcatgttgatttgtataattaaataaattatagattatagatgatgttgtatgcttgcatggggttaactatataattattgctagtgggtaatgatgtggcatggttacatgttgagttttaggagttagtgagcatcaactttatagtaagatatgattattattacctaaacaacatatctcgatcctaaaatatagttatctgtagttgttactctatattttgggacatagaaaataatagcaaagcatttataaacttatttggtatggcatattaatatagtaggatagcaaattgaactagccctaaattagctttgccaatatttaacatcaaactacaaaaaatcattttatcgaatttttgggttgccaatattttgagaagtttataatattggctaaaagccaaacagaaccttagttaatcggaactatatttttcgtgatctaagatagttgttgtagaaatgaatgttgctacacaaatcaagacgctctaggtatatgtgatacaaataacataaaaatatgtcgtcattcgtgctcaggatggttctgttcaaaatatgctggaatttgtcagttccatgcccttcctattagagccgcaagaatgattttttaaaaggacaagaaaagaaccggtttatactgttttttattctgcatttcagttctgggggtgtcgtgcgtttttgtttgctgcaaaaacagccatcctgcataggaaaccagagtttcaaatgcccacagattctaccgagtatagttaattagtggtaaattaattctaactaggacgcaggccctattatcaacgttggcgtcttagcgacaggaggacaaacacggttataggtatgtataccttgtctcaagtaagtccaaagatgtttgttaattgttatgaaatgtaggcatggttgcgatgagattacgagacccatagtcttcgtggttttatggggggaaaagttatgtccaaatgcaccagtttactcaatatcctaagcttgaaacaagctaaaataccgtatattctaacagtcgaatgttttaaattataatagatttaaacaagtgatctaaaataataataataataataataataataataataataataataataataataagttttctagaaaacttaattttttatagcgtgagcaaataatctgttttaataatcccgtgaataaactgattcgttgcacacttaccacatgatgcctatgtgatgtggtttggctacaacagagatgacatgcacaaaataagcaggtcaatctctctatctttctttcctatctaattacaaatgttgttccggttgtttagtttgttctcttatataaatatgtttgttagtttttatgaccaatactgcttttaatcctcattaagtagcatagaaattactctaatattgttcaacatctattatattattacaatagccttaaaagaagacatcacgttcgttgtgaaactagaaattttcatattagtctgataaaaaaaagagttcaaataaaaatacaatttataaataaaataaattcgaaataaaaaataaagaatattgaaaaaacacttcattaaaaatcaacattagaaaaataagagtacaagtaggattgcaattcaaaagtaacagaaattcaaaataaaaaaagcaatactaaaataacattccatatagaataagagattaattaaaatttacaaataaaaataaataagttacaaaaactagaaaattaaaaataagagttcaaatagaaatacaatttagaataactaaaattaggaataaaaataagaaatattaaaaaagacatctagaacaaaaacaccagattaattaaatttaaaaaataggttaattaaatttaaaaacaaaaagtaaaataaatactgaaattaagaaaataatatgagaattcaagtaagaatacaatttaaaaataggtgaaatttgaaaataataataagtaataataaaaaatagtcagcgtaaaatataatacgagattaattaaaattcaaaattaataaaataaattccaaaattagaaaataaaatttaagtttaagtaggaatataatttataaaattgaaattaaaaagaaatattgaaaaacattccatctaaaatacaacggtggcaaatgacaataaataagagatagcaggtgaaccgtaaaggagtaggatgatatcgtctaatgggacatataatataaaaattataaaacaaagccccaataatgattatatttgatttttagaatcctaataatgattaagagttgtggcagatagttaggatcacagcggctgacatgacttctaggatgtaaaagaataatccaacaatgaattggtttagcttttcaaatactagtgagaataaagagaaggaacaatgaacgggctgtaaagagtacatagatagtgtttgatgtgacttctataaactataaaacaaaactcaataagataataaacttaaaaattacaaggtaatcaagatttttaaagaagtcatgacagatcgagcagacaaaggagtaaggaggtgatggttggtgtgacttttaaaaaaatataaaattaggaacccgatgatagtaaggttcaattttttaaaattctaacaatttttctaaaaaaataatgtgtaaaccaatttagataattttatatgggtgttagccgtataattacgtgggcctcccacctagtttaattaaggtagtcgtttttatgttgctttaaaagtaagggactacctatacatttgtcgataaattttctcctaaaaatttgacagatataattatagtacaaccgtagtgtgattacactgtaacttgtatgtaattacactgtaacttgcatgtaactacagtgtaacttttatgtaagtttcatgtaattttgaatggttagatctattacaagatttgttctggtgaggaagaaaaaaatcacagcacacacatgtgtgaaaggatttgttcccacgacctctattttatcgaaataacatgttactgagagatttttgaaagttatatacaagttacatgtaagttacagtgtaattacactacgaatgtactgtaattacatcagttaattttttggaggaaaatttatcaataaatatatagcaaattcgtaaaagtaaatgttaaagtttgattactctaggtttcctgctgacttaggaaaaaggtattagcaaacaatacgagttaggagtacaaaaggctaggcaattgattttttttatataaaaagtagtctagtttgattttgctttagttatactactaaattccaataatggggggaaatgggtggttcaaacgtggcaatgcaaactggctgtggctgaggcaatggataatcctatgatcctatcccttaccatcttctaacctagaagtgcacttggagttgcccaggtaatgaaaaacatgcaacacgtttcttatggaaattttccccttggcaaaattttgacatgatccgatagcttaattttcaacaaacaagcgtctttttcattgttcatttgtaagaagagattatgggtgtgtttgagaaggagtggattgagaagattgggaagatacgtaaaacgaggtgagccattaacacatgattaattgagtattaattattttaaacttcaaaaatggattaatatgattatttaaagcaacttttctatagaaattttttataaaaaacacaccgtttagtagttcagaaaacgtgcgcgcgaaaaacaaaactatctttctctctttctcctgcgctcaaacgcagcctatgtcgttgacatatcttccagctctactacgtagaacgaatttactgcttgtgttagtcgttaaaaaaaatttactgtttgtgtttgagtcttaaaaaaaagaatttactgcttgtgctattttttcttctttctttgtcgcgccgatcgtctttagttttcactacccgcacatgctgcgccacgatatagcggctatagctagcgtggctgcgtgaggccggctcgcgcactcgtgcggttgcacgtgccgcgccgcgcggtgccctgtcgcgctaacgccgtgcgcgcgcgtgcgtgcgctagctgcgccgccgccgtggagtggaagcggaataccagcctccgcgcccgcgggttttccactttttttccccttccgcgctgcgtccgtccaaagcccatgacgcgcgcgcggggccgcgacgcgacgcgatgcgttgcgcgcagccgcgccgggccgggcgcgcgttgatcgatggtgcagtgggtgaacggtggtgatgccgtcgcgcgcggccacgcgtcgagccagcccggccgcgcggcagaactgaacaacgtactatcaaaaaggccaccagatgcaggtggccggcgcctctcggcacacggcactagctcggctccggcttgtcgtctcgcggtgttccacgacctcacccagcagcagcctcatcgtcgccgtttgacgagcggcaacctacgcacatactctgacgacgcccgcaattttcaccttacgtttgcatcaaggcctttgggagaagcacaactcctcgtcgagaaaattatacatacatggactgcatcttttaccctacaacataccgatgccaaaatttaaatcttaaaatttacttttatagttgattttgaggtattttattgtatttttacattaatatttaaatcactaaaagcacatttataaaagttttaaagccctactacggcgctctctactgatagtcaaaaacaatcagaatcgttgatttcttttaattgaagtgattcagatttaatacggaggggcattattgtaaaacaataggtatgatggggtataatcattatttagtaatgactaaacctttttttctctttttttctttgctttttgatggaatataagcgatgtcaatgcaatggatgaccacatatccatctagaccaaaaaacataaatgacaaagttacctaatcactatattagtaaaatactaatttactcttaataacgaactatccaaacatttctaccggtagtacaataccaataaagagcaccgaaacatcactcaaagttttaaccataatttttttatacgctaatacgctatttgacgaattatcactaattggacaaccgatgctagccatggatatattttcggtgacacaattatctacgatatttgcctgttgagtactacgtgtaacacgatcctaagtatgtgcggcgtagtatagtctacctgtcactctgaaaaacgaggcacctgcagcacagcgaattgccaactccttttcccccaaaaggcacgctcgaatgtggtgtcacggtcacgaaacgatcgttcactgtcgcaagagggttacaggagtagtagagaatcatatcctcacggcgaccagcagggacggaccagacgtgtagctgagctgcaaatccatcccgcgatacgcgcagtcacacgcacaacggcacaagcaagacgggtcgggaaacccatcctgccacggcggacgtggctatccgtgtcgtgcgtggccatggcgtgtgctcgcctcggactcgtcttatctctcttgcaggtagcccaaagtgtccgcttgcttggagaattttgcgcgttcacaccggcagaactattatttttagcttaatcaaaccggccatgtgatccctgattattttctgtttttttaactcaccaaatttatttcaaattagaaacatattacatggttaaccttacatttgaatgaactaaagcaatcttcaaatctttcgcaaagcatcttttactaggataggctaggtgagatatgttgtgacaaacgtgagctggatcgatgctatagtttgtacacacctttctcatataaagagtgataaaactccaaggaaaaacagattagcacttttttggggccatcctaatgcaagcaagcaaggcttatatggcctgtgcttttttgctttaataagccttttagtccccttccctagtctcatgaagttcatggcaccaaacacctcaacaagtggcaaatgatgaaatgatgtaaatgcacaactactttattttgggctggacgtgttggttctcaactgaacctgcaccgctatcagacagtgtacataacgcaatcgctgagcaaaggaaacagaaaggctactgcccagcgccattttatttggccatttctgctgcaaaagctctctttatttgtttctgaatatttgaatgccaatttggcgacaccaatttctagagagtttccgtggtggcaagacaacctggtacttattgtatagtgctttccttttcgagttgattttccatttgcatttgcaaagatttatataacaaatttgagtataaagaatacatcagtgatgaagtggcgtgactggctcaaatcgagctaagagagatcactcgagcaataatgaacagtgaatcagaataatggatacgttactgtccagtacattgctactgatccttgatgcgtgtgttttgtggtgataagtttgagccgtaaaagcagtggtcgaagctaaacaaaacaacaccatcaaaccaattttggagttttatctgggatattatgcgtggtagtggtattcttggatgcctttggtgacataatttgttgttgaccccaactttttttaaggacaaaaatgtttgtgtcaacactagtgttactatgtgcccatgtcatatgtacactgcttaagcggtgagcaccagaaacatacaaccgatgaagcgtacgttgctcacacgagcaaaagtaactttggtgtaaagatatttggctcttctctagtttgttggagcacattacgttgcattttcgacctattataagtcacactaaccattttacattttcatgatctgctcaatttcgtgcacacctcctgtacatgttaatttctctctagtgctaattaacgatgggctctgcacaaactcccctggttttgatacagacaagtccaattttattcccgcttaaaactaacaaagcttgcattttatctataacacgtctaatttcttgtgggcactgcacatattcccctggttttgatacaggcgtatccaaaattcactcacacttaaaagctcaaaaaagctcccattttaatcaccacacgtctaacaaatttcttgttcacatccacagaagaagctatccatgctgtactttacattgcagtattagactttttatactacttttacattacattattagacctttttttaacacaaaaatccacctacccaaccaattttttgccgggctggtcctcctccccccgcatgagccgcccgtgcgatgacgtctcccggtgggtcacaccgtcacacaccgtgctataaataggggggcttggcctctccgccatgagcaccacacttcaccagcttcgctttgcacaaagcctcagtgcctcactgcacttgcaccggtcactaatggctccggctcaatgtgctcgtgtgcagagggtgttccacttcggcaagggcaagagcgaggg

SEQ ID NO: 1543 - DNA, 1210 bp, Oryza sativa
  Intron number 1 from transcript LOC_Os06g29804.1 (locus LO C_Os06g29804) derived from phytozome v7.0 (chr-ID Chr6; po s 17155208 to 17156417)
gctcgcctccgctgcacagctcgtctgctcgcctggtgaggaaaaatccctcttttttctttttcttttttttttcaagaacccatgtaggtgtagttctttgttactgcttactactagtcctgaaggaatgtgtctgtcttgtcgagggatgcggtattgtaagccggtttagaggtatcgctcttggtttgtactatctatttttcacttgccgtagaagctgcagaaaaaatggtactttttgttgggggtgtgatgactgatgatggggttggccggagatgttcccgagattgccaagccctttttttacttcttcttcttcttgtgcttgtttgtagtggagtagtaatttgtagctagctagctttgtttcgtggaattacccccccccctccaaggctgaacccatttgggcatttcttaaatttagttgtggttttttttattgtcaatttcgtcaccccttagtttgaactgctccttctccacctactacatgatcttgactttaacgatgcaacctctgttggaaaattgagctgtctgaaccatttcaaagcatttaatttcatatagcaaatccacgtcatgctgattcagatgcaactttcagtttcttggtaaaatttcaggatcagttttgtattcgtaggcatcttaatttcaaaacatttatgagatttcccacccttgggctattgagtcccccttttgttaggaaacagtcttgtccttccataaagcaaaattgttagttttgactattcagaacactcctttagttcataggctttgtcctctgccattgtgtacttgttgaggaactaccctctcttcttcctcctggtgttagaggtgataatttttgggaggattcagtcatttcgctagtgctaattccttcaaaatctatagtaaattaaactattgaacttccttttctttttggttgtccatccttattgggcatcttgttttgctgacttattttcccattagaagctacgatctcataaaattccattttaattctgtgagatgaagtcttatggatgatattttctaaaatgaataattcttatcttcgataaaaaaaatgacttgctttttgtggagctgtaatggtttttaaaattgtccactttcagtatcacattgtaaacttcactttaacaaactattccatgcaggaagcacggaaatt

SEQ ID NO: 1544 - DNA, 1145 bp, Oryza sativa
  Intron number 1 from transcript LOC_Os12g41540.1 (locus LO C_Os12g41540) derived from phytozome v7.0 (chr-ID Chr12; p os 25690392 to 25691536 reverse strand)
aaaactggtacctcatggtaccagtaccgtgtggtaccgaaaggaggacgggagaaaatctcttcagataaacttgcgggggagatttatttttacaactggagtgcccatttccttctcatttctcaaacagtcaaatatcaatcaaatagttatatttttttttaaaaatgataatattgatacaacatgtatgcacaatcttgcacaattatatttcaggtcgacataagagatctacaaagcaaaaaaaattaaattcgatcattaatactattctctctatttcaaattacttgttgttctatatggtccaaagtcaaatattttaatctcaatcatcaacttttataaactcatagtaatatcataagatctatttttttagttatatcatgataaatactttcataatatataatattcacatgttattaaaccatacgattttttagaaattaatagttgagatagacatatttgacttaaaataaatataaaacaacaaataatttgaaatggaggaaatactaatattgtttaaagccaaatttgttttttttgaaatgaactgtacgatacagtgcgaggttgcacgtactatatgagtttagttcggtatgttcatgtagcgatatataggaaactattctaactatttagataacatgtaaggatgaacgccttcatatttaagttgtaaatagactaattcgtgcgcctttttgtttttttattgcaaaagtgtactattttctagaagtggattttttcccttgaggggacatcccctcgttttatacgtgtcgttcaaaaagttataaaaaattaaaaaaaattatcaagatagatcaatatatcttttctcaaacatgcgagctaaaaatcgatttatacaattcaaaacaaaaataaaaaatttgtcattttttttctacttgtataagttgaatttgaatttgtgtatttgtgaagtgacatatcacatatttatctgtcctacttttttttttcaattttttgatgattttttaagtaacatgtaaaaataaaggaatatcccttatgatttgagttttccctctcttctctcacgatcgactgtctcttcttcctcaatttccaatgcaggaaaacgtcgtcga

SEQ ID NO: 1545 - DNA, 4647 bp, Oryza sativa
  Intron number 3 from transcript LOC_Os07g20544.3 (locus LO C_Os07g20544) derived from phytozome v7.0 (chr-ID Chr7; po s 11867827 to 11872473 reverse strand)
tgatcaacttggattggataggtcaattgtttccggtaaagacatttcacacttgctttagcattttttttccgactatataaggtttaagtctcatctatggtattggagaactttgaggtcatgaaacatgtgcacagggaacttttgtttctttttgttgtaattgaagtggaatacaggatgttaagttcaaattggtcagtagaatgtgcactgcatgctgcatgggtcattttgcctttgcaacactattactactaataatttggccgtgctaatgctacggtagcatttagtaatataaagaatatatatgcttttgacaatcaagcataaaaataaaataatatagatttaatactaaaaaagtgacattataagttattatattgttaaatacatagccacactagtaaaaataacatcacagttttttcatcttttgaaaccatctgaatcctaataatatataaattcacaatcagtgcgtatccaacaccatctaatgtttgatgaatacctcgtttacaataaaatttattatctgctataagatgtctagcatttttttttagaaatcataaaaatatagctttttctatacacctgccaccaaacataattttccttctattttatctgctcacatcacccagttaaacgttaggaggagtaacgttgttattctttttataaatcggcaaatccatctctcccatagttccatatggaggcactggccagcttcaacattcaacccaatgcacttgtatcaacgccctcatcgaggatttaccatatggttacctatatattgagatgttaacgtagatagataataaaaatacttagtacgataccaacgctaataagtacatttagaacataaacattaagcatgtatttttgaaagagaaatcaacctaccagccatgaaagcatcagttgcatcccatgtcttatccattgaacagtttaaagtattgctgtccatgtacacacataaattgagtattgtgttttccaagtacaggcaaattatctgagcaatctaggatctgccagttctatttatcctctaatgttatacttaggccccgttcgatgcttccaaaaggaggtaaattttttcacgcacgcgaaacgagaaacctcattagcacatgattaattaattattaactattataattttgaaaaaatggatttaattgccttttttaaacaactatatagaaacttttttaagaaacacaccatttaacagtttgaaaagcgtgctaacggaaaacgaggaagttgaagaaaagaactaagccttacactgaaactgaggtttcattggccatccaaaaaagaatcaatcaagatgctcataccctgaaggttatgttttaggatggtcaacgtttcaaatcaaagataggacaaactcaaatgtataaatattaattggattcatttacctgtcagccaatgcctcgacttatgattgatggaggagtcatagttgccttgtataccttgaagcagcaattgaagctcctgctgtctacaaggcaaaatttatcagattggtacttctaaatggatagcagatagtacattctagtatagacttttctttgtatgcttgatttagctataggccactatcactattatatctatacttattagttgcttacacaacagtacatataatacaatgaacaagtagcactttacaacaaagattgcaatatttgaacccgtttcattcgtttaatgtcaacaaataattaaaatctaagttcaactgcaaaaggaaaagagaaccaaccatattttgccactaagcaaccatcgctgcaaaatttaaggcaacataaatattatgctattatgttaaagacccattactttctgaaaaaaaaacagaataaagcaagacaaataatacaagagcttgttggttaactgatgagaaatactgagataaataaaatcgcacatcccaataagctgccataagtagaaactggacattaaggctatgtgatctgggaaagaaaaaatatacttcagtgtgctgtgaccttggaagaacatggatgcttctgttaccttatctctgtttaccttctttctttatgtctaaaatgtctgcactacaatgaaaagcaagctttaactattctaatcagcatgataattgtaaaggaaaggaaaagaaacaattatattccacatgagaggtactcagcttttagcaatgttttttttcctcgaaaatgcaagagaattgcgtttcatttcattaaggggaagaaaataaaggaaaaaaaaacaaagtaggagagaccaaagccctcctaccgtgaaaacacacacccatgccccggccaaccccggccatctagctgcctaggtttgccgaaccactaagaaacagcttttagcaatgtgatttgtgttcatctaatgcacaatctgtaaaccccagtgtaagaacaaatggacctgatcatcctcagtagtaaataagagactgaaaatccctctgctagataagttggcagcagctacacccatctgtggaacagtagaacacttagtagtgcaaactacaaaatacacaaagttgacatctcaataaattgtacgtttgcactcaaagtttattttgcaaaacaacacacaagctcatctagaaggaagatttcatcagcatagagccacagaccaaaaggcatatttacttattcaagactatcttacggagaactgaagattctaatgcacctgtttatcaatgcaacaattattacctaccactgactatacaattagaaataagcacctagcagatagtgctaattgtactctagtatatcgtgaactatataacaatttaacaaggacatttggcatcagttatccagtgtccagtaggtccgaagaacttgatcaacaactgcacggcttgaagaacatctgcagctgtaggaagcaagaatgaacagtgatcttattacctaaaagaacactgccaaaatagcagcaaatcactggataatagtaactactgcagcaagtgtaagctatctgaaaaacaacattttggcagatgctaaacaagtttctatttactgaatttttaaacaacagatcaacataatgcatactttagtgaatttacagttttgacttccgaggacaaagtgtgcagataaatgaaaatgaacacattagcagctataattcttgttgatgcaaaaatcaactaatcaagtgaagggtacctgattattttcggatggcagagtggcaatgtaagggtgtcatccttataaattggtcctgtccccaactgttgcaagcctctgtagtacaatgtttatgaagctcaaattaacttactgcatatacttataggcagcctgtaccagtaccagctcaaattagaggcattccaccaagcaatgaagatggctgtcactctgttcggtcgtggaggtggagtggccactgcttcaggaatcaggcgtcggcagatggagcgccggtgtattaggccgcagaaggttgggtacggcggccgtcgccacggagtggatagcgagcctgtgtcttgttggctgagttgccagcccccctgcagcgacgagtcagtggacgacgggaggagtcgaggtcagcggcgattttatggcgatgatggcgaatcttgagagaggttgatcgaggggcgcgattagggttaggcaccgtggtcctggagaattggaaaaaaggggaggagcttacctgtgtgcagtgaacggaccttgaggtcgacgtgactatgtatcggcggtggtggcgcctgaggcggaggacgcagcggcggcgtcgctttgtcggagatcggtgaggtgtcgaaatcggcggcggagggatggcagcatgagtacgaatcgacggaggtcgaggaggaagagggcggtgcggtttccggtgtcaacgtcggaggcaggtgtcgaagaggcgctcgtgacctgggaggggtgagcgcgatctgggtggggagggaggtgcgtgatctgatctggatcgggagggaggtgtgacgctgtcggatggaactcatcagttgattttcaatcgttggatgtgtcacatgatgaatgagtaaaacaacttgttgaactatagggtagatgaaatgacaacatgcgtgcatcatgtagcatgatttctcaaacttcattcctatttgttaggttgcacccattcatcgatctcagaagcctatcattgttatcaagaaaactgttgaatatgatggaaatacttgaaagtatggtttaatgaaattctgtgtaaaaacaactgccgttctgtgttagtttcacaaagggtagttaggtttctgaaatttactcataatgtattaatctctatctagtttctggcattgctttattatactatgctaaatgtatggtgtttattgctttagtataaattgcttatgtctagagtgattgtggaaagcattgttagatcattattgggctgtaatgttacattagcttccattttctttggtacatcaattacccttgatagacgcaacatagaaattaccatagtcaatatgaaatattgcaggcttgtcgg

SEQ ID NO: 1546 - DNA, 3344 bp, Oryza sativa
  Intron number 4 from transcript LOC_Os06g27650.1 (locus LO C_Os06g27650) derived from phytozome v7.0 (chr-ID Chr6; po s 15649177 to 15652520)
ccggcaagaacgagaagcccgatcatttcagggtatggactggttgttctttctatacaatcttgttcttatcccttgaatagctttttttgagtcttgagaagttatgattgctgattacagtttattgtagtgggttgattgcctatgtaacagctagataaaccacaaacaacagaccgattgatccacatttgatgactatgttttgactaattggttgggtgtttatcatttaacaccatctctatttctttaacgtgggatgagatgtttgatttgtacaactacaattccaaattgtcaatatctttcttaaaagtcattttcttataagaaagtgagatgaactcaagcttagacaattaggtatttggcaactaaggttaactagttggagcggcgtggacgtcttaaaagtccaacagtcttgtcaagttgtttgcactatccaaggcacgttgttattcatgcaatgttttgatttgaagtcgaccaagctgctgctggatctgccgcctttagggctgccctgccagagacagctacgtccttgtccgctgtcggctgagcgtgtgcttcctgctccctttggattgttgcctgaactgagctttggctcactccttgttggcatctcctgccttgccagcaggaccgcatcaatggcaatggatggaggcttccaattaagctttggtagatggaggcattagcttttctttgatccatatttttttatcagcttctcatttatttttcttgtttcttttcaaaaaccaaaagtttgagtttcgaagaagataagcctctaggaaaagccactccacataaagaatgccatttcctttctggtatacatgtacttatgtgtaaatacatactccatctgtcccatctgtcccattttaagcgcaaccatgagtttccgtgtccaactttgattgtccgtcttatttgaatttttttatgattagtatttttattgtattagatgataaaacatgaattgtactttatgagtgacttatatttttatttttttaaaaatatttttaaataagacggattattaaatttggacacagaaattcatggctacgcttaaaatggaatggaaggagtacattactttttcatatttatgctccttcatattcgtagaacgataaaccccaatcttgttggtgctatctgctgctttttttttaagaattttctccataattaaattcacctattatttacagccatgtagtcaaactaaaaaaaaatataggtattgtgcagtatttagcatcaaaatggtagaatatatgtatataaatttactctaaaccctaacaataaaatctagtcatatatcaactacaataaaacaattcagaacatatctgcatgccctgacagtgatcggaggttgtagttgtggttgactggcgccctaggccgcagtccccatggcagcgaggcacggcgacattaagattgaacaaagtaagaaagaagtgcacaggcagaagggcacaccgtgggacagaagaaacgacagagggagagggtttagattaattcttcttcattgatcacaatgaacgaattacaagcttaaataagacccaatctaacaaatcttgtaacaaactcttcctaacaacttatctctaagaatgaggataaaggtaacacatttaaacttcatctttaaacaatgctgagtcttccgtgttctagacgttgctgcacgtgctctgtccattgttgcacgcgctctgtcctgtgttcatgccccgccgttcggctccatcacaatgcctgtggaacagaatcccgcacatgagaatatttttcaaatgcaggaatgtccttgtaataaattatttgtcaaaataattagggagaatacaggaaattggatgccaaagccttgcctagctattgtttccccagttgtggataaaggccatagggagaagaggctggaacctggaggatagtacgacgtggccagcaaggaaagcgacctcgggaacatcctgtagatcttagcactgatctacatctaacaatgggttatagttgtcttgttagatggcgtcaggaccattgcataaggaaagtaacaggagcaacaagggaagaaaatagaatatgaacaggcgcgtggacgtggaaattttttttatatttatttctttaatgatttacataaacaaactactatttcaaatttttgcaaaaatatactcctccacaccgcaacgtagggcggggcatataaatcgccctatggtagggtgggctatgtgatgtggcatagggtgggcgaggggtatgccgtgttaattttgcaggtggccccttctcgccctctggatttttcacaacttggtccttttgaaaaacttattttgcaaatagacccctggaaaacttatcccagaaatggtcttttttgggacgccagagtcgctagctccgtggtccaacgggacggcgccaacatctctggcgccgtccccctgccaccgtggcgggccggcgatgagtggcaggggggagctgcaaattttaaccatccaagttagttgattcctgtttgattactacgtttactccaattaggcaatttggacggcttctgcaattgtgatgttggttttcagtgtcacatttatggtaataatgccccatttgaaaggacaggttgttagtacactcaaagctactccatctatcccaaaatataagcacttctagagtttttcacagagattaaggagagaggtgaaattaaacaggggatggttgtgattggttgagatgagggagtaggtggagaaattaaatgggagatggctgggattggttgaaatggagtaggtagagaagtagctatatgatgggaccacatttaaacgctagaagcgactatattttgggacggagggagtattgaacacagtgtaatgctttgcaatttttttccaaaacatgaaatatttgtgctgtcatcctagtatatattttatattcttgatttttctgtgtgcttatttgtctatcatctttcaaattctagcatttatttggaatgttctcttaaaaatatgttctatggacatcagaatgggaatctgttcctatgtacgctagcttagctgcttcattttatagctaaaattattcatttctttatttgactcctctaaaactgatgtcttactccacattgcttatgcattggactgcctgctatagagcttgatttacattttattatgtcccattactgtgcttctttaaattgatttaatcactgaaatattttattgtgcagttca

SEQ ID NO: 1547 - DNA, 1207 bp, Oryza sativa
  Intron number 3 from transcript LOC_Os02g32650.1 (locus LO C_Os02g32650) derived from phytozome v7.0 (chr-ID Chr2; po s 19347008 to 19348214 reverse strand)
gaggtgagtgacagaagagcggttttcagtggtttttagctacccaggaaagatagcatatatattcagtcaaaatagttgtaggactgacttgaattttgatcaaatttcattgaaaagttcaaaattctttgaactatttggagcaaaaaaaaattgtgattccaattatctaaatataaaatggaaatgtttgcataaaaaatatgtaggaaactaacaaccgtagtaccatttactccatccgtttttaaatatatgactttgatttttcgacatgaggtttgataatatattttattaaaaaaatagtataaatatgtaaaaagataagacatgattaaaatacctttattgataaaacatatttaaaaaaccgaagtagttatatgagaatagtccaaggtaagggtgagaacaaagaacagctagcttgatactacattcgtactaaaatatagttatttctagtacttgtctcaaaatgaatctatttctacaccttttttttagggaagctatatttttacacctaccaacttctcttaatcaattataactattctctatttaatttttttacctactttcttttctcaaccaatcacaagaatcctccaatcattttcacctacccatggagtaccaaatggaggtttctgtttttttttttgcgccaaaattgtttaaagttgatgcctacttccatttcaaggtccagttataattttcgggcctagcccaaaattcccaagcaacaagacaacatccagcctttgtctcaaatcttcatcaacaaggttgggcctaatgtatatttgtccaaaacttcctctaaatgcctaaccaccgttaatggagcaagattcccactagcagatgatatatgttaattaattaagttttttttttcaccatttatagcaaagatagacagtggaaatacacaattgtatatcttaatttactcgatggataaacacggaacaacttgtaaagtttaaactagacgaataatattgtgaagtgggtattataatacccatttcataatatattcagaagatcattactacacgctgcagttcttatagtaatgttttttggtacattatatatttattcttctgaatttattatgttatactctcattaagtatttccatatgatcttgagcagcttgtgggcgagagcgagcagctgcgg

SEQ ID NO: 1548 - DNA, 1888 bp, Oryza sativa
  Intron number 5 from transcript LOC_Os03g62700.1 (locus LO C_Os03g62700) derived from phytozome v7.0 (chr-ID Chr3; po s 35475134 to 35477021 reverse strand)
caccagagtaatgtctaatttataccaatgcatttcttcatagaactcactatatcgcgtcttacttcaatttttaatccagcccaacagtagttaaaatatatgttttgaaccaactaaaatatgttaatactgacatagtgtattgaaaaactgagagagtcactgtggtgtctattcttgtcaatgtggtaggtcccatctttaaggattgttgccttgaaatgtcaaaggtctgatatgttttttttggatgaacaaattcgtaggttatcctcgtctagtttgctttcatatttttgctgtgcttgtatggttgtattcatgggcaagggtgcacataccttcaggttcatatcgaatagacatcaccagagctatcttatgtgctcctaagatcagaactgtgtactctcagtgcctccaaagtaacaccagaggcagtggctggctggcagccctgccgaccagggccacatgcatgaagcctcaaatgtggaggccatggcacaatactgtgagacttactgacctaaatgacaatggaccaaacagtgtgagtggttgtggtatttttttttttcttttgaaaaagaactccctgatccaaactgatgacttcttttttcacaagattgcatgaaaaactgctgaggctagtgaatatagaaattcatagtataactttttagaaactaaggccgacttggtgatcctgggccttgacgaggtggaagatctgtctggtttttataattgcaacagtttttttttacacatttggcaagtaaattaatgttcgctatgtatccaagagatgacaagtaattctgaccttactgttttaatcaagcaatgactatttttttttcttggccattacacttccattttgatagtatgatatcctgttatacattgatattgagttgtcttgtacattgtagtacttatttgggccttaagctatgtatgctatttttctgttagcagaatagcaaactgatctagttaatcggtttggcaggaaacatcaaatagtacgtagaaccaagtattgaatgcctttgggttgtagtgaaatttatgcatgtagctgttcttacataaccttttttttttgtttgaaaaacagctgacaatggtaccatgtaggtgttgccaaaaaacaactttacttattttgggtgtgattatgccatttaaggtctgtcaacacaaccactatctttggatagtgccttatattttttttttgggaaagccaacttattttgggtgtgaatatgccattttggagagaggtctgtcaacacaaccagtatttgggcagtgccttaatttctttttgggggaagtcaactgacatgttatactccatattctgtgaaccactatctgcatgcagcattcattctggaaagttatgcagaacattgctaatttgcataatgagtgtgatgcatctaagtgatttataacatcatgttggattacctaggctgaattaagcaggaaccttttacgactgacctcttgagcattattatgattattatatttgtttgttgcgatatttcttctacctgcaaagctattatatctggagcaaacataatgcctttactttcctctgcctacaaaggaaaaatctgttcactaattttgtgttttatctgttttgttgttatttgatcttttcaccgtcttgtgtaagttaattgtaatttctttagaaacaagtcttttgtttgctagtttgtccaggtagatgaacgtttcagcgaaatgaggataagtgttcttggcatgagttgtggaaatacttgatgccgtgtatttttatgcatttcctctcttaacttatataaccctacttgccgcagat

SEQ ID NO: 1549 - DNA, 7068 bp, Oryza sativa
  Intron number 1 from transcript LOC_Os11g03030.1 (locus LO C_Os11g03030) derived from phytozome v7.0 (chr-ID Chr11; p os 1053088 to 1060155)
cgccaacctaccacgagcgaccatcgagcatcccggtgagctccacctcgatgtccctgactccaaaccgactcctgaagcccctctagctatccgtccaccatccagtgctttatcatcaccacgcctattatgtgctcgctccacggcaccatgttgcacacctcatggttagaccaaacctcctaatacccaaatcaatccaagtcatccctccctacaaataaatctcggccatctacgtaatcagtccaccactctactccctataacaaattctccgttgatcatcccactgatggatgtgttggaattaatgaatgggccttagcccactcgaagattaattctttggaaaatcacaaaagcccacctcatgggatggcatgcatgtggagtttagtaccaccttgcttattctaggagagggggacctccttaaaagggaggatgccctcctagccacttgaagcatgtgtggtggagagaagaggggaaacacacgcgcgcgctcgctcgcctcgcctggcctggcagggcaggcggcgcgcgtgcacgacgtacgcgtcgaatggtccgaaaaattggctcctcacccttgcgcagatgcagcctccttttgcagttttgttttgctgcaaattcggattcgttttgttttggaaacgttccgaaaaatccggtgcgtgcaaacggcgtggagtccggataagttacgcgcgacttatccggttcggttacgcgcagtagagatcgtgcgggcgccctgatcaagcgacccttctctatataaaccgacccgccgtcttcacgcaatatatgcgaaaatcaatctagggtttgcctcctactctgtactgcgccgtcgctcgtagactactccatcccgctcgccggcgtgcaccagcgatcgggagagcaggtctccggaacctctgcctttgacgtcctgcaccgggagaaggcggcaataaggtttttgggaagcgcttcgcgcgactgctccctgttcgttcgcgacggctcgccttcctctttgctcgcgtgtttcgtgccttcgtagacacctgcgaaaagtttcgaccaagcagccggtcttttcgtcacctcggtacgtgttaatatgttgcgcatatttgatctgttcatgttattctgcgtagtttacatgtgtagatctaatgatgcgttcatgctagttttcatctgtaatgtcatgatttatttatggaataaattaaatccttatatgcccataatctcaacaatccaaaaaccttattataggcactgtgattttactatggctggttttgccgatgcactgaggccggataaattcaccggtgtgcattttaagagatggcagatcagggtcactctgtggctgacagctatgaaatgcttctgggtgagtactggcaaacctgaaggagttcttactgctgaacagcagaagcaattcgaggaagccactactctctttgtgggatgcattcttagcgttcttggcgatcgtctggtcgaggtgtatatgcatatgaccgacgctaaggagttgtgggatgcactgaatactaaattcggtgctactgatgctagcaatgatctgtatatcatggagcagtttcatgactacaaaatggctgacaaccgttctgtagtcgaacaggctcatgagatacaaaccatggctaaggaactcgaactccttaagtgtgtcttacccgacaaatttgtggccgggtgcattattgcaaaacttcctccatcttggaggagtttcggtactgcactcaaacacaagagacaggaatactccgttgaggggttgattgcgtctcttgatgttgaggagaaagctcgggaaaaagatgccgcgtctaagggcgatggtgggcagtccagtgccaatgttgtgcacaaggcccagaacaagagcaaggggaaatacaaagctcagcagaccaccaacttcaagaagcagaagaagaacaacaacaatcctaatcaggatgagaggacttgctttgtgtgtggccaagttggtcatctggctaggaagtgtccacaacgcaaggggatgaaggcacctgcagggcagacttctaagtctgctaatgtgaccattggcaacactggagatggaagcgggtatggtaatttacctactgttttttcagttaatcaatctactaattggtgggttgatactggggccaatgtacatgtttgtgctgacatctcattgttttcttcttatcaggtcgcacggggttccaccgtcctaatggggaatgggtcacatgcttctgttcatggtgttggcacggtagatctgaagtttacttcgggaaagatcgtgcagctgaagaacgtgcagcatgtcccttctatcgacaggaatcttgttagtggctcccgtctgactagagacggatttaagttggtttttgagtctaataaagtagtcgtgtctaaacatggatattttattggtaaaggttatgagtgcggaggcctgttccgcttttccctttctgatttctgcaataagtctgtgaaccatatttgtggcagtgtggatgatgaggctaatgtttggcattcacgtttatgtcatattaattttggcttgatgtctcggctttccagcatgtgtttaattcctaagttttccattgtcaaaggttctaagtgccatagttgtgtgcaatcgaagcaacctcgcaagcctcacaaggctgccgaggagagaaacttggcaccactagaactcctacattcagatctttgtgaaatgaatggggtgttgacgaagggtggaaaacgatatttcatgacattgattgatgatgctactagattttgctatgtgtacttgttgaaaacgaaagacgaggctctagactattttaaaatttataaggcagaagttgaaaatcaacttgacagaaagataaaaaggcttaggtctgatcgtggtggagagtttttctcgaacgagtttgacttattctgtgaggaacatggcatcatacatgagaggacgcctccctattctcccgagtctaatgggattgctgaaaggaagaaccgcacactgactgacttggtgaatgccatgttggacaccgcgggactgcctaaggcatggtggagggaggcattgttgacctcaaatcatgtgttaaacagagttcctaacagaaataaggacaaaacaccatatgagatatggattggtagaaaaccatcactttcttatttgcgcacatgggggtgcttggcgaaagtcaatgtaccaataacgaagaagcgcaaacttggacctaagactgtggactgtgtttttctgggatatgctcatcatagcattgcctatagatttttaatagttaaatccgaggtaccggacatgcatgttggtacaattatggagtctcgtgatgctaccttctttgagagcttttttccaatgaaggatacacatagtggttcgaaccaaccctctgaaataattcccagttcaatcacaccaccagaacaaactgaacatacacatgaacttgtctctgaggaggatgtcagtgaagctcctcgaaggagtaagagacaaaggacggctaagtcttttggtgatgatttcactgtgtacctcgtggatgacactcctaagtcaatttcagaagcatatgcatctcctgatgcagactactggaaggaggctgtccgtagtgaaatggattccattatcgctaacgggacttgggaggtgacagagcgaccctatgggtgtaaacctgtggggtgcaagtgggtgttcaagaagaagcttaggcctgacggtactattgaaaagtacaaggctcggcttgttgctaagggctatactcagaaagaaggcgaagatttctttgacacttactcacctgttgctagattgaccacaattcgtgtgctactttccctagcagcctcacatggtcttctcgttcatcaaatggacgttaagacagcttttcttaatggagagctggatgaggagatctatatggatcaacctgatgggtttgtagttgaaggtcaagaaggcaaagtgtgcaaattgttgaagtctttgtatggtctgaaacaagctcctaagcaatggcatgagaaatttgacaaaacattgacatctgcaggctttgcagtcaatgaggcagataaatgtgtgtactatcgctatggtgggggtgagggagttattttgtgcttgtatgttgacgacatactgatatttgggacaaaccttgaggtgataaatgaggttaaatcattcttgtctcaaaattttgatatgaaagatttgggagtagctgatgttatcttaaacattaagctaattagaggtgagaatgggattactctcttgcagtcccattatgtggagaagatcttgaatcgctttggctacattgatagtaagccttctccaacaccttatgatcctagcttgttgcttcgcaagaacaagagaattgctaggaatcaactggaatactcccaaatcattggctcgttgatgtacctggctagtgcaactaggcctgatatctcctttgctgtgagcaagttgagccgatttacttctaatccgggagatgatcactggcgtgcgcttgagcgagtaatgcgctatctgaaaggtactgtggaattgggacttcactatactgggtatcctgcggtactggagggttatagtgattctaactggatctctgatgtggatgagatcaaagccactagtggatatgttttcacactgggtggtggtgctgtttcatggaggtcttgcaaacagacaattttgacgaggtcaaccatggaagcagaactaacggcactggatactgctactgttgaggcagaatggctgcgtgatctattaatggatctgcctgttgttgaaaaaccggtgccggctatccttatgaactgtgacaatcaaacggtaattgtcaaagtgaatagttctaaggataatatgaaatcgtctagacatgtgaaaagacgattgaagtctgtcaggaaattaagaaactccggagttataacgttggattacatccaaacagcgagaaacctggcagatcccttcacgaagggactatcacgaaatgtgatagacaatgcatcgaaggagatgggtttgagacccatgtgagttatactatggtggtaacccagtctatgtgatcggagatcccgtgaattagatcctgggaagaacaaaccattaataaactagaggagagtacaaatatatataccctatccaagtgaagatgcatatactcttgtgagctgcaaggcaggttggctatgccttaatgagttctgttggctttaattagcaaagatgttgtcctgcagagcattcttgaaggaactcacctttgtgagcttgactgttggtcgcagtctatgaagattttgggtgaatcttctaggaagcttactaaagacctaggagtatgacttatacgctccacccgaggggtagtctacagacggtctagtaccagataagactttgagtgaaacttgcttgcacaagacttgcaattcaaggcgtagtccattgttcaagttgtgagtaagtgtagcttggagttctaggtggatgttcaaccttaattggtctccatcgaaccgctggtatataaacagtacattggaaaaggcaaatctcagtgggattttgagatttggtgggggattgttggaattaatgaatgggccttagcccactcgaagattaattctttggaaaatcacaaaagcccacctcatgggatggcatgcatgtggagtttagtaccaccttgcttattctaggagagggggacctccttaaaagggaggatgccctcctagccacttgaagcatgtgtggtggagagaagaggggaaacacacgcgcgcgctcgctcgcctcgcctggcctggcctggcctggcctggcagggcagggcaggcggcgcgcgtgcacgatgtacgcgtcgaatggtccgaaaaattggctcctcacccttgcgcagatgcagcctccttttgcagttttgttttgctgcaaattcggattcgttttgttttggaaacgttccgaaaaatccggtgcgtgcaaacggcgtggagtccggataagttacgcgcgacttatccggttcggttacgcgcagtagagatcgtgcgggcgccctgatcaagcgacccttctctatataaaccgacccgccgtcttcacgcaatatatgcgaaaatcaatctagggtttgcctcctactctgtactgcgccgtcgctcgtagactactccatcccgctcgccggcgtgcaccagcgatcgggagagcaggtctccggaacctctgcctttgacgtcctgcaccgggagaaggcggcaataaggtttttgggaagcgcttcgcgcgactgctccctgttcgttcgcgacggctcgccttcctcttcgctcgcgtgtttcgtgccttcgtagacacctgcgaaaagtttcgaccaagcagccggtcttttcgtcacctcggtacgtgttaatatgttgcgcatatttgatctgttcatgttattctgcgtagtttacatgtgtagatctaatgatgcgttcatgctagttttcatctgtaatgtcatgatttatttatggaataaattaaatccttatatgcccataatctcaacaggatgggccacacccgttagtccaccaaaactaattcctttattccagaaatcccaaataaactttccagaaacattcatttacttctccatgaaaatgttctctaaattcaatctttcgttggtcctatctcctccgtccaaattcagattcaacccattctttctcctatgttattctgaaattgagctctacttcctgatttatttagttacttcatttgatgttatttttctgcctttttcttttgtttatttgttttctcctttttgcaatcgtgtagacgccgttgccgaagaggttgctgctgcaggtgaa

SEQ ID NO: 1550 - DNA, 1626 bp, Oryza sativa
  Intron number 15 from transcript LOC_Os01g16290.1 (locus L OC_Os01g16290) derived from phytozome v7.0 (chr-ID Chr1; p os 9231819 to 9233444)
gtagtgcaaaacaaggacgtgataggaaatttcaggtataccattttttttgccagtctagtcacgctaatgtgcattcaatgattctacaccagaagaattgcaatattcatgatatacagccaagagtagatgtttatagctatctactgtcgttttaccttctctaaaggaagaagtttgatttgactaattctattttgcatagctgttagtattcctgatcagctgatgtgttgatcattgttccatctattggcggtttttgttcaccctttcaaagtttccttgaatatatgtatttttcttaaaaaaaaacttccattgcatcaatttatgctttagaactctaaaaatgttagaccatgtcttctacttgtcgtaccatcaaggatagatatacctaagttagttcatcccttttttttttttgagatggttagttcatccttttgttcataagtagttatgcttagtgttggaatggacaacgtgttattaagaagaccatgaaaattcttaaaaatggagaacatattgcttcaatttgtctgtttacataattgaaatctgtctggttgtaagccaatctttgtgtgttcttttcttttctaatataatgtacatgaaactaggaagagcacgagtgccctcgccctcctgtcattcttttgtatataaagcaatccatttctaggtccaacatggatgcctgtctgttgtgttcttttcccctcgttttccgcgtgcacggttttcaaactgctaaacggtatattttttgcaaaaagttttatatatgaaagttgcttcaaaaaatcatattaatccatttttcaatttttttaggctaatacttaattaatctcactataatcgcgtgctttgttttccgtgttgggaggcaaggttgggaacttgccctcccgaacacagccttagttgctaaggccatgtttagctgagcctctggcaccagttagctctagtagctggtttaaggagaaactagactccacaaatatttgggacttggcctgcttgaatttgagcttctccaaagttcattattcatttggctggggaaccctggctcaggccctggcccatattggagcttggccaaatagagtatctatgtttttgtcaaatggatgctctcttattagtccatcaaaatcagtattccttcctgttcgagaataagtaaatcagtattccaaaaattcttcttcgttcaaagctgctgccatgtagttctaaactgcagaatactatatacaatttcagtttgttaacttgccaacaatctcagcaaacataattatccggctggtgttggcacataaattaagctacaaagaatatcagtaaacactctgcaactgtcgagcaggaccagcacaagttggcgcataattgtcaagagcagcgtgtccattttttgttacgtagacacctttattgtggaatgtgagatgagatctcataaggagtcataatctattgttctatattaagcatgtttggacttgcacaccatgttttgtcatttacttagatctaagtataccttcgaaaatggatgcaggctattttgcctctaagaggcaaaattcttaacat

SEQ ID NO: 1551 - DNA, 2831 bp, Oryza sativa
  Intron number 1 from transcript LOC_Os07g12330.2 (locus LO C_Os07g12330) derived from phytozome v7.0 (chr-ID Chr7; po s 6955253 to 6958083)
gcctggattcaccggtcacagaagagaaagaggtaacatcaattatgctttatgccatgtctcttctagtagaagataaacttttcagttttcaatatgccttatagtatgaaattcagaaaacaattaaaggaggaatagagagatgctcaaacagtgtgtaatgatctgtggaacgattatatataaatcgtccaggtagcagcctctctttatcttagataatgattagcagaactgcaacatgggaactatgcagaactggtgcatggtaaataaacaaaagtttatgaaagaggtaacttcattagaccatgtctcttctagaagatactttttgcagttagtcaataactcaatatatctgatataaatttagataaccatcaaggaggatagagagagctcagatcaaataatgtatgatgatcagtagcattattatttatgaaaatttggtataaattctccttatcttgtacaatgtctaaaagaactggaccgtgtaactatgtggaactggtgcatggtaactacaaaaagttcatgatgaaccataagaaaaggtttggtgggaaattacaaaaatagtcagaaaggcaacaattatgaatcggaagcaaataaggaggatatagaaatgctcaaataatgtgtaatgattcttagaatgactatacaaaatctttgataatgtctagcaaaactgcagcatggtgcatggtaactaagaaaacttatgacaaaatacaagactgaaatttcatattgtactgggtcaagtaggaaattaaaaaagaggttgtaaaagtaacaattagggattgaaagcaagattgacatgtactgaatacgaaaaccattggaaggcactaaatcatgcattttattcaaggatcagagcttttgggcctgtccacaacctccagctcaaaatatcattcttaacatcactattgatgtactttctttgtgaatcatgtgtctcattcttttcacatctgtaacaaaccattattactactcaagttagcctcaagataggacatttcacctccttttgtcaatacaatcacatggttttcgagacattagttgtaccttttttctagatttaaacctgtcactcttcaagaactatgatagtcactggtgtgaattagtaacaaccaagccagctttataattctaaaattaagtagctatccatccctttcattctcttggcaaaccagagatatctttgactttgtttcacatcttatcttatgtgtgtgtgagtaacatgatgcaatatatgtgacataggatcattggttccagatgcaagacatgtttttttaaaatgattaaatgatgttatgttttgtaatataaaatattataaaactacagtaacacaaaaaaaacttgagtttctaaactgttggtgttctatgatttagtgttcgacatattatcattttagtgtgtaatgaccagttttgtgtatgtttcttcatacagatcgtctggttcatgtgaagatattttgcctggtgggaatgttgctttgttgatacttttcagtattgctgtggtcctagcattctggcactagatggtacgccgtacgcacatcagtgatgtactttgtttcttcgtatcaaacatttcatgagacaatcacaaatgttaagcctgatagaactttcagatttgctgtcatgcttttaatctccccaattttatgatcttacacatccttgtcagttgcttagtttctcatcatttaccaatgaagcttttctttaataatttgtctggcgcttgtatggtatctcaatactaaatggcacaagctttgaaatagtattgctggtagtggagtagtcagtggctcagtgcatgcaattcacacccttccgatctttttcccaaatatttttttttcttttctcttttggagaggacattgatgcaatccatttgtagtgaaactagttgttacatgctactgatgttacactgcagaaccaaccaaaattatgaagagccttttaacattagaaaaccctcacttataattttttttaatcaaacacctcacctataatttacaaaaaaatatttttgtaagtacctacaaattactttgcatgatcgagatctttgatataaacaaaataaattattgaactgcaaggagtttatatagaccttaacatcccggtcagttcaatgctactaataggtttcctgcatttctatattaaggcagctgagcacctggatattggataggtagataacatgacactgtatttgatttcaaggctggtgttagtttgattttttgtaggtctcgtggagttaaaccaaccattgtattgctcaataatgcattttcacgaaacccattctctgttccagaatggagtccaccttttacatatggcggaatgtctttttgtgtgtacggagggtcatatatgttgattgatggttcaggcaatactaccaaagaataatcaattgtgtgaaccggtatgctagtttgtgacgaataatcttacatttaatcaaaacaaaagttggccaggtcattctcgctagtaacttatccaccttaggctcctgcagaatcagtaacaaatcgtcaaatcctagaataacatttgaattaatggtgctgctgtggtcaagcttaggtccattgttccactgtcgtcttcactaagcatgaattacatgtgtagtcctttgatgtgattgcatactaatccaaaatctcatgtcctcttccatatgcctcagacatctggaagacaaaggtggctacatatctcagg

SEQ ID NO: 1552 - DNA, 1413 bp, Oryza sativa
  Intron number 1 from transcript LOC_Os01g55050.1 (locus LO C_Os01g55050) derived from phytozome v7.0 (chr-ID Chr1; po s 31653806 to 31655218 reverse strand)
cctccgagcccaagcgccccgatccggccgacaaggtattacttcctcccccccccccccccccgccctctctcggcggcaacccacctttgatccctcgtgaatcgtggtgcgtgatgatcgcgtgcagagctctgaccgaggcttattgccgcacgatttcgcctcagcggtgtcgtattcccgtgaatctattcgttcaactgaatagtgtggaaacggtccgatgaaaattggctgaacagcactgaatagtttcagttttttttttgcccaattgtaacgttcacatcgatttggttataggctcgttggtactatgcagccatcgcttgctatttcattttcttcctgacgaatgtgttattccagctatgcctatctgttgtaattcagagaatatcatggatttattttattgtgtgcatcaaggtttatatggtacctgctatacttgggattttcaggtcttattttgattaaacccacactgaattcctgatgtgcagtgtaggtttgtcttgaatggtcaatataggctggagatagtcaatgagaaattcatttaataagctatcaattgaaatattcagtgggttatttctgtgagggccactgcacgagagagaaagatgcctataggatatagttttcagataattttttctgacattctgttgaataagatttatgcaagtcatgactatttgattcacacgtaacattaataccgcctatagttttcatgttcagtaaaatttttgttacatataaattagtgaccatgtgtccaggacattgctattctaggtaaggaacacaatctaatgtttagagaaaaggtggattgacgttgattttgtacttgataagtttacctatatgttcagtctgtttagggattattgtcttgcttatctatttgttcagtccatttatgtttagagattattgtctttatgggtgaatgttgaaagtccattatagcattctggaaacttctgatgacacccttggtgttgctggaggatggtattctatgttctaacaggtgaaatataaataatcacctgtgggttggtgtgttttgggatgtgttcttggtaggagggactccttgatccctcctatgtaaatatttctttcttcttaatgaaatgaagcgcagttctcctgcatcgtccaaaattatataaataatcaaattaagctattactgacatagttggagagagcattacaaaaatctgatgtatttgtttcttaaaaaatgaaatttgtcaaagatatctgcatttttacaagcaaaattaatttaatgattataatagtagaaatccttgtgctatattcatccctcattcttgtacttgtgcagcaggactttcacgacagtagattggggagaccatt

SEQ ID NO: 1553 - DNA, 1252 bp, Oryza sativa
  Intron number 3 from transcript LOC_Os01g51120.1 (locus LO C_Os01g51120) derived from phytozome v7.0 (chr-ID Chr1; po s 29364411 to 29365662)
agctccttgagtcaggcttggctgacactctcgcggtgagctccatgatttgtattactagctcaatttgaccatattgcagattttaataattggcagcatctagttttgtttgtccattgtgttgctgtagtttgtagttttaatctatatcacaataggtgttttacgtatatcacgggcacaaacgactgacaggtagcattcatgagctcataatcactgatactagctgtacttatatttttttaattgtgatacttgttattggatggttaattgaggctgaattaatggtggttgttttctttttttttccccaaatctgtaccatttatgtatgtatcactgacaatttaatggttcttaagttctgtattggtatgtgattaatagtgttatgctgaacttcagttagaataaggtatttaaatattttaatatttgtgcaatctggattttagttttttcattgtatttaaaacctttaaacaatgagagcttcattttgtaacatgttcttgccactcaaggtttttcctatatgtgttttttgtgtctgttacatggcaacgttgtaattcagtaggagtgtatatcatcagtttatttccagttgtggtttattttcagatctggacccttactgtcaccattatcaactgtactacagatttcacacaatctcaatgagttctctgtaactattttgttttgaaatttcctacataattttctcattcatttgttaatgtggacacaattgacagatgtgtattatacaagatatttccattctgatcttcatggtacaattctgtagtcgcatgagtagtgagaactgtttcttgtcaaatttgtgtggtccaatttggtccttgatgaatatccgttgttctgattaaaaaaaaatgctgatctgtcaggagaataggaaatcggagttaacaccctcagaaactgtcctttctactttcagtaatctgcttaatgtttttgcgaaatgaatacattatccagccaatgtattcctggatgttgaaaagcttttgggaatgctacctttgcattctttgtccgtcatatttttctgctgatataatatcttatatcataatgcctcagcattacattgattctgatttcttaaacattctctcaaagttaatgccgttttttcttttgttgtttttcatgttgtaactgggattattatgtaaatcaggcgtctactgatcagaggggaagattg

SEQ ID NO: 1554 - DNA, 1295 bp, Oryza sativa
  Intron number 1 from transcript LOC_Os10g11260.4 (locus LO C_Os10g11260) derived from phytozome v7.0 (chr-ID Chr10; p os 6260306 to 6261600)
gagcagagcaggggaggggaagggaaggtatcctggtgagcatcaacatcctcttcctgattcatctctctctcccaccgggactacttatgtcttggaatttgcttgcgttcgttcgttaaccctagcttctcttctagatctggaagaagctcttctcttaatttcagagccttaatcttaatacaagtaatagtttgtttgttcccccaaaagtttaggggttcaactgtcccaactcccaagttggatccgcccctgcctgtgtagagctcatctcccttagcgtcgcctatgattctgagagtttcaccccaacagccgtgttgatgagctttgtaacgacctgtttttctcctgctcttgataaaattaggccagcctgatttaagaaaagaagtaaacattctagctttaatttcccgctcgattcgcatggggttagattaatgtttcttctcgagtatgtattgagaaaccaaatcgtgcatgtgtttatttctggaaggagaagtgctataaatgtctgtaatgtagaagcattttgtaaatgcatgtgcattgagttctttttattcgtatctcgagagtttgtacaataagatgattgttctgcacacaccaaaaaatggtgcagctgcaaacaccttgtggttgtgccttcctaaatactacagaaacattaatgagtctagtgtagatggccaaatgaagcacactattgttatggcattacggtaagggccaggaggtatatgctttcaaccgtgttgtgtctggtcccaatgttcttaagttacaacccaggtggaacaaataagaaacagggcgtccggattggttagcttggtaatcagattacaccaaaaaaaacctgaaccaaatgcctcctaagtttagccgagctacttagttactggttgctgcttagtgtattagtattatatttaaattttggatcttcctgttgtcaaaactcatcaagtattgtttctccagtcccctctcaagaaatcctttctgggcagttgaaggtcgtgttgaatttcctttttgtgttttattcatgttttatgctgtaatggaaataacaaaacagagtgatgactgatgtagagcagacttctagtcctaaccattccatttttttgtgattaagttctaaccattcgactaaaataaactacacatcagagatgcagaaatgcaactaattatgttctcttttgtgctttcatcaggtgatagtgttttttctctgattgtaaatcttttccccttttctttgcagaaag

SEQ ID NO: 1555 - DNA, 842 bp, Oryza sativa
  Intron number 9 from transcript LOC_Os03g30740.1 (locus LO C_Os03g30740) derived from phytozome v7.0 (chr-ID Chr3; po s 17514146 to 17514987 reverse strand)
acctcttgctttccttgggcatagtgaaaggtatatgtgtctgtacaatatgattcatgcgattgatttacttaatgttgtgttaatagctttttctctctttttcttggtttcgctattattttctctgaaaagtttcattcatcacagttaactctttagatttatatgtctcctaagttaaagcgcgtgtagaatattcccattgatattttgagaactactactctactctaaggtatatctttggctagctttgcctagttttactgctgggtaagggggaatcgttgccagggtatcaacagcaaggaaaataggaagtgaggtgcctattttctttatttatgtgatactaagatcctccttagtatcattcatacttattgaatgaacctacgctcacttggggtatgtgggtgtacatccccaccatcaagtcctactggattcacttgggtgcctatttattttatattaatttgatgctgagttcctccttagtatccttcattttttaaagaaacagcaaggaaatccttgttcacatagcgcaaaaccaaaatcaagccaatcaagggtggacaatgagagaccaaacaatatgtcctcgttttgccaacaatttgaatttgagtaatttgatgcgatgaatttgtgagatagtatgtggtagtttattccaaattttagacagtggaagctttattgatatgtggaagacaagatgcggtattctgtataagttataactttggtcattggaacatgttggcatcttttcttcaaatttctgtcggtttgtttgatcatgctcatcttatgtaggtgtggctgactcc

SEQ ID NO: 1556 - DNA, 1116 bp, Oryza sativa
  Intron number 3 from transcript LOC_Os12g13550.1 (locus LO C_Os12g13550) derived from phytozome v7.0 (chr-ID Chr12; p os 7600977 to 7602092)
gataaaaggtagatattcacattatttattcagtttctaggaataaattaacgtcttatcatactagttctttctttaactaaataataaaacttctaggaaattaatttcttttcctcctaagtattaggtcaaaatatgcgtgcacacctttagatttccacaaaagcttggatttcttgtttcaaaaaatttaagacccgttaacacatacttaatttgactagttttaggaacagaggacacaaatgaaattaaattttacttactaaggatcatctataaatggtgcacattcatgctactacctccatccaaaaaaactagcaaatttcagatagattagtactcaacacaaattaccgttgtacccctgtttaatgttgtttctaatgactcaacatcactctcaattcaccatgcatgcaaataaaaagaaaaggttcagccaattagtccacctaattagcattctcaaattaactagttgggtcctaccttgctagaaacacaaatttttggtgcacattttgaatggtagaaatacatttaaagatattaattgatgattttagtgtctatgtatttatatggtcacatttgactttgatggtttttctgtccatcaataaggtaaagctcgaattaattaattgctcaattatttcctacatactgtacatttgtatatttgaaaaatagttgcatatttaatacaagtattcgcttcaaatataaagatgaatataatgtactcctctccatccaaaaaaaataaggatttctaggttgtttagcaaatattaaagtaaaggataatagagtttagtattcctcttaaatgagggatggattggagtgggagggtgtttgaggttaaagatggtgaaaattgattgagatgattgatgggatacatagtagaatgcttatatttgtagataaatttcaaaatctgggaatttttatatttatggacagaggaaatagaatctagtttccaattgcacgagctttgattttgctaaatctatttaaaagcgagtgtttaattattccttgcaatttaatatgtaccgcacgtgaaatgtttttgtaggtacttcattgtagttg

SEQ ID NO: 1557 - DNA, 1841 bp, Oryza sativa
  Intron number 1 from transcript LOC_Os11g47453.1 (locus LO C_Os11g47453) derived from phytozome v7.0 (chr-ID Chr11; p os 28014179 to 28016019 reverse strand)
ccgtccaagctttgctagcattgtcaggcccctcggtgagaacccttgaacctctagcactcacatgcatgcacgcatttagcgagtacatggccgtagacacacatgcaccgtcacccaaagataccttccgctcggactcgccgctagcgcaactccggtcaccaacgaccgagaaaagtagaggaatggaatcgcagtaacattctcttcattttgtcttttggtcgcacccccaaccaagtcaccgtttgtcgccggcgccggcgagcagaggtgccgctcatggcggctctactgctggatcgatagagaaggaatcaggacttcactttgaaaatttaacaaattatagggtctgtaatgcaaagatacaatacacacaacactgtagcaggacctactcgtaattatataagaatatgaagtactcttaacgaaaactgaattaaacatgtgctgaattgttgaaaactactataaacttcaaaaatgcataacaaattcatcttaactccttaaaatcaatttctatggattcacaaaatgatgaactttcatgttataacataaaaagtggcacttatagtacaagatctaccactaaatattatctaagaaaaaggaaacataaaacaagtaagaaattataaaatgcatataaaatccaatttaactcattttgcggtaaaatcaaattctacagaatcaccaacatattctctatgcaaaagtaaaataaaaagacatacttactttgcattaaaagcctctaaaagtattatctactaaataactagttttagacaagctgaactttggaaattcatataacatttattttaactcattttttagtaaactcaagttctgtagaatcaccaaataatgcactttaaagttataaaataaaaatacacacttacagtacatgaatagcccctaaatatttatataaggaaatatgaacctagtgtacagttcaaattgtaaaatttgtagaaatttcatctttagtccaaatggagtgaaccaaacttctatagaaccatcaaatgtgcccttccctaatataaaataaaatgtggcaccctctgtacttaaaacttctctaaaccttgaattagtaaagtagatagtaatcacatactaatgattaagtcaaatctatatgtataatgcatacaaacttcaaataaaacaaataaagctaaatggaccagaaaagataaagttccacttcctttcatcaaaacttaacacacttaactcatatagttaatccatagttgatatatatatatatatatcaagttactaacataagtcacatctagttagcatatatgaaacaaatataatgtaagccctaaatcttgtgaattaaaggtaggttaaataataaaatcattcactttacttagccaaatcataaattaacatgttctggatatgaaacatatagatcaagcatatatagggactataaacatacaacacgttataacttccaaaatacattagaaattcatattaactctaaaaattgtgaaaccaattgtgttaatcttagaagacacatatcgtcacctcagcaaactcaaacttaataaaaaaatcaccttacaaaagcatttcatagcagtacctaagtaaatactacactatatcgaagcaaacttctaaaattcataactctcaaatggagtgagataaagtgaaattcacctaaattcaccttagaccagcacctactcactgtgcacaaaccatgcattttagagcattttggatttttcacatattttggtgtttaattgcataacatgtactttatatag

SEQ ID NO: 1558 - DNA, 1105 bp, Oryza sativa
  Intron number 18 from transcript LOC_Os01g64220.1 (locus L OC_Os01g64220) derived from phytozome v7.0 (chr-ID Chr1; p os 37288524 to 37289628 reverse strand)
ctgaattaagacctaaattggtatacttagttttatatacatttatgaatttgtaaatatttcataacagcttttttattcatctacaaaatttaacttctattaattttttttttgtagatttcaaattttagtcttgcctggaacctttatgttcaagatcactctattgatttcaacagattctcagtgatttatcctcctgtgccaaaacagaataacatgtttgattacatgtctttatttttgcttaccaattttcttttcaaatcttatttgtttttttggtttgatattgtttctcctcattttaattagctattgtttatattgtatatgtttgaaactgcatgttactgtttttgtcaaacagtttaatattttatttgtcagctgtatagtgaagagtactgaaataagtatagtaaagtacagtttgtgctgttgagtgaaggataattataccgtttttgtgcttttttaacctgactgttcagatgaaaatattgtgcagtaatatggtacgattgagatgttctactttatgttttgtatgatatgaatcactagactttgcaaatctatatttaattacattagtatatagactactatcagttacagttttttatctctgtaattacagtttttgatttgtgtaattgccatagaaattcactgtaatttaaaccaatatgtctgtttgtctcattttaattagcttttgtttattctgtatatatttgagactgcatgttactatttttttattagctgtttaatattttttattttcccagatttgattgtggaatatttgcactaaaattcatggagatatgggggccaagagtacttcttcgaaatattattttcccagagagatatacccaatttgaggattcagttaatgaacaaaatgctgttccatccccacaattctattctttgctcagatttttatcaactcctaaatgatcatttctgaaggtaataattcttacttgaaaattttatagttcaattttttgcttgtattttttctgttctgaaatgtgatttcttctttttttcattattttttctgtaggctttactctcttat

SEQ ID NO: 1559 - DNA, 1087 bp, Oryza sativa
  Intron number 1 from transcript LOC_Os06g14406.1 (locus LO C_Os06g14406) derived from phytozome v7.0 (chr-ID Chr6; po s 8042775 to 8043861)
tctcccgctagggttttctcggatcccgaatcgccgtaagccaccaccccccacgacgacttctctggttgttttgcttggagctcgagctcacgggaccgctgctttggtcggatttggggatcgtgcacctctttcctatctggtgagaagcgatcagtgtagcgctgctccctcttaagctagggttagtgcgtaagtgggaaagtaaattgttttggggggagatgaactcgggacatccggcttcttctctagatagtaggtttgattgcggtgtgccgtggaattgcctaccacgcctgataattttggtatcctgtgcggaaaaaaaattatgcgtattaaaataattagaatttttttccctgaaccgtacactgagatatttttggcctggtgccatatttgacaggtaaatgcaatatctagcatgatctgactggttttgtcctggatgtagtcactcgcttagtttctttgtgagtttttgctaaaggatgggatctcttgcttttggcgctttagttgattggtcttaataaagcttatttccattcttaaaagttggagctattccattgtatgcatgggatggtgtagcttgcagttaaggccccatgcagtgttacatgtttccagaaataccaaatctctaaactttatctgcacacgtagtgatatttcttctgttttatacaaaaacagcttgaatcaaagatggcttatgcgtaacagtgtaagcagtctgattcttgttatcgatttagcatcacatctgtggtgagcaaggaaaacctaaagcagttgttttgttgaagtcctgatgttagtagctaacctacagcaccatattgtttatgatgtaataattttctacattgcattaatattctgcatcagctaaaaatacccctgaaataccaggctatggtatctgtacacaatatattctgtatctgatgcttgaaggctgtaatttttattcatttacatgagcttctacttggttacaaaaattaaatgagctatgatttatttcatttctcttggaattatctcactctgatgacaggtagtttcacaa

SEQ ID NO: 1560 - DNA, 2607 bp, Oryza sativa
  Intron number 1 from transcript LOC_Os06g30020.1 (locus LO C_Os06g30020) derived from phytozome v7.0 (chr-ID Chr6; po s 17271986 to 17274592)
gcgggcggtggcgtgcggcggctccatcctcgccggtgagcacccgtacgcgcgtcctgtctctcactacccccagatacccttctccttctccttgtcttagccatagcttctctcctagatctggaagctggaatctgctttcctctttgcccttaagcttagtaataataacaatttaagaattgggggattgaactgaacccccatgcccccacgtcaggttcgcccctgttttaagatgaggtattatgggcatcagtttttttatcagattgagcgcacatattgtacattcttcgtgttatcttcttctatgattttacctcgtgtttatgctagtgcttgctgattctgtcaactaatggttcaacacgtgctgatatttgattaatccatgtcaagcgtacattactactataaattaatcggcaagctgcccaagctgcctgattgtggccatgggcgtataccccttcattaatgatctatgattctggctcatggtttgcttgatttcatcatacttttgtacactgctgcaatatgaacacagcagaggtttctgcattactaaaatgatcttggctcgcccatatctaaacatatttgagcattagctatacttgtattaaaattttgagcctaattcaagtactccctgtttggtatatttgatatttatatgcaaatttggacatgcagttctggttcatttatgcatttagtagatcactgtatcaattttggatgatcttgccattaatcaatgtttattttcttgttgacgccattgaatcaatggcattgagtttcttgcatatacgcaatgaggcaacatacatgatcatacaatctttgttatgttgagtttcagcctactcaggcatcttcaatcttggatgatttgtgtcatgatatatgtatgctttggaaaaaaatatccagctttggaaaaaaaatctagaatcttatgttatgcacattgagaaaaaaaaagggtttgcatacaataattcaaaccgtttgcatcattatttgtgacatagtctggaccaaaaagtatacaaggacaaaatacacaagataccctttaggatttaaattttacttgaaaatttggtaacaatgaattttaacctttttgctcgtaaagccttagaattgtacggttggagccaaccttcttgccgaaccttcccaatcagctccaacttcaatgtggagaggtgccaaccatgaagctggtgttggagctgcatattatggtgtggtagccatcaaacagagccatatgtaaaatagcaaaatcactttacatgtcaccaactaaaatatgtaaaatagtagtgtaatccaaaagtgttttgcaactgaaagcattattttaaattgcattgtgttgtgtgcacccaagatggcattgcttatctataggtgccagtgggaaactgattgtttgctatttccaatattactatttgataatgggagttgggaccacatggaaccacactgcaacacaacacctgcatgtgtggccattgcccttagctggttgaatcaagcaatgaagcatccagtgagatacaactaggatgtgctactgaaaaaaaaaatctattgtcgatgcatgtgaataagatatttatggatcattatcactacacacttcagcaaaagaagaattttatagttggatgttgtattttgaataattaggctaatgctattctgctgttcaaaatgttgttttttgtcactttaatttgagaattcaaaatttaactgagttgttgaaatttaagatctggttgagtttttttttaaggtccatctgaagctccaaaatatatagaactaaaattgtcatatcgttcaggtttggaaatttttactgcccattagagtaccccgtgtttgacagctgtaaaaactttccaagcaatcacgtgcgttgcaagtaataactgtaaaagtatattcgaacacaaaattacaacataactggtgttgttctgatagttcactgtggctgatgtggaagcaaagatggaaaatagaaagaacaccaacaagcctaccctctccttgctaggtctggccctcatttgcacatacccagtctcttctcttgatgactctggcatcaccgtcgagtcctctgctcatgtgagctgccagggacaagcacccaggtacctgctgttaccgcaagaaggaacttgcctcccctcccagagcttcactgggtggacattaggggtagacgggagtttcatccaggctgattcttctgtcagtatggaaccctaaattggctcttggtcttggattcttccaagttccagctgtgttttgatttggttactcccagatatacttcaatccattcagttagatgaggatttaatgtgatttttttccttgcaggattttgttttccctggattttcctggttagctcattatatgttttgtggcatagtttagtaggaagttgaagttgatgccttcttttacttttctagctgttcttctttgccctggttttgtaggatgttttggtttcagcggcttgattgttgtttttcttggcagattgtg

SEQ ID NO: 1561 - DNA, 889 bp, Oryza sativa
  Intron number 20 from transcript LOC_Os04g09860.1 (locus L OC_Os04g09860) derived from phytozome v7.0 (chr-ID Chr4; p os 5289456 to 5290344 reverse strand)
tgttactacaattcataacaggtatctctccaccctggtgagcgccatgtacttgtccctgtcgtcatttccatgctcagagcctcagttatgttatttcttggtcaattctgtagttataaacttataatctacatttgagctatcatgtaggaaattttaagtggaaattttagtctgcctttttaagggatagcatgattttgtttcacagttacatcatatatttctttataacaattggaggctctcctggaagcgaccacaaattttgaggccgaaaactagatatccccacattaatctgtaaaactaaaaatctatccatctatgacatctacaactgtatggtaaatgtactgattacaaatatacagtctttcctaacacatgaaccgatatacgactctagcatggtatcttggttagatttgattgttggaaccactaagttgttgagtcgattttgtagcatataaaggacactaaagaaattttagttaaaatatgcacgggttaaaggctaggctggtttttttttttaataaaacgcatgagagctgtgcttcatttcattaagaaggaaaaacaaatcacccatacaaccaagggctcgtgatcccttcccaaaacacatccgcaaatagtgccctttggttagtgacctacaaaggaaaacttggagcgcaagagctccagccaggcaccatagccttagcttctgttgacactgcctgcaacacctccatgatgtttggaattgatccgttgaaaacaaaagtcattacgctgtttccatatttcgcaagcaactagggtaatgaatgaagtcacccccttattttgctccttaggaacatccttgacagctttccacgactgtttagca

SEQ ID NO: 1562 - DNA, 3212 bp, Oryza sativa
  Intron number 1 from transcript LOC_Os06g41410.1 (locus LO C_Os06g41410) derived from phytozome v7.0 (chr-ID Chr6; po s 24818935 to 24822146)
cacggctctctcctccggccgccaccttctctccggtgagcacgctgcctttccccctctcccctcctcttccaaatctagggttaggtttccttctcttctccctttcccgtcgtcgccgccatctcgctcccggtcgtagcgcatccactccgccgccaccgccgccgccgccgcccatcgccctcactaacggcgccaccgccgtgacgccctcggagaagaagaagaagtgcgccgagctgacgaagtgctgcagggcgtgccggccctactacgtcgccgtcgacgaccaccccggttactcctgcaccatcgtctgatcgcgagccacagatctaacccgctgctacattctctggccttctaggctctgcagattcgcgtgtaaatcgtgttcatcggtttcaaagattcagccttgatgctattcacactcctctcttctctgaatcttaaatcttttcctacttattgcgtcgtttatgctgggcagtcgtggaaatgcaattgtgaagactgtgcctttgcaagaaacgccaaggccatcctattcagatttcagtggttaaatccagcaacaagtttataagtttttctttgtttgctcgtgctatcgaacaagttcaagaattgctgcagtccgctgctttgcagctttcgtattgagttaataatcaacacctggtttcaaagagaaaaaaaatcaatcgatatcattttttcctggagttgcacatctggcgcttgcagcatttttttaagttctagcttgtgcttattcagtatgttaaaaaaatgccaaacaattatggcaaccagaatttttcaagatcattcgttcaatgtggttcgctgatagtctgatacacactttgttttaggtaccatccacataaacctataacagttggaattggcacagtataatagtgttgtaactatatcttaattgcttctcttgtgcaaactagttccttttctcatattaggttttccctcatttttaccccctgttatattttaactgaatcagcactacaactttcttttttgtaacaaaaagatatagtgaccaagaaggtaactatgaaactataccatttcttgctgcttgaagatatataactgcttgctgttctttcacatgagaataccatttcttggatatagtaattttgtatgcttaatttgaattgttactaatactagtatctgttcaccctaggatgttactttatttcgcataccatgcatataatatgtgaacaaatcttatacattgtttttttattctttggaataatgctctctacccttgaactggaatcggaagacattggattagagcttaggatcatgctctgatagaaaccactcaaaatgctctccctttgcttattgactttctgaagttcaaactcttgctatacccttgtgtgtatttttatcgtgccgcatttgtgcatggtgactaatcatctgatagcttcatctctgaatcctagcagtctgcctcagattcaatgctcagattctcaagtaaaagatatttttgtctttatctaagcttattttttggactatctcattcagttacaataatgaaatactctatatcagatacatgtttgtattccgacggtacaagctgatgttatcagcctggtttatcatctttttaaaatgtcaacaaatctgtggtcgtgtgatctgtatgcatggtactttgtcctttgaaagactatgggataaccgtgtatcgctatgtcagtttggcttgggcacatgattaccaatgggaattttctgaacaatttcatcctcatttgtattattttccctgttgagctgagcttgatctgaagctactcgcctgtttctaattctttttaggatgcagtttgaattacggaacttgcagggtctggtattctaagaaaaactgaattaccaattgctgccggaaggtatttctgattttgaattaacatttggcagaaacttctgaatttcaactgattttgaatgaaaatttggtagaaaattatgccggacttggaaacaatcacagcaggtactatttatttagccagtcactagattgggcccgtaattgtgggattgtagccaagctgtttattcccagtcaaaatgaacatggggatttaggagagggattaggaacatgcaagggattcaaacccccaaagggattgagtgatatgggagggattcactcaatccctccctggataggttccccttggggattggaacccaaggaaccgaataaggccttagggaggtgcctggttctcccatcaatcgaggagggcaagttggatgaacgagacagtaccgagtcctcttctgttaaagtgatattgttttcaaacatccatatttatagctatatataaaaaaataaattttctaatttttgttagtgttgaattgaagtcatcactaaatagttaaattctacaaattgaaagaaaaatccgaataaatgttatcgtgaccgttttcattctcatgatgtcatgcatagatatttggatcacacattttcttcccttgcaatgcacatgcactttgctagtatgttgtaaaagttaaaacatgtcatattggttttgataaatttaattagtttttatgtaaacttgagcatacttattcacattattttttttaattcttcttattgtaaacaatattttataagatcctaaggatcgtggagtcgggatactatcatatttcgtaggattctgtgaaaataaatagtaaaatcaacatactatgaaaatttggatactataaatcgaatcggtatcatttcggtttgtgagttcgtagtaccataagatactataagagcaagtttaatagtataatcaactactagctccaaatcatctatagtcaatttaatagccaattgtacctataaacatacactacacttttataattcctggtctcacatgtcatacacatgttacatcttggagtccgtgctgcagctagctacaaatctatagcccactgctcttctctcttcttttatcttcttaaaatatgtttatagctagcttatagtctactattctacctgctctaactcacggatcgggattcggtatcgtttcggttttgtctacatattaggacaacttcagatttcggcccgggtcatctggccc

SEQ ID NO: 1563 - DNA, 3171 bp, Oryza sativa
  Intron number 1 from transcript LOC_Os02g47744.4 (locus LO C_Os02g47744) derived from phytozome v7.0 (chr-ID Chr2; po s 29184590 to 29187760)
tttcgtagccgacggccattggaggtaactgtgaggtgaggattttcccccggcctccactatcatagcatcgttcgtttgcgcgtaatctaagtctgggggtagcgaagatgctttgattctgtggccgcgagacgagacacacgggggaatctaggatgggggagggaatggaagtcggcatttcgtacgatttggccgctgaaaacgagatcaccgggccaatgatacgaccctacgtgccaacctgctgtctacacaaaattggaccaattgttccctgcaagaagaaggaaacatcagagccccgagatcagctagatcttattctagttaatctatctatacttcgtcgcctcctcctctcacagtggctttatcgcatcttatgattcttatccaggcaatcaggcatcattctttagctcctatgccacagatcaattatcaggtaccttttccagtttcctgctgggttccctacttttcatcaagtgcacatctatgttgggaatccaatctttgatgtgctatattagtatatggtgtggatcctgttcttatgatgtcaccgtcacataattacatgcttacttgcagaggtaaatacatgattaatcagaaaaatatcagaagtttttctttgggagtgctaggagtttggttcatttgatcataaattttcttagcttgtttcatctttcatattatttttctcaatgcaccacatatcatgacaggctgatattgttagtcaacgtgatcaggaaatccaatacccttggctggtaagtttgagttataaatattcaaataaatatttgagtccttttgttttcaagtaccaaatccatagaatagattattgccaagagagcaccctggtacttgactgtagagatttgtatcccatgtaatacaagaatcttggccacttgcatggtgggggttcttccccatcgtccacaccttaggatgttgacgatttgaattatcacgtgggagattcgcatatgtgcaggtgacttttgtttttgctgatgcgactgatgtaaaggagccagtaagtattttgtaatccacactttcaggcataacctatttctaaactctcatcatcataactggatgacctgttcctctctcttattaaaaacttgcagtttgtggcctagtcaactatttgatgttggccaaaatgtagacgtggcaggactttcattttaattggaagtcctgaggactaagatgaaagaacaaaaatctgaagtaaatgctaagaatttacaatgttaaaaaaaaaactgaactaccaaatcgcattttggcaggaacaaaccatttagaaatgttcagcgaattcattttgtatagcttttgaagttctcttgaacaattagtcctttgagaaaagaaagttatggaatgatgccattggaatgttcaccaagaaagagaaataaaacatgattttctacatggaatggaccattgttataataagtggtaatttcaccatcctacagggttaccagaaaagaaattccttagactgtttggatcatgcttggatcagatctgtcattttctttttatagaaaatctggaggttcatagtaccctgaactatctaccaatcactgtgctacggaaatcaaacatgtaagtatgtatcctctcgcataacatgcagttatcccatgaatctagttatggcacttcattgtacactagatcctatttacatattttttactagaataaacctatattgctcccaccagcaaggttagtgacattttgggatgactgcaattacattgaaaaaaaaggtttatgtaagtttttcttgaaaaatgtgttcatgatatatttatattccgtaaacatgttacagtagaaattaatggccaaacccaaacttacatgtcaatttccaaaatgtcaattatctgtgactggacatcaaagtgacttaatgtttgaatgaaatagctattttcaatatagtttctgtctatgaacattttgactgaatatctccagtatgtcgtcattatgcgcaaaggggttgaattctaggtgttgatatggattgtttttatctgttttgtttgactacatatcacagttgaataatatatctggtttgcatgtcattcttttctagcaccatgacagattagtttagttgaaatatgaaggggtagataagtacttctatcctttctggcgcaataaaagcttattttcctcaattagaggaagtccaaataggcatatatttaatgtgtgtccgttcctactcattttattggcatttcctttaaataggttcagtgaagctgcagagtgaaggttatagtgaagactggcctgctatatgtgcattgcacaagacaatctgcagtctttttgtcctcttgatttgaatataaaggttctaattctactaaaaatgaatataatacaagcattcaataaactgtttaggacttgcacatgtctcatcatttagattgtgataaaataaaaaaaaatatttgaacatttctgtttgagaggggaggatgttaatacaaatttctagtcttctgtttttacctggaaggcttcatagccacagcttctattccaaaaactatttgcttgtcgtaatcactgaattgatacacatttcatggtttctacagccattcagttgacttgaatcagtaccagaaatcacctttacttgaaacattctacaagttgttagtgccaataccttcacatagtgataacatattacctagcatatgttaaccatcaaatgcacccttaacacattgtcccaaacagggatcaaaggataaatgatctctctaaatagttctttttttcttcatatgtgtgttagggttggggtgtggcagagggggtattagaaggccaaacctctgtggtacacgtctatagattccaaataaatgatacagtacctctttggtactcccatcaacatggttcacaccacaccactacaccagtgacaccaccaccaccattacagggtatttttcttggcccctctgtataaatagcagcaccatgttcactctttgttccattgaaatacaagcaaccataaacagtagccatttctaggaccttggcctttcttgaaggagg

SEQ ID NO: 1564 - DNA, 2080 bp, Oryza sativa
  Intron number 1 from transcript LOC_Os07g41060.1 (locus LO C_Os07g41060) derived from phytozome v7.0 (chr-ID Chr7; po s 24560720 to 24562799 reverse strand)
cgaccttgagaaatctcggtatactctccccaatgatctctactattctctagctagatcacctctatattttccaaaaatcttgtagccatctgcaagcataaaaccaacacaatttactccctccgtattttaatgtatgacgccgttgactttttgaacaacgtttgttcattcgttttatacaaaactagcaaaggcctttttttaacccttttagaagtctttgcaatactataacgtagaaatcatttggctaacaaaaaagaaatcacgtgttgatttactgtctcctttttttcctagtggaataatcaacaaacacacattctttatcgaacttctaaatggtattttttaaaaaaaactatatatgaattctttaaaaaaatgttttacattcttttctttcaacttttataatagttaatgcattaagttttttttaatcttcaaacaattatctcaaattattcatgtatttaaccattccgcataaaaagagcgcgataagggcttattttatcgtttgctcttcatcttgtcattccaatcatattttgaattttaaaattgatttttaagtttttcatggtattttatttttcaacattgatttctatgtcattaagaacatatgtacaacataatataagtgattttggatgatgtaatatatcacagtataataaactaacatggtggcctgcgcagattgcgcggctagcatcattatattttctatcatataatagtatatatattttctcattatattatttaaatatattaaaatgacaacataattttaaattttgcaataactttacaaaactactaatgtgtaatattcatattgtattttatatacttgttagttattaattatttttaatatcaaattttagttatttgtaaattatatatattcatatatagactctatactcgtcttttaatatattattttaattccgaattttctgtaaattgtatttctatatagactctatgatcttcttccaatattatttatttttatttctaaatttttattatttctaattgtatttctatgtggactctaaactcatctttcaatattctttaatttttaatttcgaatttcagttacgtctaaattgtattcctatattgactttaaactcttcttcccatatttttcttaatttcgaattttagttatttgtaaattgtatttttatacggactctaaactctacttttaatttcattatgtttattccaaattttagttagttttaaattcctatatggactctatactctacttctaatattccttatttttttaatttcgaatttatttttttcttaattgtatttctatatggactctatactttacttctaatattccttatttttaattctgaatttcaattatttcctaattgtatttctatatggactatactctacttctaatatttcttatttttaattccgaatttcagttattttctaattatatagttatttcctaattgtatttctacatggactctatactctacttctaatattccttattttttaattccgaatttcagttatttcctaattatatttctatatggactctagtctcatcttctaatattccttattttttaattccgaatttcagttatttataaattgtatttttatatggactctagtctcctcttctaatattccttattttttgattccgaatttcagctatttctaaattgtatttctatatagactctgttttttctttttctccgattaatgtgagaatttctaggccgtgagagcgaacgtggaggctcctttttctattcctttaataatataatagatttttgtgcaaatatgaaaaatatttatgttatgcttaaagaacatttgatgatgaatcaagtcacaataaaataaatcataattacataaattttttgaataagacgaatggtcgaacgttagataaaaagtcaacggcgtcatacattaaaatatgaaatatggaggtaatacaaattttcatggctacgtgatttgataggag

SEQ ID NO: 1565 - DNA, 6794 bp, Oryza sativa
  Intron number 1 from transcript LOC_Os04g54759.1 (locus LO C_Os04g54759) derived from phytozome v7.0 (chr-ID Chr4; po s 32373232 to 32380025 reverse strand)
tgtggacgaagattgaaaccggtaagtccatcactctggtggctggattttttgctcgatttggatttttttcttcgtttgccgctcttcaattcttgtatttgggttctaattcgaggaaattttataaccaatttttgtatgttgtatatgcaagttcttttggtgtaacatgaaatgaaatggtttaaatttagtcacattatatgtaaatctagatcagaaccaatttgacacagactcgggatgatttttgtgtggtggactcgggatgttgctgtcggaaaaatttaggtgacgacggacaaaaattttcaccggaattcttgtgtatttgttattaggtatagatacagattaggtatatagatacgttgacatgcacggtgaatacagggctctttaatactgctgatggattcaatttatactgattttacaagttggggaccctctataccctgtattatgattgagggacgtgaataaaactcgacctatcagtagtatgaacggtgaattcacaggttgaagtccatgactaaatcaaatttccaaattttctttttttagaattttactgcacttggttgctccgtgtcagcttgggccatatacacggaccagcccaacagccagaagcctgttgctctccatgggctcgtgccacgtgtcaatcctgtggttgggtttcgtagcggctgcgtttcctagtattgagggatatgtagcgaacattttcattggaggaacaaattgcagcccggcccttttagcacaatccaggaatttttttcgtttttagatttttttttaatatttacagaaataatctatcgaccaaaaaaattgcagaaatagcccctgccgcccaaatggtgggcggcaagctgacgtggcagacggtgggtcgaccgcgccgtctgccgccgtcggccaaaattgcgattaggcccttgccgcccatacagagggcggcaaggggctaattgcaattttggccacccattcagagcttgcggccgtactttttcatctgggtcccttgccgccccaatagggacccagatgaaaaaagtacggccaaaagatttttctatgttatgttaataataaataaagaagtatttattagtaaaacttgttaatattgttataaaaatgtattgaagttggttgttgcgcaatttcatatgttaagtgagatattattttgtaccttattcgacgtattagtactcggataatttatataggcctatcgcagtctaggtcgtagaaacattatatggacttaaacaaggagaattatgtaacatgaagaaatagtagtacaatttgaacatgatacaactatttgcattgcggttacatagatgatattagattcgatataggagggaggtagtgcaatagttgaacacaacgacgatgtaataatgggacaaggaagcatgacagtagaaatttcaatatgccaagttgtccgataatagctaacccctacgtgaggatccctctcctctctcaaaccgcgctttagtaaccctgtattgctctggtagttcaagctgcacaacacggctaggtggagttagaacccttctggtgtctatccattctctgtattgacatctccttggtggttcctgggaggaaagaatagatgtaaagcaagcaaagttagtaaatgttgtgagaaaataaggaatcatgtaatcaaaatattcttaccatgaaatcgtcgtcaagaatatttggacaaacaaagaaccttcgacccaatgttgtaggatttatggaacgaagaacctgacaacgatcaccacacctgcatcttggacgggcttcccatggagggagtgccgtagttagcacccgccagtcgctctgttgttcacgacattgtcgttcataagccgcttttctttgtaagtattgctcagtactttcggatgcgaaataccagcgaccttcttgtaaacaagtggttaggtcgagaacgggattttctgtatcgacccactcgatgtatgcgcaagctgtagtgcgggtctgccgaatagagtagtgttacgaagaataaagcgattgcccatacggaatgaataagcatatgcagataataaaatacctcacggtcatagttagggcacttaaaaaagcgccttcctcgaatatcaggattcctcgaagccattagttggcatcgatcaccgcataggcagagaggacgctggcaccaaggtggtagtaggtatacacaaggatcgctacgccagtttggatcctcaacaccccggcgtctagccattgacgaaagccggtcggatttgtaatgaagcaagtggggaagagagtactgaatgtgactgagttctgaaagattgtgagggctcactcgttaaggcgacttatataggcgcaaaaaatcgagtgatacccctgacatgtgaacgtggtggggtatggtgggtacgcctgattggcgccgaaagatacatgcatgatcggcgccgaaagttacattggtcgtatgcgccaaatggcgggcaaatactcatatcacacgcgaataaaggaggctgcattggtgcggcagaaagtagtcgtgcatacgccgaaaggtattgtgcatgcgccaaaaggtatcgtgcacatataaccacaacgtagtcattacacaagcatacagtactggaaagtgaagcaagtaaataaaaagaagactgctctactggccctgccccgcgccgcgaccacgcttggtcctctgggcctgtgctcgcacgtagtcctgggagtaggtgaaacgatccggtggcacagcacgggtagcacgagtgtcccgcggaggagtggcctgcgcctggtcctgcgtctgcaccggcggtgcgcctcccagctgtgaggggccgatgacgtcctctgtcgagcctgaagcgaagtcgaagtcagtgatgtcgaagagcacggtggaagacaggaaggggtccgacgaggtcccagcatggtccagtggtggaccctgactcgacgtgccggctgcctgtgacgctgaccctgcagcctgggagaagtgggcggcctgcgtcatagcgaagtgggcgaaacctacacatcgacaacgggacccttgtaagctaagacataaaatgtatgtaaattgattgtggaagtaatgttgtttttttaagtacctgtggggggcacaacagaaggcctagccgaggaaggcggggtgctgaacggtgcacgaaaccctgaagcaatcggcaagtgaaacggctcacttatatgtgcgaggcatgtatagaagtagtaataaaaatagttacctccgtgcggagggggagtcggcctaggaacgtgcgcagctggacagggaccagtcggtacgggtggccgctgtacagctgcgtctgcccgagcaacgtcgtctccacggacaccgcgcatcacccagttgtaaacttctgccaaatttgttgtcattattccatatctagcaccacctgtgtcatacgccttggcccatttctcttttggttcatgcagaatccactgagaaaattcccgaatctccaatccagttcttctaaccaatgttggactatccgttgggagaggtccaagagcttgaggagggtcagcaacggcggtcgatggagccgctgcacgctgatcactgcatttggctgtcaactcatctaatctcttccaaagctcattgaattttttctcctggttctgattgcacagcctcttgaacatgttcatgagctccttgttcttgaattgcttgaagaaattagctcccatatgacgcatgcaccacctactctgtacatcttcccaaacaccggggtatcctcgttccatactcccaaactgcaactctcctatcgctcgcagaatgccagcgtgcctatcatgtatcaggcatacatttggcctcataccaacaacttttgttttaaccaatttcaggaaccagtaccagctgtcggtattctcactctcaacaaaagcaaatgccaagggcaatacctgattgttcccatctacccctattgctgttagtatctggccccgatactttcctgtcaagaatgtcccatcaatgcagagaacaggacgacagttcacgaatgccatcttgcatgcatgtagagctaagaacgccctttgcagcacactcttgccaggatgttcaattgaggggaatttcttcacttcgtaagagctcccagggtttctttcctcgataacaccaagcaggcgtggcaaattgtcatacgaggcttcgtaagttccaaatctcatctctattattttctgtttgtccctccaggccttggcatagctaatagtatacttgtatgtctcttcaatgtgtcggattattgaccttggttcatatgtgagattatcgatgacatgcgcatacatctcagatgcaacaaatgcacatgtaatgttcctgtggtatttctgaacaccaggtagaaaacatgtatgcttggtaacaactgacaccgtccaataatccttccatttccccttatacgtgtgcactctccagggacaaccatctttttccttaacacaccgaacttcatattgcgaccggttcgacttggcaacccaaaactctctatgaagtgacactgcaaaatgttttaccgcctccttcatatcttctgctctactataaatcgctccctgaataacctcattttctttgtactcccatctcacactatcctcttcagagacgatcagcccagaaaaatcctcactagcccattctgctggattaatatccgtctcatcatctgacgaatcaccttcctctacatgctcgttgtcagaatcctccctctccatttcatccacaatggcaccgacagtctccccctcgtcagccactccacctggttgaatgcccactggagctactacgcccccgtcctctcgtgcgttgacctcctccacagaagtctcgtttacttcagcacttggtccctcgctatcatccatgttcgtctgcacacctggatccttcgggtgaacaaacggaaccaaagctagaggccacccgcgttgcaatgcattttccaaataccatctccacactcgagagttttgaactggcattagttcccaataaaaaccctcagttgcccgacttactataacattgattgttatgtcacttgtctgtggatcaactctcaagcccctcattaaccatccttttatagaaggtacactcctctcagccggtctctcaattcccctttctgatacaataaaatctgacagatctaccccagttggcccgtaacggacgtttcctggtccatggtaaacttggaatatttgtttgttcgacatatctgtcaacgaaataactagatcatattactctttcatgcaataaacatctacaacgtaatatcttcttgtgtaagccaatgcaacggtaatgtattaattccaaactagcagatctacgtagttaccgatatctacaatacgcacttctagattagtacaactaaaaccctaaaaatataatgcatttattcaaacaaaattttaaagaatacacactatttaactcaatagtcacatataggatctatgaatattacctgaaatcggcatctgaatccggcagggcttcgccccttcttctcttctcctcccctctcttcttttttttcactggaattgaggagagaagaatgagggctgggggctgggcagcaggccttttataggcagcgaggcctgccgcccggccagagggcggcaaggggccgcctgcaaaatagccggccccgactggcttttttgcattcgggccacttgccgccccaccagagggcggcaagggttttcctgcaaaaaaccctccctccgtcaccgcccgttcctcccccgtttgccacgtcagcttgccgcccccagaggtgggcggcaggggctatttctgcaattttttttggtcgatagattatttctgtaaatatttaaaaaaaaatctaaatccgaaaaaaattccacaatccagcacagaccagcccacctacaacaccaatcccggcctaatagaatacagcaaaacaagctcactgcggcgtactgcggcggcggcggcggcgatggggcgccacgacgtctctgtattcgacgatgaagaaattgggcgcgtgatggatttattcttcaccgatggcgtactggggttggacggcggcgtatcgccggaggaggaggaggaggaggaggaggtggaggtggacctcgagcccttgttctacgacgaggctgcgacggtggcggagtcggtggcggcggcggaaaggcggcgggtgcgggaagaggatcgcgcgcgggtggtggagcagcagaccaaggtgaggaaggcgaaggaggcctatttcaagaagaaccgcaagttcaatcccaagactggccttcactacttcaccagaatattcttcattaaccccctcaccttcgacctcaacgaggagtgtaagcatctaaattctcccccatgccctctctcttagtcttcaattcaagcaattactatgaaacaatctttctttcacaatgtattttaaatgtattatatatatattgacttgaagaagcaactgcagtatattgaatttcctgcataactgttaattggcactatttttttcccttgtttttgttactactacaagtaacctggttcattgaattcatgcaatgcagctcctcttggtcca

SEQ ID NO: 1566 - DNA, 1024 bp, Oryza sativa
  Intron number 4 from transcript LOC_Os02g58550.1 (locus LO C_Os02g58550) derived from phytozome v7.0 (chr-ID Chr2; po s 35779214 to 35780237 reverse strand)
gaggtagggggattctgtggtgatcaactaggccctttcctgtattccttttttttgcatcaatccatcaactcttttaaactgtactgcttcactcatcagtaagcaatgttttacagaaacctgtagatactctattgctttcatatgtagaactacaaacttaataattgtagctcttcttattcatggggacggaatattctgattctgtgtatagtaaccaatcggttggggccactagacacagccagtaaccaacactaaggtatccgcatcacagatgataccaccaaatcatgttggtgtgcattcagccataggctgtatcgtgcaccacatggctgatggtatggaccaagattgatactaccaggatcctatgggctgaaaaccagcaaaatagattgaaactgaactttcttggtcctgtgctcaatagtcatccttctctacttttttggtataaagtaccgtgataagctgcacttgtccccaccttttggcttggggctttaagtgcttggttgctccgttatactggtcctgtcttgcattcacggcgtggctgttactccagagaccaatgcagtgctgttattctaacgtggtgatacttggttgatagttcatacgaaaagaagtgctaatctgtggcatgcattgtttcgttttacccagagatgcacaggttttgcatttaggcatttgattggctttgttggcatcgcataggagctcttgggaaatattcaaagatagagatcattcgtaattggtttggtctaacatgagtggaaaaggattgggggtttggaatgctttggttgatatgattgtacgcaggaagaaaagttgatgtgtttgggcgtgcagccttgttgtttggctttctgggattttagataggaaggagtttcctccttttgcttcttcctttggtgcaatgataactgaagtggctggtcctatatagaagtagtacgtacgagttgggtgttgatcattccgggattgaaacagg

SEQ ID NO: 1567 - DNA, 17122 bp, Oryza sativa
  Intron number 3 from transcript LOC_Os01g71300.1 (locus LO C_Os01g71300) derived from phytozome v7.0 (chr-ID Chr1; po s 41252096 to 41269217)
agagggagaggcagacagttgggattttggtgttggtaaggatttaatctacaatattcaattgttgtgctcttcgcattctataccatataacaacatgttgcatggcctttctttgccataaacaatggactatctctttgttggctttgtttagatgattcatgtcctagaaaacattcatctgttgtcctaaatctgtaagatatgcctagcaaaccgtccatttttttgttattcattgctggttatgtgcagtagtatgctctgctgaaaatctatacacataatggtcatgtacagcagtatgctctgctgaaaatctataaacataaataatgcattattctagtaaacaattaatatgatacggaatattgttggacatattcccctaaaaaataaatgtcttgtatttctttttatcatttctgatagcctttacattattacgaatggaaatgtaacgtgtaaaaatgaccagcaaatttggtatttatgattggttttctgaaaaaatggttttctttgactggaataaacgttctcttggctttccaaaaattaatgttctcctttatcgcaaaacatttcctgattttgtatttcacacatatttcggttactaaattggttgtctgaaagtgatgttcccttttactgataaaacattattttgttttgtattcgaatactaaactttggtatttctgattggtccaaacataggggttctttttataaaatatctcttggtttcatgcataaccctttcatttggaatctgaaacatatgtttgatacatataattggtattatgaaatttgatgctcctttttttatctaaacaaaacaattcagtctagtgtgtgacactaattaagtgttctgatttgctctccaaaactggtgttcctttttattgaaaaaacgtttcttggtttcttggttgacaattctgtttgaattctaaactttgatttgatgctctctaattggttgtttgaaaaatagtgttaaacttcctttaaaaaaacgatattgtatttgatacttttatttggattctactcgttcagtttgctacttctaatttgttcttctaaaattggtgattcctttttatttatgcttcttgcttgatgcttctatttgtaacctgaagctttaatttggtatttatcatttgttttgcaaaaattggggttcatttcataaaagaatctacttgtttcatggttgacatttctatttttgtttggtatacttataattttttttgaaacaggatgttcccttttattaaaacaaagaaacccaattttatgtgtgacactttaatttgctattatgatttttatcaaaaaatagtgattcgtgttaaagaacattttcttggcttcttgattgacatttctatctagagcttcaagttggcatttgtgatcggtttcgcaataaattggattcatcttgtaaaaacatctcttggcaacgcttaatgattttttttcttggttacatggtggtggtgttccattttcttgttttcctgcttaacgcttatagttgtattctaaagctttactttagtaattcttattttttaaacgacatatcttgttttcatgctcgatgatgttatttggattctaaaactttatattggtacttatatttttttccctaaaatttggtattcccatttgttgaattgattatattcaaaagttttgatttcttattctattttttaaaaaataaatttggtttgttttataaacggaacatatagttttcatgttgatactttcattttgtttgtagagctctatgttggtacttacaattggttttctgaaagtagttgtttcctttaattgaaagaaagaaaaccaattttgttcgagacactttgatttggttgtctaatttgtttttcacctaaaaaacattctcgtttcttgattgtcacttacatttggattctaaatctttacttaggcacttacttttggatttcatcctttgtcacaaaagcatttattgatttagcatttgacacctttatttggattctaaaacttgcttggtaccaatctattttccacaagatggtgtttccttttatcacaagtttattttatttggctttgggtaatttggtggctgtttaccgaataaatatctctgttgagttcttcgtgctttacatttactataaatttaactattatgtttggtacttacggattccaaaatttggtgtttccttttatcaaaaaaaaaaaaatcttatatggtatttctgattcgtttctaagtttggtgttctattttaactaagagaaattctcttagattcttgattgacacttctatgtggattctaaatctttaccttggcacttacttttggttttctgttagttggtgttcccttgcgtcgtaaaaacattcttttgttgttgtgcttgacaattctatttcaaatcttgaagttggtacttactatttgttttctaaaaggtggtgtatttttattttggttttatgaaatgtggtgtttgtttctatctagaaagtatactcctttttaatgctttggcgcatctattcatggattctaaagttttcactttacttctaattctcattggttacttgctagtagtttttttttgtgaaaaaatgtttctagttcgttcttcaaaatcgtttttccttttcatcgccttgcgaaaatatggttttttgctttctattaaaaatactctatttttaatgctttggctctctatttgtagattcagaagttattttgctttgtaaaaaatgtttgtaggtagttcttcaaagtcatgtttccttctatggagaaaaacaatgtaaagcttttcaatcttgtacttttcctgaatttggtgtttgcttttcttttaagaacataattagttccaaatctttaacttggtacacactctttgttttctaagaggtggcctatcattttataagaaaagcattgccttggtttcatgcttttttttggattgtaatgcttttgagcttgaccttataattccttgttatttggaattgggtgttgccttttatcaaaaaatattttgatattttgatatttttatcacaatacttattattggagttatggagtttggtgtttaatttaatttcttgtcaatgccatcttgattcttctacatcttcaaattttccttattttggtttttgtaaaatacgatgtttgttttctagtaaaacaatattctcgttttaaatgctttggcgctttgtggattgttaagctttttcgttgcacttctaattctaataggattttcataagttcttctgttttgcaaagaagaatgttctagttcttttttcaaaatcgtgttaccttgtattgagaaaaaagattctctaaagcttttcaatttggtacttataattagttctccttagtttatgtttgcttttgcaagaagaaattattttggtttccctgtttgacatttgtatttgggttcttaatcttgaacttagtcttactattggttttccgaaagattgtgtcttgttttatccaaaagtaaaaacattaccttggtttcttgcttctatttgggatctaaagcttttagcttgaacatacaattcgttttttctagaatttggtgtaccttctattgaaaaaaaaagaaaaacattttcttggtttcatgcttggtacttctggaattctaaatcttttgacacgatactcattgttgaatttatgcgatttgatgttcctttctatgatcgttttgttttcattcttgtcattgtcattttggtttttctaaattttcaatttggtacttacttttgttttgtcaaatgttgtgtttgtttctgtcgcaaaagtattctcgtttttaatgctttgacacttctatttgttgtttctcaagttcgagctctaattggttttccaaaagttgtttcgttttgcaaatcagaattttttctagttttcttaaaatcgtgtttccttctatggagaaaaatgttctataaatcttttcaatttggcacctattatcgcttttcctgaatatgttgtttgcttttacaaaaatacattattttggtttccttggcatttgtatttggattcttaagctacttgctgttggtttcttaaaggtagtctatcaatttattgcaaggaaacattgctttggtttcttgctctattctgattctatagcttttagtttagacttataatttgttcttttttggaatttgatgttcctttattgatgaagaacaatatcttggtttcgtgcttggtgcttcttccaggatatatatcttttgacatcatacttattattgggtttatggagtttggtgtattgtttaatgaacttttttggttccttccttgtcagtaccatcgtgattgttctagatctttaatttgttcctttttggtttttaaatgtggtacttggttctatcaaaaagtattctcgttttcggtgctttgacgattctattcttggattctaaagctttcatgtgtacttctaattctatttgttttttttgaaagctgttttatttagcaaataagataattgtagttcatttctcaaaatcgtgttttccttttatgttggaaacattctaaatggttttcctaaatttgatgtttgcttttgtaaaaaaaaattttgttgccaagttgcatttgtatttggattctaaatcttaaacttggtacttgctattgatttttcttaaaggtggtttatcccttttttttaaaaaaacattgccttgggttcatgcttctatttggattccaaaagcttctagcttgaacttataatttgttttttttttttggattttgaggtcccttgtacggaaatcttctaccacggtacttttggaatttggagttttgggctcaattgtatgatatttttcggcttaaccttttgttttgtgaaatgtgggtgtttgtattaaaaactatcctctttttaatgcttcgacgcttttattcttgaattctaaagctttcaattggtacttctaattctaattggttttcttaaagttgtattatttcgcaaaaaaaaaaattctcttgttcgttttttcaaacgtgttatctttcatgcagaaaaacattatcttggttttagcttgaacttatatttaatttttttttggaatttaaaattaccttttatcgaaaaaacattctcttggttttgtgctttgcgcttcttggattgtatatatttttattggtgttttattttacctggaagacattctcttgtttcttgattgacacttctatgtggatctcttagtttcttgattgacacttctatgtggattctaaatctttaccttggcacttacttttggttttccgtaaattggtgttcccttgcgttgaaaaaaacattctcttgttgtgcttgacaattctatttcaaatctttaagttggtacttactatttgttttttgaaaggtggtgcatttttatttttgttttatgaaatgtggtgtttgttcatgtcgaaaagtattctcctttttaatgctttggcgcttctgttcgtggattcaaaagctttcactttgtacttctaattctcattggttactctatagtacactttttttgcgaaaatatgtttctagtttgttcttcaaaattgtttttccttttcatcgccatcttgttgtggatcttgaattgggtatttgttttggtttcgtgaaatatggttattgctttctattaaaaatactctattttttaacgctttggctcttaatttgtagatcagaagttattttgctttgtaaaaaaagtttgtagttagtttttcaaagtcttgtttccttatatggagaaaaaaaatatgtaaaagcttttcaattttgtacttttcctgaatttggtgtttgcttttctttgaggagcatatttggttctaaatctttaacttggtacatactctttgttttctaaaagatggcctatcattttataagaaaagcattgccttggtttcatgcttttatttggattctaatgcttctgagcttgaacttaaaattccttgttatttgaaatttggtgtttccttttatcaaaaaacattttgataattttattttttttatcacggtacttactattggagttatggagttcgttgtttcgttttctttcgtcaatgccatcttgattcttagtttggttttctataaaaatcgttttttccttttatggagaaaacattctaaatggttttcctaaatttgatgtttgcttttgtaaaaatagaaaacattgtttttgtcgccgacttgcatttgtatttataatctaaatctttaacttggtacttactattggttttcttaaaggtggtttatcctttatttttttacattgccttgggttcatgcatctatttggattctaaaagcttttaggttgaacttataatttgtttttttttttggattttgaggtcccttttatggaaatcttctatcacggtacttacttttagatttatggagttttgtgttcagttgtattagtttttttggcttacccttttgttttgtgaaatgtgggtgtttgtattaaaaactattctctttttaatgcttcgactcttttattcttggattctaaagcttatacttggtacttctaattctaattggtattcgaaaacttgtactattttgcaaaaaaaataaattctagtttggttttcaaaatcgtgttttcttttatgcagaaacacattctccaaagcttttcaatttggtactaataatttatttgcttttataaaaaaacattattttggttgccctgcttgcatttgtattaactctaaatcaactcggtacttgctattagttttctaaaaggtggtctattttttatcgtgaaaatatatattgccttggtttcgttcttctattttttttctaaagcttttagcttgaacttataattcattttttggaacttgttaccttttatcgaaaaaacactctttgtttttatgcttggtgcttcttctgggattgtaaatctcgttattggttttatgccgtaggtgttttgtgttttgacctccttttggtttctttcttgtaaatagcattttgatccttctacatcttcaatttggttctaacttaggttttgtgaaatgtggtgtttgcttctatcaaaaaagtattctcacttttagttctttgacgcttctattcgtggattttaaaagctattacttgctacttctgaatctaatttgttttctagaagtagttctgttttttttttaaaaaaaggtttctagtttttaaaatcatgtttcttactatggagaaaaatgttctctaaagcttttcaatttggtgtttgttgttgtaaaggcattattttggtttcgttgtatgacatttgtatttagattttaattcctttacttggtactacctccgtcccaaaataagtgcagccataattttccgcgtccaactttgaccgttcgtcttatttgaatttttttttaaaaaaattaaaaacataagtcacgagtaaagtactattcatgttttattatctcataacaacaaaaatgctaattataaaaaaatttcaaataagacggacgatcaaagttgagcgcggaaactcaaggctgcacttattttgggacggaggtagtacgtactattgggttttctatgctttgatgtaaaaaaaagtattgccttggtttcatgcttccatttaaattctgaagttttagtttcaacttataattcatattttggaatttgatgttgtttcccttcatcaataaaacattctctttgtttcatgcatggtgcttctactcggattctatatctttcatcatcaaacttactattagatttttggagtttgatgtttcgttttgttttaacacttctattcgtggattctaaagctttcactttgtacctcaactctaattggtttttcaacagttgtttcattttgcaaaaatatgtttctatttcgtttttcagaatcatgtttctctttatggagaaaaacattatctaaagcttttcaatttggtacttataattggttttctaaattttggtgttcccatttattgaaataaagaagcccaattttgtttgtaataatttaatttgttattttgattcgtattacccaaaaaagattctcatggcttctcgcttgacatttcttaatggattcttaactttaacttggtattctctaattgtttttttaaatagtgttttgttttattgaaaacatcttctgtttcatatttaacctttatcttgcttcacaaatctattgttctaaagcttttatcttacttgttttctaattggattctataatgatttttttcttggttacatggtggttggtgtttcattctcttgttttcctacttaacgcttctagttgtattctaaagctttacttggtaaatttctaattataatgatttttttcttggttacatggtggttggtgttccattttcttgttttcctacttgatgcttctagttgtattctaaagctttacttaagtattctcctttttaatcctttggcgcttctattcgtggattcaaaagctttcacttggtacttctaattctcattggttactcgctagtagtttaatttttttttccggaaaaatgcttctagtttgttcttcaaaatcgtttttcctttttcattgccatcacattgtagatcttcaattgcgtacttgttttggttttgtgaaatatggttattgctttctattaaaaatactctgttttttaatgctttggctcccaatttgtagatttagaagttattttgctttgtaaaaaaagtttgtagttagtttttgtaagtcttgtttccttaaaaggagaaaatatatgtaaaagcttttcaattttgtacttttcctgaatttggtgtttgattttctttgaagaacataattgtttctaaatctttaacatggtacatactctttgttttctaaaagatggcctatcattttataagaaaagcattgccttggtttcatgcttttatttggatactaatgcttctgagcttgaacttaataattccttgttatttgaaatttggtgtttacttttatcaaaaaacattttggtaattttttttcacggtacttactgttggagttatggagtttggtgtttcgttttctttcgtcaatgccatcttgattcttagtttggttttctataaaaaagtattctcgttttcaatgctttggcgcttcaatttgtggattgtaaagctttctcatggtactactcattctaataggattttcagaagttcttctgttttgcaaaaaaagaatgtttatagttcttttttcaaaatcgtgttcccttgtatggagaaaaaagattctctaaagcttttcaattaggtacttataatttgttttcccaagtttgtgtttgcttttgcaacaaaaaaatattttggtttccctgtttgacatttgtatttggattcttaatcttgaacttggtcttactatcggttttccaaaagacggtctatcattttatgcaaaaaaaaaaacattaccttggtttcttgcttctgtttgggatctaaagcttttagattgaacacataatttgctttttcttgaatttggtgtaccttctattgaaaaaaaaaacgttctcctggtttcgtgcttggtacttttggaattctaaatcttttgacacgatactcaattgttgaatttatgcggtttgatgtttgattctatgatctttttgttttcattcttgtcattgccattatgatttttcaaaattttcaatttggtacttatttttgttttgtccaatgtggtgtttgtctctattgcagaagtactgtcgtttttattgttttgagacttcaagtcatggattctgaagctttcactttgttcttccaagtctaattggttttccaaaagttgtttcgttttgcagaagtttccaaaagttatataaaattgtttcttttatggagaaaaatgttctctagatcttttcaatttggtaccaattattgcttttgctgaacatgttgtttgctttcacaaaaatacattgttttgggttccttggcatttgtatttggattcttaggctacttattgttggttttcttaaaggtggtctatcaatttattgaaaggaaacattgctttggtttcttgctcttgttttgattctatagcttttagcttatacttattatctatgtttagaaatttgatgttccctttatcgataaaaacaatctcttggtttcgtgcttggtgcttctactaggattctaaatcttttaacatcatacttattattgcgtttatggagtctggggttttgtttaatgaacttcttttgtttccttccttgtcagtaccatcatgattgttctagatccttatgttcttttttggtttttaaatgtcgtgcttggttctataaaaaacttagtgctttgccgcttctattcttggattctaaagctttcatgtgtacttctaattctaattggtttttctgaaagttgttttattttgcaaataaaatgattgtagttaatttctcaaaatcgtgttttccttttatggagaaaacgttctaaatggttttcctaaatttgatgtttgcttttgtaaaaaaagaaagcattgtttttgtcgccgacttgcatttgtatttataatctaaatctttaacttggtacttactattggttttcttaaaggtggtttatcctttttttaacattgccttgggttcatgcatctatttggattctaaaagcttttagcttgaacttataatttgttttttttttttggaatttggaagtcccttttatgaaaaaaacattctcttggttatcttctaggattctaaatcttctatcactgtacttacttttggatttttgcagttttgtgtttccgttgtatgaattttgttggcttatcctttgttttttgaaatgtgggtgtttgtattaaaaactattatctttttaataatttgacgcttttattcgtgtattctgaagctttcacttggtacttctaattctagttggttttctaaaagttgtattattttgcaaaaagaagtttcttgtttgttttttcacatccttttggtttatttttttgtaaataccatgcttatccttctacatcttcaatttggttctaattttggttttgtgaaatgtggtttttgcttatatcaaagatgtattctcatttttagttctttgacgcttctattcgtggattctaaaagctatgacttgctacttctgattttaatttgttttctagaagttttgttttccaaaaagaatgtttctagttgtttttcaaatcgtgttccttattatggagaaaaacttctctgaagcttttaaatgtagtatttataattggttttcctaaatttggtgtttgtttttataaatacattattttggtttccccgtaggacatttgtatttagtttttagttcttttacttggtacttactattgattttctacaagatggtctatgcttttatctaaaaaaaaatattgccttggtttcatgcttccatttatattctgaagtctttagcttgaacttgaattttggaatttgatgttgtttccttttatcaatggaacattctctttgtttcatgcatggtgcttctactcggattctaaatcttttatcattgtacttactattagatttttggagtttgatgtttcgttttgtgtccttcgttagtattctcgtttttaatgttttaacgcttctattcgtggagtctaaagctttcactttgtacctctaattctaatgggttttccaagagtttttatttggtttttcagaatcatgtttttgtttatggagaaaaacattgtctaaagcttttcaatttggtacttataattggttttctgaaatttggtattcccatttattgaaataaagaaacccaattttgtttttaacaatttaatttgttattttgattcgtagtacccaaaataagattctcatggcttcttgcccgacatttctcattggattcttgactttaacttgctatcctctaatatatattttttgaaatatagtgttttgttttgttgaaaacatcttaatttcatatttaacacttatatttggtaggtccagactgttctagtgttttatcgtgtttcacaaatctatttttctaaagcttttatcttgtttgttgtattacaacaaaatatgtatcattttcatcaattttattttgatttggaaacaaagtttggtatctataattgcttttctgaattttggtgctcgataaatggaaaagtcaatttcatgcatataacaatttaatttgtattttgattccttcccaaaactagtgttttcttttgaggaaaacattgtcttggtttcttgcttgagagtttcattctggtttctgaactctaaattggtatttctgtataaaatagtgcttccttttatccaaaaatttgtacttgacacctatattttacttttttcaaatgtcagtgttcccttttttagttcttcgtgaaccttgttacgataatgcaagctatttgttcatgtaatgcttgtcatgcagctgctattttgctgcatgctttatgctttgaagattgctgggaaataaaaacatctattgaaggaaatcacagactagttcttaggcttagtactacctcacttggacacacatttttatttagcaagtgcagtttggtttgctctctgaatggaagtagtttggacaatacaacacaatcaaggtattcttatgcaatcttggacaacatttcaaccatgagcaatgtcaagatttgcacctgccttgggatccaactagagttgagctttgcatactctcttgctatcggcttgccaaacctttcatcttctacctttaaatcccaactactgcacttgaaggttatgcttcaatttcaattcaatccccactagcgcatttacattggtgaagtgtgtttgctaactgagcttcaccgcgggaatggcttgcggtgctccacatcgagtaaacaacaaagtagcgaatgaaaattgccacatgtatatctgtttactaacacatcatttatcacctgtgttttcctcatcatatgctcaaaggtcgagagattcctcgggaactaggggccaaaattttcaatgagttttgtctctaccggagctttagtcgatggaaggccttgatgttggagtggtcgaaatctggatgggcggattgaactcatgccaaacgtctaagtgattgattaaatttcacattagagttcacaatatcgggtcaacagaaaaatccatatttctagatagtagataataaggctacatggactaggcaatgcaagctctagcgcgtgtatctatgaaaggttcaccggttcgcgggtactctagagcgaggtgctttcccctcttgccaggaaggttgccattgtctgaatgatcggactttctagcacgctgaaatattagtgatgctccaatgccaaaatgggcaactgaacgtaccataccagatgacccattacaatgcggcgtgagatgttgaagctgcaattttctttgttcaacatctcacgccgtaaagcagtgaaacgatgtagcctgtgaaatgatgtgttttttgtagatgcccatgctattgctcgcgttgcccacgtgaaataatgcatgtagccttgttatatgctatttatgaaatatagattttgcctttctatcagcctggtattctgaactataatctgaaatttaatctatcgaatagcaacatagcatgagtgtgtcatgactcatgaggctagtgtttgactgaatttgtgctacatttatatggtggattcacttcgcgatttgtcctgttcatatagtgtagtcagttggtgactctaatggtgacttattatttactacataacgttgaccttatgcaatgtggatgcagctaacataaaggaaaagtaggtacggtggcatgaggttagtgtgacataatgtgctctacataaagttgactttatgcaatgtagatgcagctaacataaggaatgagtagatatggcggactctcttcggcatgagtagataggctgacagtgagatttttgtacacaatgttctgtgcatgaaacttactgattttgattgccaggttagtagttcttttgctgcatggggattgataagattatgaccattgtaattaagttttgtaaatgaataaatttaatatatattagaagtatcccccaaatcctattttttaaagtatccctatacatgtaacactgttggactctaagaatacttgcattttattttcaagtaaaacctgattatcaaggttataatatattttcaattaaaaacttgaggttaaatttggaactcaaatgtatgttcccacaaattaggggaaaatctccacatttgtctcctgaactatttgccttggtctgattgtggtccatcaactacaggtctctcaactctcaaaacggtcaacatttcatccctgcaatgacaaggataattaggtgtggcttcatgatcccaagatttcatcattccttcctcttgatcccaccattgtcctattctttgcaaccctacccttatgtctaagtgatcgattactctccatctccatcgctctctccaagtgtttcctggctcccccatgcgtgacagcgcaaaagttaatgcacttaatggtctggatctgggaggcaatgcttaggctgagctgtcatacagacacaaatcgatggcgaactcagtgttgcagccatggattggtttctttcttgcccccgatgtactcttgatggtgtattttatggttgtctctttctagaatttcttgatcgaactgtcactgcaacaatagctgtttttgtgggttgttggtatctatcccttttctcgttttcctgtagctttcctgatagatctgttttgtctgaattgaattgtttgggtaatagatctgtctaaatccaagtttctcagactttgcctcagatcataactggtatgccatatcaattctctcaaccaagcagtgtaatgtattcgactacaattctttagtaaacattagcaaattacattaattttatcttctgttgaaccaaacatcatcaaagtttgtttctcctttaaagttgcatcatattcctgaattgatgagagccaacttatagaaaattagtagttattccaaaagcattttttttgaagtctttgctatttaagcaagggatgttgcgtggccccaataccatgctttagctagtcaactgacaatgctagcatggaattagtatttaatacaggcctactcaagagatagcagtgggcatataatattttttaaaaaatattttgggattttgatacggaagtgtgattatcctctcactagcgttcgcttgggtgttgtcccttgtgttgcatgtaggatcgcttaaaatgccttaaaagaggccaagccatctcctggcaatgtaatccaattataacaaggatatcttatccccaacatgaacatggcatgtcatacgtcatcgatgcgattgcgtctagggtatatcactaacaagttgctgtcctagcccttcatgccttgcacaaggatgatggtcactttgcttggaagtggccagtgatccaatttcatcgctcattctgtcaaaaaaaaacacacgcacacacacacataggaccacattgtcctggatccttcttgaatatttggtaacttggaacatctcgtccagcactagctcaaaccaaatacttggacaagagctcatccctggaccaaaaactacccaaatcagtattagctttacatgcatgtctgaattctattagtatgcctattttcatatgagcttgttatgacataatatttgtgttgcatagtgaaatgatggtctgtttgattgcaagatatattggtggtaaactccactttcatgctcaaagacatagtgtttgcacgatgatgttgagtggcatgagtcactgaggaaacaatagtttaatcaccctgtactgtgctaggattgttcatttccattttacattaatgcatctgaatatgggctgaacttaaccagaaaatagcgcgactgtcatagcaaagatgtgtttatatcatcctctgagactcaatgtcatggctgatatatgatgctcctaaattatagcagttatggatttaatagatccaattagaaatatttttttcgaggggaatccaattagaaatattgcgtggatatgtatgatcttgatgatgcataattgaatatatgatgtttagtcttgatatgatttctgttttgagtatgtaaagaagttatgccaagtgttttttctagttggaaatgacagtagttttaatgcaatttgaggctctggttttctctcgtagaacattctgttcgttttggaagaatatatgagcaccatttgaagttctatctagcatgttaataatgggctttcctgtctgtgaatatggttggatgtgtttctgttttaaaatattataagtgctggattttatttgaataccacaaataaaatccatttagcatgttcacaatgcactttcctatctgaatatggttgtatgtgctcattgtttctattttaactattgtcaagtatatgttggattttgtttgaattcaatgaatgaaatcatttagcatgataatggactttcctttctgtgaatatagttggatgtgcttactgtttctattttaaccatcaatgagtaggtgctggattctatttga

SEQ ID NO: 1568 - DNA, 1119 bp, Oryza sativa
  Intron number 2 from transcript LOC_Os02g20700.1 (locus LO C_Os02g20700) derived from phytozome v7.0 (chr-ID Chr2; po s 12207033 to 12208151 reverse strand)
agagctcaaaacgtaatgcatttagttagtgcttgggatacctttcttgaatttttatcatttcctttgtcaataataaaatcaatgtaatataatattggagtaaaaaagaaaaacggatatagcattcccaaaagatcgatcggattacatattgcattcactttgtgatagtgctcttacctgatttacccacaatgcaactaccaacatgtatatgcaattgatgctctttgaccagttgaccatagttagagaatttatgcaactgcaaactaatttaaattcttctacacatgcatgtcaaattattcagagtcatttgcgcatggaaagacacaagtcataagataatattattataaataagtcgagaaaatgttaagctattacatttctttttaccagatgctactacataaatttgcatttaatagcatttaaccattcaaaagtcaacttcttttgacatgctttaatttggtgaactagcaaaggtaaaagagaagccacattatttagttcatctggggcaatatcattgcttgaagtccataaaactttttggggaactatttcttctggatagagtatgtcctattatgttccttaggatttttagtgtgtttcatctagttatgacttatcagaagacaaggtccaagaaaataattccagaaaaaattctcctaatggtggtgctagctccactgaataaaataaaagaaagaccagacggttcttatctaatttgaaacaaatttgaataataatcagtgttggatgtgcttgcagtcatagttgtcaattggaaccaaatattcgtcataaattttttatttaattaaggtataaaccagaagaatttgtggatcttagtttaaaaattagtgtttgtggcctcgtgggaactactggcaagtggaaaccattcaattacataaatgggatatccaacgacctttctggaagttattataaggctagtagaattgtgttacaatttgttcctcccatacaatatgccaactcatttctggtttatgcatatgttacattcaaaattctgacttctaaagtgctagtactaattattatattttctttagtcgtcagagt

SEQ ID NO: 1569 - DNA, 6160 bp, Oryza sativa
  Intron number 1 from transcript LOC_Os01g03549.1 (locus LO C_Os01g03549) derived from phytozome v7.0 (chr-ID Chr1; po s 1436580 to 1442739)
tgggtaagtacgtgaacagaattgcagaaatgatacagttcctggcacttggattttcttgtcttctctctttaatttgttttgattattatgtgacgcatatcgtgatggcaacctgagtttggtacgatacggttgttcattttattcatagctcagcccttgtttatttccaaactttttcttcaaacttctaacttttccgtcgcatcaaaacttttctacacacacaaatttctaatttttttatcacatcgtttcaatttcaaccaaactttcaattttagcgtgaactaaatacaccctcagtagtagtgaaaattctcagaaatgaaaacgttagctgaaaactggaaacagttcatgaaaaagtaggcaaaacctgaagatctactgcaggtagcttagtgcctgaaagtttaagtacagacagtaactgctgccaagtgccaactgagcagaagctcgtcatgcacttcgggcactctcgatcctactagtactagcaaactggagtagctatgcctatactacagtatggtcattgctaaaattctaggcttcgagcacttttaggacaaatggacattctattgtctagacagctcgaaaatgtttgaaagctacgtgtatttcttcagaaacaatttttttaaggatattgcactatatctttcagcagtagttgtactgtataacgtctctcaaaaacaagatatccagacctaatcaaatgatttttcttttaaagaaaggggctcacaagtcacaagaaacgcaagtattttaggacctggccaatccacaaatcacagggtcacgtaccactaactgcggttcacaagaactctgcaaatcttattcactcataagtcctcatgcataaaagtaagatcagcctcggattatgaaagcaacacaagcagctgatatttcttttagcactgttactgcctaaaatttcatcacgaagtcatctttagtacagtagtggtctattttgcttgaacggttacactcagagggcaataaaggtccgaagaaaattttttgcatcaacaaacaatccgtatttcaaagatgcagctgctaatagcctaccataacaagtacaaaaatatcgcatttcctttttagttcccccaaatttgatctgattagtgacagatgtttgcacaagaaaagtaggcctactctgtgctgtcatgcagtgtctttgcaaagtggagggggacctctgttactgttaaatccgatgtggaaatcctgtactaaactgagctaaatttcactccattcttttaaatcaggataagatgatgctgattctattctacaatcatgctacaattaaacatttcaatcttcagagggaccctccttttctacactagaacatcaggacttcctagaatttcttcagcatctagcttttcagaactttctgtctttcttttacacacacaattcttaactttatctgaaaaaacacacaactcttgtgatgaaatggatcgcattcacgggccacgactgaccgctcactcacgttggaagtcgtgacacaggtcagcccctgtctgtgtcgctcatggcccccaccttatcgtcagagatgaaaatggcagaccattgttcagagttcttcgatggaatcctttctactttctctgaattctcattcacgttaaactttaggaagactttctagcagcatgatgagtttgtgcctgtttcacttcttcacaatgtcagcatcctaatggccaaatcgcaatgcactaaccttcaattagaagctaacttgatatcttgagcacagcaaaaggtagttcagagttttgtaatccccttttctgctttctctgaatctccaagcaaatgctgtacggtataggtgtccaaacgggcggcgcggcccggcccggcacgggcacggttccggcacggcccgtttcggcacggcccgttaggcacggctgatgaaacgggccgtgccgtgccggcccacgtgccgagccgccggcccaagcacggcccgtggatggccgggccgtgcccgtgccggcacggcacacctgcggcccacgggccgttcggggcacggcggcccgtgaaggcaggccgccagcccgccagcctgcagtgcacagtgtttttttttaaaaaaaagcaaaggaaatgtataaggaaaaaaaattaaaaatggaaataaaatgtttaaaaaaaagtaatgatttactaatgttaaaaaatgaaaaaatggtatttaaaaaatggaaataaaagttttttaaaaaagtaatgatttgctaatgttaaaaaaaagaaaaaatggtattttttttgttgtgttgaaaaatttaaaaatatagattgtgattcattattttgaaataatttaaagataaatccacacttgcgaaaatattgcaaaagaatttgttaaaaatagtaatgacctttattgatgtttatatcattacaggatacaatgatacatgctgcctcgttaaaaactttgtcatgtaaaaactcataggggaaaatgagaaaaccatgacaaagaaaagagtacagctcaaaggtcagaactacttctaacaaaattctactggggttggtctggatccaggtagagttgctcgaactgagcagccaattcttggttgtccgcagtgtattgggcatgttgtcgagcaagctcccagtctttaacgcttagtagcatttcgacgtggtcgctgcgcagagtcgtcctccggtcttcgatgattcggccgcatagactgaaggccgattcggaggacaccgtcgacacgggcaccgtcgacacatcccgtgctagttttgaaagcacaggatatgttatcttgtggtcattccaccacccgaggacgttgaaatcttgtgcttcgtggtggatggcgtcgctgtccaaataaccggacaactcttcggccacaacatgcgaagaggcgtctccacttgtagccgacgaactgccaccaccttggattgaacttgaagacgatccaccccaaatcctaccccactgtatcttcttcttacctatagtggggataggagggggtctctgctggcgaacttcctgaaactttacttcatatcttccaaaaacctcatataatttacgtctaacctcagtataaaaagaactataatctacacctatagtatctccaacaagtgataaaatagcagacaatccccttaatttacacctaggatctaaaacaaaagcaagagcatacaacataggtatatttttccaatatttcaaatatttttgtttcatgtgaaagacaggttcagttagaacgtcatcattttcgtattctttaaataaagtagcaatttcaagaaggttgtgcaaaattatattagcagttggataataaacttgtgacaaagttagagtacaatcataaaaagtttctagaaattggtaaaatttttggacaattgcccaaacatgctcgttcagtactgaagacccgtcactgtttcttgggccaccacgtgactgaacaaaatcagaaagtaaactactataaggtaaaacaacttttaacattaaatacgttgcattccaccgatgctctgcatcggtggcaaacttacgagctttcacaccggccgcattgcaaaaacctcttccatgcagcaatccgcgggttagaagcagttaaccacgcgattgcttgacgaacagcatcgatgtggtcacctaccctcttcatgccagtcttaacaatcaaattaattatatgacatgcacaacgctgatggagtagaaaagattgagcatacacacaaaataaaggttgcaatatttcaatagccctagaattagcagatgcattatctagggtgacagcaaatattttatcagcaagattaaattcattaattacttccctaattctttcagctatgttttctcctgtatgtgagacatctattaacctaagccctaaaactctcttttgtaattgccaatcatcatcaacaaaatgaacaactacgctaagataatcctctctagctctactactccatatatctgaagtaacactaacagagaaagtacatgtactaaacagttccttaagtgcagttgcttccttgtgataaacattctctaaatctctagttgatgtttgcctactcacagctttaaacctagggttatgagattgctgaatgtaatgttcaaaagcaggggactccccaaagttcaggggtaaatcttgcctggcgattaaccggacaagagattcccgagcaaccatgggatcgtactcccaactgcgtaccgtaccgtctgggtttaccataagttgctgctgccggagttgtattccttgcttcttggcacacgactccgcatggcgcttgaggtgacctgtaccaccagaagaacgagcagataaaatttgcctacatattctacaacgggctttcgatacctcccttccgtcggggcatgtttcctttatctcgtcgaagctttgccacacaccggaggttctcgatctcttcgagccggtgtgtgtcgaaacacttccgctcgcggttccggaaaatccttccgaagctgtctccgcctgaaccggtacctcctcaacgacagccgtatgaaccggtacctcctccacagatggtggagttggagccgatccggaggtaccgtcaaaccccgacatgtagttggggtcgaaatcacccaaggtgaacgacggcgactggtatggaaagttcggatccattctgaaaatttaaaccgacataaacaaattttcgaatatttattgaattcacaaacacaatacaaataatacacaaatttgaatattacttacatctttccaaccgcgagctcttcaaacctctgcgatcaaactgttgaactacgaaactaattttgatttttgacaaaatttgagcaaattttgtcaaaatcaaaaaaaatgcacacttgagaacaaagagagcacttaaaacacttgagagcacaagatgaggagtgtgggatgaggagaaatggctggggttcatgccctatttatagggcgaaatttgagattttttggaattttttcgaaatttttatgaattttttagcctcccaacggttattttcaaatttgaacggtcaaatagccgttagtgccacgtggcgccttcccattcgaccgccgcccgccctgtccgcgcctgacgggccgccggcgtgccgtgccgtgccggcccgctacagtagccgtgccgtgccgtgccggcccgcgggctcggccagcggcccaagcacggcacggctactcgtgccgtgccggcacggcccgttactgtagcaggccgtgccgggccgtgcctgctacaggttcggccgtgccccgggccgcccgtttggcccggcccatttggccacctctactgtacggtaactctttagactttcctgcagcaatgcagaatgatgcgtttatatccgtctcacagtgccaacatcgtatattgctgtaatacactaatacattgacttcagattaggagttagtaataattgcgtaatgtaatttttttatggttaactgtgtaatgtactcctcagggagtccgggttgataatattagtcgttttggataagggtaaaattaaactttaaaatctttgactacaaataatttctaaaatattcatcttaaaaatatgaaaatcatatgtagattagtcttaaaaagtacttaaaatcatatatttgttaatatttctatatatattataatagaaaataattaatcactccgtttcacaatgtaaatcattttagcattttccacattcatgttgatgttaatgaatctaggatatatatgtctagattcattaacattaatatgaatgtaggaaatgctacaatgacttacattgtgaaacggaaaaagtatcaaaattactttttgaagaccgtacctttatccaaaacgataagtattatcaacccggaggaagtaattttgtaattttgtaaatgcaatagatagtagtgctagagaagtgaaattgttttttttgaaccattgtttttttttggcagaaattccaccgcgaccttccggcgacgcgagtctt

SEQ ID NO: 1570 - DNA, 6029 bp, Oryza sativa
  Intron number 1 from transcript LOC_Os01g10680.1 (locus LO C_Os01g10680) derived from phytozome v7.0 (chr-ID Chr1; po s 5700426 to 5706454 reverse strand)
tagaggagtgtacgcttcttctcccggcctctacggtgagtcctcctcttctctcgcttttttttttctgtttctcttgttgtttttcgattccttccccgtggttggctcgcttctctctctcgctcgtgttagttggaatccaaggcgcggttgatgatttgattggaccgtagctgatctgcggatgcttagtttttcgtcgggtttggtagagagaggctgcttcgatctcgcgttttttgactttgatcataaggtttacccaatttgaaaccgatggatttggttgcgtggatactatcaaactgcttcatggctcttagtttgtgccgatttatgatcgtcctggatgcaatggagtaattagtcgctgtgccccaataattattcagttccttcttcatgtgttttctctgttttttttgtgtgtgcatgaggtgacctcgtgtccttgtttggtttgaactttgaacacgcgaggacgattacccttgaaaataagtggtggagaaacaaaacttagatgcgtctctctgctggtgatcatctgccacttgttaattatttttctgcaaaataaaaaaaatcggttgctgacgatgaggtcggcgtagtaggctttgacaacgccccctgaattttttaaaccatcctgaatctgtggataacaccattgcataatctctgatagtgaattgaacctactattctacaagtgtatactaatgttaaacctgtcaagaaagtacttgtaagagtagtgagcccttgtgccttgataagggtgagcttcaggtttgcaaaaccgtgcaattaccgaacggctatcgtgggttataacttgtggtaactttttgaaatcacggtataccatacgataatctttaaaccgggagtgactaaacggtttggtaaacctgttgaacgctaattgtttgtgtttctaaacggtttggtaaacctgttgagcgctaattgtttgtgtttctcaagacggcattctactacctgcgtcctagtaacccctcaatccatcccaagatataaggattttgggtggacgtctagattcactgtcttagaatgagatgggattactcattctaggttataacattttgggcaacaggatagtattatgtcgagattcgatgtttaggatgagtaagatcgtaggttataacatttgggaaggaggaagtatggtataatacactatattacactgtttttttttcacggtatgaactggctatacagtattggtatatacagtattagtacacagcattcaaccatgtgtaactaaaacgtctgcaccttcataaatcagtagggcgtaaaagacgccatgggtttttaggtgcacgattgatctctgcatttatctcctggcgtagggtcttaccgtacatcgtacttagttgacttcagcagacacgaaaagaatggacgggggcccacctgccagtcgtggttcaccggttacggttaggttaccatcagaggataaacctgggcgtcccacttaacttttgatctcagcaactgatctagtagtattgaattgtactaccagtagtaattactgtgtggtaggattactagatgaacatgccattcgctcatattagtgatgggggcattagtatctgcgtattgttattacagtcctgggtacggggtgcctgggtactgctatgctggtgaatgttgttaattgttctgtctgttttctgtttccaaacaagtgatgtcaatggatttactatcaaaactttgaccaaacaataaaatttcataaactattcggtcaggaaaaattctactactaagttttagcaattggtgtcagattttgataacagatgaagtagtgctatgatcatgggtattttatacacatgttattggattctatcagccgtgtcgagactcgagagtggccaatacgttgtactcctcttactattttatattatatgtcattttgattcttttatgttttttttaaaatttgactaagtttatagaaaacaaaacatatttttcaacacaaaacaaacatatcataaaaatatatttaatgttagatgttgtgaaactaatagttaaacttgaataagattgacatgtgagaaagtcaaaatgacttataatataaaatgtaaggagtaactgacaatcacagtgatgaaaagaaatagtgctgtttttccaggttcagaaacgtccctgtatgactaatacactgtattagtattcagtattagcagcggtggctactattggttcgtcgaatctattcctctgcctgccaattgcagttaactaaatcactaaccggatgcggtttaataagttggtagcattgctgcatgtgcagcagtatcaatgtattcatagtaccgtagtacaatcaggggaagtgacaggaacattaggggtaagtggcggtatactaatcgctgcaaccaaccaacgtttagtgccagtaattagtactgttcgtgcaacgttgtgatgcgtaaagtggtgtgctagcttaatggaaggctgcactgctgccaatcctggcagtccaccaattgatagtactagtaatcaaatttctgtatggactaatccgtttctttcttgttccgtttttttctggttcttttgtttggtttcatttcatttgaggggaaaagaaacagcatggcctgcagtggttctgcagttgcacgtgagctctgatagtcttctggggaataacagttgcaattagtcatagtctagcgcatctttttgtactatactacctgtttgtgaatatttttttacatgggagtttcaccgaactccctgtttgtctcttgaatttgaaaagataaatcatctctgggagggttagttactgttcttcacttttggtgcgtttcaccaaacaagtggcagcaccatgattttttccaaaagacaaaaattttccggtaaagaagcacgtgatgtcacctaataccaccggtaggatgcagcaccttgtcgacagaaaaagatgtttttgagttcaacttaagtggcatgaatcattgcaaataaagctgagaggggtaggatgttttagtgctacagcacaatagtagcaagcaatgtgctgttaatcgccgtccattccttttcgtttttagtaggagatgagttgcaagtagccatcaggaatgtgtcgctcgacatgcgcattgcacctttctttgcttccactatactctcatctcgtgataattgagccgtggaaaactgtagcaacagatttgttcagctgcacgaggacatttgagttatccttggtgtccgggcttaatctaggttaagatgatgctagcatataggacatgtcgggtttgattagtttatgagcatcggaacatcggagcaaataaactaacccaacctatgaattggctgagttgcttgaatttcattaaggctgtgtttagtctacaccaaaattgaaagtttggttaaaattggaacgatgtgacggaaaagttggaagtttatgtgtgtagaaaagttttgatatggtggaaaagttagaagtttaaagaaaaaatttgcaactaaacacgacctaaaaaagattttgcatgacctcatccactcaggtctgtctttggttggaagttcaaatgcaaaaacgattttggatcctatttggttttaaaatggggatcaggtgtacacaaaacacacatattttagcaccatatactagtagttttgttattttattttatatacccccctgattatgactgacctaaccaatctccaattgaatctagcataaccggagaagttccaaacattgctattgctatcaacaaaaagccattgcctttattaggttcctgccatgtgtgaaccccggaagccagcagcggctagtcatctgtccttacccttgtttcgcatatcaccagcattacttagatttaataaaattagattcagatcagattgccggcctgctgctgctgctgctgctgctgagttgttgactgcatcatgttcatagcacagctccaccactgttggaacacacacgtcacgtaattacttcccatggagcctggaatcctcggtgaaagcgattttgatcagcatgtgataaggtgcaattaatccctgtaattttctgcttagtaatcgattcggtttgtggcctacgtgcaatgacagcgatcatttgggggaggaggggagagagatgtttgtgttgcaagtgttgccacatgttgggtgaaaacggcgaccctccaaacgccggaaaatacagaaggttttgaatcatttggatggaatttttcatcatcaaggtttcttgtagtgtgctggagtacttgctgtttgggtggtagtgaaggatttgttgcgttgctcacaagcttcaaatgcttgcctttgttttggcacgtgtggctctgtgctggtttgtgtgaaacttcccaggatgtcgaagttagagcttaccgtgttttgcctatttttggacataggagtatggcacaatcatttatctattcttttatactcttcctttttcatttttcctctgttcttttttttaattaaagaaattttaaggagatggcagcttttcctatgctttttatggttaggtttagcgtgtgttataggatatgacgatctatatttcgttggatagggtgatctaattttttttgtttggtttatatagatatggcgatccaattttttgttttgttagagggatatagcatgtatgggaaaaaaccaaaagttagtgggacccatatatatatatatatcaaaatttaatcatctgagatcttgttttaaagatttaattgtaacaaatataatgtgtaataaaatcataaattagataaaaggtttaggagaaaaaaatcggttggagcttgcttaacagaaaatcaaacaaccacagccaattaaaataggacacatcacccagaccaaaactaatgacttcatccagccaaatcgaccagatgcacttatccagcatattgagagaatattccttattccggaccgcctcatctaccctgcccttcaaccaaacacaaaaaaaaatcgggcggccatcttccatcaggctcatccacccaacctagcaaatgggatatgggagctgggattggaaaagggaaatgaataaatggctaggattaaatgaggtgggaagaatggatggttagatgcaatattactctttggagggtaggatattatttcccaatcctcaaacaaagcctcagttggcacaaataaatgcttgtttagacacagctcgaattctttgcaatgcttactagaattggaaattgctcaaaattgcagctctagatacagcgtgcattcggtcaaatttcaaatagagagctgaagtgaggtcccattggctttgaatacttactatttatatttgaatttagaaaattgctattaaagcattaaagcattaattatttgcagtatgtttgtagtactactcatcagggcaccgtatcacatcatagtaattgcattatactcttaattaattcagacctgaatcttctccaaaaatgcccatttctatatgcatcaagcacgtgttaaaaaagagcacccaaaaagaaaatagagtgcaaaatatagttagctgtaaaaattaatgaattagcatagtgcccctctaaattctcccaaattatagaacccacccctcagcagtcaccacctcatcgatagcacaaccacacatgcacagtgtcacagtggtcacatcacccacccctatacccccctgcacgccccccatcttttttactttacagtatcccccaaatattcccgcaaaaattaaacccactcctccccattcccccgcaggcagaggtagtagtagtactagcccaagaagaggaagagcaagacgaagctggaggtggaatcctcccgccggcgacgagaggccgctctagatcgac

SEQ ID NO: 1571 - DNA, 436 bp, Oryza sativa
  Intron number 5 from transcript LOC_Os05g06630.1 (locus LO C_Os05g06630) derived from phytozome v7.0 (chr-ID Chr5; po s 3426778 to 3427213)
tggaagcaattcaggtatatactatttttccatcagtattaaaatatactacagattgaatcaaaatcgagcaatttctatgtggcacgtaaacccactaatcacgatatattcttattaattgaatgtttatggataaatcttttatatctatgttattagcgattttaaaagccaatgctgaaaaaactacgaaaaaacacctaaaatcaacttaaaattaagttttaaaattcaatttgctaaataataaacatggcctacaaagtggttggtgcgccaacatgcacgctcattttctcctaatagactaagtcaatcttatctgtagcgctcattttctactatagactaaatccatcatatctgtacgctcattgtctactaattgactgaatccatcttatttgtagctgtgttgcccgccctgtgtttg

SEQ ID NO: 1572 - DNA, 16359 bp, Oryza sativa
  Intron number 1 from transcript LOC_Os11g20239.1 (locus LO C_Os11g20239) derived from phytozome v7.0 (chr-ID Chr11; p os 11682866 to 11699224 reverse strand)
tgacaccgcaagtcaaagccatcccccgaaatcaggttggatctcatctcatctcaccaattgctccgtagcaatcttgtggaatcctagttgtatttatggggttgatttcatccgttcttgagtccaaatcgaatccgctatgtctttcgtgttgaacttggtatccgcccttctgtttttgtttttgtttttgatttggattgtgatggtttgagattttggagagaatgtgggattctatttgtgtgatatggaattccgactaggatttggggggcggggtgtgacgggacgaaaaatcaccgcatgcacgaggtgacgaccggaaaaatccaaatatttatattagttatagatatagtgaatctattctacaccctcctcccatgggtcaaacccacctcccccaccctccctagggcccaaaacccccctcccacctcggtcaaagtgtcctcccgccggtcaaacccgcccaccactccctcccccgtccactactttgctgctctcgtcttgcaggaatcgtgcagtaacaggacggtcatcgtgcagtaccaagacaacattatcgcagtaacaacgtcaaaaagtagccatgatggatcttgtttcgttaagcgtttttttatgaacatggtgcaaacgtattggaaatacaaggtatgatgtgagagatattgctctctaaagattgagatttacctctttttagtcctcgtcttactgaaacagcgtagtaacgtgacagccagtgtatagtaccacaactgctttccgcagtaacgacgttaaaaaatagttatgatggttctagtttcgtttagaactttttttacgaacgccatgatgcaaacggattaaaaaagtaagacatgacgtgtacgttactattacgcaaccctcctgctacacgaagtagtccaagagggtcccgtaattctacaaaaagtggagacacaagatatgagggtgtggcatcctttctcattcatccattgcattctcaagtgtacaatcctcctctatactcctctatttatagccattcccttttccaccttccatgtttagtgatgggcccaattagtgggtaaccgggccgggccttcgtgggctggcggtttcttaacactcccccttgggctctcactgcgtgatgcctatgcctcatcaaaactccataaaaacccagtgggaaaaatttggagaaagagtacatagcatacgcttgcaatgtcgcatgaattgcctcgttaaaaaccttgataagaaactgctaggaaaacttatccaagggaaaaagagtacaatccacccaattctctgttcaatctttctagattgattttgggtacttgattttttatatcaagattatagaatgagtcagcgaaattctccccctgaattttgcatttatctaagtctcattattccgatttctcggacagacctattcaagagaagatgtcaataatgagttagtggacaaatctgcaagacttccatatgacttagttcgtagctcctatgtaattcatgcacatagaaaagcttggggttcatgtgcttagtgagtatgcttctcacgtaactcatttgcatatgtgcgacatatgttgcttaagtttcataaatggtggggttgagatagtttccaaatcgcgattgctgtcgcgggtaaccatatctcaaaaccatgccgaggctctgaatagttcaacgatgtttagttcggtttagttcaattagccaagtttttgtgtgctgctatggcacacttgtgtttgggaattccgtcccattttggcgataattgactaaccaaagctatgcaccatgaacatttctaagtgcggttggactgatgtagtagacttccatctatcgcttgcttttagctgcaagtgtgagcatgatttgggttcagccaaatatttcaaaattaaactcaaattcaaaacgaacgagtttgcttcttcgattcttttctgctttattctttctatgttggttcggaacctagtacttcttcatgtactattatgcaagtgttcgatccaagctcctgaaatacattcattgattctatcttcaatgcttatcaatatttaggttgagttctagtaacatcctcaaattttaaactaaaatttgactgcatcatgctggttttaatcttagattagtaaaatcaaaatttctttttaaaagttctctttttattcttgattttggttcaagtattacccctagaattcccttaacctagtttaccaataaaccataaattgttaccctatcctaaaccttagtgaatttagcaaattttcttcaagttccaaaacttagaaactttctctagattacccttctattagtgagacattgttatagtgcataatctttgcaaaactcttccaaagatctctagataaattctttctccttaggcaaaatattcaaaattcctttgggccgaaaatcttcaacttagccccttcccttggcccagccggcccaagaggcagccgcctcttttctcttctttgtgggcgcgtgtgacgtcacacacgcggcccagccgtcgttgccgtgcgccacaggagcgcaccacccacggcttgcgccgccacttttgtcgtgccgtgttcttctgcacgccgccgccaactcgcttccgtcgccgctaagaaaggagagccggcgccgtaatcctcctctccacgccactgccaccgtgctccccttctctctcctccaaaccgacatgcctagccaatcaccgaatgaagccggcgccgctttcttccgctccactccaccggcgccgtgtttcccttctccctcctttgcgaaccgacctcctccgcctataaatagtcggcatgctcgccatccctccccacaactaagctcttcgagcttttctctctctccaccatggccggctaccaccaagtcaccggccgatctccctcaccgttgccccgtcggccaagcccttgctccatcacgtttgcctcgacgaggagaacccatttcaccccattcccccatcccttccaccttgagttaagctaccaccgccagctcccaatcggctgagccaagctcttgccgccggcgttccggtctcctccctctccctctccgcaagaaaccgccctccccaggtgcgtggtgctcgggaacaccacccaccgccggcgtcaccaccttccggtcgccggaaagccgtcgccctctctccctctctctttgtgttgacacgggaaaaagaaacagaagaaaggaaggaaggaagaaggagaaaagaagaaaaagataaaatactgacgggtgggcccctgttccgtaataacctttctaatttctccatttaattcaaaatccaaactttagaagcccatatcttttaaaatataaacccaattccagtgaaacttggaccaaaattcttctaaaatctttctctatcttttgagcccctttttgctatttttgcattttattttattttctctatttttcctatttttggattttattcgaattccttttgaatttgaattttacatgcttaaccctaggtctttaggagtctcctaacctattagataatctcaatcaatctcaggacatcaagcaaggcaagttactatctaccttttgatcatttaagcctatattttacaaattatttatttatagccttctattcaatactctattttatatgcataattcaaccatagaaacccagataatttagtattgcttatcttgcttacaatctggttaaaatattttatacttagattgggacagtacgttagaattggatgatttccgggtggctagtactgtctcgatcgatatagtttttaccaggtacttatgtcgaacgaacgggtacgaccgcagtctctagaatggggacagacctagttattatgttaattagcaatgtggtacctctgtatagtggttcttatttttaagtcctcgcgtaggaggcaactatagctgcgaagggcaacttttaaccgttaccatgtacaggtaaatggtttgtgatactcgagtataaattatatggtatatttctaaaccctgatcgatatgacgtggtgtcatacgatcagttccccttaaatacctcgggaacgccagaaatcctcttgctgctgttaacattacgttcagagcatatgaggatataagttcatggaacaggtgccacaattgttaataacctaatactgggccatggctaaagctgatgattatcagcaagtcgtggactgcgggtaaagcgtacatctgctgcagtagaatatcattgaaactattcgaatagccgtgctcacggatttgagtaccgggactcatatggtaccctggttagaaacctaaagtatatatttttacaaactcttgctttaatatttccagattgtctattattgctttctgcaaagaactccactccatgccaacgcataacatatttccatggtaacttgctgagtattgtgaatactcaccctgctcttattaaccctttttcagatttgggtcaagaggacccctatgattattattatgatgactttgataacttagaaaatccctagaggttatacctccctagtcagaatgtactagaacagccgctgtgtattattagcacctatgtttaattaggtgagtacctacccttgtaaaaaccctagtattgtaaactttaacgtatgcaatgaagaaccagttgtattacatgtatcaatatttactgatccagggattgatacattaatctcagtcggatccaagttattagttttgggacccgacaggactggtatcagagaatatgtttggactataggacaaaccctaaggattactaaccaatttaagtttgagtttacttcgaacttaatgctttaaggggggtagatttgacttgcgagcacacaatatatattccatttatgtatttcaggttaatggcataaaggcatgagcgagaacatattgagatggcaatttctatccataataatgattgcactgatcagctaatcaggttaatgacgaagctaaagataagtgaataaacagaattctattcccatgcttatcagaagggagattattgggaatatgatatgaccataaagatcaacccacctaaaggagaagatgatatatactatttccggacgcgtcataggcgagatacactataagctgctttatatgatgcatgtagggaggctttcctacgcctcaaccatatttatcaagacaagtttctgcattctcgctatttatttcatcctatgcaagaaccaggcgaagactattgcaccctccagaatatagatcgtcatcaacaaccagtgaaggcaaccatgtctatatggatgaaagctgctgatgacatgtatgaggaagtcctagaacacatggatatgtagtccaaacgtttggaagaagctgagcgatgagaagctgttcttaagcacatatatcatgtgctacaagaattatatgatgataaacaaaactctatacttaatatttgtgttgtgggcgcgtcattctgtcttcaccaagtccctgggatagatagtgatgatgatgatgatgaagtggggatgagccataagggccaaatcctcaaaatgatggtgagggagttctacaaggtttaccaccatcgccaccaccattatatcctatccattccgaggatgaagctgaagaaacgccctcagctatggacatcagtgagccaagtcaggagcttgaagtagcaaggggaacccggatgtttcatattaatgacctaaatgttcccccaatttggattgaaactccagaagaagaggaggatccagaagaacgagtgtttgagatgcaagaacatatttctatgtatgctgatgatcaaggagatgatgaagatccttactcatgctctgcccctaatactgctgcatcaacttctacacctcatgctgaatttttacatttcgcacctacatcattattcactaaccccgctgaaggtagtggtgagtaatttgatgattaggagttgtagatagagtgttaatagttagaggtcatataaataaataaacttgctagtatagtttagcaaatgaccatactcctctctaacccctatgtgaaattatcccttccttggtttcttttgctttctctcttgtttcttcttttgcttttggttattacttttgtggtatgcatcatttacgatacactgtccagaaataaaatctatggttaattaaggatgttaactcccctttgaaaagacagcaactatccttttctagaggaattcagtcaatggcagttcaggttaaggtgagacaggagatatccctctaccaaatcctgccaccttagtagaattaatggaagacaaacccaactattacaggctatagttcaaaatcaagaaaataaaggctacagtgcccattctgaattcatgagagttaaaacaccaatcttttccaaaacagaagaacctatggacgccgaggactggctaagggctatcgaaaagaaattagccttagtcagaataaatgagcaagagaaaataacttttgcaacccatcagctagaaggaccagccaatatatggtgggaagcatatcaagtctttatagaagaccctacccatattattacatgggcagaatttactacagcctttagaaaaaccttcatacccactgcagtaattagaatgaagaagaatgaatttcgaagactgagacaaggttttatgtcaatacaagaatatctaaacaaatttacacaacatgctcgatatgctgcctcggacatttaagatgaaacagaaaagattgaaaggtttatagaaggattatgctatgagctacgaggactgatgatcggctaaaatcatgaaatttttcaaagcttagtcaataaagtggtcaggctagagaatgaccgcaagataatgaaaggacctcgtaagcgaggaatgaatcttcaacgacaatcaccaactaaaaatccgcaacagattcggaagccctatccttttaagccatctctacttaatacaaggccgggtatgccaccaataatccaaataccatgtattagtatggaagattccccatgctatgtttgtgggaagactggacatttcgctaggcaatgccccaatcgccaaaacacagtgcccagacttccaatcaaaaaccacctatctcaggctttataaagaaaaatcctccaatcattaaaggcggaccaaattttgaacatggttaggtacaccatatcaaagcagaagaagctcagcaggaccctaacatcttaatgggtatgcttaccataaactctaaaccagttactgtcctattcgattccgatgcttctcattcctttttatccacaaaagctagttggattcagtgtttacctatatatatatatatatatatatatatatatatatatatatatatatatatatatatatatatatatatatatatatatataccaaaggaagaagtgtcagtggtacaagagtatttggatgtatttcctgaagaactaagtgaattacccccagatcgggaaatagaattcatcatagagttacttcctggaacgacacctatatcaaaaagaccttataggatgccaattaatgaattagaagaattaaagaaacaaatagccaagttagaaacaaaaggttttattcgactaagttcttcaccttggggagctcccgtgctatttgtcaaaaagaaagatggaagcttaagaatatgtgttgactaccgagctttaaatgaagtaactattaagaacaaatatcccttgccaacgaacgacgatctatttgatcaattaaaaggagctagtgtattttctaaaatagatcttcgatcggggtatcatcaattgtagatcagacaagaagatatatcaaagactgcctttgtgacaaggtatggattataggagtttacagttatagcatttggactaacaaatgctctgacttattttatgaatctcatgaacaagatattgtggagtatttgaaccaatttgttgtcgtgtttattaacaacattcttatatattcctaaaatgaggaagaacataaacaacatctccgattggtactggagaagttaaagcaacgccaactttatgccaaattctgtaagtgtgaattttagctagatcaagttgcagtcttgggacatataattaccaagaatggagttgtcgtatatccagagaagattaaagatgtgatggaatggaaggtaccaacatcagtatctgaaataagaagttttctaagacttatagcatatgcggatatttggtacttcgtgcggccaattcaccaatcatcaaatacaatgctagcattgtcctcgcagacttctgaagatgatttagtgagttctattggagttcacatgatcttgctggatcagtcttggcaaagacatggtgtctaagagacactggatgtttgctgcttcggaagcgcatttatgcatacagtaccaaatggaagccacatatattcttcgtaatccaattcagggatgctagaacaatatgcggtttatgcattgatctcctgtcggtgcatactggcacacaaatcttcatgatttaggaaaattatgcatatatgtgctatgatcatacgagttgtaatatttattcttataattctaagaccgaaaatggctgaaaatccattgctaaaagggtgtagcccaaatcatcacactttttagagagttcaatgggattgacggacaatagatgcttctataaagtgcacaattgttccataggtaatatgattgtggcgcattctaggccgacaaattcagttgttggtgctagcaatagtcataatgtttccagttctatgggtctggaaatacctctttctcttaaaatgttatttgtggttatgcggaccacaattcattctttttctcttatgtttgggcgctacacaaaattcaaagcataataactatgtgctagaaaagagcaacaaaatagtaaatgctttaaatatgctattttatactggaaataattctttattgcagggaaaatgtgtgctctacttgggcaagaaccatttctttgatgcaatgctctattcaagaattgcaacaattgatgacgaagtatattgatttaacaaagtattctggtacatcggattcaattaacttcatagcgagctccttgctcaacagctatggcattctgacataaattttaggaccaatccaatctagcataggagattctacgtccatggccatgcaaataggctaggagttctccccctcaagtcatgatgagtgtgctattaggattgtcctctttttttcatgttcatagttctagattgttcaccttgacctatgttctactcccccttttcctcttcttccgttaaggtaactgcaccaggctagctgctcatgttgaattcgttatcaactgtgctagttggtttttttggaagataatgcttttctagtgaacactatcctgaacgtttcgcgattctattatcgactagttatgcatacttcttgtatgtgtactagtgatacttgcatgcgactttcgtcatgttcgggtagaacattaagagtttcagcggtattcaatgcaaatgcgatgcatcgtaataccatactctctctgggtcatttgcttggtgaatcatagtcgaaaaatacatgttcttgcttatagttcttgctctacgaaaggtaatgtatataccataatactctaaatgctaatgcgctcattcgtttagcgtactcattcgtgagagtagtttggaggcactggcgagagtttgaaatgctagatcaaactcatcgagtcaatgcctacagcgtgattggattaatggtaccatagagcttcttgctctattgtaatttcgacattgaataaatatgtcagaggtattcaagattcggcaaattttctaattcgcgatgcacgtcatttttctatatatgcgcaaaattagattcaggcaaaaatgcacaattgttgcaatataatggtacacaaaattcccgcaaataattccagtatattctatgcaattctatacattttatcgcagcgatattaattaaaagtaataaaaacatcacaaataattaataatcgtaaatgcgataattaaatttcataatcataaacatcagcaataaaggtactttaaatgcaaagtcggggtcgaaattcaatgtcccgtggctcttttacgcgagaatatgattttggtgatatttgcaaatttctaatgccattcaaacaaatatcccaaatgcagagggttattttcttgttttctggaaagttcagggtttaaaaggcaaagattccaatgcaggggaacatgcagttaatttccgaaaacaacaagggcatttttgcaaaatcacaggggaatctttccttttctttttctttttctttccttttctcctcctctttgcttttcttctctttccttactttctttcccccttcctccgccgatggcgccgcctgccatatgcggctgccgggcggcgccggcacggcggcccggcggccggcggcgaggcggccaagcggcgtggccgtgaggcggcaggcgcagcaggggagggcgcgggcggcaccggcacggcggcctggcggccggcggcgaggcggccaagtggccacggccgtgaggcggtaggcgcgccggccggcggtacggcgcgtggtggccagccggagcggcacacgacggcgcagcggaggggcgcgtggcggtgcggccaggcgagcaccgtgcggcggcgatgcggcggccacggcggcgtgcggccgggcagtgcaggcagcgcggcggctacgaaggcgtgcggccgggcggcgcaggtgcgacggcggcggccggtgctgcctcctgcccttctattcggtggcgcagaggccgggcgtcggcacggtcggcggcaacacggcagccggcgttgccatcgacggccttctctcccttctttttcgtttcattttttttttcttccccgttctctttcttcttcggggcatgcacgattccggccgtcctgcgggcggtgcggccgggcaggcgcggcatggtgcggcggccggataaggcttgcgcgggcgtggcggacagccaggctgctccggcacgcggcacagcggcgcggccctgcgcgggcgcggcgatgcgggtgagtgaggcggacgagacgagcggacggtggcgggacgcgcccgtgcggcggcaggcgcggcggccccgagcgtgggcggctctggctccggttcggccgagcaccagagcctctgctgacggtgaggtcgacggccggcggggcggtgctgtgcgcggcggcagacgacgcggcgagcggctgtcaggcggtgcggcacagcaagccgttggccggcgcggcgggatgggcagccggcgtgcgggcggcgctcggattgcatctctctctttttcttttgcttttcttcttctattcctcttcggtcatggcgcgtctgtggcagtggcacggcatcttgcagaatgcggccgatgcacggcgaggtgcggccatctcgctaccgttgtgcatggtgcaaccttgctatcacacaatgttggcgtgatgcatggctagttccgatgcgattcgtcaatcatgccggcgacttcttggcagcctcgaaaggactcgcaaccaatcggcaagatgccggcgacttcaagtcggcaatggtggtgttggacgaaaatcgcaaaaacggaacaagaacgaaaagaggaattcgttttcgcggtagatcggcgagatgcaatgcggatctgcgagttcttacccttcttctttctcggtctccggtagaacatcgtgctgataacgtattacgcaaccctactgctacacgaagtagtccaagagggtcccgtaattctacaaaaagtggagacacaagatatgagggtgtgttatcctttctcattcatccattgcattctcaagtgtacaatcctcctctctactcctttatttatagccattccctcttccaccttttcatgtttagtgatgggcccaattagtgggtaaccgggccgggtcttcgtgggccggcggtttcctaaccgttactactctctaaatattaagatttaaaatattttagctctaaaaaacattactactgtagtaccactgttactatgcatgttctttgttactacaaattttgccatgttgttactgccaaaagtgtagtaacaacctataaattttgcagtaacaacctactgattttgtagtaacgtatcatgttactacctttctgggataatgttactgctgactcatagtaacaatgtaattattacagtaacataactggttctcacataatctgaatagacatacaaagcatgcaaacaatgttttctattcacaaattgtcatatggtgatttggttaagaaagcttgccatgaaccatgagatcatgggttcaagtaatgaattcatcaatttatttttaatttttataaaaaaaagaaaataatagaaggaaaaatgagagatgggaaggagagaaaaaatcaggaggagcgatcgtggggaggaggaggagcgatcgggagggggaagggggagaatcgctgggagggggagaggaaggagctgggagggggagggaggaaggagcgatgggaggcaggaggcgggaggaggaggagcgatcgggagggggaagggggagaatcgctgggagggggagggaggaaggagcgatgggaggcgggaggaggagagagagataaggagggagtgaggggggaggggaggggggtgtagaatagttattctaagggagagtgtataatagaactatatatatatatatatatatatatatatatatatatatatatatatatatatatatatatatatatatatatatatatatatatatacatttaaaaaaataagagatgcttccgtcgtttgtcaaaaaaccggtgaaaataaaccgggcgaaaaaaccgtaactgttcgatagaaaaaagggcgaaaaaaaaatccgattccgtgaaaaaaatataatccgattccgtgccaaaaaaaagggcgaaaaaaaatctctatctctatctctacatctacttctatctcttctctatctctactaagaggtatttcggtcgtccgtaaaaaaaaccgggccaaaaaaccgagcgaaaaaaaccgggcgaaaaaaagtccgaccaaaaaacggagtgaaaaaaaaacgggagaaaaaaaatgtctgataaaaaaacggagctaaaaaaaaggcaaaaaaaaaacaattctgtccgaccaaaaaaataggaacggggcgaaaaaaacgagcgaagaaacctggcgaaaaaatagtctgatccaaaaaaaatcgaagcgaaaaagggagaaaaaaaatttccgatcaaaaaaaaacggggcaaaaaaaagcagaaaaaaacgaaacagtcagtaaaaaaagagcgaaaaaatttaaaaaattttccgattccaaagaaaaaggaattatatatgacacggtaaaaaaaatcgaccgagcgaaaaaaagccgagaaaaaaaactgggcgaaaaaaagtccgataaaaaaacggggcgaaaaaaaaacaaatatgtccgacccaaaaaaaggcaaaaaaaaggaagaaaaatcgaaacgaatccgactctgccgacgcggtaaaaaaagggcgaaaaaaatttaaaaaattgtccgattccaaagaaaaaggaattatatgtgacacggtaaaaaaaatcgaccgggcgaaaaaaaaagcgagcaaaaaaactgggcgaaaaaatgaaaaaaagtctgataaaaaaaacggggcgaaacaaaaaacaattatgtccgatccaaaaaaaaggcaaaaaagggaagaaaaatcgaaacgaatccgactccgtcgacgcggtaaaaaaagggcgaaaaaaattaaaaaaaagtctgattacaaagaaaaataaattatatgtgacgcggtaaaaaaaatcaaatcctattatgtctagaaaggtccgacactataataaagtggtgaaaaaaaccgttcgaaaaaaaatgcacgagaaaaaaaataaaaagggcggaaaaaagcacggcggaaaaaagtctaatttctattcatcgttttagtagtccgtttatatctcttctttatctctaatctaatctaatctaactatagaagtttctatggtatattaaaaaagaaaaaaaatgtgcgagaagattaaaacggttttaaaaaaacgcgtgaggaaaaaaatgccagaaaaaagcgcaaaagaaaacacgttagaataaaaagttccatagtcccaaaaaaaacacgcgagaaaaaaatatttccatcgtctgtaaaaaggaaaaaaaaaaagcatatgaggaaaaaaactgttagaaaaaaacgctaaattgatggatacttggtcggataggctccatccacttttttccatctcttacacgacttttatttgtcatctattctcctgtagtggagaccctgcacatttttgtaggcaattatcatactatttttgtgaagtatagctattattcttgataacatattatagctcttattcttgattacatattatatggaaataatcttagaaaataaacatattttaattgttatttagagaagagtgcacagtgactctattttgtgtagacttgaccatacgagacagtgtaggatttgattggttgtaagaatgagattaaaagaatattttagattatatgcatgttgttatataaataattcaattattttaggtaaagcaaacatcgtaaggttgccatcatcgaggttgggctattacatttaagatgttccaattttctgattgtcatcgacatggttatgaatgaaaaacgtgtatatatatatatatatatatatatatatatatatatggcaaaatctaaatcgcgtgcgctctctgttttgtcttatcgcgcgacacgctcatcggccgtccgatccaacaagcgctggtgcgtccgaacatggcctggtgattcatggacgtggcatcatctagagtaatccaaattggaagccatgtgatgctctacgctacgccggcttcaaaaataattttctcttaaactaatcatccgatctacgatccgattacaccgttgtgttcgtaagagttgaatctttataataagatctcacatgattatattttgatgaaaaattagaaattactttcataatatatctaaattacttttagatttcactaaattacttcttagatccataaagtaaattcaataaagcctaaaagtaatttacatatattaatatataagtaacttagaacaaaaagaaaataaccttatcatgacattaaagtaaatccgttatggaggtaaaaacatgagtttatatagaaattaaatttaatcagcataaattacatcattgactaaaaatgattataaaataaacaactcacaacatgaatgtacagatttcttttaatgccgtaacatgttactttactcacttttgttttaagttacttctataatataggtaaattacttccaggctttattaaattacttttatggctaagaagtaatttaatgaaatctaaaagtaatttagatatactataaaagtaatttctattttttcataaaaatatagtcatgtgagatcttgttataaagatttaattgttatgaacacaatagtgtaatcggatcgtaaatcggatggataatctaaaagaaaattccataagaagaagaaaaatacatgcacttttgagtatactagtagcaactggataagcgattgaggtagctggttatgaccatacagacaacggtctcgttgtagacacgtcctatatatatatatatatatatgtgtgtgtgtgtgtgtgtgtgtggttctatactcctagggagtaagtactccctctcccatccaccgttcatctgatcgatcagatatgtactccctccctcattataacgggtttggctcggtggatccgattagtttttctaattaaaagacggactgcttatcccgtaatttggggtttgctcccaacaggccgaactgcttatcccgaaaattggggttttggg

SEQ ID NO: 1573 - DNA, 2581 bp, Oryza sativa
  Intron number 1 from transcript LOC_Os10g01480.1 (locus LO C_Os10g01480) derived from phytozome v7.0 (chr-ID Chr10; p os 304022 to 306602 reverse strand)
agcttcctccagcccaagctgctctcgctcgccaggtaacttctttagttgtgatcccgcgtcaaatttggaatcttttctgtggctctcggaggaggcgtcttcgtcttgtggggggatttcatgacaataaaaagaaaaatggtctattctttttatttatttatttatttatttattctgaaccgaagagaagccctcctagtacgcttctttaaggcctaatggtgcttaatttcagtgcatcagatggcatgtgcatttgtgatggatccacggtcagattgtgttttagtattgtgaggcaagaacagggaagcgatttaattagagtctaacttgatttatcttatctgaaatgggaatgtaatcactgctgttggctgaatctgtaagtactgattaaattagtgagttagttattattatgttgtgggagtttagtggatagtgagagtggctcttatgcatgtgagacagatggtagctacaattggtctcagtattatcttactacttctggagggagggagggaaactgggaggttggcgtcttaattatatgtcctgtactaatcactagtctcagttacgtttctgttgtgttgttgactgcttgtgatagcttatctccttgtcaacttggaaatgttggcatttctttaatatgcgatccgtctatcctacggttggtatatgggattggaatattcttggggataaacacctctcaggtctttgaaacggcctgagggaaaaaaatcagatcattcaccaaagtataatttacttccgtgaatcagcttgacctgaatttaactatagtatgcacgtgttgacttgactatgcattgatacattctcttccagcatagaatccatgaaaatgataggttcctgttttgtagttgcaggcttgcagcataggaagtgtacttttttcctggttggtgaaccatgactctcttcagaaaaaaaaagagagattttattcttctagatttactggtagtctcctttgatattttataggaagcatttattcataaatattatcagatgatttatacataaatagtctcctttgccatttaaaaggttagatttcaaggaccctacaaaatgcctttttgtctgcaatagttttaaagcatcatattttgtttgttgaagacttgaagtgatcaagttttcaatgcttccaaaacacagtaaaaaattctggaatgaatttaaagtcaggtgttagctcaaagattaaagctgttgtcagtattatacacaagctcatgatgtgttgtaaagaaaatagagttcgctttaccacaacaattgatgacatccagatgtttttcccccctacctgtagcctcttgggaacaaaaatattagtggtgtttgggtaagatgtagcagtagagaagtagtgaggtgttctgacaagtgtatgcctttagttaggatggtatacttggctacatttgcgattgaatcaacagatcacatagtaaaatatcgatattccagaatataaaatcgatacactattttttattagatatactaaaatgcaaaatcaggggaattgccatgtggttccaagccaacaaactacaaagatgctacactagacaatatgctgatgccagtgataacatatacctgagtgctacattggcattataggatgttgttcagaacaatgggtaggggcgactacttctcaataaaactgtgttgatgctgtttatttaatcattttacagatatgttgtttctggggtatttattctgttcctccctttgcttaataacatcatctctcttagcttcttaaacaactggttgattaatgctactgtctaggaggaaggtttgagagtttatgttgctacataatttttccttggtattcaagttgtattcaatgtcttcccagaaagccaatattaaatagaggtagagtaaataaaactaacttttcatatttagctggagccgatgcgctctatgagcttctcatatggtcacttgctccggatggttagtctatttctgggtgatctggtcaacactttgtgtgtggcacgtttcttacttttgggagtgtggtttcttatatggtcctcttgattcctcctttgtaagttttctttcttcttactgaaatgaagcacaattctcctgtgtttctgagaagaattaccgtcaattcttcaattgtgtttcataagttgtcttagtttagtttaagcatttcctttatctggattatatcccgctgcccagggataacctgtgctcctttgtcaaaagtaaatcctttcatcaatagtaactacagtacgatccaatgcatttcttagctaacacaagaaaaagcttgaagctgcctgaaataatcacacctcattcctttgaaactattcctactattttcttatagactacaagcttacattgttatgaacagtacactgtgttcgcattaggttttttctttatgttaaatttttgcaagtttccttaaactgttaacccttttccttcaggaagaagagcattcattttgtatcaattg

SEQ ID NO: 1574 - DNA, 2582 bp, Oryza sativa
  Intron number 5 from transcript LOC_Os04g26834.1 (locus LO C_Os04g26834) derived from phytozome v7.0 (chr-ID Chr4; po s 15677310 to 15679891 reverse strand)
ccaaaagtcaaaacaacaccattggtgcccaatatgtatgtcaacgttgtaccaacacctcattattctgtttgctttttgctcatagtgaaatttcttaagctactttaaatataaatttttgactctatttgaacaattagttagcgaaacatggttttggagatttatcacagttcagtattagctattaagagacatattatatattttaggagattcatcacatcatgtttcaaaccctcaaaaggacatagaaatgtgatatttccctctgcatcattgcattatcttcttatcaaggacgcatggtccaaatctgatgcactatgtgaaacataattgtcctaattaaacgctctactttttgttcatccgtaactgcaatgtagcgtgagctgtccaattagttgaggttttctaaagtcaagcattcaaggttttttgagaaacgctcaggggtcttccggctagctccacaaggtggtgggctagacgacatgggttcgaagcctcaccccttctaattatttaatattaggtccttccctaatattcgcgtcttttttttgggtcaaatttaatccagtgaaattaccatctgccttgaactattgagttgagcacttagggaatgaaactattcggaatatacgaataacagcttcaggaagagataatcgttagaggaattttgtatgctagctgaatgcctgtgctttgctacgaatagaaaatatattataatattgtgaaataaatattttttttccatgaaacgtgttacccatcctcctatgctatagggaatattcacctcactttgttttttatgtggctatccatttatggttgtgttttaatattgagaaattcaagggggtaatttgtaaaatttacaatggaagtagatggatggcagattcactgccaccaccactatcttcttttaaggtagtatatagattacctagtacaaatacctcacactggctgtcagcacagtgtagataacaggaacattgcatgctttattttgaaaaaaagtccattttactccgtcaaactatttcgttgaatcacttaacctataaactattttttggctcatcttccccctaaacttttaaaaatgcttcactttactgcttaatagcatttcccttctttgtttctctttgtactacttatattttaagctgaaattttttagagccatagatggctgtattatcaaagttccaaaatatttttaaattcttttcaagactgtttgcttgaagttaaaatctcaacatttaaattagtcttacatgccttcaatctatgtaaacagtgataaagaaaatcgaaaaaatattcataggtactccttccattccaaaatcagaaattccaaattgattatcatataaccatggtcccttcgtttgacgtgtagtatcattgcatttatgcatgcaaattgagtttgcatgcatgcaggtaggagggtagtaaaggtcccgtttcttgtgtatggtggaagttaaagtgtgcatgtttcttgatttttttctcgtaccacagtcacattaaatgaaatataagaaagttaatacttccttggtcttgatgaaaaaaacttatttgataattaatatggaatagagggagtaagttgtaatgcatctaacaacactaccaaatttcagtgcaaaatacaactttgagaaacaaaaaagagatactattagggagtaaggtgaaccgttttcaatagttcggggtgtaaaatgagctgaaaaatagtttaggggggttaagtgctccagtgaaatagttcgggggagtaaaattgattcttttcttttattattgtcatccctttcttttgactctggctcaaattgccatttccttttggaactgatgaacataccaaataactgtaaatcttgacatagatatcttcgaccttagatgtattgggttcatattttgtataatctctcgtactcatatgctgttagcatgattttcatttttatctgtaaaacttgatgtggaaaatgttgtgattctggtttataatatctactgctacaaatgttgagaagaaaatgatacatggtatgctgtagatgttgaagggatggaatcatgtgaaatttgtcgttgatttatttatctttgccgcagattgaaggatactattttggaattgcttgtcacctaactattttagctagaatttgttacttgatgtttttatggtggaaagttggcttacctttgtagcatgcacatctcatgtgcagaataaatcaatgtgtggtgcagagatgtctttctgccagtatcctactctcttcttcatattttctcctggccagttcaacttaattctattgtctcatttatgaatctctaataacctctttccatggcagttactgatttttagggaatgtacacttttttggcagatagggtacatatgtacctgtgatatgtattgcatgtctgcaactggtttccttttgttccatttacaccattctaatacctatccatgattctactactcaggccacactaca

SEQ ID NO: 1575 - DNA, 1167 bp, Oryza sativa
  Intron number 2 from transcript LOC_Os11g01830.1 (locus LO C_Os11g01830) derived from phytozome v7.0 (chr-ID Chr11; p os 438871 to 440037)
cacgttgtatcatccaggaaagcacaagttaagtaaggatcagctctaaaagtctttgtagagttgattttttttttttttagattttgtacgtttggtgtacctactgatatcaaaattgctttgctttgtaggttaattttttaaataaataaatgattggttactgttgtactagcttaagttgggcttttttctaaatgattttatgactgtgcggttaaatgattttgatttgctatcctaggataggatgttccatacttggttcatatgtagacaaatccttatttgagaaggtgaaaaatataaaaaagaacgacattgaaacatacaagattctgttcatttctagtaatggaaatgggggtgtcatgcccttgataaaaaaaaatattgaaacatacaagcaaaagttgatgcaccactagtatggtctatttgtccaggctacttcaggtgttgataaactaaaaccttctcttttttttagggaagggtattttttacatggcctctacattcaaccggatatatgcagccatttaaattgggaagttatccccacaaacaatctaatttgaaattcactcatatgaagatttaaactcaggaccttggggtgctactcaggtcactgcaaccactaggctacatgcctttagcaaactaaaaccttctggcaatggttaaaacagagagtaggataagagtacgcaacggttggagtttgggactaaaaaaaaaatcttaccaaacgaaatgtatagttacatattcacatggaagttgaaattgattaagataaattgtgttcttggctacatttctggtacattctccagaagactcaggctaaattcgaaatcagccatgttgacgtacaagcttcggtcttgaattcttttacatattttagtaggatagaatttcaagtagcgtaaaggtatgtttaatatggttcttgttccaatggtatgttatactgtcagtaacgaaccagtttgtcacaaagcaaatgtatttggcaaatcttgcaactagcagctagtatatatgatattaatacaacttccactgaacaaacttcaaaggaatgtttgatctgatatcttagttggaataataataggtaccagaaactgttggaggcgtataagaatacaa

SEQ ID NO: 1576 - DNA, 4717 bp, Oryza sativa
  Intron number 1 from transcript LOC_Os07g35310.2 (locus LO C_Os07g35310) derived from phytozome v7.0 (chr-ID Chr7; po s 21134112 to 21138828 reverse strand)
accgcccgccgctgccgcggcggcggccggagaaggtgagtcaaagcatgcttcttttttttctttttgcttactctagattttgcacgtgcgtgatggctttcaaatgattgaaacattgtttagttcatccattggtgacaaaaatgattagcgaagtcccctgaagttggtttgatgtgattgatcttccgttgattaattcaactggtagttaaccttgtgagagtcgttaacgaacactgctagcattgtggagtactatacacatataggctgcgtttgtttcagggtgttcccaacccctgttcctcgttaatagactgctccatttttcgtgcggagtagatgggttcccaaccccatgtgtcgaacacagccataatcggtaggtgatctatctgtgttgtttatttgtgggggtggtgtatagggacagtgtcatttcattttcagtatgtcagcttcagtgtatctacaaaaaaataacaataaaattaaagaatggaattcgtaggccaagtgggattagagatgcagtgcaccaagtagataagatgtcacatttgttggcatttagcccttcacaatgttcctatcatcatacagcctgtggttttgttcttcagtcagcgcctgtaggtttgctccaatacagaggcacattctgaaggcaacacactgtattggctacggcattagcagttagaagcaatgtttgtttaaagagtaaatttcacaaaactatatgtgttttgcacaatctatctatctattatataataattatataattaaagtaatagaaaaaggagccttcacgttcgctctcacggcttaggaattctcacattaatcgaaagaaaataagagaaaaaaacaaaacaccaagtgtattaggattaggtcatgcaaacggacaagaaaaattaaaagttaaaatggacagaacaaatagaaaaaaaaacaaaggatattataatgatagtgtgtaaacagataatgattctttggaatccgtatgagagaatttctgcatgcccatatcacggtaattgacttatcccttttttaattgtacacaatacatgtcatctcaataaatacatgtcctagaaaaacataaataacaaaagtaatcgcatgattttctcgccgcaaattagcacatcagtaatctttttactacaatccacttcatcagcagattaacaaacataaatcttttcatgcaatccgcttcgtcaactagcagaccgaaaatatatataatttacaaataactaaaatttgatattaaaaataattaataaataaaacatatataaaataaaatatgaatattacacatcagtagtttcgtaaagttattgcaaaatttaaaattatgttgtcattttaatatatttaaataatataatgagaaaacatatatgctattatatgagagaaaatataatgatgctagccgcgcaatctgcgcgggccaccatgctagttaacttattaaaggaatagaaaaaggagcctccacgttcgctctcacggcatagaaattctcatattaatcggagaaaaagaaaaacaaagtccatatagaaatacaatttataaataactgaaattcggaattaaaaagtaaggaatattagaagtagagtatagagtccatatagaaatacaattatgaaataatagaaattcggaattaaaaataaggaatattagaagtagagtatagagtccatacagaaatacaattaggaaataatataaattcggaattaaaaataataaatattagaagtagagtatagagtccatataggaatttaaaactaactaaaattcggaataaacataataaaattaaaagtagagtttagagtccatataaaaatacaatttacaaataactaaaattcaaaattaaaaaaaaacatgggaagaagattctaaagtcaatatagggatataatttagaagtaactgaaattcgaaattaaaaattaaagaatattgaaagatgagtttagagtccacatagaaatgcaattagaaataacaaaaattcagaattaaaaataaaaaaatattggaagaagagcctagagtctacatagaaatacaatttacatataacgaaaattcagaatttaaaaaatattaagaataattaataactatacagaacaaatagaaaaaaaaacaaaggatattataatgatagtgtgtaaacagataatgattctttggaatccgtatgagagaatttctgcatgcccatatcacggtaattgacttatcccttttttaattgtacacaatacatgtcatctcaataaatacatgtcctagaaaaacataaataacaaaagtaatcgcatgattttctcgccgcaaattagcacatcagtaatctttttactacaatccacttcatcagcagattaacaaacataaatcttttcatgcaatccgcttcgtcaactagcagaccgaaaatatatataatttacaaataactaaaatttgatattaaaaataattaataactaaaacatatataaaataaaatatgaatattacacatcagtagtttcgtaaagttattgcaaaatttaaaattatgttgtcattttaatatatttgaataatataatgagaaaacatatatgctattatatgagagaaaatataatgatgctagccgcgcaatctgcgcgggccaccatgctagttaacttattaaaggaatagaaaaaggagcctccacgttcgctctcacggcatagaaattctcatattaatcggagaaaaagaaaaacaaagtccatatagaaatacaatttataaataactgaaattcggaattaaaaagtaaggaatattagaagtagagtatagagtccatatagaaatacaattatgaaataatagaaattcggaattaaaaataaggaatattagaagtagagtatagagtccatacagaaatacaattaggaaataatataaattcggaattaaaaataataaatattagaagtagagtatagagtccatataggaatttaaaactaactaaaattcggaataaacataataaaattaaaagtagagtttagagtccatataaaaatacaatttacaaataactaaaattcaaaattaaaaaaaaacatgggaagaagattctaaagtcaatatagggatataatttagaagtaactgaaattcgaaattaaaaattaaagaatattgaaagatgagtttagagtccacatagaaatgcaattagaaataacaaaaattcagaattaaaaataaaaaaatattggaagaagagcctagagtctacatagaaatacaatttacagataacgaaaattcagaatttaaaaaatattaagaataattaataactatcacgtatataaaatacaatatgaatattacacattagtagtttcgtaaagttagtacaaaatttaaaattatgttgtcattttaatatatttgaataatacattaagaaaacatatatgctattatatgagagaaaatataataatgctagccacgtaatctgcgcgagccaccatgctagtttatcataaaactaaatatttaagagcttgtttcacaaaactaaagatttagtgtctccgtttatcacaaaactacaagtactttgtacaatagatcacaaaactacagatttaagaatttgtttcataaaactatagatttagtgtattcgtttatcacagaactacacatttagtgtctttatttatcacaaaactacaaatttagtgttttaaaacctatagttttgtgataatggagacactaaacctgtagttttgtgataaatgaagatattaaatctgtagttttgtaaagcaagttcttaaatatgtagttttataatatattgtgtaaagtacatgtagttttgtgataaacgaagacattgaatctgtatttttgtgaaacaagttcttaatctgtagttttgtgataaatcgtgcaaagtatctgtagttttacgaaagagtgaattgcattggcggtacacgaatttgtcaggtgggtgcaatctagtgcatgaacttataaaatgctcatgttggtgcatgaacttgtctagtgcgtccggaggaaggcgaaaaggacattatatatatagctaatcttattgatttaggggctaattaggatattatgtaaacatatatctgagaaggttgctattagacatacacctcttcaataaaaaaaatagaatatgatatagtgatagtagaaaaagatgaaaaaaaccaagcaaatgatattttggtcctcgttcgcacgaaatagacaagtttgtgtactgaaatgaggattttacaagtttatgtaataaattgtacccacctaacaagtttgtgtaccaccaatacaatttactctttacgaaatttactcttgtttaaatgatcttgacagaataaaaaaatattttttccttcagttttctgaatatacatgacaagaatatggcaaatgagattgaaaatgactgaaaggcgatgttggtacttgcctattagcttctggcagctcttgcacgttgcttgcgtaatgctattgattatgtgtttagttgcaacttactcatttgatctgaaattagtctacatctgtcaattcacagggaaagattaca

SEQ ID NO: 1577 - DNA, 2942 bp, Oryza sativa
  Intron number 1 from transcript LOC_Os05g40190.1 (locus LO C_Os05g40190) derived from phytozome v7.0 (chr-ID Chr5; po s 23539433 to 23542374 reverse strand)
agccaaacttttcttgcccttttgctcttgcagaggtacgccccctctctgaacaatgtgttcatcgttgtatagcgaattgctgctgcatgatttgagagattggggaaaccggccggaaatgctatcttccttccgttcgtctctctcttttttttttaaaggatacgcaaaatgtgtatcttttgtattaagattaaaaaaaagttattacagagagaaaggaaagaataaaatgggggcggggaaacaatacattgatagctcgcggaacaatttgacgaccaaatgctccacctagatgggcgggtgctcctgtctcccttgagagcgtggccccccgatgccgctagcttcgctatttcctgtatggtcttgcattggccattaagggcccctttgatttggaggaaaaatataggaattttaggaaaatttcctatgaagccctttgaaacaaatgattgtatcctatccaatcctttgaaattcctatgtaatggacaatcctatagagattttggaggaaatttagcaagagcttcaacctcttgctaactttcctttgagtatatctctctcatccaattcctgtgtttttcctatgattcaatcaaacggtcattcctgtgtttttcctgcgttttgcaatcctctgttttacacttacattcctatcaaaatcctacgtttttcctattcctatgttttctcaatcctgcgattcaaaggggccctaaaaaccttattgtttcgctccttccatatcgtctatgtcaccaatcattatctttgctcatgtgagagatttgggaaaccagaaaagccatcttctcttttcccctctaatcttaataacattttagccgacccagtaaaaaatattgctctataaatttcgtaggttatttgtgattgggtgattggaccgtgatcctggcaaaattaatttacattcatggtgtgaattatttttatgggacatgatgtgaaatatggtctcttgatttacgtcacaaaacagtttgacggtttatttctactttttttagttcaaattatcaaatgagtattgaacatgtatttaaaattttaaatgctattgaaggtttacataaacattaaacgtctatacaaagttaaaagtgactgcatacatcgtttgctctatggctgataagctgtggggatgtgaatgaagcaactaaagataatttatgggtaaaaacttttgcatttgtgttcttcgcaattaaaagctagcgttcaaaaataaactacgatgaaaaaagcttcaaaatcaactctaaaattaagttttaaaacttaaattttggctacgactaataagtcaacaaacaaacaatggagctgacgtcaatagtattttaaccaaagggataatttcattcttacccctattttgatatccaatatcaattttgcccctattttttaatgtttttatttttgcccctgatttttggaaatgaagtagacgtttaccactatttttaacagaagttagtcaacctgggattatggagctgaagaagtagagaaaaaaaagaagtaatgatttttaattcgttgatggacctttatacccctggtgagccataaccaaacaatgccggtccttgccttccccaatcccacctatggtgacgagcagaaggccgcgcgtgtcgaggcaggccaggcgactgcggctcgacaaggggacgagaggacgatgggctcttgtccaggcggtggcggcttatcgtgaggagcttgcggcggcggcgtctcagctaggcatcggcggcttcatgcgggaaggcgacgacggcagtggcccggccaagcggtggcggctagcacgccaagcaacaggccgcgcgcagcgagcaggtctcaggggcgctgcaagctgatggcgagcaggccgggcgcggcggacggccggaggtgcacgctgcggcaagcagcaccaacctggcaataggaagaagcaacatgctactagattggatttttttgacctcatgatttggatttgcttgattttgtgatgattgctattacatgtcttttgttagctgtgtaaaaaccatgcccaaattctgtctttttttttcttttgcaaaatatacaaattttatcaaatttgtcgcaaaattatattatgtcaaaaattttaatcttctataaaaaattgtcatatttgcaaaagtttgtgaaaaatgcaatgtaaaaatgggggcaaatacacaattattgaataaacattcagacaaatattcaatatcaaataggggtatgattgtcttttcgccagagatgtaacaccgtcaatatgtccatccaaagtaggggtaaaatttgctttaatttcaaaaaagtaggggtaaaaacgaaaaccctaaaaaaacaggggtaaaatcaatattgaagatgaaagtaggggcaagaacgaaattgccccttaaccagatcactaccatgaacaggatcttgtcccatctagaaaaaaaaactctctccatctcataatataaagcatggtcaaacttggcacagtctttaaaactaatatttgacctataatttctcatatactataagttttttacaacaaaattataaccatcttaaagtgaatttaaatgccaatctaatgatattaattttagcaaataaaatttaatttatattatagtcaaatatttttaaagttgaatcttgaaatgtatgtataccttatattatgggatagaggaagtaggagcttatttacatgaatgtgactttctttttccatcaaaacatccaggttaatgttttgtgtgacctcttctttttcttggcttagcggcattgacaccagtactgaatattgttcccgattttttttttcatcagtggagcagaggacacttgcatcttgacgaattttc

SEQ ID NO: 1578 - DNA, 2734 bp, Oryza sativa
  Intron number 1 from transcript LOC_Os04g51830.1 (locus LO C_Os04g51830) derived from phytozome v7.0 (chr-ID Chr4; po s 30550310 to 30553043 reverse strand)
atgtgagtgctctctgtttctctctctgacctaagctctctcagggtctcagctcttcaacctagctagtactccatctgtctcataagttttcgcttttactatttgaccacttgtcttattcaaaaaattttgtaattatttttttttgacttactttattatctaaagtattttaagcataacttttcgttttttatatttgcacaaatttttttgaataaaacgagtggtcaaacagtgcaagcaaaaactcaaaatcccttatattataggacggaggaagtacttgtttccaagcttcctgcattgtacactataatattctagaaccatagtcttttattactactatcctagcccaaaaatataataacatagaattagactaaatacattttaatactacgaatctggataaagtagtatagatttgtactacttaaatatgtcctgtcctttctatgctgttatattgtggacaaagggagtagctagtaggtacgcaaaccatttacatcatcacattaaaatgggaactagttttaccatgcatgttaactttactctccggacctctagaacatatgttttccttttcattagttctcctaccaattttgacattgttagtagcatgttttgcgattaaatcacaaactataaatacatagaaatgtttcgttgcaacatgcatatatgtggaggtgagccatgcatgcgacccataacaatgacacaatgccaatacctttgtcccaaagtgtattaggttgtgttcgttaccggtggttgaaagcaaatttctcatacatgaaaaatggaacggtctaatagcacttggttaattcggtattagctttaaaaacttaaaaattagattaattaatatgctcttttaaagtatttttttataaaaaccatactatttaacaatttaagaaacgtgcgtgcgaaaaacgtaagagtgttgcaaagaacgcaaccttattgcattgccgagtgtagtggcacttggcatcgatgtccttgagtgtaaaatgtcaggatctctcaggtggaaactgcaaaaccacttgaattattgagtaaaatatcggatggtcatatcataatgacaaattaaattacaagtactaatagtgaacgagtgatgataggagatgtaacggccggtggcaagtgggttctcttctgcaatggaatcttcttcggttcttcccttctccgtacgtaatagtcacggacaaaagcacatcaaaacactataaactcgtcaataattcttcgtatcctaattaatttgctcatcggccacagcaagaggacacatgtttcttttctgtggtaggacagtcccaacccataacactagacatggtttccataaactctacatcatcaagaagtactagacactactcttccaatgcaaacaccactatttcatacttcaatttaatgctacttatctcacatgatgtcttggatgttgtgtagaaaccatgtctctctttcctcatttattcacttgcatattattttttgtcctaagtagcaacttatttaatgctatggacatcatcctaattattgggttgagaatggccttaggtaggtagatgcatgtgatggagagtagtttcaaacgtcaaaacactgtcccatttcccagttcgtgaccataggtaggagttgaccgtgcgttgaccctttctcctagatttttgacagatttttttttatttttgccaaagaagaaaaggatagctctcctcctagcttcacagaaaccacaacgcagcacaccacttcaacttgcaagaacaccacaatcaatttgctgaaaggtaggagtattaatattccaagtctccattcaaaagcctgcatgcatcacatgccacaccttctgtcaacctgagaatatgctctccgcgttctcagcaaatctggtcacctgggaggttgatgactattacttctaattttgttcatgtcaaaatgggaggcgcatagttgctagaatttgttccaatctttggttcttccagatgattatggctcaattttcacatgcaattccataaaattcgccatctttccccagttgatgcatggagtacaaaatagtggagcacagtagtcgtcattcgtcaacttttgcagcctggtttaggaactgggatgtgtgcctctgaaaatgacctgcatggctaaagcagggtgatatctcctgccgattgtcgtagcgcgtgcaaaggaatttcttcaccggccagcagttgttcccatattgttctctcaaggccatatgcttgtgaatccaagcttccagtcagttgagccattgttttcatcttattgtcgcatcatttacagagaatataaccaagcaccagaatgttcttgcacgtcacctgaaagatcaaaccttagacaagcagagctgcaactccttccctgaattatttctcaataatgatctgcttttgaacatccgaagatgataatccacccaagggtgactttctgatcgcatttcgttaagcagctgcatcgacatgcatgcattttcaatgcccaaaataagcaactaatcactgaaactttaattggaaagattgctgcaaattaactgatgtctgtttaaactcgtaccgtttgttgtctcatattctgcttcatcttgcctccaggtatctacctccgtacacgacgtggttcccatttg

SEQ ID NO: 1579 - DNA, 2181 bp, Oryza sativa
  Intron number 2 from transcript LOC_Os12g04424.1 (locus LO C_Os12g04424) derived from phytozome v7.0 (chr-ID Chr12; p os 1883929 to 1886109)
gtcgaacactcgtccgccgtcatcgagccacatatgtaagctttaatctatatatatctgtctcttgttgaatgaatgtttgttgatccagcgattcatcccatagtactgttctctcgatctgcatgcatttacttgcgtgtgatgctactcagatctaagtacagttgcaactcctctcagcaatgataattcttggcataatggcatgtgtacttaagtctattattcccctgtcctacagaaagtaaatcaatttatgtagcagagctgccgcatcattgatttgcaatggctttcggcacacttccattgcatatgattcatcttcgataagattgcacgatgctggtagctgaaatctcatagtaataatcaaattcactgaaaacaatagcacgatgctcaacccgcatccacccaaatactacactatccatcttctctgtcttcatggacggtcaccggccgtcgcctgtagctttctttccttttccaacacacctatggcagcttgattagctaaccaaccaagcgcaaagtatcttgatacctcatacatgtactgcatctctaacgacatgttatcttcatgggcacatggtagtcttacatttgcttttccaatctactgaaaactcacttatggcctcatcgaccttatgctgtttactgttaatggatatattcgggagctcttttaggaccatgccaacatattgggggagttctgaaatctgaactaggtagggtaagttcaaataagttatgttgagattggttcctttttatgcatttttttagtttcttctgaaaaaaaaatgttgttttaggtcaacaatggatcatgggatggttatggggcaccgaacttaaaatacactttaaaatgtcgatcttctttttttcaaagttcagagatagatgtccacttttcatacactatctgttctcttaaaagaacgtcttattcaatcgacgtacattacaaagtagtactagtagtcagcactatttaacactggatagagaagcatctttcatgaatagttgatgtacctaagattagcctgctgctcttcatgtaaaattgcagagaatgagtaataagaaactctaaaaaatgtgaaacatatttcaggtagtagttgcgagttgcaaccgtgagacaggaacacgcctgtcagcatggacacagtggcaactattggaccgtacactggtcttggatctttctttctctttcaccattaaaattttaatggttgtagatatggagatggcaatgcattaactatcctaccatgatcaataaatcaacacttaggaagttagatcggtctgcaggtagcataaaaccaacccatactctgcctagttgaggaacacttccatttgtgggtagctcaccaaaagcctagcttacttagctacgatgagcaccacggccaagttcttggcgctcgccgtcttcgcggcggcggcgatcctgtcgctggactcgcggagcgacgtgaggcagctggagataagggacggcgacgtcgagctgatccctctgctcgacggcgccgcggggccggagagcatagtgttcggcgacgccggcgaggggccgtacacgagcgtgtctgacgggagggtcctcaagtggctgccgccgccggagcgccggtgggtggagcactcctgctccgtgccggagctgtaagtcttttttcactttgggaaactattcagtattcacccgtgttgctagctgcctagtatagttctctgttgttctcatgatttggttagtagtagttggttggttagtttacgatccaggtccagggaccggacaaatacagttgcactgtccaaatccccaattaattgatgattaattgtgagcttaatatggcctgtgaggctgtgagttacatctgtacatatggaaaacgactgaaaagttcttggtataattcaacttcagagttcagatcatcaacaatgttattgttcagttcatttcattttcactactccttttgactatcatttatgctatggtccaaataatatttatagtatggcagattccgtcctgaattgttggaacggcatttatcgattgattggtcgttgacctgaactgctgcaggttggatagctgcagaggatccaaggacacgaaac

SEQ ID NO: 1580 - DNA, 1852 bp, Oryza sativa
  Intron number 2 from transcript LOC_Os10g33190.1 (locus LO C_Os10g33190) derived from phytozome v7.0 (chr-ID Chr10; p os 17320269 to 17322120 reverse strand)
tctagcatctcggtgagcatccttcagcctgtagaacatacatgtatgcacccaattaaccaatacatgattgtagaagcacatgcatcaccccccgaaaacatcctcctttcggactcgccgccggcgttactccgatgtccactgaccgagaaaagtagaggaatggaatcgcaataacatgatcttcattttgtattttggttgcacccccaaacgagccatcgtttgtcgccggtgagctcgagatcgagctcagccatggctgttctgcctctgtgcatgagaaaagaagtcagggaccttgtttcgagaatttaaacaactataaggattaatgtgcaacttttcaactcactgacatatgaggctaggtctgcgggttgattcttagaaacctcagggatctttttgtatattgatctttcactgacagtggaccccttggaaacaaaaatctgaaattataaaaggaaagtacctaaaacttgtaaaatccatataaaattaaatatagctcattttaagatgatacaaatttctgtcaactcaccaaattgtgaactttagtgttatggaataaaaacttgcactcacagtacaaatttagcctctaaaatttatccaagttaaatcacacataaagcatgcacaaatttataaaatgcatacaaaattcatttcaactcattttggagcaaactcagtttctacagatccaccaacttatgttctcctataaagcaaaatgaaatagtatacatactatacatcgaatgcctctaaaactattacctttaaaatgactagttttacataagctgaactttagaagtttatataaaattcatcttagatcctttttgagtaaacccaaattcagtagaatcatagggttgtgcacttcaatgttataaaataaaaagacatacttacagtataatgaaaacccctaagtatttaagtaagttataagcaacatggagcataccttaaattgtaacatttgtagaaaattcatctatagtctaaatgaagtgaaccaaattttctatagaaccagtaagtaatatacttcaacctagtagagtgaattatagcaccctcttacagaccatggctctgaaccttaatttggtagaataggtactaaacacatagtagtggttaaacaatacatatgaaaaagtatatatatgcttggtagctccaaataaatccaaataaaacttgttgaaccagtgaaggcatagatccatccccttccaccaaaacttagtatccttaactcatataataatctccagattgatatcttaagtttctaacatagaacatcccctagcttataaaatgtgaagtaaagtaatttgaacactaaaattttataaactaagattagattagttaactaaaatactcattttatacaacactagcaagttagagcaagttctggacctaaatctccaaagccatgtacacatagggactatatgcctagaacacgttaaaacttgtaaaatacataaataattcatattaactctaaaaattatgaaaccaaatgtgttagtcttagaaaacaaatatcttcaccccagaaaacataaacttaataagaatcaccttacaacagcatttcacaatagtaactaagtaaatcctacactataccgacgaaacttctaaaattcataactcccaaataaaatgagataaaatagaaattctttcacctaaattcattttataccagtacctgatctctgtgcacaaatcatgcattttagaacattttggatttttcgcatatttcggtgtttaattgcataacgtatactttgtatag

SEQ ID NO: 1581 - DNA, 662 bp, Oryza sativa
  Intron number 5 from transcript LOC_Os08g05510.2 (locus LO C_Os08g05510) derived from phytozome v7.0 (chr-ID Chr8; po s 2938078 to 2938739)
gttccttatcagagtgtcggagcatctaataggtaggctgcactggataaacacacctttctgcacttttaatgtaaacccaacaagtaacaactgcatatccaaaattatgttcttaaactgtttctatgcactattggtactgttccaaaaacgacggtacaattgtttccataatagtggtcccaagcaccaacacaaatattctgtggatttgggagttggtacttggtagttactattcatgttgaagcatatgtgcaaaaatgaaaattatgaaaagacaccgtaacttgtaatgtcaaagttatttggtgccctgagttccagcaatattagggaattagttttgatcagaacaactatcttgttggtaaccgcctgagaacatcatgttatattagattattagttgatgtactttacttggtagttgcctagttggtagtggtactgtattgattacaagtactgttgtttagggtgccaacgatcagtatgagagcctgagcatttgttccttgaactcattatgaaacacacagatttgttcattttctacattttaggagctacatttgtaatacaatgagccattactatctatacttatggattaattaaccttcattcctttccaggacggtttcttgagggcgccc

SEQ ID NO: 1582 - DNA, 3459 bp, Oryza sativa
  Intron number 6 from transcript LOC_Os10g09870.1 (locus LO C_Os10g09870) derived from phytozome v7.0 (chr-ID Chr10; p os 5358403 to 5361861 reverse strand)
caccagctcattcatcaaggtcgcgctcaacacaggtttgcaagcagaatgttttatcttctagtttgttgaatgataatggaacagcattcatcaatcaatgccttttgaacactcctacgtttggttcacaattcatatttatgcacaatctcttttgcctgctaatacctgagttgcaggtgtcctgctatcatagtttcgtagataagtgtcatgccgtagtactccaaactttctgtgcaactactccaactttgtgttaagttccatgagaaatagaagtttacattgttattgtggttgtatgtttgagatgattgtaatactcgaaaatagaatgaaccaaagatgttccataataacttgcttcaatcctaaactcttagcaagataatgtcacgaaagacgatatttaacagcaccttcaactatgtttgcgataaaggcattaaattaacaaaagtcaaaactaatcaaattaaagcaagataatgtcacgaaagacaatatttagcagttccttcaactatgtttgggataaaggcattaaattaacaaaagtcaaaactaatcaaattaaagcgagacaatatttaaattgctctgtatatttgtacaaacattatgtaatagaaaaaaacatccacgtgtggtatctaatagcaagacgtttaaggtgccgtatgaggttatagtgacccgttacaaggtgcatagggttgtagaaagaatgaccagccttcagttccacaaggttggcagccatccattgcatcactaaaagaacatagtgggggtcacaacagccaccaagacaaagcagcaagcctggtccaaaaaaaataaaaataaagacaaagcaacaagcgatcgaagaccataacaattaatttgtgatgactaaaccttccttgaactcccttatctatacattattatttatgtcacatcagcttgaatatgtacaattcaaaaacatagtaaatctttgcaataaagatgctacatatcaaaacattcaattaatgccccttaatctggaaaaaataatactaaggaataactcaagtaggtatttctatcttcaattttaatattaaattttaagcattgaaaggagatagatagagtgaacggttcaaaccgttgggtgaataccgtccaatttgcaaggtgggtgctacttattccgaagtattgttatactatttatgagtagtgcaagtagacaatcatattcaaaatagtttactagatgtagcacttaatgagattttgctacggtagtatttgatgaaaatatacttaaaaagcttcttcatgttatgtttggagatcgatactaacgaaaaccttaatgatgcactgtatatttattacaatgtcagtattctaaatagtatagtaaataatattacgaaatatcatttgagtatgaaaacaagaataagaccatgtaatacactagctccaaaatttgcatcagcataagtccttcatggattgggcatacatatgcatagacttatacttttattctcattttcgtgtaaaatagttaacccataggtattatatttaaatcagaccttcatccacctaaaattctaaggaggtattaaaccaccaattacaacatcttctagcatatatggacctcaacttcacctcttctataggctgctaacgggctagggagtcacatgctgaagattaaccaacctatggatatccaccacaggaacttctaaacttcatattgataagtgccaacacatttagttaaatttatcatagctgcaataaaatttgtcaatgattaatttggcactactataaatcatgataaaatcctcttgagtcattaaaggaaatagagaaattcaaagaataatcagttccgtattatctgaagatctcagttaaagttttattactctaagtttatatgtgtaaccaaggatccaattctttacctacaatcaaattttgaagtaccaagaccaactaactgtaccaagaccaactaactatttgtattgaacattttacgggaactttacatatagatataaagaaattttcagtcatcataaaagattttaacattgccctgttcgtttcctatgaaatttgaggataaacttttggattaaaatggcacgcttttcaaactgctaaacggtgcatttcgtacgaaaactttctatatgaaagttgttctaaaatatcagattaatccatttttcaagtttgtaataattaaaactcaattaatcacacgttattaccaccttgttttgcgtgaaacacttaatcttcatcttcaggagattcaaacaccagaaacaaagatatgcccgcgcaatcgcgtggattaccttcctagttatattaataatgtaagatcagcagactactaatgtagctgttagctcctctgaaggtcgtttgtgatgttgaaactaatatgtagttgttaccacactaataaccttcaagatcaacaataattaaaatatcagttcaagttggcatatctgtactctgttggacatgccacttaatttttagtttaatttgttggttgaaaatgctccaacttccaattcattaaatactttacacaaattgcataatgataggaaaattttacaaattgtaccagattggttcccaccaaggagcatgtactgtttttgagtaaaacatattgtattttgtttccaacttcctaatctgtagggtggtttctttcttccttcagaaaataatctgctcaacacaagatttaggtgggattagtgttgatcactcatcagcagtaatatatcttttcctatttattacacttccttatgtaagtttgagacacttaggactgacttgagcaaacacgaaaggcatgagatcatttagttaaaatatttaacaatgagaaatgaatgaggaaactgggaattaactgttagtttgatagtgtatagaaattgctgattgttttctggcagtacttctcgcttcgtagttatcttgtcaaatcgaaacatcagaaaatttccccagttttcctgtactcctgtgacattctgccccattgctgctatctttacttgcctagtaattatctgacaagtactgctagatcgcttgcccagaaattgttatgatattgtaaaaaggcttgtttcagttgaagacaaattgtagaaaatttatgattatcctatctgacatgtgaaaaaccttcgaagctaatggtaatatatgtcatagtggcattagtagccttaacacattctctaacagcatcctctgttatttctcacgtaggttttgtttgtcattaacacttgttattttttttttgtgttttcactaaagtttttcgtgttgaattcttcttttgatattgttatagcagcaatcgtatccacaaaaacagcagcaagcaca

SEQ ID NO: 1583 - DNA, 1784 bp, Oryza sativa
  Intron number 5 from transcript LOC_Os03g17130.1 (locus LO C_Os03g17130) derived from phytozome v7.0 (chr-ID Chr3; po s 9514708 to 9516491 reverse strand)
gactcagcttgcagaatcttgtcgcctcgagagtggtacacattttagatgatgcaaacacccctgagaaatcaagaagcattgcaggcagctgattgcgatgcaaaggttaaacaattggccggccataagccctccctaagagcaaggctagcaaagctttttgacggcggtaacatatgtccatgtcatctagagttgatgattgtagattgcttatacaaaggacaaactataagttggctttatataagcgtgaattggacttaattattatatgcacagatgaacaaaaccaagctctatatctatggtccaccgtgcttgagctgttgagcataaaactaacactgaaccggaggcccacaaaccatataaaatgtttaatatggcctaaattatcgtgctaccacccggcgcttcagcaagcactcgctctcttcgttttcatgttttctccctcctccacgtaatacaacgatgatgtggatgttgttatcaccgactgaagaagtgctattatacctgctctaacggtgtttggttcatcggtcatttttgtctatttacttaatcattatcttgagcttgaactgatcctgacatgttaaacaaaaccaatgagggatcgagcaatggtcaaccagattcagagttccagaccagcatcgtcctacctgacactcgttgccacgtggcagggagagggagagacaagagcctaatccaaaaaacatctctttttttcctctctcactgctgcaacgatcctgccacagccggtgcagcaagacgccagcaactgatcagtaaaatactaacagacagtaacgcagtttgcagtagtgcaaatctctctcagaaaaaaaaatactgatgtgattatcattattagaggttgtagtagtaataaagtgctagtactaatcagctactaatcatatctgcatgtaaaaagaagtcaaggcgaaacggccatgagaggccggagctgaacttatttaatttttgtgagaagtggcaggccctcctattaattgtggccaatcgatccgcccagttttcccgtgtgctcctctgaaatttctcggcatgcttgtgatctcttcccatctcatgtgtttgatttggcaaagcttggaggttataattagcagcagcctgagttaaaacggcagcatctgagaggagaggagagggaggccaagcaaacgacgcaattaagcgctctgcttacgccacacacgtagcagcagaggagtatttagcagccattgctatgccttctctgccgtagcgtcgacattgctcttgcgatctagtgcctgcctgtgcctgcatcctcccattgtaagaacttttgccggtttatgttctactttgtttgggccatctgcattgcaagagaattcagtagaaagacacgagcttggttgttcttgttcgtgtcaaacctgtgagcttgatagctgcttctgtttctttctgtgatttctggatcttgtggtgtattctgggattttaaagatgggcaggtcttagtttattggattgattgtgatgaattgtgtgtctctgaaaaataatacaaattcatccagaagagcttgactctgttctggttcttcttttaacttttgagcaatgggtcttctctgtttcttgtctactctaaactactattgattctttttcctcttaactgcaactgaacgttgtgaacttgtgatctttactgtaattctctaggtgttgaaacctgcaggcttctggtgctgagagca

SEQ ID NO: 1584 - DNA, 1714 bp, Oryza sativa
  Intron number 1 from transcript LOC_Os07g48860.1 (locus LO C_Os07g48860) derived from phytozome v7.0 (chr-ID Chr7; po s 29237842 to 29239555 reverse strand)
cagtgtaagacatgtttttctatagggaaattattgtttttttcgagacattcccttgtttatattatgtcacccaaataattattaatatcttttaaaaattgataagataaattaatatgtgatttattacttctacaaatatacaaattcaaatttgacttctgcacattataacaaaagaacaaattaaactataacacgggcattcaatttttgtttctttttttaaaaaaagtgcataagtcatttaaacttatatatttataaaacaatataaatcatattgatctatcttaaaataattatgattatttgagtgagcgaacattctttgtaggaacgaaaacccatctacttttggtaattgctatatctacaactaatagctgctactaagtgctcatcaccgaaaaataaaaatccaggctcaaccaaccgtgaagcaattaacacaagcatgtactcaattggtattagcacaatgttcacgactcctaatctattatattattaaaggaatagaaaaaggagccttcacgttcgctctcatggcctagaaattctcacattaatcgaagaaaaagaaaaaatagagtccatatagaaatacaatttagaaagagactagagtccatatagaaatacaatttagaaatagctaaaattcggaattaaaatataaggaatattagaagaggagactagagtctatctacaaatacaatttagaaatagttgaaattcgaaattaacaaataaggaatattagaagaggagactagagtccatatagaaatacaattaggaaatgactgaaattcaaaattaaaaataaggaatattagaagtagagtatagagtgcatatagaaatacaattaggaaataatagaaattcggaattaaaaaaaaggaatattagaaatagagtatagagtccatatagaaatacaattaagaaaaaaagaaattcggaattaaaaaaaggaatattagaagtagagtatagagtccatataggaatttaaaactaattaaaatttagaataaacataataaaattaaaagtagagtttagagtccgtataaaaatacaatttacaaataactaaaattcgaaattaagaaaaacatgggaagaagagtttaaagtcaatataggaatacaatttagaagtaactgaaatttgaaattaaaaattaaagaatattgaaagatgactttagagtccacatataaatacaattagaaataataaaaaaatcagaattaaaaaaagaaatattaaaagacgagtctagagtccatataggaatatatataatttacaaataactaaaatttgatattaaaaataattaataactaacacatatataaaatacaatatgaatattacacattagtagtttcgtaaagttattgtaaaatttaaaattatgttgtcattgtaatatattttaataatataatgagaaaacatatatgctattatataaaagaaaatataatgatgctagccgcacaatctgtgcgggtcgctatgctagttaagtaattaagatggggtcagagctaatcaacgtgattaatcaaagggtactgccagctcttgttccactgacaagatgacaaagattagacacgaaagtgcatgtccttcagggttaggatagtgaatagggttcctcctttattttcttttcagatt

SEQ ID NO: 1585 - DNA, 18301 bp, Oryza sativa
  Intron number 1 from transcript LOC_Os03g37411.1 (locus LO C_Os03g37411) derived from phytozome v7.0 (chr-ID Chr3; po s 20727150 to 20745450 reverse strand)
gtatccagatcttcgcctacggcctcgtatgtatcctttgccggcccatcgatcgacacctctctgctgtgtgcgtgtatgagaggttccgtagcttactttcctcctctgtctcatcgtcaacgacgtcgtctcaaccatttctaaccattacaattattaaaggtataaagcaacaacctcagatacaaatcaaaactcccatattcgcattagagagatttctacaggtaaagtcgacttttaaatatcgaactttgcaagaaattcatttttcaccctaattaaactataaaagtcagttgttgttgtttttaaaaccagacaaagagcatcctaaacaatattttacggtggttttgattgatatgtataaacttaaattatttaagtttcttggttgtggatcaaattaaaaaacatttacgtaagtaaaatttgcataataagagtatgaaccggaaaaccacttctatttcaaataaaacgaatatacaaggttgcgaagtgttatctgtcggtttaaaagttagagcagaaaaaacaagttttgtaggttaggaaaaaataaactcggagtcaagggcaaaatagacttgacccagtttttatgttttaatctaacttattaataagaggccatatggtgacagtaaaacatgtcgcatgtggtgtcccatatgaatagttatttcatacgatacgtaccttgttacatgatctttaacattatgactagaaaaatacccgtacgttgcaatgagtgaaggctatttagtcttattactattgttatatagtttagttagggtgaaaataattgtgggaattcccttggattttttttttagaaaatcatgagttgtaattaagagttcgatttttatctcaagttagcatgtgagttttttttaaaaaattttcaaaagcgttccaagttagcatgcgagtttctctaaaaagatttcttataagacgtctttttatttccaaaggcgaacgaacttaaaaacaaactcaaacacagatatatattttcaaaagcaaacgaacttaaaaaccgactcaaatacgaatgacttaccaaagtatcggcaaaaacatcttcaatttttataatagtagagatacgatgtttacatttttttttcgtgtgttgggtgcacaaaactctgattctgatatccgaaaaaccagacacagatacaggattttttaggtgggtattcataacataaattggaaaaaaatttagtggtgctagtaacaaacactactacataaacactttttttcatgtggtcaacacgtatttttgtaggcgggtgctctgcccgcctaccctaagtgtctacgcaaaccggaacttttttcattcgggcagtgcactcgcatgccaaaaatgatttttcgcggctgatcggttaagccgaccgtatgcgaaaagaaaaaaatcgctaaaaaaatataaattcctaagataaaaaagctagccagattcgccattatccggtcaccgcaccacgaaacccgtcaccaccatccaaaatccgctaggtccactcgggccagggccccgctgccgccaccatggtcgctgcaagcaaactatggtcgtagatgtcatcgccatcgccacttgatccaaagcagcatgggttgtggcctactgatccaccgccacccattgccgccactgttggatccgccccggctggatccacgtacggctgacagatccaatgtctcttgccacttctggatccacctcgggcaagcccgcgttcgacgaatctagtccgtcgtcatggtcaccctctgccccgcctctccccactccttcggcgacagtggcggatccgaagcttgtcagcttctttgctcccacacatgtgcctgccatctgttaggagagaagtcaaggaagagaagaaggagaggcggcgggacctgcgtagtctgaggctgagtttgccaccgcccgagcagaagaggtcggactagatccaggaggaagagagaggagcagaagtgggagatgacaggagaagtatgagaagtgggagaggagggagaaaaatgagtggagagagaggaggttgtggaaaaaaagagtggaaagagagaggagagaaaaagagcagggcacgaagggcatgcggtggagaaaaccctgtctacgaaaatgagttttcggaagtggggcttaatcaaatagcatccaaatcttttttgcatgtgggcgtttttttagtccacctataacaaaataagggggtgcaatcgcaaattttcttttttagtgaaagatattgaaagctacgttgaaaataaaaggaagagacgaaaatcagttgagaaacatgtccaacgttgggatcatgtactttagtgtgagagccaacagatcaaaacacatttaattattgagtgtactccattcactactgtatgaaaataatatttgggcattccctatttcctttggatatatagccatattgatcgttggttcgtccacccctccgaacaactgatgacctaccatgggactaacaataagatgaaaaatcgaaactacaggatccattgatgattggagtttggtattgatgtgattgtaaagtatagtgcatgcatgacgaggtcaagcagataggtcatttacaccgagacaaaagcattgtgtcaccaaaaccgactagatgtgcgtgtgttttcttgggatacggatgcatgaaaggaacttcaatcaaactatgactgcattaggtggatcagtggatgacaagttgccaattatatgctgaaaagccagtagcatatttggagacatctcatccaagtttagcaggagatcgatgcgttgttcgttgcaattagatttcactttataagtgaagctggtgtcagtacatgaattaatgcagaggctgcttgcaacaaaagaccatcacattgcaagttttttccaactcagtggatgtggaaaaaatagcactattcgatcacttaacaatttgcactactagctgctaatagctgcttcatgtgttcggggagaattctgaattcaaacaattacactcattcgtatggtctagtttaaattttaatattttgctcacattttgaattattgcacaattattggatattatgcgataccttgttagtattatcaataaaaatatacagaatatggctccttatctctctgtttgtcattcatatttttttctccttttgtctgactttccggttgctctatttgtttttatcttttctctttgttctttatctcttttctgccggaaagatatagaacaccctcttttgattggattggtgagattcatttctctgattttgtttgcttgttaatctaacagccattattatgatgtggctcattctcgtttaatgttaggattggcttttcaattgttatgattttcagacattttcttatggttttcggtttttttttcccggagcttcaacctttttgtagttttcctcctcttcctaatatgctttttttaattctaataatcattttttctccctttttccaacttttcatgggtactattttcttgacatattcccatattttatatttattttcatgaccacatgagttgtgagtaggccttgagcccggtgaggtgggtaacgagagctaaagagattggaataagtacattttgactcctttaactggtgacttaaatctgattcatatcactcaaccgcaaaaccagacatgacgactccccaaacaattaaaatgtctaaactgactccctcggcggttttggaggggggtttcgctgacatggcattcacgtgacagtccagtcatcaataaattaaaaaaataatgtggggctcacttgtcatgcgaacaatggtgagctctcacgcccgctcacttggtcgaggccgacctcgacgctattcgcctccacgccacgcacaagcacatgcgtcgcgcctcctgcctcgacgtggactccccacacgcctcgcttctcctccgcaaaggaagcctcccaccatgccaccctcctcccacccgactccacccactcccactcctagggctcgcccccctccccctcagccaccgctacaaatccctctccaaatccctccactctagcccagcctcattttcccctgccatctcctccgccatcaaggaggcactctggcgcgccaccaacgcgtatgccacgctcgccgagcaagccaccgcccccatcctgcgcaccttctagatgccctatgctggcagccgcctccttaatgaatttttgctgattctggcctacgtcgaattccacatcatgtgcccctcctaccgttgcaccttacatgcctctgaagtgtcccctccaccggaggctacggcagagatggaggcaaactcgccgccagctaagaagaaacccacctcaaggacacatcgccgcctcgactgcggtcagcacataatttgtgccctagccatggtcacgcccacgttctcacttctatatctcttctcccgtccgtcctccctcctcccgcgccacaccgtcggctcgccacccactgccacgccgcatccccgctcagccggccactccgccgctagcaccagcacggaaggggttgggatgggagtgagaggagagccccaccaacgcctccgccgcaccccgtcgtcatcacggcaccctgctccgctgtcctgctgcatttacattgataagaaaggggagagagtttggtatagagtagggatgacaagtgggtcccacttgttttattaatttatttgatgaccgggctgccatgtggacgccatgttagcgaaatcgccatccaaaaccgtcgaggaagtcagtttagacggttttaatagtttggggagtcatcatatttggttttgcggttgagagatacgaattagattcaactactagttaagggagtcatagtgaacttaatctaaagatatttcagcattttggggcctagaattcaagggctgaatgatacaacgtggcactttccgtgttacagcccaatacactgttgtaaggtttcgacgcctggacgaaaagccgagcaacaccaaaaagcacttgcgcccttgttttgtaccacctccatattttaatgtatggcgccgttgactttttgtccaacatttgaccatttgtcttattcaaaaaaagttatttaattatcatttattttattatgacttgattcgtcatcaaatgttctttaagcatgacataaatattttcatatttgtacaaaaattttgattaaaacgaatagtcaaacgttggtcaaaaagtcaacggcgtcatacattaaaatacggagggagtgttgtgatacgcataggctacgatagcataaatcaaaattttctatcgcgtaaaccaggaaccatgcaagtattagatcatagatcattaccactcgacgcgctgtgcagcggaagaagacacttagaagtcgaaggaactctcgcgaagtagcacgcgtcgatgtagaggaagtagtcgatcgcaccggctcgaccttctcctcctcgtgcgttctcctcgctgtactgccacgccgatcagcactgcaaaccagcggcgcctctaccggtatccacacgtacagggatggaacgccacgcgcagatgtgttagcacccgcgcgcggctagggttttgctcggggagggaagtgacggctagggtttctcacgtgatgcaatacctccgccggtcacacccctcacgaatatataggatccatcactcgggcctccaaggcccgtaggactcctattcagatcccgatccaaagtaagctcatattggatctccatccaatcgccttatttcggcccattaagcgtgcaaccctgtaggttcatatatactcggctgtaacccgaaaactccttttcggtccacgcgtcaatagcggcctctagcagaacgtattgacccaccgggcatacataaagatcatatcagatgaaccactagtttatacttgtatgaacccctttgcatcacgatatcgattaagctcaaggctagatatgtgccatcctctaatagctcaatcattcactcgaacctgttgatagattatataacttgtgattgactcctcaatcacctttggcatggccatgcacttccataatctacaacatcgaggatgtcaacgggggatacccgtagaccggatatagagggtattggggtacgctggtacgaggatctacgtaatacgacatcgagctagcaaaaaaagagattatactagttcaggacccttgataggtaatagccctaatccagttgatatgggattatacgatggaaaccacaaattacaaagggaatagtggaactcgacgataccgacgagatcgtagtcgagttgattcgactagatcacccggcgacttggctcctgtaggctccggcttcgtaggctgtggtggatgtgttggcggtaaggttttctgccttaggtcctcccggggggtcccttttataccgcaggtcagctagtctccaagtaggactcggagacatcagactcggtacaatacaatgacgacccagttctatccgagtaggactctttccatctgtagactccatgatggacttccttaacttatgctgagaacgttcgtatacgcgcaagcataccatatcgatatgtgacgtatatcgaagggtagagggtataccttacccccgtaaccctgacagtagcccccgacttttgcttaaatgaactcgtgagaccgatcgcgacttctgatgttgtcgtcgttctcgatgtgaagaccgagggagaaggagtgatcgacaatgtcgggtgaagctcaacggtcatgagtgaatttaaactgaagtccgaaaaactgtcgcgcgtaacggaccccaaaatttccggcggccatctctctcctttccttggaattcgcactgtcggaagtatgtctatttaagggagttttggggatcccatttgaagtctgcctgttgaaaactttctctagcttccaagcgtccctcgtcttcttcgctcccgcaaaaaaccctagctagctcatctctatcctttctccagcgatccccggcggtgatggatctcgacaagtcaacccccaccagtgcgtcactaaaggaactgcaggaggatggcgcccttcccggtcacgggaccgcggagagagaagtaggaggtactgaaccccagcctgtcctgggtcgcatagttgcgatcgaggactttattctctgtggttttcttcctccgccttctgaatttcttctcttggtctttaatttctatggtctttccttgctccatttgaaccccaattccatcgccttcctgagtatcttttcgcatctttgtgaggcctacattagggtagagccgtttcttgaccttttccgcttttactatgagttgcgctggatggaacccaaaaaggtgtccgggtgtgttggtttctgacttcgggatggcctgaagtcgcgatacatccccttccagtgcccctcatctcgcagcaaatggcgggggaggtggttctatcttcagatagaggattcggatccagtctttgttgttcctgaggagcaacaagacaagattccatcctggaccaccaaacccgccttgaccccatccctccaatctttcattgatatcattgatgacctccgagaacgggggttgtcggggtatgaagtcgctgctgacttcattggtaggcggatccagcagcttcaggctcgagcccatccagcctttgattattctgggccggaggacgcaacccgggtttctcctcggggtattttcctttttagttaaattgactcccttatacacgtgttcttcccgacttaacagattctggtctcgatctacaggcttggacatcgcaaccgtggagcgccgcgttggccaactgataatcagtggctcgacaacagcgagcaacgtccccgtccccctttgcgagaaaggggcagccgagcgcgatgctgccatcaatgtaagtgtactcagtggtcattttgcatttttcttccgggatcacattatgacttcatgaagcgtaggctctccctctgactgatatcatcgggccgcttgtggaccatcaggtggtggcgtcgctgaaggagaaagtcgcccaggaggcatctgacgctgctgctgccgctgccacaacgagcggcggcaacgttgcgaaaaaggggagaaattctcctctgtggtcagacatcgtcggaagaaacccaccccctcggtaagttctcctgttctttcattatgtagtcggaaaacttgcacctcacatcgcatcggttgtactccaggcctcggacgcgtctcccccgcctccacgacggcagcggctagtgaagcttggcgagaagtaagtggatgattttgagatcttgtcacttcgtcaaactgttgcagcctgtctcagttgcaacttttcgcagggcggcgcgggcgaaggcggagcaagacgggtctggagggacctccagcgcgtctcctgccgtggcctcgacggatgtcgtggtcgcgcccagaagctgcgaggcgacacctagcggcctagccagcgatcttgcagctggtcggggtccgccagctgccgttctcacctgggaggagctccaggtcgagatggggcgcctccccaaggctggtgctcgcggcattggtcgcgagattgcggaggcaagggcggcggcagcgtcgtcggcgaaaagcgcgccgaccggctggcgcgcgacttagcggaggttcgcgaggacctccagaagatgcgggagctggtggctggcaatgagtgacaacggcaggggctcgagcaccgtatgtcggagctcaagaaccacttgtcggagatccgcggctccctgcgagtcacctacaccggcctgcaccagctcgctggggagtgcggcgtcaaggccaccatcccggcgaaccccgatgagttcttgttgacgtcttcacttgcggaactggcggcggcgatggaggcgatcccctccaagcacgcggccagggtcggagaggagacgtccaacgggatctatatcggggcgtgccatgtccttgcgtgtgtgaggctggcgcatcctgaactcgatctgcggaagatcttggatcagggggcagccagcgatgtgcgcaaggatgtgaaggattaggtcggcgacctgggggagtccgtcctccctctttttgaagagtagggtcttagctctcttgtactttttggccatgctttgtaaaacttttattggttccgaccgcctttgtgtgtgtagtcatcgccttagcattttcagcattttgatcttgagtactttgttgtcgtttgtagagatgttgatgtcgaggatgtctagcagcgcgggcagcctgagttgccggtggtcattccgtgacttgcgttcgagccacatgtgccggagggcgatgtagctcaaaattcgcccatcgaaatgagcatgacagcgactcccttaggttggttgtctttgctacatttcctctatgctttcgtctgggtcgacttgatttgttgtattctcggaagagaagagcaacttaacttaatcgtttccatgctgcgtagacctcgagagcgcgctcgctgaccaggatcgtcgcatccattattggaggacgaagtttgaggtcgcggaactcgagaggactatgctggaagtgaagaaggaccaggctgtagagacactccggggtcgtgaggtgtggttcaactcgtatctgaagagttgctgcacgtccatgtccagagtatgtagagagctccgagtacctcgtggggatcccgaggaatcggcggccggatatatctcgtggctgaacggcgcctgcacccagctcgaaggcatcggtcaacgcatcgacgaagccttgaagcagcagtgtcgtcggtcgagccgatatgccggggggcatgtgttggcttgtatacgagatcatcgtccacagctgcacctcgagttcctccacgaaaggttttctcgttctcggagaactcctgtggagatagatggcctagcgaagtcgatggcgccactagcggagaaggtcttacagtcgatcccttcctggtagtctccgtgtcctgtgacaaatgtcttagggaaatagcgtaatatacttttggattttgattgaattgtaagaaggtcttgtgaaatagaaaagaaatctatctaactatgctttcttactttggatgtagcgtgtataagtgtcttctcacttcgcgacttcgatcagtcatttgaggtatacactctccctagcccccagccttatcatcggagaattcttctcggaagataaggctcttggacctttgacctgtctcggttgaacaagcactaatcctagcccctagccgtgaaattggaaattttatttccgattacacggcttggttaatacgcacggcgagaactcttacacgaccagatcttacatggtctttcgtctctataggatccaacaaggccttatcggctctgggcgtccccagccgaagttcccttaggttcctcgaacgccttgttaagacggcataaagggacattaggataggtttcaacgctaggtgtcatctcggtaagggatcatcaggaaggaacgctttgattgtggtctggacctgaaaataggctttattgaagttgtaagatgtcttacaagtatggatactattgacttatacatagaatttacgtaattgatcaatgttccaggaatttgtcaactcgcgaccatcgccgtctgcaattttgaatgcgccttgccgcagaacttgtgtgatcgtgtacggtccttcccatttgggtgagagcttgttttgccctgcttggctttgaacccgtcggaggacgtagtcgccgatcgaaagcgtgcgtgctcggatgcacttctcgtggtaacggcgaagggcctgttggtagctggctgctcgaacggcaactcattcacgatgttcctcgagtagatttacatcgtcgttacggtgctcctcttgatcctcatcggaatacttctgtacttgtgtactttgatgtcgtagctcggtggggagcatggcttctgagccgtacacgaggaagaagggtgtctccttgttggacgttgtcgtgtgacatgagcctgtcgtagacgcgagttttaattccttgtagtactatgctgtttgccctctcgacttgtccattgctctgagggtgagagactgaggcgaagcagatcttgactcccagcctgatgcagtaatcctggaaatatgcactgatgaactaggagccgttgtccgttatgatacggtggggcaatccgaatctgcagaatatccctttgatgaatttgatagcgttgtcagccttgatttcccccgtgggtgtcgcttcaatccacttagtgaatttgtcgatcgctacgaataggaacctgtaaccgccctgtcctcgtgggaatggcccgagtatatctagcccccagcacgagaacggccaagtgagagggatagtctggagtgcttgcgcttgtaaccttatgtgtttactgtgaaattgacaggcttcacaccgctggaccatgtcgcaggcatctttgagggcggttggccagaagaacccttgtcgaaaagcttttctgactaatgtgcaaccggcggcgtgtgacccacagatcccttcatgtatgtcgaggaggaggtgtctgccgtcgtcggacgagacgcattttaagagtaccccgtttggtgccttcttgtatagatcgttgccgatcatacagtagacttttgctttacgggatattttctcagcttctgcgtcatcctcgggcaactcttcgctgcctatgaatttaatgagtggggtgcgccagccatttgaggtctcgatgtcggcaacggcgcgttctgcctctgtagcccccgagctgatgttgggggcgaccgggctatcttcgtcgcttgcctctgtcatagatggtctggtcaggacgtccagaagggtacccggttcaagtggctctcgtctggatgcatgccgtgctagatcgtccggttcgatgttgtctttgcggtatacatgtcggacctcgatcccatcgaaccttttttacatcatcctgacttctgcgagatacttggataactcggggctaaagcacttgtaatctttatgcacctggttcgcgattagttcggaatcccctttcacgattagtcgcctaactccaagtgcagctgcagctcttatcccggcgagtagtccttcgtactcggctgtgttattggtcgccctgaagttgaggtgaattgcatgcttgaattgatctcccgaaggtgatgtcaagatgaatcctgcccctgctccttggctgttgagcgcgtcgtcgaatgccattgtccacgtttctttgtcgacttggttgtttgacctgttatcaggtatagtccaatcggctacgaaatcggcaagtacctgggacatgatggctgttcgtggcacaaagcggacatcaaattggcttagctcgactatccatttcgcgatgcagccgacaacgtctttgtttctcactacttcaccgagagggatgaaggatacaactgtgaccctgtgggcttggaagtagtggcgtagctttcttaatgtcatgattaccgcgtaaagcagtttttggatctgtggatatctcgtctttgcgtcgtggagagcttcgctgacgtagtagactggtcgttgcaccttctctctctcgacaacaatgacagtgctaacggaatatggcgtggcggcaatatagagaaataattcttcattaggttggggggcaacaagtataggaggatttgataggtagcgcttgagtgcaatgaatgcctcttcggcttcctgtgtccatacaaatttgtcctgcttctttagcaaggcgaagaaaggttgtcctcgctctcccatcctagcgacgaacctgtttagtgccaccacgcatccggttaacttctgtacttccttgagtcttgtaggcgacttcatgttctcgattgccttgatcttctcgggatttgcttctattcctctttcagagacgaggaaactgagcagcttgcccgatggtactccaaatgtgcacttctctggattgagcatgaggcgatatcgtcggaggttgtcgaacgtttccctcagatcgtcaatcaatgagttgcttgtctttgtcttgacaacaatgtcattgacgtaggcctcgacattgtttcctaattggttgctaagtgcaccttggaccgtgcgctggaaagtgtttcctgcagttattagtctgaacggcatcttaacgtagcagcataccccgaacggcgtgatgaatgctgtcttctcctcatcctctttcgccatgctgatttggtggtagccggagtaagcgtcaagaaagcttaacaactcacaaccggctgttgattccaccagttggtctattcgaggaagagggaaatgatccttgggacacgccttgttgaggtcggtgaaatcgatgcacattctccatttcccgttggccttccgcaccatgactgggttggctagccactctggatggagtacctctctgatgaaaccggctttgggaagcttgtcgagttcttctcgtatggcttgttttcgatctggtgcaaatctccgcagtttttgctttactggcttggcatcgggtcgcaccatgagtttgtgctcaatcacctccttgggtacccccagcatgtcggacggctgccaagcgaacacgtcagcattgtcgcggaggaaagtgatgagcgcgagttcctatttctcgcctagtgatgccccgatcttgacggtcttgtcggggttggcattggagagtggaacgatcttgattgcaccgtccggtttcggcgtcttgtttgttttgctcactttcttgggtggctcagctattgcgggtgggctgagcgtgtgcttgaccatgtcgaggctccgcttgtcgcattgcactgtcagcttagcattcccttgaatagtgattgttcccttcggtcccagcatcttaagcatttgatacgtgtagtgagatgcggccttgaacttcgcgagtgcagttctcccaatgatggcattgtatgctataacgaattcagcgacatcaaaggtgatctgttccgttcgaaagttatttgcttggcggaaagtcacaggcaacgtaattttgcccaatggtttggacgatgacagaggagtgattccatggaagggttgatcggtgggtgtcaactcgcttcgtgggatccccatcgcgtccaaggcgctggcaaagagaaggttcattgagctgccgccgtcgatcagaactcgtgcgacgttgatattccgaatagtgggttcgaccacgatcggatatcgccctgggatgacagcagtcttcttccgagaattctatcttctgttcagaccacttcatcttgggcgtagccccctgccacatcgaacagacctcacgttccaccttcttgtattctcgctttgaggagtatgccgtggaacctccgaagatgtgcgagacatggagatcggagtctggatatgccgagtctgattcctgagtaactgcctcagcgtccttctcaaccacacgtattcgcttgcctttttccaatgccatgtgttttgcgagcgactttttgaaaacgaggcaatcttctagagagtgtctgtctgacttgtgtataaggcaccatattttcttcacgtcgctgccttgtgggtctgggcgcttggggggggggtccgcgtattctgttgcgagaacttttgcttgagctttccttttcccacttttgcgattcttcttcttgcttgatttaggtgcgtccttggctggtttcttctctcctccggtcttcggtttgtcattcttgcgtctcactgcgtcgtccgcatgagcgcatcgatcgacaatttcgaacaatctccgagtagttgtgacgcgcctcgttgccaactcctgagtagtatagcgatctctgacaccggacttgaaggcgcaaattacagaagcatcggtgatttcagggattgtatttctgcactcgttaaagcgccgaacataatccctcaaggattcacctgggttctgtgtcgacgcatgtaggtcatcttcgatcgcgtggcgcttgtaagttccttggaagttggcgacgaactgctgccacaggtctgcccacaaagaaatcgagtacgggggcagatgcatcagccatgaacgtgcagagcctttcaatgccgttggcaagtaatttgccaatgcgttgtcgtccgctccggcagcatagagtaccgtggagtaaacctgaaggaattcttctgggtcggtgctcccatcgtatttctctattgctccagaccggaatcttttaggccatcggacatctcgaagtgaacgaccgaaagctctacacctagcgctgggggcggtgggttgtcggcgattgtacgcccttcgcggatgtctatcggatgatgaggataaggaagatgatgacgatgacgatgggtcacttggttccagcatgtggttatgagggcgtcggccgggttctcgagaaccttgtcgtcgtcgcccattgttgtctcggcgccgatctccatcatcatcgtcatcatggcgacgtcctcgacccgtatcgcccggcacccatcgttcacgatcgttgtgattgcggcggttgtggcggttattatggtctcgatcttcactcgaacggcctactcgatcttcgttatcgtgacgtcgtgaagagatacgatgacgagaacggttcttgttgtcgcgtgtgcgtcgcgcctctcggcggccattcaggtgatcgcggagatcgccggtgccgcgaggtggaggggtggctcgatgaggcgattccggctattcagggtttccaccattagcatcgccagttggtggctgttctgggtgtgctgcagcagcggcctcttcaaacgcgttgctgaggttggtcaccgattcccgtaaccgctctgtccatcacgcgagatcgtcgttcagaacgggatcatagggggtttccctcagtattgcgttgatggctctgttgtgctgggccggtgtagtcacttgattctctgcttccgcattggcgtgcgctgacgtgccgacatcgtcgatagccaatacctcgcgcggcgtactcgttgtcgatgaaccatagtcttcgagcaggtgcaagactgatggttcgtggagatcgatgtcgattaccccaacaaatcgatctgaaatcggcgtcgctccttgttccttgtcctcatccctgagggggacgcgtgactgctagaccttaggaggtggcgtcttcatggcgctgagaaagaccttgcagctcgagaggtcgtgattctttgtcttgtgaataggacaatagacatcacgagttggagaagtacgctgaattccacgctctttgtaggcacgaatttcagcatggacgttgagaaaaacccagcaggcttgcaaggtgtgttttctggttttgtggatagaaaaccaggaccttgtcacctcggaagtcatcctcgtcggctcgtgattcttgtcggaaagacaagacttggcctcactaggatccttctcgggctcggatgtcgtcgacgttccgatctccgcttcggcgggaggatccttcgacatggagtcgtcctgggttgtagccactgcgttctcgtttccggccattggcggaccagctgagatcggcactgtggtgtaaaccagaaagacgatttcgccgacttgagtccacaccagcgttgttgaagtgagaactccttggttgcagttggtgttgacgctgttgtcgacgaagctagatgtcatagtagtagaaccttgagcaccaagtgcccctacctggcgcgccactgtcgacgggggatacctgtagaccggatatagagggtattggggtacgctggtacgaggatctacgtaatacgacatcgagcaagcaaaaaacagagattatactggttcaggccccttgataggtaatagccctaatccagttgatatgggattatatgatggaaaccacaaattacaaagggaatagttgaactcgacgatactgacgagatcgtagtcgagttgattcgactagatcacccggcgacttggctcctgtaggctccggcttcgtaggctgtggtggatgtgttggcggtaagattttctgccttaggtcctaccgaagggtcccttttataccgcaggtcagctagtctccaagtaggactcagagacatcggacttggtacaatacaatgacgacccagttctatccgagtaggactctttccatctgtagactccatgatgcacttccttaacttatgctgagaacgtccgtatacgcgcaagcataccatatcgatatgtgacgtatatcgaagggtagagggtataccttacccgtaaccctgacacagaggggcctagagatatctctccataggaggggcaaatcccatcttgattattcatatcccactacatgtttcatagcatacccgacttttatagctacccatttacggagtagcgtttagcagtccataagtaagctacaacacatgttgaaaaccatgataatctcaggtctaaggattcaacaccaacactaaatgagatcactgatgacacaacacatatggctcttgcaatgtctcatgttgggtctatccaacaacatgttcaccaacatatgtccacattattaatttggtatctctataccatgatccatgagatatgatcatcaattaatacatgtgctgatcatataaacatatttgttccacatatgatatttgatcagggatcctttagaaatagtaacaaacaacataaagagtctcatgaaagaatcacatattcattatccaataaggagttatctatttcaaggaacaatgtcggataaatatgtaaacaaaatatgtgatacaatcatctctataattgcctctagggcatatcagtaacagggagtagtacctttggtccatcaaacgttgtataacatgacaaattaaacgtaacgtgactggcatggcacatgcagctgggc

SEQ ID NO: 1586 - DNA, 6669 bp, Oryza sativa
  Intron number 2 from transcript LOC_Os02g24190.1 (locus LO C_Os02g24190) derived from phytozome v7.0 (chr-ID Chr2; po s 14001995 to 14008663)
tgaggaaggttcggaagtgtttgcggaagctcaaggcaagtcacaaagatcccaaacaaccctttgagcatgttgaacccgtttaaagctattgtttgatttcaacttatgcattattttcgaatgtcatcgggtggtgagcctttcacaattaattaatggccgaagatggctttattttcctatgggttataatttgattagctagaaccttatatattggtttgggttcagctaaatgctatatatatataattgcttagccatgcttagaaacattagcacatgattgggataactaatgttacactatcacttatggttatatttaatggtagctcacgatggtcaatcgtgattggttaattaattattgccaattaaaatttgtcaatggtgggttgtgagcacatggttgtgaaggtcgtgctcatggcaattaaggaccgattcgcgagctactgttgtaaaacattaaccgtgccaaccacaagccagcataggcaacggctttaccttttgtatagcatgattcattgcggggcaccagactgagaagcggcgagaagtccgtgggggtcgctggggagtccatgcctctggttgtatttatagagggggtgattatgatccaggtatggtgcactgtggtgagttgtgttgtgcagagggtattgtcatagcctctattcgggtactttccagtatcgcgacgcatggtagacatgatgttgaggctgtgtcttgtaggtacagtggtacacctctggccagagtaaaactattcgaatagccgtgcccgcggttatgggcgagttgagcaatgtttttcgtgattagtctcacacatctcacaataattattgatgctataattggtaataatttgcttagctcctggtttggagttagatttgtacagccggggttggttgttcaggtttggttgggcctgtacagcattggggtgctgttcagtgttgattaaaattgatgattaattactctattgttttactactcttaaatctttgctaaatgctgcttttacaaatgagcctatattatgccatcctttggtatccttgtgcacttgcatatttgctgtgtggcttgttgagtatgtcatatgcttattcttgcaataatcaatcaacctcaattgaagaaaagggatccagaaggagaagacgtttggcttataccccagttgagctgcctgtgggaatggagctgaagtcatcgctagaccgttatttccgctgctgttttcttttcttttgtaagtatgtaacgttattattatgatggatttgtatattaaattgtcagtttgtgtacctcggctgattcctggacgagggttttatgcacaaataagttcggaaattactagtgaatttccggacgtggcaacgaccacgagtgggcctgccgctgctctactcgccgcttgccagagatgagcccgaggatgccgtcgatgctccacgtcgcgatggccccgacgttgctccacttggtgcttgccggagacgagactgccccgcccacactgtcggccttgatccacgtaggagaaagccaaccttgttttgcgccgtcggagttcaattcgctgatgccggagttcggtcccgccgccgaagctccaccgccaccgagcttggttgcatcattggaacttgatttgccgctggaggggaggggatggatggggaacgggagagggtagacggagatgggtggcgccgacggagatggagaggagagtaggcgatgaagctgggggcgatgttggtgaggcggcgaagatggagaggcgtcggcgtcttcgttgggacttgggaggggatgaggattaaatgcaattgggagcgagagaacggggtgagggggaggaaaaagtaagggatggctgacaagtgggtcagtgggcaggcatgattatgtgtgtagatcttttttttttgttgcagggtctgaaatataaaaaattggatggtttgttaatacaaaatataggaagggctgacatagaagaatttaagggctgagatgaaaaaaagttgttaggtggagcctccattgtggagctagtgtccatataggaacctcatcctatgtggcatagcgaggcatgattttgagtagattgtactgctattgtccttagggaatccacaatgtgagccacttctagagtgctgtagaggaactcagctcggaatggaggatacccctggatgggctcctcaaaatctgaaacaacttaatagagacactccaacccacaataggtatcacagcctacaaagccccatatttatttttactatcctacccctaatctctctctctcttgccccctcctttttttcgccaccgcactcgcctctccctctcgccgccgcctccaactcaggcccagcgcaccgctgcggtggccgacggcaagcggcgagaggcgggtggcatcctccctggccttctccgtcacgccatcgtcgccacccaccccagctctctctctctccggtggcggccgcaagggcgacgagtaggaccaccctcgccgccggagctttgtcgacgagggcgacgaggagagccgcctactccgccgcgaacccgttgcctccgccggggatccgccgttgccgccgctcgccgcgcgctctctctctctcgtcgctgctatttccggccgtagctcgagatcccgccgctccctctgccgatggctaagacgagcccggcagacggctgccgcacggtggccgactccgcccaccgcctctctctctcccgctagcagaggctgaggagacggcgcacctcggcggtgcccgaggaggagctcggctcagcggggtaggccgtctcgcgatgagaacggaggagaggagagagagggggagaggggtggaaggggaatatggtggtggagagacagtcgcctgaggcgtctgtcgccgcagcgcgtgcctctagcccgttccctagccgaaaaggaggaggcgcgtctcccaagcaggggtcgcgcgccatcaccagggcatggctcgaacggaaaagcgaacggccgtcgctggggcgggttgaagacacattgtagatggccttattcacccagtgaatagctaggagtaatttagaattatatatttgagaccaaaatatgatagcagaattagcggcgaggtccgaccttggaagtgagctgtttacacggtacagaccagtgacaccggatagtaggggaggcagtttgagacgttggatgcatttcaagggtggattttggggcactggacgcaagtcaatagtatccgagtgcagtacggcgtaggtggcctccgagtcgtcgcgcccggcctagggaaattgatctcccccgcatccccgtcccctcggcctcgactgcccacccgccgcctgcgccgatctccatctcgcgagggcgagtagcagcctgctgcttctgccgcatcctcgcaggccggtgagcaccctgctcgcgtcatcctctttttaatcccttatcttctctcctagatctggaagcttttctctccgccttagttccacaaacaatagatttgggggttcaactgaaccccatcatgcccccggttaggtcaaagattctgtctttggcgaattgggaggtgaattcatgggtgagccgacgagcttcgtcgtgatttcctattcaatttggggatcttctcgctgtttgacgtattggccgtatggcatatgcagaagtcgatgtgaattcattgcttctccaccttttacaacgatatcttgtgggctagattttttgtcgggctgggactagcttgtgtgtattcttgattttgtcttcaaagatgttatcctaaaggggtggacaaactgctttgcttttgtcgagaaatttggtcagtttattaactgggagttggttgaaattacacccaaagtctgccaacttttagtgagcgcagtttgtagaatctattatttacttggtcaagaagattgtgcctatacataaatagttactgctagttgagaaatcttttctacattcagttaagcttggatttggatgagatattacaatcttctgccaacaaaagacatagttttcagcatgttgtttttgttgtaaccagaatttctatactgtgaagattgtatgtacaacagaaaatttctcttatgccgcaaagctgcatgccatactcttatttgccacatgatttgttggctttgtaaaaatgccacaaagttcagttgtatactcgtttatctgccacactttaccattttaacccaccaaatgtgcaattttcccttcttctgcaccctctttctctcttctatgagtttgtgaatggagcttggccgcacgggctggtgcccactgtgtttggcccaacagaaaattatatcttaaaaatgtatgtctctctatgggcttttacacccaggcctaggacctaggtccgccactgcggccgggagcagggcgcgtggaactggctttcaggaggaaagccgtgcgcggagtaggtgggctgcacagagccagttgctgagggcaggacgcatattgttgtgctgctggcggccagaggcggaggtaatgctaaggttgaagctggctactggagctagggtgtcatagctcatgccgagctcaggtgcacggagatggcgtgcgcgttggacatgcaggagtggggcgtcggacgtgcaggagtgggctggctgccaggtctggctcaaactttggccggacagagctaggtctgtccttgctggacacagagaagaagggtggggataggacaaaaatggagaaggagaagaaggtgggcattaatttggaatttcacactgtattgtggtaaaagaatgaattggtactcaattttgtggcattttagtaaaggcttcaaacttttgttcaaaatgagagttttcgcatccaactttgtggcataagagcattattctctttgtataatggaataccgttaacttgtctcaggtgcaattgttattaagcagaacccaagggccgtgtaccacatccttgaaattgtgtattgtctgcttctaaccggaaaggcaatacatgcgaaaactttcaatgggtaatgtgtagttgcacattgatatatgggaaaaacatgcagtggatattaaacatgggaaaactatcgcataaatttctaaaatatctcacatacaggaaggttatattagacaaccatataaaatttcaggacatatgaaattgataaacagtgaggaaaaaaagagtattctttatttgtgtttttttctttgctatttgtaaacttaatatctcacaaacaaagttgagttttatcttgaattttgtatgcccatctaatttcatatagctatcattgagttctttttttcaaataaaactctttttgagaacttatattctgtggtttacatgtttccgacctagttaaacatttcaccatgtatttacactggatatctcggaaatctcacatcgtactcctatatccacattgtctcatgtatagttgtcgatagatcccatccatacaatgctccacattgcatggcaacagatcagaatgtctgatgtttgcacttcagagaacacaaacaacaatttaattggcacataagagggcacaaacaacaatgaactgaaatgaacagacaaatcagtaattgcaagatgtttgcatagaaatcttgaaatgcaactgataagtgattatggttacaaattggaccatgcaagtaggctttagaatttctaagctctgctcagtgctattttccttttattagtgcattgaggcggatcaaactcatctacatttttggtaaggttttggaatttagactttggaattcaaactcatcagcacacattgatttcctctggagtatagacgcttcaatgccggatatcgtcttccattaggagtacatgttcaaaagattcaatctcgtggaattcacatgtctgtacaggttctgaacaaaagagttttaaatggaaggaaatgtaatgaatataactgcacacagcattttgatgaatataaatcagtatccgtgactcttgattagttatggataaaattgaaataggtcatcttatggatttcttttaaagtaaaatcatcagatgattagcattttaatgatgatgacatggcttaatatgatggctcatgttatactcaaaaatataggggagagattttctgggatggaatacattagtatcttgttataccatgtatgttaatttgattaaaaaatatcatcttcatcaatataatttattttcctttgtggctatgagaaacttttttaacatttctgttaatttcgttctctgccaattgagggaaagggaggtaaaaatgttcacagtagcatggtgaatgcaactgtagcaagctatcaaaggaatagatcatgtaaaacatgcacaatttagctataatctgtacatattggcttaaatttacattcataatgttcgttgctcagtatgtggattcatattgtagatatttttattatatacataaatttcatggttctgcaggctgttcagcacaagcaattcggaagttctgtctg

SEQ ID NO: 1587 - DNA, 2624 bp, Oryza sativa
  Intron number 1 from transcript LOC_Os03g29540.3 (locus LO C_Os03g29540) derived from phytozome v7.0 (chr-ID Chr3; po s 16836855 to 16839478 reverse strand)
cagtaggtgttggcgaaaggggatcaaggtaacaaacacctctctgcacttctgcacctgtgcacggttaccctctgtaaattgtggttatacttgtcataagaaatgcgcatccattttgtagttttgtgtagtaacgagtacataatgtttgcgtccactgctactctaatggacatacaaggcaacgtgattatcgaaacggtactttagagaaaaaaaaagttactaaatttctgcagaaacgacatggcaaagcagcccgcgatgaacgatggctatccatgggagtaacattcactagccaaccgtctcatcttttcgcttatacttatacttatcaataaaaatttaatttttcaaccttaaatttggagctgattttaagatttttttcatcaaagttttttttagcttttgcttttagatcgctaataacacgtatataaaagttttatttacaaattgctttacgtttgcaaatatgccatttcacttattccgtgaataagcaaaacgatggctccgtaggagatgtttggttggttatcacattttagtcatgccatagttttttttagacatgtatttgcttcgttgtcgtaactgtgttatgccatactttcttattctcgagatacacatgtcacactcttaaattttaagctcactatactacacttactattaactactacctccgtttcaaaatgtttgacgccattgactttttatcacatgtttgaccaatcgtcttattcaaaaaatttaagtaattattaattcttttcctatcatttgattcattgttaaatatatttttatgtaggcatataattttacatatctcacaaaagtttttgaataagacgaacggtcaaacatgtgctaaaaagtcaacggtgtcaaacatttcgaaacggagggagtatttctgagctacacttgtaccaccctactacaactggtgtaagcttagttacggtcaagttagatctcaacacgaaaaaaacttataactcactccctccgtttaaaaaaaagagataacctagaagttatacagtgaatctgaacaatctcattgtattaggagagacaacatgtatttgcttatatgttgttttttttttttaaaggatggagtagagcgtagcagggcaaagttcgaggcgctgtgccgtgctccaaatcatccatatcatgtttgttcgtttgtccgtacatatctgatgctaagttttttctagtcctccttatccacaacccctcctcctcctcctcctcgtgcttcttccagctccagggcgtgattgcgggtcgcaacccgacacaggtaccgtgccaggctgccataggccagctccagcatcggcgccaacagagtcgcccacaaaaccgctcccttttttttccctttctttgtttgtcagtgtccactgccatagcactacactggtggcgatactgatacgtgcagagaagcaaaccaacgagttctctcactcgctataagtgggagcctctatcttatctccacttcttcttcagacttctcaaagaagaagagtcaggctcctcttcctcggcatcctcctcctgaattctccttctcggatcacctcttctcttcacctcctctctctcccatccgctgcaaccgccgcttacaaacgagagtttaattggtattttagtcttctgcacatccatcggtacgttctttctttctttctttctgcatgattcagttttcccgttgttgattgcgatgatccagccatctatccgggactggtttcctctccctttttgttggtctctgttcttgggttgggttttcagtccggggaatgaactcgctcgctaggctggaactctggatctggtgatcaaacggcgtctctgaaaaatcagggttgatgtggtgggggtggggtggggggatcgagttcatgtctcttttgttcatctttgatgggagaaaaatgagtataagaataaattgcgatttgatttgattaaacttaattaattattttttgttgtcctagaaatgatgaagtgttgctgttgggagggaggtagtaataatgcttgcagaatagtcgccctgtcacaatcaatcgtccattgaggataaagcgcttatccaaccacagcaccacactatggcacctaactagaagaatcttgcatcccactcactttgccacttgcgagctgctcactctgagctcttcagatatttagatccaactttgcttttgagtttggataattaattaatcatgtttctgttcttataatgaaaaaaaaatcagattgttaaacacaaaggtattaataaaaaggttcaaaacaccaaaacctcatctttgattgctctattttaaccaccacagaataataatccttttctctgaaacctgtaattcagtagtacttgtgtccattgatttatgattgcccatttttatcagataattatacttgttggatgcttacaaggtttactaatgttttgcctcttgttttccgtttgtatctcattatctgtatctctctgaaacagagctcatcatcagattgaaacaaataaagtgaagtatttgatcacttat

SEQ ID NO: 1588 - DNA, 807 bp, Oryza sativa
  Intron number 2 from transcript LOC_Os06g42810.1 (locus LO C_Os06g42810) derived from phytozome v7.0 (chr-ID Chr6; po s 25737214 to 25738020 reverse strand)
cttcctttttaaaggtaaatactttgacctgtgcaaaatgtgtacctgttttatctgcttattatgtttgtctcatgtgccattatgtacttataccatttatttgttttggaatatcttaattcaccttgtttccgacctagagtggtagctgttgcaatattttgtcatcatgatgcaccctgttgtgcttaacgtaatggctagttaaaataaattcctcatgatgaaaacaaatcactggaatggtcttctttcattgagtgtatccattgatgttcttcagctggcttccatcatagtgtctcacaacctttatctcatttttgggctggtcctcatcaattgatgtagggcaagatgtgttttggtaggaagggtactggccaatccccccctccccccccccccccaaatttgccattgcaaaacagaaatctttctgaaaatttctggaccaagtaaaaatagttggatttcacatttcacaggtagcttgttcagtaaaactacccaaactaatctcaacattaaaaaaatgcactgaggcttttttttgttggtaaaattcggtttagtgttaccatttttcttttatggttattctgttgcttgatctattgtttattttgatcttattcttagcactttatgttcaggtcctctgtaacttgctatgcatgccatttcttttgttttgttacatgtttatgaatttgggttatgtcttctcttgctaaatggaatgtgaattaatcaatctattatttttcctttttcaattgcacagagcatcaagaattctga

SEQ ID NO: 1589 - DNA, 1413 bp, Oryza sativa
  Intron number 2 from transcript LOC_Os03g36900.1 (locus LO C_Os03g36900) derived from phytozome v7.0 (chr-ID Chr3; po s 20477020 to 20478432 reverse strand)
aacaaggatcctgagtgctgtaatagaaaacaaccattagttttggataatactctatatcggtcaaccgattttatcaaataaatctgacgctgcatgcaatgggtgcatgtgtgcttctgaatgcaattattcctactcttacgttacatgcgtggttcttcaattcactctcctactttacgtagtttgaattgctttctctactcgtcttaaccacattttaacaaacttcaaacgattttttcttttaaattattgatccaatttatgattttattacaccattatattcgttataattaaatctttgcaacaagatcacatatgactatattttaattaatatatatatatgtttcaaccgttaagattttgtgattcatttatcagaataagatgtttcaactaggattcaactatgttgcactatattacaatggatttttttaatgttgcacataatgttatttgtatgttttactaagtatttttgatgtttcactagtttatttgtcaatgttgcacatggtgctagttcgatgtttgactaagtattttgtgatatttcattagcttatatgtaaatgtttcacatggttgtctttgaatgtttcagtaagtattttttatgtttcaataattataagatttattctttttaaagaaatatagttatgtgagatcttgttgtaaatattaaattgcaacagatacaatggtgtaattagattacagatcggataaataatttagagaaaaattcagtttaaagatttacaagaaagtaaagaaaataaaagtgaaaagatacactactgaaagcatgtactagagccagattcatactatggcccgatttagttcccaactttttctttaaacttccaacttttctatcacatcaaggcttagtttagtttctaactttttcttcaaacttccaatttttccatcacatcaaaactttcctacacacaaacttccaatttttccttcacatcgttgcaatttcaatcaaacttccaattttagcgtgaactaaacacaccccaaaattttcctacacacacaagcttccaacttttccgtcacatcgttccaatttcaatcaaactttcaattttggcgtgaactaaacacaccctatgcgtacatctgcatacaacagtttgcgtgcacatccatgcaatgggacaacgggcacaagttgagcgtccgatttttttgccttttcatcaggcgtccgaagcatagtgccgtccattagttttacacaccactacactgatgaactattttgagatcagacaactattgtctataagaaaaaaaatgacatgaggtaattgatcgccgaggaaaaaatcttaacagaaatttatgttcctttccatgtgctggacagttcct

SEQ ID NO: 1590 - DNA, 2072 bp, Oryza sativa
  Intron number 1 from transcript LOC_Os02g54090.1 (locus LO C_Os02g54090) derived from phytozome v7.0 (chr-ID Chr2; po s 33125769 to 33127840 reverse strand)
cctgccccgagaaattccggaatttccagctgcaggtatgtgcagcttgcccgtctcctcgctcctaggtttccagtagtcgtgattaacctagtgccgcttggtaattcattctgatccgtgacacttgatatagttagggatcttttttttaaaactttaggtggcaatccattcgatgcgatcaaatttaaccagaaagtgttgcctgtggagacacaagtatattgctacaatagtggtaatctggttagtgaactggcaatgttataacattgcaccggtgtgttgccatggctagatctagtaattcagtgctaggaatatcaactgcaaatgcttatgatgtcctgcacgtagttttgcatgttctagtttgatatatggagtgtgcataaccaacagacttagttttttttttttaaaaaaaataaggttgttgattatttatagcatatttgcataactgaaaaaaaataaggctattgattattcatagcatatttgcataacttgtgaatcagtggttcaatgctattgaaaatttgaaatctgaatggggttgaaattagttgatgcatgagctgaataaactgtaattagcatgacaccatttgtatttcaggcatcatgagatgcatatactatacagattttaaaatacatgcttattattttatacttctcttcactctttctgttctctcaacagtaaaacattacgtacccaatgcgaatcaaattctaacttttcgtgcaaaaatttcccacgtggccacgtgttgtttatcttttgcgaatctagccagctaggctaataaaatgttaattaaatatggcaaaccataagctggatgggtaagataggaatttgtaggcggaaggctttcatgattccacattttctaggtaccttcgtcctccgtcgcatttaactgaccttttctttgggtgttgccagttattttgctttagtaatgccactgttttctgatggcttaaagaaattgttttaactaaaacaaccactgtatcacatttatgggcgagtgcttaccagaatccacatataagtgagtagtaacagtaacatatcatacaattcctttcatacatacctaatcggttgagttgaagctcatggaaaagaaaccgagtgatatcagagtagtgacggttttgcggtatctttaaaattagtgttgtttggtaatatggtgaaggtagctgaaaaagaaaagatatttgtggattttggttgcttgtatgtttgccactggaagcctctaatatggaaattttcaagtgggaagaggacatgtgcaagaccaatgctatatgctaatgacatggaagaagacatatgtagctgctattgtggcaccatgtatgattgtattatgggggttttgcctccgcagccatagtaaaatcttaaaaacattaaatcactctgactctgttgtctgtacattaaaagtactgaacaaacatggatcattgaaatgtttatggaagccaatttattctttgaagataatgcctaccatattggccctgacaaaccagtgggtccacctgacataataggatctaagtaactcggctacattccaaaaaaggttagtagtaaaactttctgtgcaatccaattaaatttgcatgatcggctccatgtacagtctggacatgagctggataatgaccttcctataatttatttttagtctttaatgccttttttgttgtcttgtgtgcatatatgtgtgaaaatgttccatattgtgccaaatatgttggataaacagagaagacattgatgtaaacgccactgaggtatcaggaagtggctaataagtagatttggacaaggaaggggagggcaagaaaactccaggattgatcaatggacacgcctgatctcacatttctataatcgtacctgctaaatctgatcaactaactttcatgcacagaatttcccttaactgactactttgcaattcagatattttaatatttaaattattgtttactaatttatgaatttaatttgattgtgcaggaagagt

SEQ ID NO: 1591 - DNA, 1526 bp, Oryza sativa
  Intron number 1 from transcript LOC_Os04g40490.1 (locus LO C_Os04g40490) derived from phytozome v7.0 (chr-ID Chr4; po s 23870156 to 23871681)
tgttccaggtgagcgtctcttcgaataagcaaacacggagtaaatgacaacgttggtttctccaagttgttaagtaaacttattattaatggcagttctaagaaatggctgttttttttttaacaaccaccatgggaaatggaagctgtttctattgttagcgagttcgagtcttcgagatggcgccaaattttaccgtgtcttaccgctagatgctactacctccgtttcagattataagactttctagcattacccacatttatatagatattaatgaatctaagcacacgtatatgtctatattcattaacatatatatgaatgtggacaatgctagaaagtcttataatatgaaacggaggaagcagtattttcgctgatagagtgcaagaaaatactccctccgtccaagagttgtaggagaaattaagtaaaggttaaggtgaaaccactttcatgtaccctggttgaatccccatgccaccatccgattcaccgggatggggaatataactatgagggatggttgaaaacttggaatgtggaaatatactctagaaatgtttatagaaaatattcgtggactaaatttaaacactagaaatgcttatatttgtggacggagggagtagataacgttgtacctagaagaacatttacattttttgttgttgaaagctatgggctcatttaaacatttaagtcagagtccatgtaaattttacatttttctgaagaaatagctattatgatgcataaggcttaattgtggaagcaacagtatgcaatgaatcaattgacttatagctaaaccaactgcaggtcatgtggtttaatttaacaaaaacaacttgctaagaagtcaaaattttgcagattattgattttgaaatcagatgatctcgtcacaatcttttcacaagacttgccaaagaaacctagggtatcctcttttttttttgcttatttaataagaacaatcaatttcaagttgaaggtttaagcataatcaacaatctgatcgtccttttctatttcaggaaaaaccaatggtaattgtttgagtagctttccctttttccttttgtttctcttccaaaccagtttatgtgaagatgacattattcctaatagtcaccaaattgatggtccaagataagggtgccttgaaagtctctagctagataaattctttctttgtaaaatatgttctgacgatagatggcaactggggtcattaggtggtctgcttcctttttttaaaaaaaaaaatccaaaccagggatgtattagttatctctcattttacaatgatgtatctagttagttgacctagtaatctaccaaaacatgtgttcacatactcaggagtatattctgggagagtttacccgtactaaacattaaatgaaataaagtaaacgagatttttgctatcaagtgttgaattctgattatttactccttctgttaaattaataaccataggaagtggtgtcagctttggccaagaacaatataat

SEQ ID NO: 1592 - DNA, 1638 bp, Oryza sativa
  Intron number 1 from transcript LOC_Os01g65080.4 (locus LO C_Os01g65080) derived from phytozome v7.0 (chr-ID Chr1; po s 37773016 to 37774653)
ttttgctgccctgtggagcctcaaattctactcgcgtaagtccatcttttttttttactgagtatattacacgcttcacacgaatttctcttttttttaaactaaacgaatttctcaatcttgttaatttcatccgtgctatactggaacaactgtaacaattttgggggcagagaattttggggggagggaatcaatcttgcaccagttggtctcctttagaatctggatatggttctttagattctttctgatgtttttgttagaggatggtgtgatggtgcctttctttttagtgtttgtttgatctggaggggcattagaggtggtgtttttgggttagatggggatcttgaagtgtgtgacgataatcatttgggggtagttttagatctgccggttttgtgtttgtgttcttggggttgattgtttccagattgttggtgtgcttatagggcctaggggtgagaattgagataagaagggaaggtgatatgctgaaattatgtttgatttatctctgatttgtactagaccatcaactttgctacagtactttatttgattaatagttaggctgtgaatccatgaaaatatgcatcatttggatttgtcaatattttttttgcatgtatgcttcaggttcttttgcatcttcagctccacatcaggagtgatccctgttacttggtgccaccactttctctgctaagtgattctttatttgtgataatttaaaattaaaatacaaaacactatttttttactacaagaaatatgtagatgcatgcacagaaaaacaatcacagttgcctagccatatgaactaaaattttagcatatcactacttataacaaaagtacgttggcacatatatatatatgaggaggcgtttccagtagaaattttgattgggtcatagatttgttgttagactcttttctttgagcgtcgtgaattggagtaggaatttacatatgttgtgattttctttggaattaaagtggattacttttaaagtttgattttaaagaataattttagatagacttttatatgtgttctaagaaattattaaaatagaactagacaaacaaagtggtaaagaaaacccttgaaataaatttagaattaagtcaacttcgattatatatattcgtagttcaaccagcattcatcatgcaataaagtaatgattttatttataccctgagtaagttttttttaaaataatttatcacccatataaaggaggcaattctcgctctcactaacatattgaactatttttgtcactaaatgtggactgggatagcaaattgtatccaacttaagaatgtcatattaccaaatgtcccagttataaaataataattatatttacacaccatgactttgtaaaataaaatactgtaccttttttttaagatgacttgtcattttcttttcatgcagccttattagattatgttgtactatcaaccaaaactaatgtcttgccttgtactgtttccacgttcatggctgatggcctcatgggccaatgaccttgggggttgctaaaagtcagaggagcctgatcccaatatctcatattcccagggacccctccgtaaatttgtgtttttgcccacgaa

SEQ ID NO: 1593 - DNA, 3268 bp, Oryza sativa
  Intron number 1 from transcript LOC_Os05g04380.1 (locus LO C_Os05g04380) derived from phytozome v7.0 (chr-ID Chr5; po s 2010448 to 2013715)
tcgtccgcctcatcttccacgactgcttcgtcagggtaattatctcaatcagataattaactttcttgcatatcaattattgtagcggctcatgattgatccatccatatatatcaatctacatttgcagtacgtactagctaaggtttactagctagcttaactgttagttagttgtgtgtgtacatagtacaacttggctttgcagagtttagttgtgttacagttggtttcattcttcagaatcactcatcaggtgatcgatccatcgaggaaacttatcacattctagctaggttagttgattaattaataaggaaaacaactttactcttgatggaaataacagcaacatttacacaaactaactaagcaactactcaatcagcatcttatcttacaccaacgtcgtcgtcgccgcataagcgtgtatgagaaatgatcaaatcttaagctaatatacataacacagcttcttagttaagtctctgaaccccacttggttggttgttgtcaagatcaacacagatagttatcagcaagttagcagccacacgccactgcatttgacacactgtcatcactccatccagagacagtttcttcttctttctcttcctttctttccatgcacaaaagaaaagaaaagttcaatggagacctagctaagctaagctaagctagtttcgtgagctacttgacttctactagttcactactaatccaacatggcaagagagagaaactaaaggtagattagagagagaaagatagatagatagagagagagagagagattggtagccagcaattcagcatctgcaacatgcatgctggaatcgaatgtgatactttccttgtgtccatcatttggactgtcaatgcatgctacacctttttttttcccttctggctgcttagctaaacacataattaagctgcattagcttagcttaattagctctagggtcccagaaacactatgcccttgtcgtcagtttattccctctcctttcttttctctgcatgggtgccagccagatgcagctgctgctgatgttgctgtgattggcaagcaacatgtaactacctattcaattggttcatgcatcatcagtacgttttgcatacacacaaataattaattaattagactctcatgtatatcatattagtagtagtagtagttaaacatgattttattggtgttcgatttctaggtaagctcaattagtgggatatgattatgtttggattgtgcttggggccagagcttctttgcttcctatggggcaaattgttttcttgtgctgattgtctaggagagagagagagagagagagagagagagaggaaaaggacacatatgggagagaaaaggggacactgtgttgagaaagagaaagcatacctatatctctccagagtcatgaccaataattggtaccactagctcctcagtcatgaatagaaaagagagtaaaagtaattaattgaacttttttttacttacccttttgattaacaagtaattagtgcatgttctgacagagtttcagcactctcatccaagcaagcatcctagcttacttggctctaaaagttcttggagttgcatttgttctgattaaattacatattttgattggtttgtgcgagccaatttgtgttcatgttattagactaaaaatatagagtgaaactattttatttagacatgcaagaatacaacataggtcattagtggctacggaattgaatgagcacattatagacgaaatggtcggtagcatcggtagtctttctttttgttctcctctttttaagaaaataataaaagaagatgatgtacatatatacaagttgcagcatgcatggacttttcgttgtgtggtttaagcatcagcagcaatagaactgttcaagtaattaagaaccaataatgcatttgccctctcaccgacactacatatgcaattatatgtgcatatcgttttccaacaactcagctgacgatgatcaatcgatcgatctatcacacatttttctcaaggggctctaatataattaaaggtttatttgccatagcttcagctccatcttttaaaagttggagctcaacgaaacagtttcagctccatctaaaataagagtagatctggttgaagcattctcacaaaataaattagagaggtggagctagatttagactgttccacaactccactccaaatccaactcttaaaactaaatttaagagttggagctctatcaaacagatcctaactgtgcttaagtacagataggatgacttgccaagcacacatatagttaacagtattagtattaactactagtgttttggacggtggaacaagagtaggaggtatgagatcgatgatgtgtggaattaattgaacgattccgtggagatgtttggtccaaaggacggtatgattcggcctagtagtgttaggctcattggttgagagaataaagaaggatgaaacaactatagaataagtagcattttaatacaaaacaaatttaatataatgatatttttaattatggatttaataaaactaattcggtgttttatatgttgctaagtttttaacaagcttggtcaaacttgatatagtttgacataggtcaaaaaaaacgtcttataatatggtgtggaagattgttaattgactaactacctaaattggggtatatagagaacttcaacatatgcagagtgtttaaggcattattagttgactacattgcgcgtgcttaattttttatcaattgtattgtctaatcatgtgataattaccgttagctaacataattatgacatacatttaaatcttaccccgatattcactaatcccaaaacatctaattgttaccagtcaaatttatggatcattcctgcttatcctactatggttctacttgtacaatgcagaaattctgaaatatttctgcctaaaaaaattcaaaattcgaacaaattttagtataacgatttgacctttttttaccacgcaaacaattttaagtttggtcaagtttatgaaaactttttgtatttgaattgtttggcgccattgattaattacaatgtaaaaaatgcacgacaaatttgaattctcaattggttgctgattatagtaattttttttttaaaaaaacgcgcgaatgttaatgatcgatttgaattggaatgggtggtgcaggggtgcgacgcgtcggtgctgctggacccgacggc

SEQ ID NO: 1594 - DNA, 4009 bp, Oryza sativa
  Intron number 1 from transcript LOC_Os11g22449.1 (locus LO C_Os11g22449) derived from phytozome v7.0 (chr-ID Chr11; p os 12437672 to 12441680)
gtagatcatcagccatatcaagccggcgacgtcattccgaagctccccgccgtcgccgagtcgttctgctcgcggtcaccgctatctggaccctgccaagtttcattggacgctcggtaagcatcctaggatcccatagcggcacatgcatgtagctaaacatctagatcaatgctctagctccacatgcaccatcacccgagaaccaccgcagctcgcgccgccgtcgccattaattccggtgactaatgcttgcaataataccaccaaaagcgtcgccttgaacccctttacattttatccttacgttgcacgccgagatctgccaccgtttgtcgccggcgagctcgaggacgagctcggccatggctagctctgtatcagctcgaaccaaggacctcacttgagaagaatcaaaactctaggtagtagtttgtaaaacctacttcacacacagaacagtcatgggaccgcgggttgattttgctgaaacaccaggggcctttctgcatactggcttgagactaacctgtcgacccaatctatttaaattctgaaaaaatctaaatgaaatacctaaagctttatgttttcaacagaaaaacatgtaaacttgtaaaatccataacaaattgaaaacaactcatcttagagtaattcaaattactgctaactcatctaatcaagaactttagttttattgcataaaaacttgcactcacaatacaatttctgtctctaaaattcatctacgtaaaatcacatataaaacatacacaggattataaaatgcatacaaaattcatttcaactcattttagagcaaacttagtttctacagattccccaacatgttctctaaaaaaaagtaaaataaaacgtatacacactttacatcaaatgcctctaaaactattatctttaaaataactagttctgcataagctgaactttagaagtttatataaaattcatcttagatccttttcgagtaaactcaagttctgtagaatcatagagttgtgcacttcaatgttataaaataaaaagacatacttacagtataataagaacccctaagcatttatgtaaggaataagcaacatggagcataccttaaattgtaaaatttgtagaaaattcatctttagtctaaatgaagtgaaccaaatttctgtagaaccagcaagtaatatactttaacctagtagagtgaattatggcaccctctgtacagaccatagctctaaaccttaatttggtagaataggtactaaacacataatagtggttaaacaatacatatgaataagtgtatatatatatgcatggtagctccaaataaatccaaataaaacttgttaggaccagtggagccatagttccatccccatctaccaaaacttagatgaacttatctcatgcaacaatctttagattgataagttaagtaactaacatagaacatccctatttataaaatatgtagtaaaataatataaactccgaaattatgaactaagattagattagttaactaaaatactcattttatacaacactagcaagttaaagcaagttctggacctaagggcgccatcgttttgcagttgctgctgcttttcagcagtactagcctaatgcttataagcatcagcaattccattgttttgtttatggctgattactggatcttctatgaactgatgcattgcctctgcttgcctgcctctgtgtgcgttgtgtgctcgtcagcactgagtccaaatgcgtggccgtagatagatcccgacatgtgtagggcccactaccaatagctgtttgcatttaggccgtaacagcgaaccgatgcgcttctgctgcaaaacagcaaccgcaaaagcgaaccgatggcagcctaaatctccaaagccatgtacacatagagactatatgcctagaacacgttataacttgtaatttgtgaaccacataaagaatacataataactctaaaaattgtgaaaccaaatgtattagtcttagaaaacacacctctacacctctgtaaagtcaaacttaataaacatcactttataaaaatattttataacactacctaagtaaatactatcctataccgagcaaacttctataattcataactctcaaatgaaatgagataaaatagaaattctttcacgtaaattcattttagaccagtacctatccactgtgcacaaatcatgcattttagagcattttagatttttcgcatatttcggtgtttaactgcataacatgtactttgtatagatgattgcttaaacggtgaagaagtgatttaggtgctgactttttccggttacaaggaaagtcccacctccctctctttgatcactttgaacctatgttttggaggttattgaaaatgttggcaaatcttgcatgtcgattgtacactaataaattaaaattttgttaaacttgttaggcaagctcctattatttgaattatcaccttaacccacatatatccatatccctcattcctaaccttaggaacaatacgactataccactttatatatgagttttggtgacactaggttactataatgcttagccatgtttagaatggttttccttgtcattatgggctcattacaaacatgaaaattaatttttaaataatctggaaagaattttaatacttgtgattttgataaataaaatggtggaaaacatggattttaggtttgggcctcaagtggtgcacatatggtgattagttgtgtaccgatagggggagagtgtgcccaaaccaacctaaggacttcactcaatgtctgttcattatgtttaccatacatccacatgtgtctttatgggggatcttggcctattaagttaagcacttgtctaaccttgcattcgggaggccgttatagtataggtaggggccacgagtgtactgtgggctacctagaggaactacccatgtgtgtgttgaaccttaggacgagtgtactgttcctaagtgtgatcgtaggatgataaattccctacgtgtgtgatttccgtgaggggacgagtgtactgttccgcctcacgtgttccgcctcacggcatgggcgtctaagtgtgtccaatacaacgatattgtgccacgtggtgggttcccattgtgtccgctaccacggcgttaagtttaaagcgtgtgcccgccacttaacggttctaggtcatataacgtgtatggcctaggatggagaaacacgtatcgtgctcatgcatggttagacaatacttaatgtaaaagcctcgttgtgtccgctatcacggcgttaagtttaaagcgtgggcctgccattaacagttctaggtcatataacgtgtatggcctaggatggagaaacacatatcgtgctcatgcaaggttagacaatacttaatgtaaaagcctcgttgtgacctctagaccatactcaatgtgtagagtatggtggtaccgacgggtaccggacaaaccagagcgattcacatcatgtgggtaaagctgtataaagtctgcagagttctaaaacctaatcgattagccgtgctcgcggtcatgagcggcatgtcgatatgtgttgagtatagacttgtgtttattcttctaaatgctgaaatttaacttcaaaatgtgatgagatttgagaatgatctccttgttgccatggatggcaatgagtagtatatttatacatgattaatgactactttgatgcccaatatgtcaagtacttgcttgctgaaatttatttgaaagcaaatctgatttggaaatgttttatgcaaataaaacttgctttatgctaaaaagaaccatatcatgccttccttgattatatgccttgcaagtagagtgttaggcttgtcttggtgcttaccagtacattatttcttataatgtactgactcttgctattgaattaaccttttgtttgcaggtttagacttagtctttgagtgattgcggtaatcg

SEQ ID NO: 1595 - DNA, 1218 bp, Oryza sativa
  Intron number 1 from transcript LOC_Os07g42200.1 (locus LO C_Os07g42200) derived from phytozome v7.0 (chr-ID Chr7; po s 25254667 to 25255884)
gctggtacttcacccctccacgtgtcccttttccacttaatcatcaaaaaaatagaataaaaaagtgatatgatttcatttgattaattagacatgcacgcgttaatcactttagttagttaatcatttaatgcgataattaaatcagattgatcgattatgtttgtataagattaacaattaagcttggagtaattaatctgagatagtgtagtgccagcttccttggaagagtccctaaatctaatgcttgggggaaacaacattttctcacatggtttcttatagtaaaagagtggccatcaaatatagcttaattggtagagtagtagttgccttgcaaggatcactcaaatatatgtatcccagtatatgaatatcctagggcattgagtaaccctctagataactgaaatttgcaggtgaggaacagtattttttttttctttttgagggtgagagatatgagatatcgttgattttgttttttaaattaatattattgtttttctttgggaaagtgtcgattttccttttatttattgcatagaagcaaagttgtgtcgtttctcctgtagcaacagggaatgttcagtcaaattacccaatcgtttctttcctaatgctatttagtttcccatcaaacagagactgatcagcggtaattagtttggttatcggtcgactagaggttaccacctaaaagactgtattattcaaattttatatttgaaaattttgaacttttacgacttatgactagttaactaccaattattcattaaaaaaattgaatctgaaattttatctggtaaaattcagtaactgtcaggggccagtagcttcggaaacccggtttctgaaacgcttggcctaaacaattaattacagattgtttaatttcagatcaactaatactactactactcacacgatcatctagaacataatcaaacaggtttaaaaatatcttaagcagcacgattaggacgtgcgaggcaaagaacaagggaggggtagttggacgatgtgacggttccggcgacggtcggataagtttccagtgatctaatcatgctgcccaatgcaacagtgccactgaaatggacgtgatcatgctgctgattcgctgctactactactactacctgatttctgatgattctgacgtcgttgcttgcaggcagaggtgatcttccttggccagcttcggcatcc

SEQ ID NO: 1596 - DNA, 2078 bp, Oryza sativa
  Intron number 1 from transcript LOC_Os11g26910.1 (locus LO C_Os11g26910) derived from phytozome v7.0 (chr-ID Chr11; p os 14996208 to 14998285)
aggtcgaccaggccaccctcttcgacctcatcctggtataaaagcccccccctctccctcccccatcgcgcccctaccttttcttgatggggattcagatctgcggttattgctagatctggatttgttttcttggtcaatagctcgaggtgcattctgttccaagctttttgggatgtatttcatccggtatgtttgttactgggttggatgtggtttccatgcatcacgcattcattcatgtcagttgtggaaatcatggttgcgtgaatatcattagggaaaacaagtgtactttgtgcagatggggtaacggtatgattctgtatcctcatctgtatggtcgatgattgtatccatatgattggataaatgtgccctgctatttgtttgtttcatactggtaattatgtaaatcaggactgcgtagatgtggtaattgatattctgcagattttttggtatgatcggttgatgtattgctaccatgggtttttattaaatacaacatttagttaaagaaatacataaagagctatgcagttttgcgattgtatatatttgaagtatgaaatatgtttctagtgccatgttgtaataaactcgtccccttctgttttgttgttaactgttacacaattccttccctgttcataaggattttgtgcttctctatataacaagcatgatatagtatgaaattgattgtttagatgcatgcttgccaatttggtagattaggtcaagctttaaatttgttcccttctgtttgttgttatacattatttcctttcgtgttggtaagaatttgagattcatatatcaagcatgatatatgtttgtagttctatgttgtaataaattctctcccttctgattgtaatgtttttctttcctgttcataagtcaattgcttttgttatgtccttacattgatgcagcctccttatgattatgttcataaggaaattagggctgttacagataatgatcttacattgatgtagtcttgtgatgcatcttttatgtatgattgactactgtattgctaaaatggtgaagcattatcttaagggatttagtacttgttctgtatctctaatttatgatgtttcaggcattgagtaattgtgtctctgtatcttcactgtgatatttctttgatatccagtaataaattcattgcatactacagtttgtgatcacaaattcgttcttctcttgatcaattcattgcatactacagtttggggtcataaattctctctgctcttgttcatgaattgtaaacagttctgttattttgttcatttattctttctgctcttttttcatgaattgttaacacttctcttgatctaagagaaatgatggcagtctcatttttttctttgattgtcacaagaatttactatctaaattaagttgcttgatggtggtggactattaacaacactgcaattttacaatgagacgggttatggggtatcagtgcatgttaaattattgcaaaacaaaatgtatcatgttttaacttgttgctcaagtgtttgtataccaacttctttctatggagggtccttttttttttcttttttgtaaaatgccgtatttgttcacatgcactgttttatttgtgtactccactattgcggatctaactttgttgtttgtttctcatcccacggtgtcacgtacctatttctagtatttctgcatttcaatttggatttgctacacactcgccttttttcttgaagtttttacatatatctgttatttctaactttgttgtttgtttctcatcccacggtgtcatgtacccatttctagtatttctgcattttaatttggatttgctacacaatcatgtgctaaagtaatttgtttcagttcatagtgttctcatttctacatttatgctttcttttatattccaaagttgaactatgtattccttttgtggctgaatgttgatctgtgctttagccatagtgattactgcttcttataccatgtttatttgattctcaaatcccacaggccgcgaactacctcaacatcaaggggttgctgga

SEQ ID NO: 1597 - DNA, 772 bp, Oryza sativa
  Intron number 1 from transcript LOC_Os06g48770.1 (locus LO C_Os06g48770) derived from phytozome v7.0 (chr-ID Chr6; po s 29522063 to 29522834 reverse strand)
caaccccgcggccgcttcgttcttggtcgtcctcggtgtgttcttgttgttgttgttgttgttcggatcgagttgatttcgtgcccctcccattatggaatcaggtttcttcagggtttctctgatgtagggtagaagattgtttggagaggccaagaaaaaaaaagttcttttggagttcagctgaactcgttgttaggtcgtttgcccctgatttagattcgattctgaggtaataaagttgcggaattgtggatgtccggaggatatccgagggttttatccgctcaatttgatgtgatcaagcaaaaaattcgtttctttttatgtttaaaggccttaatactacacaagctagtagtagtttgttttcttctgctctactgcaaaagtaagtactccttgtttgcatcccttggtggctttccagtacctaccatctgatgttgtagctccttggaaactgcttgcttatccctttgtcatgataagaatgtggtgtgaggaagaaacctgtattctttgtagttatacgctttatttgctttccttaaactctgtctttgtctgatttaatgtaaatacaagctgtcgcgcgaattcgttatcttgtcatgacttgtcaagaacagaagaacagtcctttctatgaagaagttttgagcctattgtatgtgatcggtagtgactaaggaatgctgatttggatttaccttcttgtacttgtgacattgcagaagatcaaccgtctggccgggagcctagagttgtt

SEQ ID NO: 1598 - DNA, 1378 bp, Oryza sativa
  Intron number 4 from transcript LOC_Os11g07930.1 (locus LO C_Os11g07930) derived from phytozome v7.0 (chr-ID Chr11; p os 4094879 to 4096256)
tgctttgatctagataagctgaacgacaagtcgaagttagtaatttgcatttgtgttcttcaggctgactcagtacagcaaattgaaccaacgttcttactattttataaaactaggaaggtagcatgtatcgtaagttgtgttcaagaaatttataagattggaatattaaccagacagtatatgctacgcttcaaatttcaaaaaaagtatttctctacgattgtttttcaacgatattctttgataatttttataagctatttgttagttttatacaacaaaatatttaattcatccctatgagtaattatccatccagttatcgagaaagaaagtagacttatttttgttaataaatcatgtttaataaattaaattcaaattaaaattgaagtgttattaacaaaacaaacattatacactgatgatttgattcatcttcaccttggcaaatcagtattgctgcgacactcgtgatgaccttggtaaatcaccttagctgtcttaggtgtggtggttcatctcggatgttttacttttctctcagaatttcttggatttttctaatttattagagcgccacgttatggcttaggagcatttgtagaaagtttaatagacttttagtactgcctctgtcctagaatgtaacaacctaggataggatgagacccatcctatattctgggacgtaaagagtatatgatagatagatagatagatatagtattatgaaatttactctttttatttatataatgagttgctagctacaaaatagggaggagaaagtgagcaaggagagaggagcgaagatcatatatatgttattaatttaatatttaattactttttatttttcatgtaaaagataggatttttttccaaaagatatattcttgtatatccaaacatggccaatgtagataaataaaatataatataaaaattataatcatttagagaatttacttttatttacatattgaattttgctaggtagaaaattggtagattgaatggaaaatggcaagacaaaaggaagtacaggagaggaagagacgtatgtacgtacgtacgtcaggggagaggaggtctcgtacgtacttgagggccacctgagaggtggtgggttaggggtgggaggagattatggattgggttttaggatattttttaagataagatctaatggtgaagaataatgggtctaccatcttaaatgaaaattaacggtcggatgttttgcttttttcttagaatttcttggatttctctaatttattagagcgccacgtggcggtttggaagtgtttgtaggaagtttaatggatatataatagatatattttcaggtaccgtccgttcaaggcat

SEQ ID NO: 1599 - DNA, 8843 bp, Oryza sativa
  Intron number 5 from transcript LOC_Os06g28194.1 (locus LO C_Os06g28194) derived from phytozome v7.0 (chr-ID Chr6; po s 16022491 to 16031333)
tacaggtatgcgagtgcttgcattgttgcacatctgaatgattatattctatttctttttcctatattaactttatttaagcttctttggttcctttttattacgggaagctttcaattgattggtaaatagtaattatttttcaactgaactcaatgtgaactatgtgatgactattagatgctccggtttgcttcatattagtggtagcccccttttctcttctctcttttttacaaaccttgtgcgtaccttttcttaacaaagctaggtcaaaaaattctttgaactaaaaacagtaattgttgttgtgacaacacatcctcatctactccacagcttcctaacacttttatcgttttgtaacataatgttatattcacatcgtccatagggctgttgaaaaaaatgaactgaacactatttttctattcacatctgagcaatcgcatgcaaggttgtcaatatcgcagtagggatcatagtatggtataatcctacaatacccccaggccaaaatttacgtatcagtcacatggaaaattttgggacgaaggggtaacatggaaaattttaaacctatctatacctatattaattggacactttctatgaactataacattgatcagaagaatctggccatcgattagatgtatcataaaatctgcactgcaaatctatattgatttaacgtcgtagcccgactaatctacctttgaaagcccatgaagctagcctgccttcaatctagacgtgagactgcaccaatgcgagcagcagcaattacatcgagacctctccttcttgctatttttcctcaatcaaaagattgatttcttattagacacaataccaatgcgtaggtagctttcttattccgatctcttcgggagttttgatttgctttcctccgccggccagacaacgacgaagggaaacccactgcagccccgtaagtctggtgtgtattgttccatatcttttagcgttttcaaatttgttgatttttggtatactgcccaactaacaaaaatactcaaaattgacactctaagataacttaagttttaaaagataattaaaaaattcatgtatttataatatcaccattattattagcatgcgcaacgcacagatgtagctagagaactccaaaaagagttagcccttcattagttggattatataattttattatcgtagatcatattaagagtttgtgtcgtggattgtgtagattcttttccctaaaatttgaaattaataaatagggaattattcacttcgtgggctcttaatttcgcactttgctttttaaaataaagtaatacatgttcataacgtgcgtgtgatcagccctataatttgattcgtagatccagcattactaattagctaattgtagctgacatagatcattgcttcaatctaacataccgtaaagaaacaaaatatatatggagttgtccttcttcgactactaatactagtcgcctacctgtgtttgcacgggttattgttatcggcgttataaagaataaaaaaaatcataatttaattatttgtcgacattttatgtcatgttggaattttaatttagtcattttactaatttaatttgtaaatcggaaattactaagtacggagtttgaagtctcaattatcccttattcatgatctattacttttgaaattgtaattaataaatattaagcagttcctgggttttgtgtgaatttacaattttcctttgtaaaaaattatagtttccctgtcttaaaaaatacaatgttcctttcttaaagaagaatgagttttcttatgattttaattactgatcatacgcagcgcccacactcaaattaacgaagtagtcgatctattgcaatttttagactgatcatacattgtcactttgctataaaacgtaaatcacataacagaactggcctatattcagcaaatcacactgatgtgcaagaggagagaagcaacagaagaaacaaaaacattatgtgcaagctacctgcagatgcgcatagaacatgtcaaacattgtagagttttcagcttagaaaaaaataaaatcacacctcagatttagctggaaaggataatccctgataatcagcagcagttagagcccaaatcagaacgaagtgcatttagaacgtctcccatcttctctagcagaagtctcatgtgaccacgtacgtttccatttgcacacagttcgattggatcggatagagtccaaattcgtaactgatcaggatgaagcgcgatggccggagctgcttttcatgattctgtctcgcgttcctgtttgttgcgagaggctgaaatacgtacgggtatagggcaataacaggttggattatttttttcaaaacgcaaattggatgggctttcaaataggccttggattggctctgaaagaagcccataatattaaacattatgatcaatggtcgagatgttgcgatctagttaatcaagggctagatttttcttcttaatatgggagctcgtaggaagtgcccaattagggcctgtttagggcctatttggtacagctccaactcctaaatttagctccagtagttgagtctggagtggagttgtggagctgactaaacttagctccacaactctagaacattttgagagagagctccacccaactccactcccagttttggtggagctgaaatgagctccaactccagaaggggtggagctggagctggagctgtgccaaacaggcccttagtatagctctaactcctaaatttagctccaggagttgggtctagagtggagttgtggagctgcttaaacccagctccactcccagctccacaactctagatcattttttgagagagctccacccagctccactcccagttttgctggagctgaaactatttggctgagctccagctccagcaggggtggagctgaagctagaactgtgccaaacaggctcttagggcctgtttggtacagtttcaactcctaaatttagctccgggagttgggtctggagtggagttatggagctgcctaaacctagctttacaactctagttcaatttgtgagagagttccacccagctccactcccagttttggtggagctgaaactgtttggctgagctccagctccaggaggggtggagctagagctggagctgtgccaaacaggctcttagtataggtatggataaatagatatatatatatatatatatatatatatatatatatatatatatatatatatatatatatatatatatatatatatagatagatagatagatagataactttttttaaatttagttctggaaataaaaaaatcataattaacaagttaatgcttatctaaggtgctatacgtttcaaaactaagcaccatatttagctaccaccaacaggaggaacgacagtctgtgcaatgcacgggctgacaactagttcccctaattacacaaatctaactagacaaaattaaaataggcacgagagagctcctaggctctggtaaactaaataaaaaaaatgaatagggttgaattacacctcacaaatccaatttgtagggcgcgacccatagtgagaaaaaagttttgttgtgacaaggtccaaagtgtgcagcctcagttgcaaattcctactgatcatcgtgctattgtattaaagacaggtcccaagccaattggtacacatgaatataatccacaaaggactaaccatcttccttttattaaaaaattatcgttacggcttaaacgaaactgaccaatataaagcacaacaatatgtttaaattttggtcttgagatttctttttgtttgttttgcctcaaaccaattaccaaacataagaccattgtgccattgttgtttgaggctggatgtaatgtaaatagctattcctccgtttcatattataagttactttagctttttttctcctaaatttatattactagccatattcatttttttcataagtttataaaaataagtttgactaaatttatagaaaactagaaaaatattttcaattcaaatgaaacatattatcaaaatatattaaatgttacatttaataaaaatgatatgatgttgtaaatattcacaactatttttttataagcctcatcaaacataaagaagtttgactaggaaaaaaatcaatacaacttatatataaattgggggaagtatctacaaaaatttgagcaataaggctttcgaacaataccaattttgtttaaaaatacttaggtttcaatattgagaattcaagatagtaataaatatccaggtcaattgctcttttgacccagttttagaacctaattattattttgacagtttactcattcgaccctcatttttaaaaatgaaatgattgattggccctatattaacagcactgttaagaataaattaggaatgaaatagaaaatgaatttatagaagggaaaagaatgaactacccctatggttctagtaaggaaaaagtacgaattaccccccgaactatcgtgccagtacgaattacccccctaaaccacaaaatcggacattttaaaccctaaactacttataccagacgaattacccccctaactcactccaaagcggttttagtccgatgtttggcacacacatgacaatccagttagcaataccaaataaaaaaatttgtagggcccacatgtcatatggctttctagttcctcaatcctcaccctatcctcgttgaagcatgcgtcggtggcgagggcagtctccatgagcactcgtgctagaggaaggcagggctggctgggcgtaggcgggaacgagctagatgcggcaacgatggtcgcacttgacccctcaagccgtgcttccacaagctggcgacagcggtggaaggggcttccatcgagctcgacgcagcgaccatggtcacgcttaacccctcaagccgcgtttccacaagctggcgacggcggtggcggcggctgcttccatcgagctagcagcctgaagatggtgacggaagctgggataaggcaagagctcgctgagggcgcaccagccgcacgagctctagtaggcatggatctagagcgagttggtcctgagccgtgttgtcctcggctccggctccccctccgccactgcctccaaccccaccggccgccttcctcggttccccctccgtcaccagcagctgcacgtcgccatcctcggctctagccaccgtcctcgaagttcccctccgttgcccacaggtgcgcgtcgtcattatcggctccggctcctcctctgtcacccgcagctgcctccgcccctccagttggcgtcctcagctcccccttgatacgtcacccgcaactgcctctttccccgccggacaccgtcctctactccccctccaccgctgcagctgtctccgccttctgcggccgccgtcctcgactctccgcccgccgcccgcagctgccttcgcccccgcccccgcccccgcccgccgcccgccgctgcctccacccccgctcaccgccatcctaagtgattcttgtgagtgatgcaggtgagggaagggagaacagggagggggaatagggaaagagatagactagaaagagatggagactatgagaaaatgataggcgggacccactgaattttagggaaaaatattgctgactagactgccacgtaggattaaaactatctcggattgagctggtggggggggagttattttgtccggtttgcatagttgggggtgaaaaatgtctggtttggtggtaattcatactttttccttatagtaaatgcttgttagtccggttcaagttccaacagcaaggacgcatacgtgcggctcgggtttacacgggcagtggcagaggcgcgggaggtcgctgccgccgggtctgtcggaggcgtgggaggctacgacgctcgccgtagctcgtctacggagcttgactcgggctagagttagggcgcgactcggctgcagatctccatcgtccacccgctgattgctcgttcggccttttcctgcccactgctcctgcttatcctcccatgctgttcgactactgcttccgtacgggaactgctttgtgattgcttgtgacattaactacatattgatatgtgttttgtgtttttccttcgatatatgcactttgggatgcagttaaaaaatatatgcaaattgggatggatgctgagatgctgtcaatttttttagtatcttcagtaatttttttcaaatctaattcaaatatgtcaaaaatatatcaaactaattcaaattggtcaaaatatgtcaaatctacgtcaaatttctcaaaattcttccatatgtaagtcaaacctaagttaaatttgtcatacctagtttaaatttgtcacatatgttagacaaaattttaaatcagcataaaactaggtcaaacaaaaacactaagaaaatagggtcaaataagtaagagcacaaacgttattttttacataagttaacaccgttatgttgacataactaataaggttataccttctcttcgtttttgaaaaaagatagtcaaatgagcaaacttaaaaaaatagcatcaaattggtagcatattggtcaaaatcataattgcccctaaatatctatatgctggcatatgtcacactgatgcgtgtgttttgtacgtcactttggtgtgtaaatgtcttgtacgatgtttattggttttatgaatggatagattacccaataaataattcttttgttgcagcatactaattagaaagactaaattaggcagatagtatataaacttgtgaggtgggactgggagtagtatagggtgcaggtttgtagaactctagttgcattgcaccaacttgggtggtatatgtttgaaccaacatcgaaagggcacacttggcaatttttttgaagttagacattgagaacaatatgccacagggacacttatggttagtatcctagttctagggctgcaaattgaaatcatgtttgtgctttactaatgttgccatgtttgttgagattttcatcatgtcgagggtttacttttaaaaaactttgaattaattatgtattgttaagacttgtgttacacatacaaccaactcacgctctctctcacactcaattaaattggactgtatgtttacaatcatcaaccaaaatcgaagtaataaaacctggagcaatagagagccaaatataaaaactaatcgaagacactacttcctgcgctaatctataagcagctatattcactaatctcctaacccaaacaatactaacgctatcgcaaagaatcaactttatcttcagatctttgtaccaagcacccataaatcgatctgttaacttcactctgcgcaaccatcctcgttactttcaaataatcaatctcaataattagtttagagtaaagtgcattggcggtccttaaacttgtagggttgtgtcatataggtccctaaactcaaaatgcatatccaggttccagaacttgtcaaagtgtatcatctaggtccaaatttacacatcccctctaggattctacgtggtgctgatgtggcaataccacatggacgtgacgtgtcttttttcttttttttttctttttcgttttcttctcattcttcttttttttccttttttctgcactggtcatagagaaaggagaagaaagggaaaaagagaaaaaaaaagaaaaaggaaaaaaaataaatgggtcccattcgccagtcaatataatgccatgtcatgtctgtgtggcatgccacatcaacgccatataggatcctgaaggggttgtggcgatttgggacctaaatgacacactatgataagtattaggatttggatatgcattttgagagcttagggacctaaatgacatacctctacaagtttaaggaccgcccgtacactttactcaatagtttagaaactcctaactctcctgcaagatcagctgccccgcgacaagctagaatttccccgtggtagcatcttgaatccttggatgataatgtgctacggccgccataaaacctccggtgtcattttgcatgaccactcccggccagtgctccaaacttatgtgcctcataagtgagacaacagaatagaagtagaagccaccggattcacacccgctaagaaaacctcttcttctttagatcgtgaaaaaaatgaaaccatcacaaaagctccatcagtatttaacttcacccagtcgattggcagtctttgccaagtctgtgctagatagtgaagagggccattgttccggaacggcaagttcacccattcatccaattggaagatgattttgcttgccaccacatcctatatggcacctaactttgcaatgttagctatggtgtgtcgttttggacttcactcatactacataaatttgtgtacttaaatgagtactaactccgtcccaaaatataagttttaaagttggacatggttattaagaaactaggtagaattaaatagggtgaggttgtgattggttgagaagtgaaggtgggtgggaaaagtgaatggtggagggtcatgattggttgggatgggaatgttggtggagaagttgttatattttgggataaatcctaagtactaaaaaatgttagattttgggatggagggagtattttagaaggtcgtgtttacaaattgtataccattaatgcaaatttactgaattataaacatttagcatgcatgattattttattttgctaaaacagggctaaattttttg

SEQ ID NO: 1600 - DNA, 504 bp, Oryza sativa
  Intron number 1 from transcript LOC_Os01g69900.1 (locus LO C_Os01g69900) derived from phytozome v7.0 (chr-ID Chr1; po s 40384566 to 40385069)
aggtcctccgcttccatctcccgcgcctcgcagcagtacggactccccgcctcgccctttctgtttttcttttttttttttggtagtattacttctcttggattgggagatgctgtaggtggcggagaagcgtgggattcaggcgttgccttggggttgatagttaggccttttaggggggatacttttatttggtgtcgctttgtttgcaacctaggctagatttgatctgatggaataacaaaaaagattacgacacagtagcactacgaactagaaaactgaagaatacaaatccaattaatctgttataatgatgtatgaatgctactagtagtttgttgaattttaattcggtaacgcagataacttcatttacaatttacaagcaagcttgtcttcaatatgacatgcataaccggttaatagtgcattgatgcgaagtgagtaaaaccgaaatgctagcgggcagcattgcaactgaagagtatttgcctcaggtcg

SEQ ID NO: 1601 - DNA, 10003 bp, Oryza sativa
  Intron number 1 from transcript LOC_Os10g11750.1 (locus LO C_Os10g11750) derived from phytozome v7.0 (chr-ID Chr10; p os 6513115 to 6523117)
cgacgtctgccacaaggacaaggggcatcaaggaggtgcgtttctgctttggattaagattaaatgcgagcacgtaaaacgataaagctattagcgtagaattaattgagttttaattgctacatacttgaaaaattgatatatttaatattttaaaacgactttcatatattatttttttataggcacgaatcatgccgttagtagtttgaaaaacgtgctaacgaaaaccgaggtaaaatcttattcttaataagaacaagagtgaaatatatggacggtccctaaacttgtgtggtggtgtcacttagatccatgaacttgaaaattacatgtttagatccgttaacttggtttaatgtaccatactggttcaaacatactttgactgcgtttaaccgccaacgtggcatgccacgtaggcaacacttttgctcgcagccccctccacatcacaacacgtcgcatatatctccttatagctatatagtgacactagtatctcaaaaaaaaaatcctcaaatcgttcttacctctcattcttctccttgcatgtatagaaaatgcggtcccaattagcaattgacattgctctgcgctccaaaataaccttatcgatgcacaacgggcacttgatcaataataccttcttccagtgacttcaagacgaggacgcttagaaaatccatggagatgcctagcgttcaagctgcattgtgctgcctcccaccactaatccagtcgcattgtgccatcgctaaccccgcttcactgcgctgcctcctgccgctaatcccaccactgaggccgccatagccgctacggcgctacctctcggcctccttccgttaacctcactatagaaactctagccgatttaggaatattttgagggatttaggtttaaatgcactggtcagggcaagttatgtgcgaagatatatgtggagggggctgagcacagaagtgttatctacgtggaatgccacgttggcggtcaaacatgatcaaaggacgattggaccgagcgtggtacattataccaagtttacgtacctaaatatataatttttaagttgatggacctaagtgacatcaccccacaagtttaagaaccggccatgtatttatttgatttgtttgttggtagatattgttgcgtgtggtttaatgatttttctccaccaaaaaattataatacgtacttaaaagacatggatatacggcaagagaatcctgggaatccgccaatgacatctttccatgttaggaacaaaaggatggttacgattgttctcgtactagtaattaaaatatcattgtattgcaacaaagaaaaactaaaataataaactaattgatttggttaatttttatagtcggagctttttaaaatggcaaattttcctttagaaaatagcgacttcgtaattttaactgtaaaacaccacacggactcactttgacaaaaacactctctgaatgtggttatttgggaacaggctcctctgactttacggagccacgtcacgccgtaacgtaaccaatcgcgatccaccgtacagggcgatccaaggatgctccgtctttgctccttgtcctacattaattagcacactctgtcatcttcttacttaattacgatcatgtatttctttctggcaagagatgtgaaaaataacagaataagaatgaaacttctgatatgcatccatcttataacataaccaaccctcaaaatttctgacaagaatatatgaaaaatagctaagattgaaacttctaatactagtaaactctaaactcaagtcatgtcgtgatataaaagctctgaactataaccctgcatcgtttaagagcatgagttagaaaagaacaacagtttttatagtctctttatgaaacatttgaatatgcaagataattatgtccggcgaataactataccttcagcaattcagtgtagctcgagatgaactcatatccttgtatataattctcaatgcttctagaagcattttcttcaactaattgagtttatgctgttatgcttcgagtgttcacgtggcaccatcgccttcttcaatggaacatcctcgcttgatttcctggtataactcgattccctcgtataactcgatcataacagataagcagagtgaagaaatctgtatattggcggcaaacatggttaccatttttattttccctccaaaatgctagttaggataagaagacgattttaacagaggggagttgcatcgatgacacagagcaaagatggagcgtcgttggatcagcttggatggtggatcgcgatggctacgttacggcgtgacgtgctgctgtaaagtcagaggagccggttccggttatttgatagcgcacgccgcgtccattaaaataatgcatttcaaataataagcgggccatatttttatgcgggtgaccaaattgcccctccgtactcttcctccctcgtgcttcttcttagtctcttaggtagacgccgagcaacctgcaataactaatacgtccgccgccccttgtcgcgccggtggcctcgagcaacacctcgtagctcgatcgcgtggaatccccccttgccgagcgcctcgaactggatggcgtccgtggccaggacggtctcgccgtcgccggctccgccgcaggcctgtcgatcaaacgcgaagttgaggttgcggccgggcgaggccgcgctccaggtaggcatcgatgaagcagccgtacgtgcatgacgaggtccggctgaccccacgatggtcacctgctgctgacccggcctgttgcttgctctccaccaacgcaacgcctgttggagatagcaccgacacgttcaccagcggcggcgcggcgttttgctgctgctgctttaattgtttttagtgcgattgttcctgttttgcttaattgtatgtgtccatgagctatagctagcttgatcgagagacagagaagcatcaagcaatgcagcaggtcgccactacctcgtgatgagcggacaaggggcattttttaacctttcacgctatttatctctcctattcaatcaaaaattaatattttaatagatatggtgtccgctgataaataaccacgtttacatagtgtttttccccaaaagtaagttcgtaataaccacgtttacagagtgttttcccaaaacgtaagttcgtgcggtgtgctatagctaaaaccacgaagtcgcaatgtcttgtagtaaaatttgcctttaagaaaacatattcttctctatacgtgcaaggtaacatattcaaaatagtttgtttctagttcacataccacaacatcaattaagaatttatggagaaagccccaactttctctagttgatcgaataaatctaaattactgaaacacatcccggccaaccaaactatactaccttgtttaagtctaaggtttttgtttctctagcgatacatattttggtacatataagtaagatgaattggtgtaatatataattggttgtagctcgttgagcaaatgccggaattatatttcataataaaaaaacgtgagcaaggatgtaaggatgtaaggagagagttggttgttgaacttttatagtactatatttaatctggtatcacgcaatatgggcgactctgttgtgatagcaatggggccattactatattaatattgaaaaatagtaaatgtgtaacatattagcatgctaatgcaaaacaataaattgcatcgaatatttaatatcagcccaactcgctcagaaaaaaataaaaaaaaatatataacttttttacaaggagttacccaacatgtacatttgatgagaaccgtgcatggacgggcccagctagcgtgcgtgccagctaaactgctaacgcgtacgcgcgcgataggaacccggaatcgctaattggcgcgcgcgcgttgccggcgcgtacttctggcccacaaggcccacgcgcgcgcctcttctctgtttttttctttatttttttgacgccgccattttcttcttttattctttttttttttgctgttcgctattcctgccgtatgaataggggaaaaaatcgtaattagtttagattagattagttttctatttttactaatgattagtttactagtaatttttaaatcttaactttaaaatcttcaaatctcgagttgaaagttttcaaatattttaagggaaaattggaaccatgccattataattttgcaaaatttgagatatgccaacctgacccacatgtctttgactcatgtgggtcctacatgttattgagataccgatggcatatctcaaaccttgcaaatttataatggcatggttccaatttacccatatttcaaatgtagacttgaaagttttcaaatctcgagttgaaaattttcaaatctcaagttgaaagttgtcaaattttttaaatctggacttgaaagttttcgaatcttgagttgaaagtttttgaatctaagttgaatgttttcaaatctcgagctgaaagttttcaaatgttgactttaaaatttaaatcttaaatcgaaagttttcaaatctgacttaaaaattttcaatctgttagtaaaaaaatatcccaaaaaagaaagaaaaatcttaagaatcttctctaattacccgttattagtgttaagtattaactaatatagagaagttataggagagaagtgctcgctgctggcgcacacgcgccagctagcagccaccctaggaacccccgctgagtggtgagcggtggcaacgataggccttcgagcaggagcagtgcgctggcccagagcggagatggttgaaggcgtcactgaaaatcgtgtgtttgtggctaggtagatcttgttttgtgtggtttaatgattcatttatctaaaaaattagaatttgtaaatgacaagaatatacggcaagtgaatcctgagaatccgtgaatgagatatttatttccacattttaaacaaaatgatggttacaatatttctttatctggtattagtggtggtgattctaccggctactttaggctgtgttctttactggaggctccacgtatggaaaacatagcggtggattagcacataattaattcagtatttgcttaaatacttaaaataaactaatataattttttaaaacaatttttgtatagaatgttttaaaatacgcgggaagcatacgcatggaaacacgaggtgaagttgggaataactatggaacaaagccttatagataaatggaggctttttttttgttgcttggactttttattttatattctacatgtttttctgagaaatttaaaattttcagctaagaagttaacatatatattttctaatccattggaacttacttggttagtctattactccctttattcaatttgatgatcacccaagcatttttaggtcttctcagaatgatctttctctaacaattattttttttatgtgtaaatagtgaataaacatcatttaatgtgctgcgtgtaaccaaccaagactaatttctattggtgcaactaaatgtaatatttaaatttgatgtaactcagaggacacgaaaatatgtatcaccttaaccaatgataatcaattacaaaatgataaaagtttggttatgcttgctctccacaccctctgcttacgtgataatcaaaatggaatcgagagagtatatactaaaacttcatttaacatactgcaaacgcttttatatcgctacgtggcattccttcaaaaactcctagatcgtcacgtggcatgataataaattagctaaatctaaccattatttttaagttaaattggtggactcattaattttaatggttagatcaaatctcatgcgcatgacatccccttcagtaaaattttgtgcacagcgttaccaacaatcatcctatttcattcccaaaactgattttgatggttgcgttaccaacagtcatcctatttcattcccaaaactgattttgatggtttttagtataaaaattggatccaacatattcctaaaagccttgcatatatttcatctccatatatttcattccgtggatttaagggtgagagagcaactcccaatctctcgttcacgcgtttctctctccttctccgtgcttctcctctccttcccgcgcgagcgccgaaatttctgttgggagcatgcatgcgggtcatcgtgatctctctctgtgcacatgaaaggagaaaaaacgggaatttcagttgatagtttaacagtaggtcccacttttaatttttcggaattaaatttaggctatctcttggaggaaaaagttttttcacttcctatttttattttaggaaaccccaatatcatattttagaaatagattattgctaatttgttggtgatgctcttaccttccggacttcaatccttcttttttctcctatttttatgcaactgtttcgccagagaaaaaattgaaacaacataatttaattatgttctgttttttcaagtagttctctttaaattccaatttgtgttatttgattggtactgagaagtgagaagcattgccatagagatgtgaaaaaaactaccaaaaatatttgaagcgggtaattttgctataatacaacattacaaccccttaattcatcactagaattattgtcacacgtctagattttttctttgccaaatagttttggcaccaaatgaacaatccagtaacatacgcaccactgatgatatattttgttatagtcgaggaactccaatacgtcgggcataattgatgggctgtcttacaccccactgatgtgactgctagtgcacttcaatgaatcaattataaataagttcgtaaagctgtctcaagaaatatttatgaccagcggatgttgaaaacaatccagacacttaaactatatgtaaatataaacaatgagacggtattctacagatattcagggtgagttgtctctttagctataatattttgaagtagtgtcgaataatgagcctagctcattttcaaaagagaataatatatccttaccatgaatgtctactctatattacaaatcgactcaaaagttttaattaaacacatgttttgattacctctattttctctttgtccttccgaaagacaccaactatgagggtgccaatgtcgatagtgaactaagcattaaagttatgttgtatgatggtctttacatgcacggctacgttgaggcaggacccatatttcaaggaagcatagaagaaagccttggagcctatggtcggattgggtattcatgtttaattttaaagtaaattccctatgtacccttgaaaactcactcaatccttttcatatccctaaaatttatccgatcccttctatacccttgaaatttcaactcgatcccttccatgcccctactgttatattttccttcatttcactattatgtttggttgcaaatatcttttttcccttgatgctttaggtttgaacataagcttgaaaaatgatttatgaaactaatgagagtaaataattggtgcagaaatttttgatataaattttgaagataaaacaaatgtaataaattaaaatttttatttgaaattctaataggacaatggatatttttgatctggagcattcataaaaaaattattgtgagcattggtagtcctatctttgtaagaatgattatcatttttatgactttcttttaaaaaataaatacatattttttatttctttatctaaaaataaattttgtgataaataacacatcacacaacaaactcattactataatagtctgatgcggcaaacgtttatatttttaataatgtaattcatgaatttctatgttcatccaaaggtaaaatggttatttttataaaaaattagacggccaactaatggtcatctgaagggagaggtatggaagagatcaaaatcaaattttagaggtataggaggaagtaagcagggacgtagaagggattagctgaaatttcagaggtatagaagggattttctcttaattttagcggtgttaacctattaataggtagaaacaggatttttaaaatatttatatatgaatttggaaataaacacttagataagtactggagatatattttttatgtattaataatatattatgactgttttcttggtattgatacaatttcatatattaaatcagttacatctattaaattggcaaacattttttaaaacaatgataataattcgtggtagcaatatacaaatttatatataaccgggacaaagtgatttttgtctgaatctgggagacattctatcatttaggatattaaagtttgtgctctatttcaccgcggacatattttttattataaggtaatttatggtgactatggtgaggtatgacttctttcaatactttcttaaaataatgaataagatgccacgcgttcgtgcgggcttatctttttagtttttagataatagtaacatggaacagtcggagttaattgagttattttagctctaggcttcagcaattccgaaaatcgcaaaaatccatggtgtagtgtcagtaccgtgcatttggctgtatataatcgcagccgtacggacgcttgagtttttttacacctttttcaactacactcgtattattttgagaatttataaattcagggggctaaaaacacagaagaaacatcgtagaaaatacaatattgaagacaaaccgtagaaagagatttgttatcgatgtccaaccgaaacctacgaccctccacgggctaagttgtacgctagtcgtacacactatgctagagttgtcttatggttacaacatgtgtgcctcggtatttaacaaaagacctagacatagtttggctctaactgtatcctacgcatattaaaattcaaaatcttaaacttatacacatattccacacaaactctcatatatagtctaccatagttgaagttattccacacaaactctcacatatagtctaccatagttgaagtgatgggtaataagttttaaagataatgttcctagtataaagaatgaacagattcatttatggtgatcttttcaaccgttccatctcttttctgtaccagtaaagcatagcgagtagtataattactttccgacaaacgaatttatttctgaaacgagtaattacttttggacaaaccaatttgtacccttctgaaacgataattgttttgtaaaaaaaaattctttttgacaattttagtaccttatcagaaatgaaataagccaactgccaatctagttatctactccctctgtctcataaattcaaattctagagatgaacctgaagataggatttgaatctttattgtacagaggagtagatgcaacattgtgttttctggtacgacatcagcaaatggtttaaaataattctgccgtcctgtggcatgtaaaaacatattaatttccaactgctcccttcgtcccataatacagattttgatattttgcttgtattgtttgaccactcgtcttatttaaaaaaattgtgcaaatataaaaaatgaaaagttatgcttaaaatactttggataataaagtaagtaaaaaaaataatttcaaaattttttgaataagacgaatggtcaaatagtacaggcaaaatatcaaaaccccttatattaaaggatcgagagagtagcatagatgccatatcttgaaattgctcttaaccatttgaaataacaaatcagatggctgaaaaaaaatcgaatgtaccgataaacaaataagattgccaaaattggatcataccaaaaattagtgcattgaaatgtcacatttggctggctatatgcttacgcgaaaacaaataatatgcagaaattttatattcattaagtacagcatatctctttggtgaccccagctaatcttttcctgccataattgtcaggtcata

SEQ ID NO: 1602 - DNA, 1902 bp, Oryza sativa
  Intron number 1 from transcript LOC_Os12g10660.1 (locus LO C_Os12g10660) derived from phytozome v7.0 (chr-ID Chr12; p os 5699010 to 5700911)
acgacgaccaccaccccacctgcgacatctgccaggtacgttacgtactctcgattgattaattgctcttgctgtaattaacacagagagcttttaatttgtgtccttttagtcaaaaagagcggggaatttatgaattaaattaattaattcatatacggaattcaaagagatattttacatggtacaaaataaatatcatatatatatatatatatatatacttttctttttctttttctttgaccaagataaaccaaactcgtattggattaatgcggatatatagccaattagccatacaagttggacagatggagtatacttttctagcttctagagactagagaagagaaaaaggcgtactcaggcatttagatgattgccaattttcttcaagcaaggatacacatgcctagtaatactacaataactagccaagttattgaggatgcagttagcataacaaacattcctaaaagtttttttttgggaaattatatgcactactactaaataattttaattatatacatgtttaaccatatattgaaatcaataatattacacctacatgtataatctaaaccttaaatttattatattttattcgtaacaaaaaaaatttgacaatcttaagactataaatttttcagaattttattttattttgttacgctctatatagggtcaatttaaagatgagactttacatgaagatataatattattgaaaatacatgtacaaatttttctagattttttcaatgacatttgttagttgatatgtatagtgtatacgtgtaagggcttatgtgcatagaatacgtttccatgcagatgaattttcttttttttaatcaatgtttttgaaattttgaaacattgtatatggacatatatattctataaactaataattttgaaaatcaaaccaatcaattcaatctgatcaataattctagaatctaaaattagaaaaaaaaatacaagtatgttgtcggcttgtcgattatatataaccgttgttgatccatcactttctattttcttgatttaattctgaatctgcaaccaataaatgcaaggttatacttggcgtttattcttaatttagtatttattttattaaatgtttctgaaaatggggattaacatttcatagtctcgatttcagttatttttggcgttactcttaattttagttatatttgtcatgaaatctcaatttcagtcattcttaaaattttagttatatttgttggagtctcaatttcagtttttttttcacaatttagtatttgcaaaattatttcacaactattgtctataaagttatgctcgtccaggagtcaattttagtttttttaagaacttttatgatttattcctacctatacatgaatatacaaatttgttcccttttctcgagctaatatggaaattactaactacttgtacagatgttcatatcataggcattatattcatttgaagttttttttcagaggtttaaagttgttatgaagttgctcagtgtagatcatcctcttaatcatttcaaatagattaattagtaattaaccaagcctaaatgggcgtaattaaattgccgattaaccaagctactccatccgttcaagaaaaaaccaccttatattataggatgtgatatatcattagttgctatgaagttgctcagtgtagatcatcctcttaatcatttcaaatggattaattagtaattaaccaagcctaaatggggtaattaataaattgccgattaaccaagctactccatccgtccatgaaaaaaccacatcctaatcatattaggatgtagtaattaatttgcacgtaattacaggagaagacgggctacttcttctgcctcgaggaccg

SEQ ID NO: 1603 - DNA, 6826 bp, Oryza sativa
  Intron number 1 from transcript LOC_Os01g49614.3 (locus LO C_Os01g49614) derived from phytozome v7.0 (chr-ID Chr1; po s 28523930 to 28530755)
cagaaacagcggtgccagcaactcgtctacattaagtaagtcctgcaaatttgactttttagaactttgtaacaatatcaaaccaactagtagtcacttagtagtcacttatttgaagtatcatccaaacgtccaagtgcatgacacctccgtcattttgtttatactcggtagacccctaaaatctatatatctttgccgttcagatgtaatccaaaatggaaattatcccgtacaaaagaattgtaaaatccgtcttgagcattatgtggacgtcgatacgcaccgtgtctcaacggagcaaaatggaagatcgtagcctttcaattaaaggtagtcgtgcccatcatattttgaaacggaggaaatactacattcgttttataaaatataaaggttcggggatagtatttactccatctatcgaaaaaaatatattaaaaatcacttttacggttgtatcttactccctccgtcgcataatataaatgattttgcaggaatgtgacgcattttattactacaaatctaaatatctctgtctagatttagtactaggatgcgtcacatccctctaaaatcagatgtccagattcataatactaggatgtgtcacatctcttcaaaatctcttatattactcccttttttcaaaaatataagtatttttagtatagtgacaagtcaaacatttttaacttttgaccagtaatagcaaaaagataaaaaagatcaatcatgtaaaattaatcttactagatttatcattaaacaaactatcataatatgtaattctttttatttaaaacatcctatttttatagaaattgttggttaaagtagcatctcgtagactgtgtcagagtaaaaaaaaatgtttatattttgggacggagagagtatgtgacagagggagaaagggtatgtttaattccacgctaaaattagaagtttgaaaaaattagaatgatgtgacggaaaagttgaaagtttgtgtgtgtaggaaagtttaatgtgataaaaaagttaaaagtttaaagaaaaaagttggaaactaaacaaggcccaactccttttgaactaagggagtagttgggtgaggttaggaagttgggattaaagaaatcagatcaggtctaaaatttcctgtcatgttcaacgctgctagtagtctagtcagtcaattgctgtactccgaaattgactactagcaccgtgtactgaagtcgctaatgccggtcaaatcaactacatctcagcaaaaaccaaactcgttgtacggatatatagagcaaacgaacagagtttgctcctcttcacgtcgtctcgccatggctcgcctaccaagtttgctcctcttctttatcctcggcgtccatgcctccgtttcccatggctcgccgcctcttccatccacttacgacccttccatttgctccaagtcatcagagtgcggaggcgtcaatatctcctatcctttctatctttccaacgccaccgattattacactcgattttcttgcggctacaccgatttgaagatctcttgcagccgggaccgggacgggaggaacgagactcccaccatcctactcggtggagacaactacaccatcctggacatcatctacgacagtcacaccatcgtgctcgtggacaccgatgcgctccgcggcggcagctgccccagagtgggccacaacgtcaccttcggccaggcctatgagtggctttaatacaccggctcccctgacaacctcaccttcttcttcggctgcaaactcaaccttgcaccaccaatcgatccagggctggttagtgttgcagaccagtaccaaatcaactgcaaaaccttcagcaacgctcctaacggtggagattcgttcgtgttcacctccggcgagctcgaggcacgagcacgagtagagtccgaattggccaggcgctgcagccaggtcatcgtcgtgccggtaaatggaagtattcttaattcaagtaaccagagtgcgctcccaagtggtggatacagtcaagtgcttaataaggggttcgacctggcatggaactcaaggaaagatgaacaatgctaccagtgcgagcaatcaaagggacagtgtacctatagccagaacagggcgttcctaggttgcttgtgctctaatgggaaggtgagcaccaaggattgcagaaacagcggtgtcagcaactcgtctacattaagtaagtccagcaaatttgtttttttataactttgtaacaataccaaaccaactagtagtcacttatttgaaattgagatttgcttcggtccaacaaaaaacatctcgaggtactggtatcttacggtatcaaattgtttccaatcgttagatctaacaatatccatcatgaggtactgctagtgggcaggtgatcgctcccccttctcctagcgatcacccatccctcccccatacactcttcttctcccccttcctcctccccttcttctcttcctactacagaaatttaaaaaaaataaaaaaacaaagttaaaaaaatttatggatataaatactatatataaaaaatttgaattcaaattcaaatttaaaacgggtataaaacttttgacttataaactttgagtctataaactaatatttgaattcaaattcaaatttaaatcgggtatgtaaatttttgacttataaactttgggcctataaactttagatgtatagaaatactatataaaaaaatatttgaattcaaattcaaatttgaatcggatataattcaaattcaaatttgaatcgggtatataaacttttgacttataaattttgggtctataaactttaggtgtataaactttatatgtatataaatactatatataaaaaatatttgaattcaaattcaaatttgaatcagatatataaacttttgatttataaagtttggctctctaaactttagatgtgtaaacttgaggtgcacaaactttatgtgcataaatttactaaaaaggaaaagtaatgtggtgccaaaaaaggaaaccacgtagagaagagggagaggggggcgccacgggcgatcgatcacctgttagccatctcgtccatcatgcccaactagatccaacaattagaaacgatttagtaccgtgaggtaccggtacctcaaggtactttttgttggatcggagcaaatttctttgaaatttcatccaaacgtccaagtgcatgacacctccgcatttgcttatacttggtagacccctaaaatctatatatctttgccattcagatgtagtaatccaaaaaggaaatctattaacttattaaaggaataggaaaaggagcctccacattcgctctcacggcctagaaattctcatattaatcggagaaaaaaaacagggttcatatagaattacaaattagaaatagttgaaactcggaattaaaaaataagaaatattggaagaggagactagagtccatatagaaatataatttagaaataaccgaaattcgaaattaaaaaatacagaatattagaagaagagtacaaagtccatatagaaatacaatatagaaattcgaaattaaaaataagaaatattagaagtagaaatacaattaagaaatatagaaattcagaattaaaaataaggaatattagaagtagagtatagagtccgtataggaatttaaaactaactaaaattcagaataaacataataaaattaaaagtagagtttagggtccatataaaaatacaatttacaaataactaaaattcgaaactgaaaaaaaacatgggaagaagagtctaaagtcaatataggaatacaatttagaagtaactgaaaattcgaaattaaaaattaaagaatattaaaagatgagtttagagtttatagtccacatagaaatataattagaaataataaaaatttagaactaaaaataaataatattgggagaagagcctagagtctatatagaaatacaatttacagataacgaaaattcggaattaaaaaataagaaatattaaaagacgagtctagagtcgatgtagttatataatttagaaataactaaaatttgatattagaaataattaataactagcacgtatataaaatacaatatgaatatacaaaattcaaattatgttatcattttaatatattttaataataaattgagaaaacatatatgctattatataatagaaaatatattgatgctagtcgcgcaatttatctgggccaccatgctagttatcagtataaaagaagtgtaaaatccgtcttagagtattatgtggacgtcgatacgcaccgtgtctcgccggagcaaaatggaaaaccgtggtggccctgacttgaccccgtctcaaatactaatcttgccatgtacagtacgtcattcatcttccccgaaacctgccaaactactgtaccagatctctgcttactagtaaacgggctagcggggcactaagcatcatctaaccattgttcaaaaccaaactgtttgttcatgctgacttcgatctctagctagccatgcttctcaagctttgtctccggctgctgccgctcctccttgtcttggttgccgcttcccatggcgcttccaatgacacctacgacacctccatgtgcctgcaggaaacaaccacctgcggggatgtcagtatcagatacccgttctacttttctgataagacgggatatatcaacgggtccagcaactcatactgcggataccccggcctggcgatcgattgtgacgacggcaagcccatcctgcaactcaacggcgccgagaagtacaaggttaactacatcaacgttgggagcatcaccaacgtgtccctggtcgataaggaggtcgtcgacgacagcagcggctgcccaagagtcgatcacaacgtgaccttcgcacagggctcatggctgttcttccctgctggcatgtcgttggattacctcgtcttctttctcggctgctccttcccgaatctcttcctcccaccggaaaacatcgacccgatcacctgcagctttatcggtctcattggaccgtcctacgtgcttccgaaggatcaagtgccgcctgggaactggtcgcagttttgcaaaaccttcgaagttcctgtggtcaaatatcaacagatggacccaaaaggtgacgcatggaggaagggtggatacggccaggttcttcgtcagggattcctgttgtcagtgaacgatagcaggaggccccccaattgtacgcagtgcgaggagtccaaaggacggtgcggtttcagccaagacggggaattcatcggctgcttgtgcctaaacggacgagtgcgctctctcaggtgcggttccagcgacctcactggtgagccatctgaagatcgtactaaccctagtacccttttcgcttcttgttttgttttcttcctttaggaatagccttaacttttttggtccgggatttaggtggattattttccccttttcgagaaggtgtggaatttatttttcatgataagagtgttatgcaaatcaaatacggtacataaatggtgtcatgctaaatgaatctcaatttgttgaacattatttatgagaccctgttctactatttggtttgatcttgtagtccaaataattccataccatgacgtatctgggatagtagtcattagtgaaaaaggaatagttatacaaacgagtgaagtgaacccatctccaatagcccaaaaattcttatctttagaccattctgagccatttacgaacattatggcaaatatgatcaagacatttatagctcccacataaataagaagttgtgccacagctacaaagtaggaattcaataaaatatagaataaggatatacaaacaagaactaatcctagcgaaaaagcagaaaaagttgggttggtaagtaataccacccctagaccccctagtagaagaacaaatcccctaaatagcacaagaatttaatgtattggcccaggtaaatccattatggataagaagaaattaatagtataaattttttcatgaactgactaaaactaaaagatagcaaaaattactttcgagggtttagttatggaagccctacccaacggaatgttccgcgttcgcctagagaatgacaccatcatcctaggctatatttcaggaaagatccggtctagttctatacgaatattgatgggggatagggtcaaaattgaagtaagtcattatgattcaagcaaggggcgtataatttatagactttcccataaggattcgaagcgtaccgaagactcgaaggataccaaagatttgaaggataccaaagattcaaagggttaggtttttcttttttttttctagggtaaaaaaattcaaagttctaaaattcaaacaaagaaagagacttatttttccaaaagagtaaatctacatggctgcatcaaaggctatatgcgagcttggaaaaacctttagctagtttatgggcatcagcatccctggactctccccctaccgggcatttgggacagagcagtggaagcctaggcctgggccagcccttgatatactattgccagtaacaatttacagagtatatattaccaatcctaaatgcgaaaaactaatcatacagaattgtgttgtcagtatagtgcaagcagcatcttgggaaaaaagtatagtgcaaataatgtacgtatgcaattatttattagtaactgcatatttaatctatttacatgaatttctgtttgaatattgcagggtattcaagcttaaaggggaga

SEQ ID NO: 1604 - DNA, 2142 bp, Oryza sativa
  Intron number 3 from transcript LOC_Os05g19480.1 (locus LO C_Os05g19480) derived from phytozome v7.0 (chr-ID Chr5; po s 11323783 to 11325924 reverse strand)
aacgggcagcgcccataacaggaaaagaaggtatttgctactttattgtgtctcaattgttagcagatctgtataatgtatatggtacgtactttatggcattatctttagttgctatgctggttatagctccccaaagcatacgaaatgtttggatctttctaaagtgtgtaccaggcgaccaggatatttacactttgatcgtgtatcatccttgcattacaatacccttatttactttggttgaatcacgtgttatggtgaaattgcactggtttcagatcgctttggtgtgagtttgtcttcagctagttcaggaaattatgattttattactatctatagggaatagaatcaaaccaatgattgcacctacagaatgctgatcacaatttatatggatgtgccatacctaattactgtctcctttccaattagctgtttattgacaaataagacatggtgtccagaaatacatgctattctacacatttttaagtatcattgcactaatttattcaaaggaaaaagggcttatttatgtggtatgttcttaaatctcctgaaaagagcatgtggccaagaaactttaggttcaaaaccttcaagtaagaatttccctaacatgaatattataagtgagtaaaatatgttgttaaaaatcctcaagttctgggttactagattgcatatatcttctaggaaattaatttttgaaccaacatgtttatgattacttgataagggcaccgtgggttttctcatgttattatccactagctcaggagatgcacaatatacaacctgactacaattctgtcacaagtgatccggtggttgcatgtacaatatttaatgaaaatacaagatgcatcatcctaattactagttttataagaaacaaattgagccaattaaatattcaaatatgagtaaaatacattgctggtacaacaacttgtgaactgggtgcagattagtcactcatcttgcaaaatgctcaaaagagtcacataacttgattagggtacgcaaatatgcaccctaacacatgatatgtggcttattacaccgaccttgttgccagagtggtcccttaagggacaactgggggcagcatagaatccatgaatgcatatatgtcaccattttcagttgcctgagcctaaagctttgcagtttactcctcctaggctattaagttgggcatggcaatcctataggaggacattacattgatctgaaacatgtatgtattctgtccacacgttgttccttaggccaacctggtctgtatttcactgtcattagccccacatgacatgcatcggactgtatttccactctcctttcaagttgcctgactcatttgagcattttgcaagatgagttgcaagcctacacccacctagcaagaatccttgctgcattttactctaaatgtaagctaggttggaattttttattttcataatgcaagctaaattatttttgttgtagaaaaaggaaaataaatatggttaatgcatgtgtcaacttcttgaaggttcaaaatggtccaaacgcttaactatttttcaagctggcttgtttggttgagatgtgcctaatatgactaggtttccccattttgtggcctgtgcatccatcccattagggcctgcagtagcagcatccttaaacagggtttgttattaggatttaggaaatctatctattttgttgtctggtatcttctagttaggcaagctattttttggagtaaattatctataattttcaggtcttagggagtcctctatgtaagaagcctattgtaattgtttccatttagcagtatatataaatcaaatagtcctgtctaccctccatgtttttgttgcaactgctcggccaattggctcttgtggattgggctgtgttgtcttcttgattatttggttagtgtggggttacataggtcttggcccattatcaggtccaaaacttttttattttttgttactcgttacattctttggctttatggaatgctactgatatgctaatgacttattgtttgtaatattatcctagcaagtgttgatgaattccatgtgtttttcagtcagaacaggtttggaaggacctggactttcagtt

SEQ ID NO: 1605 - DNA, 5760 bp, Oryza sativa
  Intron number 1 from transcript LOC_Os03g13614.3 (locus LO C_Os03g13614) derived from phytozome v7.0 (chr-ID Chr3; po s 7362550 to 7368309 reverse strand)
cgccctgtcagctccccctcacctccatagccaaggtaaggaaaccctagcagtgtgtaccatctctgatattttgtttataatgctagatctgcgcgattccgtttgcatgatatgaatgtccttgctgtcaacatctgttcaagcacactgcaatattttcgtttatcaattattacacagtagttattttcctgacgtgaacaagtattactatgtgatttgggcaagtattttttgatgagatgatttatgcttgagcatgacatggcaacgtgtttatttttctttgattgttgtattgtagatggataagaggaccaaggttttaatttttgctgcttctgccaatctattgttgtcaatgatggccatgattattcattctaggaaaagaaagatagtttctaggagggaaggtgttaaatatgacccaatggttgaaagggataggatgagaattgagtatctaaacacaaaaatttggaggaacgataacatgcttagacttagaaaagattctttctttcggttttgtaagctctttagaaatcgtggtttgcttgaagataccatccacatgtctattgaggaacaagtaactatgtttctaaatacagcagggcacaatcttagaaatagataagttggcactaattttgataggtccggagaaacagttagttgttatttcaacaagtgcttcatactgttggtgagctgcgagatgaactaatcaggcctccctcattggacaccccaagtaaaattgccgggaaccctaggtgggatccttactttaaggtgtgagattcatctgtgtctcattttcaattttatattttaacaaacctcaatgtcccctgatcttttatggtgttgaatataaaataggattgtatggagctattgatggcacacatattagagcctctgttcagaagaatatcgagccctcttttcgtggtaggaagtctcatgccacgcaaaatgtaatggcaactatagattttgatcttcggttcacttatgtcttggttggttgggagggtatagcacatgatgctgtagttttaagagatgcattggaacgtgaaaatggccttataccccaaggtaatagattaatttagttcatcaatttctccatctcaatagaaatgtgaccaacttgtccatcatatgataggaaaattctacctagttgatgctggatatggagccaaaccaggattcctccctccatttgtccggtaccacttgaatgagtgggggaataatccggtgcaaaatgaggagttgttcaactttaggcactcgtcccttcgtgtcacagttgaacgtgcatttggggcactaaagaggaggttcaaaattctagatgatgccaccccattctttccttgtccaactcaagtagatattgttgtagcttgttgcattattcataattgggtcatgaatgatggaattgatcagtatattacagatccattagatttgataagtgaacccacaaaagagtcatttgggtaggcaacagagccatctacgtttaaaaagtttggctagttgcattcttcgatggtgtctgtcccataaaggatgggtgctaagtttataaattttcttaggcataattaaattcccacaaattggataaattgaagtcatatgtccactgtcacccagacgattaaaccactcaagcattcatacaagtaaaaacaaatattaagtattgtaatgacgacgttttctgaagtgatagtagcatcaaacggatatgcatcaaaagaaaaccaacataagaaagataggaggcacataaaaaatgccaaacccacggatcctccacagcaattccatattctaaatcctcaaatcgcgccacggggacatcgagcagatctacccagaaccctcgccggcttagaattcacgaccggattcggattccaccgcccgcacgagcgaaaaaaaagaccagaaacaaatcgagagcttaagtcacacggtttactgggagggagggaggtcgaggcgctcgcgacggatctccactccacgccaatccagcagaggctgggcggcggcgagaggggaagcgcctcgaggtggcgccgcttgctccagcgggaggctgcccccgggttggggagcacttggatttgcgaaatttgggggaggtgtggcgagggagggagggaggtagaggcgctcgcgatggatcttcactctgcgccaatccaacagaggcggggcgacgacgagaggggaagcgccccgaggcggcgccgcttgctccagcgggaggctgcccccaggttggggagcacttggatttgcgaaatttgggggaggcatggcgcatgagaaagagagaggagaggaaaaaagttggtctaaaggcgtactccaatcacgagttcacgtagtccggaaggtgacctcctgagagagagggcgaataaaaaaacaagaagaagagcagctaagacaagtgtgtggtttgttggttgtgtgtgggcctggagaaaaagaatgcctggcccattacagaccgattccgcttccggctacagtaccatactaccatgtgctccaattggcacaatactaagctttttctttgcaattaaaaaaggacaactttttaaatccaaaattttcacatttaaaaattttggatttacgaatagatctaagtatatattttttagtttactttatcaaacaacgaaagtgatgaacccctacatacccctacaaataattaatttttaaaaaggcatgtttagtttcaagtcacctgaaaatacataaatctcggtcttttttagaccgtcaagatttcatccaaattcatgtggactttttctctcccccttatatcttctcttctatcgaaaggatggatgcacacaagcacggaacttatgtttggtttggggacctggtgggatgggttaggtccattaagggggagagaaaaagtccacatgaatttggatgaaatcttgacggtataaaaaagactgagatttgtgtattttcaagtgacttgaaactaaacatgcctttttaaaaattaataatttgtaggggtatgtaggggttcttcatcactttcgctgttcgcttaagtaaactaataaaaatatacagagctattcgtaaatccaaaatttttaaatgtgaaaattttggttttaaaaagttgtcatttttaattgcaaagagaaagcttctatactgtgccaatcggagcacatggtagtatggtactgtaaccagaagcgggctcgggctttaatgggttgggcatttttttctccaggcccacacaaccaacaaaccacacacttgtcttagccgctcttcttctttttttttattcaccctctctcaggaggtcaccttcccgacgacgtgaactcgtgatttgagtgtgccttcagaccaatttttttcctctctctctttctcatgcgccacgcctcccccgaatttcccaaatccaagcgctccccaacctgggggcagcctcccgctggagcaagcggccgcctcagggcacttcccctctcaccgccgccccgctctgctggattggcgcggagcagagatccatcgtgagcgcctctacctccctccctcccagtaagccgtgtgacttaagcttctagtcttcttttcgcccgcgcgggcggtggaatccgaatccagtcgcgagttctgagccggcgagggtgctgggtagatctactcagtgtccccgtgacgcgatttgaggatttagaatgtggaattgccgtggaggatccgtgggtttggcgcttttttttttgcctcctgtctttcttatgttgtttttttttctgatgcatatctgtttgatgctacatcacttcagaaaacgtcgtcattacaatacttaatatttgtttttccttgtacgaatgcctcagtggtgtaatcacgtgggcgacggtggaaatcaatttatccagtttgtgggaatttaattatgcctgagaaaatttataaactaagcacccatcctttatgggacagacaccatcgaagaatgtaactagccaaactttttaaacgtagatcaccaatacggacacaagtattttgattaccacttaagtttactacggagtaccatgttactggaaaactactgttagagaagtgtgtcggaaaccgtgtcaaaatctgagataccattattcatgcatatggaaaataattatggagtggccaaacccctaatgctggggttcagtcccgtgtcatggctagttggctacacggtcctgtgctcccaccactaaaaactaagcccagttctgctggcatacagatagactcatcctataaactcttaatcaactgaaatatttctacacctggctgcctgaaggttttagtggattgtcgtcaagcatgaaatatctatttcttgataatttgtgtggtgcattaaagcagcacgcattccttacctaaatgcctttttgttgacacaaaagcatccctgattgcaatacgtgaatagccatagcctttttacaacaaaggcactaattatctaattctaatagagtattgtccaactggggcataaagatttaactaagtaataagaatgcttgtgatatgtttttctagcagtctttttttttctttccttttattttctaggaaaaacaggagcataatatgaagcaaaagcattgatccttgtgttaacagctactattaataatagctaatgacaaacaccttaatgcgaggtgcatcttgcctgacgtgttggatgaggatgacgccataagttgctgcttaaaagaacctccatcgtcaattctacccgcatttacttgacatcagcggacagcttgaaattaattaggagtctgattaaaagttaaactactgaagagtttgacaaaatatgctcttaaaattcaccatcttgggggtccttatagaattctgtacctgccaacactcaaggttttaaaagttaaaaagtaaaaatatgtcaaacatggattctcatatcggtaccgtgtgaaacagcccatcgtaattgatggccacgtaattgtgatatgcgcataacgctatcatctgtttgagcactcatggtactatcatatatttgatacacatatctaacttgtctctctcttgtagtcagcttgctgtttagaatattttgattagcattcctttccttgttttattagacaaaagttattaatacaccgtctgatcttcctttgtacttttgttccacagtgctagccaataagaaaattttctgccgcatccatgatacttagagactccactgcttcattgaccaagaaaatatagaagatcaaaggtgtcttgtaggtaggaagcttctgccggttgtttatatattcatcgtttcacctgataattttttttccatgtttgttgggttccgagtgtttttctgcacttgtgtattattctatgctctgataatgattaatagtcatctctcctttcaaaattattttatccatgacacaatttgtttgcttgctgaaatccttttatttttcacttccttaaaggcaaggaagatctaatttaagcgtttcggaaaacattattttaaaaaccattgagacacatgattaatgatcacttcataaatttgtcttattttcagaacttaggtgttaaaaggaatagagtaatctaggg

SEQ ID NO: 1606 - DNA, 255 bp, Oryza sativa
  Intron number 13 from transcript LOC_Os07g10490.1 (locus L OC_Os07g10490) derived from phytozome v7.0 (chr-ID Chr7; p os 5649260 to 5649514)
aaaacttcttcctgtctggctcttacacaaaacaggtatctaaaccattgacttagtcactgtcaccagtaatcaatcagcgctcatcaaatacaattgttttgattctgtaaatttagattttaagcaggaaggttcgtttggtagatattcgtaatattggatgaaacatatataactgctcctgtaaaagcatgatcgacgatcccatgaactcataatctgctatcttgtttgcaggactacattgacagc

SEQ ID NO: 1607 - DNA, 9615 bp, Oryza sativa
  Intron number 1 from transcript LOC_Os06g46284.2 (locus LO C_Os06g46284) derived from phytozome v7.0 (chr-ID Chr6; po s 28047213 to 28056827 reverse strand)
ccaggtgcgcacgtccacttcttagctttttttttttaccgcaaattgttttggtttttctttttttggctgaattgctctgcaaagttggcgaaaataattctgtagattcctatcgatttttcacatttttggcacgcattgcaaagtactatcaatcagttttgaagggcctgactgtacgcatcgactcatactgaactgtttgccagttgagaggtcactagcttgaattttttttattatttagacatttctaataattttaataatacacttccccttgaatttattttcaaaaaatagacttttggctgcaccagtgatggctaaagaaggataccaccccagtggttgtggcgtgacagttgatgccatcgtggcagtcatcggatggacttggctgtgttctctgattctctcccatgggttctcaacccattttctctcgttttccgtgtgcacggcacgattttcaaactgctaaacggtacgtgtttcgagaaaagttttacacagtaaaattgattttaaaaatcatattaatctattttcaagttttttatagctaatacttaattaatcacgtgttaattatcgctccgttttccgtgcggacttgcaggggagggtttccaacccctccaaaagaagtatggcgaggacagtagtgaaccctggcatccctcactccagttttctctcttcacagcttgtacaaacatttttattttttttgagttcaattttcaacttaatactttgtctcaaaatataaggtgcctataatttttttaacgcaaattagttataaagcaccacaagttcacgtttttgttaagaatttaaaaagtcgatatttataacttttgaataataattaaattaataatgaatgtttagtgcacgtgatactattatatttatatttcaaaatacttaatatgaaaaacatatatactcatgttatattttagaataaacagagtattaattaattaagagtgaattgcactttaggccaccttttattactgaagttgtatttgtgaccactttatatttaatcttttcaatttggactagttatttttttatcaatcttttcaatttacaccactctaacgttttcgtctagccacatccaatctttaatccggcaaagatgcgagctacacgtaaagatgccaatgtgcttgagattgttgatgtgctcacgaagagagtttgcatgcatggtctaaaatgcagaaatagcgaaaatacctagttcaaagtaaaaaaaaaatggatggagggtagtccaaagtaaaatttctggtaattaaaataactcaaagtgtctcttaattaattatgctctaattatccggataatgagctgcactttggggcagctgagaaactatattgccaactaaccggacatgtattaaatttccacgagtctatagccaattgttttatgacattattcttcgacatgaccctcctgatcttgcccattgtgtcattgaccccattattcgcctttagtagagcaaggtcgatcaacttgtccaaattaaacgctacatcacctttattagtagcatggtcacacgtattattccaactagctgattgtccaaaatccagacaccacaccagtacaatgctctagtgcattacagcaatttgtgcaaaatatgctctgcactttcttgtcccatgcttgtaggtgtaacgtacaaatcttcagatgcaaaggtatagtagtatataagctaagaataatggataaccctggaaaaaagcaaaaggttagattagaagacgttttgacatccaaaagcagaaagccaaaaagatccatcacgaacttaatagaaaactaaccaattattggcgtatctagaggtacacgcaaacaggagtatcttacttcttcccttttgttgtgtttccagcgttttctcttcttcctggacctgttcccccgggcctgcaagcgataagatgtaatacctcctttaggttataaaactttctaacattgctcgtattcatatagatgttaattaatccaggcacacatatatgtctagatttgttaacatatatataagtgtagacaatgctagaaaatattataatatgaaacggaggaagtactatttaggcaaagatcagattctttcaataaaaaaacaattaaatggatcagatgaagcaatgattgatagtattatataagaaaaagataaacaaaaacaaattaatttaaagaagagtagaaagaagagtagaaattgtggtatcacaaatgctggtgtgtaatttagacatttactgtaattgttcctagatttcaaatttattctaaaatgtagttatttctctacctacctccaaattatcttagccaattccaacaatctcatatttaattttctcatctatgtttttttttgaaaaaatctcgtgaaatatctctagagaaatgcttgtaatttaggaatggaggaaatatcttataaatagttcaaacgaatcatttttcttgttctggcggtgcaatcacatcaaatgtgtacaacggggagctatttgttggtaattcagatgctatgctgatcgatcttttttgtaaacatagccgcaatatatacattaaaaaatgagtcagcaactcaataattttggtagagtgattggcaactgctacacaataagaaatgtccaggggtcttccggctaaatccacaagatgatgggctagctagcctggttcaaagacttgctccttttaattatttgatattaggtcatttcttaatatttatgttttttttgcaaccgctgcgcaacgcaactgtgtgttaaatgaaagcacatatggggcttgatttgtatttttgttgcttgcctagaaaaaaaaagattgttttgttcacgtgacacacgagtgcatcatgttaagctggcatgactttcaacttaattagcggcgaatagtcgtgacacgtattttgtgagataaatctctttcttcgaacagcttataagatgatgtgtgactaaagttacattcacctttatcatcaaatatcattgttgcacttattcatatcattatctaaatctcttattagtaaataaaaaatcatttatgagtaaactacgataaaaatatataaaaaaataaattttaaaatttaaatttaatttataagcatatgtataagcggaacaacgagactctatatcaccattatatttttaccctttacgaaactattgttgtctgtttctatcattcagctgcgggcccaggaatctcaaaccatgctggttccaactccaaaaagcacacgccctttttccactccagaaagaaagatcaaaagaaaccattaaagaaaaaaaaaacaagacaaagatcaaaagaaacacatggcgtatcatctctgatgtgattaagaaaaaaagtgtttagaaacaaatcagaaggtattatgatcttctgaaaacggccaaaagaaaagatcaaaagttcagtctaataagccttgcacgcagtagatttcttcctctccagttcatcacctccccgggaagaaaaaaaagaaaaagagagagaaaaaagcgcgggagattaattgcgttacatatctcgattcttttcagctctcgtgtttcagacacgatcgaaattggccagcaccgacaaatcgctctcgttgcgattgttgcgagatttgactcgagcgagctgtatttaattagctcctcgtcttgttctgctaagctactactagtacctagcttaattagctcgtagccaccattggcgaaatcgcgagagctatagactttttgtctctgacggcgatgatgggctcgccgccggcgccgccggcgcgtcgtcttggcgctctcgccgtcttcttgctcgctctcttcctcgccgcgccgtggggcgtcgactgcgggtacaacgtcgcgtcggtggccgggtcgaagaaccggctgagggcgcggctggagctcgccggcggcggcggcggcgcggcgccggagctcggccccgacgtgcggcggctcagcctgacagcgaggcaagtatgattaaccttgcttttcagcacttatctgagatttgctaggatcgattgtttagttcttgagctctcgaggttgatgcttgattgatcgttagctacttgattattaagatagatagagatgcttaatttgatcatccacgtagataaacataatctgggctgctttcttggggttagttggattactgtggtttcttcaagccgaggtagtatttttttttaaaaaaaatatgtattataaattcgctcaagcagagctgcagagggagttattgagacgttgattgatttgattatactagaataggacaacgtaccgaatggagttgtagttaagtcatcaggaagataagtacagattatataataaccaagaaagtctaaaggactgatgaagtgatgaaataaatggcaaaatattttagaaaacttttaaaaaaagattaaaaaaggaaaaatcctaataccccctacaactcactagtgttctattttctcccttaaaactcaatttcatatatacaaacccctttgcaacttaatttcatacgcaaaccccttcgactcgttttattgatacctacagttggatcgtacaaatagggagaaatcactgaaaaaggaatatggggaagctagaagataattgacttgtgtagatttttatgtacgaaattaatttaaggggaaagtaaaaatacataagagcaggtttaataatagtatagtcttctaccggcgataattttctccaggtcatattagagcaggtacaatagcaggctataagccagctgcaaacatattttaaacagataaataaggagagagaaaagcagcgggctacatattcgtagccagctgtagcacggactccaagacgcaatgtgtgtatgacaggtgagaccatgtattaataatgtagtatgtaactattgtataaatgagctattaaattggctataggtgaattagagttagtagttggctatactattaaacttgctcttatagccagtgaaacacactagattagctataacatgatgggtcccacaataatgttttgttttttttatacccattagctctctctcccgagtgcttttcttgttgggtttggtgaggttagcatgcatgcacagagcctattttggtttctgtgtgtagccccgctacaaattaatcgcccatttcatcctttctctcccattaatcgtctgtggctgtgtttagttcatgataaaattaaaagtttggttaaaattagaatgatgtgatgaaaaagttagaagtttgtgtgtgtgaaagttttgatgtgatgaaaaaattgaaagtttgaagaaaaactttgaaactaaacacagccacaattgatgtggagcttttgcagtctgctgatatcaccttgttgtatctgttctaagagcaagttaatagagccgccggttgccagttgcaaaataatacacctcagcaaaagtaaataaaaagaagaaatactacttaagctaatcatagttacttttaatattttattcaactaactgtgcgcatcactcggcttagctccatccaattggctggccatgccctcccacttgtgggccccaccactttgcgttggaggctgtgctagagctagcgctaactgaaggggaaactgttttaaacactcgggtggacgtccatccgtttcttgcatgtcatctaaatagttataaaaaaatttcaaacaaattgacatgatagattaatatgtaatatatcatttcacaaacatgcaagtcgaaattcgacttctacaagttgtaacaaaaacaataaatttaactgtgaatatacgtatactagttagagtttgatttgttattttcgttacaacttgtagaagtcaaatttgaacttgcatgtttgtgaagtgatatattatatattaacctatcttgtgattttttttgaaattttttcataatcatttaggtggcatgcaagaaacgggtggacgtccacccgagaaattagaatccatccttgtcacgccctgaagttcccctcccttgctctaaattcataaaataaatcgtccgaagtaattgtttaatttaacctagagatgaatccctaattaataaatgcaaataataatcggaatcgacatgtggaatttttcttggattctacatgtcaaaatatgctaacacgatttttagtggaattttcagagccttggaaataattttaaccaattaaaatgagcaaagggcaatattaaatccctggaaaaatcctttcttctttttctttttctttttcctcctttttcctctcttcttgggccgtcggcccagtccattcgcctcccgcgccgaccttccctcggctgggccggcccaagccggctcctccctcctccctaacccctccgggtcatcgacaggtggggcccacctgtcggccccttcttccacctcccgccgccgctccccaagccggcaaccgccgagccgcccacgccgcccacctcccccgccttccgcgccccactccgcgccccgcgcccacgtcgccgcccaccatccccactcctcccactcgcgcgtgcaccccgcaacggagggattcgaattcgaatctctctctctctctctttctctccattccccacgtcggcgagaaatccggccgcctcccggcctcgtccgcccctcccgagcccatataaaccatccctccactcccctccaccttttcctctttccaccgctccctcccgtgccctctatcgctcccgccgccaccgccttttccactcctccggtcgccgctcgctgccgctggagccgccgccgagccaatctgccgccgccattagcttcgccgccgccaaagctaccccagccgccgcatccccatccaatcccgccgtcggggcccgcttctccccgcgcgccggtgagtaccaccatagccgccgccgtcggccatggctctcgctcgtcgtgggcaccctctctccctctaacctctcacacttcctctcttagggtgtcccggagctcggccgccgttcgccgtcaccctccggtcgctcaccatcgccgtttgccgtcgtctcctcccgcgccggccgaaccccggtgagaactccctctctcttcctcccgcgcgcgccgccgctccccgcatgcgcgtcgccgcgatgcaccgtcgcccgcgtcgccggccgccgccgtcggtggccgcttgccgccgccgccctcgccttaaccggccggccggcttgaagccgagccgagccaggccgccttcctcctttccccatgagtcgccgcccggtgggccccacctgccagtacccctccctccaccttgagccgctgaccagtggggcccgcatgtcggcgccacccccaccccttgctgacgtcagtcctgggatgaattattgcgcaataaatacattaaggctttttctttattagtaaaaacacagataatcttctaaaaatcataactaattcgttcgagctccgtttaagcccattcaagtctcagtaaaacaagaaaaatgtgtagaatccattaaaaatggttttgttccctgtttcagtagtcttatagcctgtttgcaatgtttgcctcgtatgtcgctagattccggttcctccgacgctccggtgtacttcgaaatagtcgccgaggttcctccagcagcagagcaaggcaagtcatgcttgtcacttgaacatgttgatcctatattgcaaatgctctatggttttccttcaaatattacattgttttataatgtttctatggggtgtttacctattgtcatagccatgctattgttgtaccatgtccctttgtcagcttgggggttaaaacatgactagagattggactagggattgcttagccatgcttagttcaactagtgcacaatagggagaatcctattaatgtttagactgttggttctaatggtattgttggattagcgccaccgctatggtgttggttaattaaaatacactacatggtgagctgtgggtgcatgattttgctagtcgtgcccatggcgattaaggaccggttcgcgggatgccctggaagaacttatcgtgcttaccacaagccagcgtgggcaacggctgggcttgtagtgtagcttttctctagccgacgtacccaggcgagggtgggcgtgatggagttgggtcggccggggtgtccggttgatcggcttccggattcaccgcggcacgaaaggggggttgcccgttgcctgctggggacgggggcgaaccctaaggtgtggtgcgatcggttagagagggttatgcgaagggtcatgtcacggcctctttccggtatgtcgtggtggcatgtcggcgcacgggaacgtgtcgtggggctgtgtcttgtgggtacagttgtatacctctgatcagagtaaaactattcgaatagccgtgcccgcggttatgggcggtcgaccagattcaccgtgattagtctcacccctagtttagcttaattaactggtgtagttcaggtggttggttgggcctgttgcaacgtggcgtagcgttggacagtgactggttaatattgcttaattactacaactgtttttactgttttcaactactggttttaaatgcctgctttatgcaaatgaaccccgtagcctcctttggttatatcctgcatcatacttcctcttccggtatgacttgctgagtacagtgggtagtactcagtcttgctcttttccctcacaccagagttgaagttcttctcagttggagatgtcttgaagaggttggtttcgtcgctgccgtcaagggttgcctgtggaatggaatcgcccgctgtaggagtcaagtcttcaggcttagctcgcttttacctttttcgctgcgtttgtaatcttttatatttttgtaagacgtggatccgtatgtcaacaattgtcgtttgtgtaccctggctggtcctggacaggggtttaatacacattcagcttagaaattctggttcgtgaatttctgggcgtgacaatcctcctgactgaagcgctcgcctttgcctttcctaaccttctctcccttccatgtcagcactgatataatatttaaagtcttaccgcctactattatacctgctctaaggaagtatttggattctcgagtggaagaaaggtgaaaaagcttatcatagaagcgccagaatatttttgggaaataaaaaaccgaaaaaaagaaaggctaaaacagaaaaagaatcgcaaaaacatctcaaaaacttgttgctcgatcacggtggggactcgattccggaggcgagcgctgcaaactcgattccacaatccattaggccacgcgaccactgcaaaattgaccctaattactatctataatcaccgttattttattattttatttttggctcgctggcggcagcctggagacggacagccggctacacgtccgcatca

SEQ ID NO: 1608 - DNA, 3400 bp, Oryza sativa
  Intron number 1 from transcript LOC_Os04g42420.2 (locus LO C_Os04g42420) derived from phytozome v7.0 (chr-ID Chr4; po s 24917721 to 24921120)
ccgtactgggtggtacgtagcctcccgccctcgccctttcagtgattgtgtgctcgtcttggcttttgcttgtttgcgtggggatttcttgctgtttttgcctgatttgagctcctcatcggggaggagattgagggatgatgatgaacagttttttattgagggacctaaaattttagcacatacgaagtagctctcaaattcccaattttatctttttttaaaaaaaaagcgattattgtccttttggagcgtaatttctggatatggcttggttgactgaacgaatgtcgaaggtgatgatcgactagcggcatctgtagaatgttgaaagatgtgcgagttttttaactgtatgattgacaacaacgccggtagatattttcctagaataagcgtgaaaccaaatgtggcatatgtagttctttacttcctgccattcggtagaacatgtcagactttggtccattctttaggtgaataattgttgactatttaaacaatcatgcttgcaaatggggcacaattggttccggtactgagagccacagcaaacctagaactttaatttcgcaaatctgccaactcgagctggtgacctggtgtattcgcatccctacaacttcttatatagttttaagtgttggtgacagattttggcaagttaatgccctaaagttattttcaagaagcagtaaggctgactttaatcagttcaaaattctggttttagtaaattgcataaaaatatcacatgtaaagacatttactgttcagttttacatgagttttctgttgcagcagcaacagaaaactatattatctgtgtgtgccacatatataaagattatgccataaatgaggaggtcaaaatataagtagtaaggcatgcttagtagtgctatctaggttgtctcttatgattgccatgttatatatattaaaaaaaaagtaggtggcagagaaagggggtgaagtgagagaacgtgtcatctcttatacaagagacgatatgagagaggacaccgacacacaagactgagagttctgaggtgagtatgcgattaaaagaaggggaattataatggcatttatgatagagacaaactgttagagatcatataggttgtacgtgaggttattcttgaatcttgatgagtcagatttgtaggagattacattaggggtctctttattttacatggtctaagttcgtattacttgattgaagcattggctgacacccaaatacccaatacaacatgattgagattcctgaatgtgatggttgctcaacttttggtgattttcaactttgaatagccatctgacctgcaacgcctggggatgtcattcattggtgtttgtgaccactggaaggttattgctgaagttggtatgaacacaatttttgttgggactttttccattacaaaatacattgacaatgtaaaagcaagccaaagaaaaacagtgaagttcatgcatccttagctttatacacttactggtaaacatgttctggtcttgtgttgtgtagctgtttattattattatatttgcttgtgtgttgcttttttgtgaccctgaatgtctaaactctaaaatgccagcccattctgtatatattaatgttttcacaatttagagacatacattagacctactgtattgcttttttgcattcgtatcgtattgttttagggaaaaaatgtttgttgttttgagccaagatttaatcaatccaacaagatattggtattacactgtaactttttaatcactgtaaataattttttgccaaaatgatatggaattcctagtcgacatttgatactttttttaagttcagagctcactagaatttccatagaaacaccagtcactttacaatcagtgtcttcatcttcaaaatctcagccgctgaatgaacttcttggacaaaattagtccctttttagtttcatgatcgtcctgatatgttcaacatactcaattcatgaatcaagatactccattaaccgcatagtttttccaacaaagtagaattgtctcacaaagaagccactattaaggcacttattttctttgaatgttgcaagaatttcctgtaattgtaaatgttctgaatctccaaagatccaaaaaaatcgatcatcatgtctcttttccctttttatgtactagtaaatgtaaatcaggcgagcagtacacgtgcatgctatccttatggagagatctgataaagaaaataaattatgcacacgcttagaaggcaattggttgtttaccataaatattttatctgtaatgttggcaagtacgaaaatgctgactagtgttacgtgcatagaacttttatatctgtaatgttggcaagtacgaaaatgctgactaatgttggcaagtacgaaaatgctgactagtgttaaatgctgactagcttcctaaatcatggaaccgcatcttggtaaaattctgtctcaaatgcctgatgagttgtccatatctgatatttcttgctcatgttgtagctcatactttcaagcgagtctttttatatttagcatattttgttggatgcctcttgcagttgtgcatagccttatgtattggcacaaacagcagcgcatggttgggcaccgctgcacttgtgaccaatatgaggaactttcctctcagccggggaactgttgctggtctgatcaagggctatgttgctgtgagtgctgctgtctacacagaaacatttaatggaatgcttcagaactctcccacaaaccttttgctgttgcttgctttggggatccccaccgcatgtgttctggtgatgtattttgttaggccttgcactccatcactggatgaggacaacgcagcagagcacagtcatttcatgttcacacagatctctagtgtggttctcggtgtatatcttatggtagctacaattctcggtgatactttaaaactaagtgacgctattacctaccttttgtttggtataatgatacttttgctcctttctccactggcaataccaataaaaatgactatttatccaaacaaaccaaaaagggaaaagactagcacccttgcactgtcttattcgactgatagtttgtctggtccggatcaagagaattcagaaccacttcttggtggcacttcaacatttgtcactggagccaacgattctgatgaggctactgatgtggatcttcttttggccgagggtgagggagccgtgaatttgaaaaagaaaagagggcctagaaggggggacgatttcacattccgagaagcattggttaaggcagacttttggctactatttattgtgtacttttgtggagttggaactggtgtcactgttctgaacaacctagctcaggttggg

SEQ ID NO: 1609 - DNA, 2383 bp, Oryza sativa
  Intron number 17 from transcript LOC_Os05g48200.1 (locus L OC_Os05g48200) derived from phytozome v7.0 (chr-ID Chr5; p os 27569257 to 27571639)
gattgtggcactcctttctgtcatcaggtgatactcagtttttttcccttttgtattaagcagttttttttcataaaatacaatgatgcttttcagtacagtagttttatatgaatgtcacccggcaaaaaagttttatatgaatgtccttgatgctcttgatttcttgtccatatatattagtgcatatagtcgtgcattcgcacgaatttaaccatcctctatactgaatatctttacatattatttgtagtaacaaaatatacttccctttttaatagatgacactgttaacttttaacataatatttaatcattcatcttattaaaaaatattatgtaaatgttaatttttttggtctgacttgttttatcattactgcgttatgatattttggtaagttggcaatggtagggtatgcttagttagttaccctataaaatttggtatttttttctattttatttaatttttaggtaaactaaattcataatattttactttactttagaaagtgtgttcgttgaaaaaaaaactgagatggttaatttgtgtgctaaacaaaaccgacaatcgagtgtactttatgcaatgtttaaaaaagtgtgtaaagaatataatctatctattatattattaaaggaatagaaaaagaagcctccacgttcgctctcatggcctagaaattctcacattaatcggagaaaaagaaaagacagagtccatatagaaatacaatttagaaatagctgaaatttggaattaaaaaataaggaatattagaagaggagactagagtccatatagaaatacaatttagaaatagttgaaattcggaattaaaaaataaggaatattagaagaggagactagagtccatatagaaatacaattaggaaataactgaaattcggaattaaaaagaaggaatattcgaagtagagtatagagtccatatagaaatacaattaggaaataactcaaattcggaattaaaaaataaggaatattagaaaaggagactagagtccatatagaaatataatttaaaattagttgaaattcggaattaaaaaataaggaatattagaagaggagactagagtccatatagaaatacaattaggaaataactgatattcggaattaaaaataaggaatattagaagtagagtatagagtccatatagaaatacaattagaaaataatagaaaatcggaattaaaaataatgaatattagaagtagagtatatagtccatatagaaatacaattaagaaaaaaaataaattcggaattaaaaaataaggaatattagaagtagagtatagagtccatataggaatttaaaactaactaaaattcagaataaacataataaaattaaaagtagagtttagagtctgtataaaaatacaatttacaaataactaaaattcgagattaagaaaaacatggaaagaagagtttaaagtcaatataggaatacaatttagaagtaactgaaattcgaaattaaaaattaaagaatattgaaagataagtttagagtccacatagaaatacaattagaaataataaaaattcagaaataaaaataaataatattggaagaagagcctagagtctatatagaaatacaatttacagaaaatttggaattaaaaaaatatattaaaagatgagtctagagtccatataggaatatatatattttacaaataactaaaatttgatattaaaaataattaataactaacacgtatataaaatacaatatgaatattacacattagtagtttcgtaaagttattgcaaaatctaaaattatgttgtcattttaatatatttggataatatattgagaaaacatatatgctattatatgagagaaaatataatgatgctagccgcgcaatctgcgcgggacaccatgctagtttcaatagtaaaactcaaaactttcaaggttcttcacgtatacgaggttttaattgtacacaaggtataaaaataatttaccaatattcaaaactcaaaacctccaaaattatacgcctaagaaaaaaatattttttaggcttaaaaataaaaaggtgccatggttgtgacatattggcaggttcagaggtggacttggaatatctagtaacttccttgccactcttccatcggacagctgagatttattcttcagtttttgtccttttatcgattctatggccattatttactacatgatgtggctttttctctttgcatcatcagattgtcttttcacttgttaagatttgtgaaattttcttggtatggttcctgtatttttcttatatcaaacttttgcaggagggttctggtgctggttgtcctcttggaaataa

SEQ ID NO: 1610 - DNA, 1900 bp, Oryza sativa
  Intron number 1 from transcript LOC_Os05g35370.1 (locus LO C_Os05g35370) derived from phytozome v7.0 (chr-ID Chr5; po s 20936653 to 20938552 reverse strand)
caggggagatacactacgccagaagcacccctgaggtacgtacgtgatcgcctccactgcatgccttgaatcgattaagctacatacataatttagtttcatattggacattgctgttttttctgtatatgtatactccttttcgttaattttggtccggtggtttatggagttgattttgagagtttttcatcggttcttggcaccttagcatacaacatacttcttattaggaactccttaaaacacatagttcttggaaaatataatactgttccttccattctcgaataattgacgtagataatatttaagtttaaaatttgacggcttatctcttttcagaagaattataaaatatatatgttatattatcgaagtttttagtgacagacgtatgaccatacaactttcattcatcatgatataatcacattaattaacggtcaaagtgaaatggccgaacacaattattcgacagatggagtggttgaaaaaaaatcatatagcctaaatttagttatctgaattcctatatgatttcaaaaatgaaaaagctttaaaaattgctgcttggatattacacggaaaaactctttagtataaaacaagaggaggaaataattatttttctcctaaattccaaacaataggccatttcacattttccataggaatttcgacctcctttgaaatatagtataaaacaagaggaggaaagaattatttttctcctaaattccaaagaataggccagttcacattttccataggaatttcgacctcctttgaaataccaggagttttctcgttttctatgaaatttctaccaggaataagcagcctttctttggccaaagatgactactatctgtgtcctaaaatatatctagttataaatctaaataaatacttatctagaatcatagttaaaaacaactacatatttgggatggagatatcaccatctttaaaccacattgttaaagaattgtgcaagtatattttttccctacaataaagttcaattatccaatattatgtaaagtataaaaatacagtatgcagcagtggaaatataatatcacacagttgtgtcaggtcttctacactttcgttagtggcttggactcaagtgacatttatgttggtggcttggtgcaagcctccttttggctcagcactgtggtactaaaagtaatgtactcaggctgtgtttagttcagcgtaaagtttggattttggttgaaattagagatgatgtgactgaaaagttgtgtgtacgacatgttgatgtgatggaaaaggactgaagtttggatccaaactttggatctgaacacagcctcaaactacatacgtgtggttgggttgtcactgacattctcaaactacaaatttaggctcccatcggatggcccattaaaccaaagaaaaagccaaattttaaattttcaaacttaattttgagagtgattttgagatattttcaacgtagtttctttttcagcattggcttttaagtcaccaagaacacatatataaaagttttacctacaattttatttttatttcctaataagccattttagcttattagaaaaaaaaacgaaacgatggggcctaaatgttagatttgcaccatcgagtctaggcagcgaaaagcttatatgctagtgaccgggaaattttatgtgtgttaattatcgattaggatagtagttatattgctggcagtggagcctgagtgatcgctcaatctgcccgagagctggctgcgttgttgctggctgctactaaaccaataataataattcatgttcctttttgcatttaaacttcaacgaaaaaggaacatgtcgcagggcaagcatcagaagaacacgtccttcttgaatct

SEQ ID NO: 1611 - DNA, 1494 bp, Oryza sativa
  Intron number 1 from transcript LOC_Os06g12030.1 (locus LO C_Os06g12030) derived from phytozome v7.0 (chr-ID Chr6; po s 6444939 to 6446432 reverse strand)
gtcgtctcccgctcgcttcctccctcctgggttaggttaggcctccccccctctctctctggttttgtgctgatctcggagatcccggctccaggtcgagtgatccattttttatttttttattttgttttttttgggtttcgctgggtttgtgccagtgtgttgttctcgtggatggtttgtttgttgggttccaccggatttttttttttttgggggggggggggggtggggcgctggagatggggggatttatggtagggtttatcgtctcgtctcgtgcgagtcggcccgtcggtgggtgggcgggatctcgcgattccgtgttgattagttcgtcttaagcggttcgggtgatttgatgctcgtacgtgctgatgaactgtttgggggcttgtagttttttttctctctctctcttttaaagtaatcccgagtttgccggggatttgaatatcggtttcgtgtgtgatttgctctagagggtatggtttaaggtagagaaatttgatactaacatatgccatccaatccgcgtgccttgtgtgttttgccactttgatccggatgtcttggttagccatggcgttcctgcttgagctcacatggctagaggttgcgcaagtagtacttgctccgtgcgaacgattcaccatctaatggaaatctggcggaagattggatgcatttgttaagtactgtgtgcaattagaatacgtttgcaatcgtgctgtaccagtgtctgccccccattatttatctgacagtctgacagagcgtcttcagatttgtgttaattgctcctgtggttgatgagtctttatagggtgcagcatctcaactttatttctttttaattgtgggaagggtgtactccgtatggctgacagatcgctggggagtaccttaatgaatactcacgaatttattattactagcacagtatgaagcctctgagttacttgagctgtgcataatctgggttgtgtatcgatcacaaggatcaaattggctaatatgtgtagttgtatattcataaaaatgatctagcatgtattatctgttcgtcactaaataaccaaaattgttgagatttcattttcatacccatctaagttatttgtctaaactgtgtgcgccttgtgattttgtgaaaattcttgtgtgctaaaaggaaaatgaagaccataattgcaaatttattatgcatataatttctttcgattgtttaaggcacatgggaataactgccaacatgccttaatcacactattttttttttaaaaaaatggataaggtagatgatcttgagtctgttagtctttgttctacttaccatttatattctgtgtatttgtcttgctaaaataaacttcactttccactatcctggatgttttctttcagttatttctaatatgtcttgttggccatgcaggctgtgcactgaagtactgaacgttcttttgtagactgttaagcttatcctgcatc

SEQ ID NO: 1612 - DNA, 1286 bp, Oryza sativa
  Intron number 1 from transcript LOC_Os08g02120.1 (locus LO C_Os08g02120) derived from phytozome v7.0 (chr-ID Chr8; po s 700517 to 701802)
ccaagctcggtggctcctccgccttcgtcggcaaggtaacaagcaacgcctccgctctctcacttacgtagtagatctgatctgccatgtcggtgtgggcgtcgtcgtcgtcgtcgtcgccggcggcgaggttggtcgccggcgagatagatccggcgggtgtggggtttggtaaggttagatccgggcgtggatctcgccgccccgatggatcggcgggatggggggatctgggccgtcggatcggggatggacgggtgggattaggcgttgaattgtgcaggaatgatttggttcgctcacgcttgcttggctcggaaaaggaagttctcgtgggcttcgtgcgcgcgagctattttgtcgtcacgtgacatcacctcactcctcactctcgtgctgtattgagctgtgctgtgcttagctatttttgtttttttccctcctgttttgtcttttggttaaatttaccctttaaactgtttattcttagtatggattaaatttctgagaattaaaataatgtgattttatatttgtactttaattaattattttacttttgattttggaaatgcttagagtagattagtctttatctgtgtgcgttaaaggtggtttctttcggccgagttggcccttgggatcacgtgcagttattaagctgtacagtggcgcacattatctagttgaattattttttttactggtactattatttgtttattaaatttatttacacgcatggaacctgacgatgttggtgctgacaccgtgggccccactctctgtgcacactgtcgattggcccagctgagtcggatctgacagcgacgcgtcgactcgtgcccgttttgggtgcgagtgggccatcggatccaataacccgataccgagtatctgccactgaatactctctgttgctgtttgccactacaagtatcgtggatagttttattctctttttttatcgaaaggaatcaatcacctttaatttaaaaatgaataatatttctaattctttcacttattattactgcaatcaaattgaaaaatcttcctgtgttatttccgatcatatgtctcgaagctgcctctttcattgatctgaagataaatattcatcttttgctaatcgctaaattcagatcaaatgcagttcttgaatcctgattaacacatgttggcctgatgtgattgcatctttcattaatctatctttcatcaaaagcattgcatattctcaatgtctaaaaaatatttgttttcttctgtgttgcagtttggtg

SEQ ID NO: 1613 - DNA, 1787 bp, Oryza sativa
  Intron number 1 from transcript LOC_Os12g04930.1 (locus LO C_Os12g04930) derived from phytozome v7.0 (chr-ID Chr12; p os 2121017 to 2122803)
ggcggctgagcagaagacgccggatccagttcctggtcagtaccatactaccattgtgtttgactctacacttttcaatagactagtggtagattgtcagccaggaaaacaacaaatgctatttttcatgaaacaacttggtatgaactagcaatttcacagataaaattctgtgtaataacaaggatgcaggtttcatgatgttatatgcaatacttggcataatgtagaatttgtaccaattacggaattaccagtagtagattttcattttaaagtgatttaggattcaggatttaggatcctgttcctggtgagtgccaccggtgttacttcatgtgttttagtggactagttgcagatcaccgtgctaggaaaataacacatgctatgtttcacaaaacaaatgggtatgaactagctatttcacaaataacattctgtacataataacaagggtgcacatctgatgacgttatatgcaatactgtgtgccaattaccaatggcagaattgcataaaaaaataagtgatttaggttttaggcagtgtttttatagatgcatggttatacaacaaacattacaacttccaatggttaaagggtgatagtagtgcacttgtccttacaaaactgaaaagtacagctaataagcttcatcggtcttttgcattctgtattgctcagtttcacgagtttgtagtaaatatctcaatcccattggtcagcttggggggattgttttgatgtttcctattcaacctttgagaaaattcttgatccctgtttggacacaaggttacctacatgtgtgtcagtagtcactatatctcaattgcacaaactagatagttttcactcacttctcttgaaatcatttccaaagcatagtgttctgtaccaagaaatatagttattgcatatcttcatctgtattattggaggcgcttagtgcagaagcataatgccataatatggtaatggtgagtgcaacatacagttcataagtcaaaatgtacaccaggaaagcaaaggaagcagcttatgttacttgagtgatgctatcttgagaatgtaaaccagaaaagcaaaggaagcacaacatgaaaatgtaacgatttgcttctgcagcagccttacaatatgcataacttattaatttgccactcaatcaaagacaagaaatatccatgaaatgtaacaaaatttacctcattgtcctgttcaagagtatctatatcttcatctgacgatacattctataatatttatactgaactataaatacttatatttttccgttctgtgatttgtctacatcacaagtacaacataagatactgtactaatcctgatctcaaggtctccctcctacatcaaagaggttaccttgggtgtttttacttatccagtcaacattccaccttatcttgcattatattatgcctacttgaatatgaaagacactacagtaagattttagttgccacaaaggcactaattgaaaagtttcaatattagatattcagtgcaggtatcctgtaataggtgcacattaatatcttccactagatctctctgtcttgcctacatggtcttttttgtttaaacagaaaaggggttacttgtttgtttttcgcatacaaagtcagggtcctaacaatgattgttttgcaaagttgcactatatgacacttcctactttgtagcatccattgttttatctgttcaacctctcactggtttttcatcaaataatccattttgcaaatgcaggtagcgagat

SEQ ID NO: 1614 - DNA, 2997 bp, Oryza sativa
  Intron number 1 from transcript LOC_Os04g25900.2 (locus LO C_Os04g25900) derived from phytozome v7.0 (chr-ID Chr4; po s 15053954 to 15056950)
ttgggtcctcgtaccaggtcggttctcctaatctctgtttccatcagttcaagagcatatactccctgcgtactcgtaaagaaagtcgtttagaacagcgacacggtcttcaaaacacaactttgactctttattttctataaaaatatttattgaaaagtgatatatatatatatatacttttatgaaagtatttttgaagacaaatctattcatataagttttacattttcaaagttgagagttattaatgatttatattcctaaggtttgacttaaacattgttctaaacgactttttttataagtatggagggagtacttgattaaaaagaaaaacacacacacaaagagagcacagtacttggttgttcgtctttttacggattgagtttttttatttttatttttgaaagaggattaaaccctgcctggcatggaacgaaaccataatgagcaatctggtagttgagaatcagaaatcagatcaacatcgctgaaagacaaacgtattttctttccttaaacaaaagtcatgccaactctgtgtgtgtttggtggtgtgaattttcaactccacctcgttttttttgcacgcttcctgtactgttaatagaatttgtatacgaaagctactataaaaaatcatattaatccactttcctaagcaaatagttaatatttaatttgtatacaaaagttactttaaaaaattatattaatccatttttccaagcaaatatttaatatttaattaattatgtgctaatgagttgttccgttttacgtgcgataggtattaatgagctctgcactcaagttgccgaacacagtcttagtacaatacaaaataactagaagaaagctaaagatacaaacaatatttctgtaagaattcaagtcttcatcatataaatattaaatttctggcttataatatagccgtaataattattatttatttctggcttataatatagccgtaataattcaagtcaaataatggatgtgcgtgttgttgtgtttgttcatgtgcttttgtcgtgtagtaaaaaaagatatataatatttgggtgaaacggtgtactccctccggtgtcataattattaaagttttggaggtcaaacttttataactttgaccatcaataactttaaaaatatctattaacttattaaaggaatagaaaaaaaacatccacgttcgctttcatggcctagaaattctcatattaatcggagaaaaagaaaaaatagagtccatataggaatatacaatttaaaaatagctgaaattcggattaaaaatatggaatataggaagataagaatatagtccataccggtagacaatagaactaataaaaatttggaattaaaaaaaataagaaaactaaaagtagagattagagtcaatatagaaataagcagaataaaaaatatataaggaaaatttattgtatataagaactttttttagaaaaaaaaaagtgtccgatcggacagctgcatagaatgattagtcttggaagtcttttccaaggaaaaaaaaacctaagctgggctacagtaaccgtgtataatacaaatcacaagtgcttatctcgatctattctccccgttgcaacaaatcaaatctctaatggcaggttcatacggtcatacctgcacactctatgcatttatatgtctataatagtatatcttagtctaacataaaaaggccaccatattcgcttccactttctacaaatttccatattaaatagaaaaaaatagagttcaaatggaaatatatttcaatatatctgaaattcagaataaagaattctcttcaactacctagatgaaaataaaactatttataaatataaatataatttaatatatatctaaaatttggaataaaaaatgaagaaaattttaagaagagtctatgttgaaataaaatttagaaatatcaaaaacttggattaaaaagaataatagagtccatatagaaatacaattttaaatagctggaattcagaattaaaaataataaatattgaaagaaagtattagagcccacaccattatataatttagaactaactaaaatttgaaattgaaaaaataaaaattagaagtccatatagaaataaatttataattgaaatttaaaatttttaaaaagaaatattggaaaaataatttagagtctatataaaaatataatttagaaataataaaaattcaaaattataaaaaaagaatattggtagctagccgcgcaatttgtgcgggccgtcgtgctagtttagtttaaaggaactagaaagatatttgtctttcaaaacactataataaagtaaacatatatttatttattatatactccctccatctacttttgatagtcataattcatcttggcacacggaccaaagataagtaattctacttatcatccatttaaacattctaatagttattcctcgtaaacaaacgattcattaatatttacatttctcgatgtccatgtagccaatcttgtgtggaagaatggagagtcacgcattaaatctgagaaattcgttaagatgataggttgttggattgaaatatgcctatcaaaaataaattttttcagatttggaatgactataaaaaatagatggagggagtatattataatagaaaaaaatgtcaaagatatattttgtagaccgtgtcattgtccaaaacgtcaattaaaataaaacctgagagaatatatatgttaatatgatattcttgttacataacgtgtaaaatctatttttcagcaataggacaccaaacatatacaaaagtcagctcattttttttagctaggaattgtgttggaaatttggataatttgcaaatctgtatgtacaattgcgcagcgtctcttacatagttcagatcaattcagactacttattaattcactgttctccaactagctcagtgtttacttggatttgtaggctg

SEQ ID NO: 1615 - DNA, 2191 bp, Oryza sativa
  Intron number 2 from transcript LOC_Os03g59774.1 (locus LO C_Os03g59774) derived from phytozome v7.0 (chr-ID Chr3; po s 34033501 to 34035691)
ctattctgatagtgatgtaagtatactccagttatgtttttgaaaaatttatttttgtttgtttgttttatttatttttttcaatatttcatcttgtaggaatctaaagatccttgtaatgtaatatcaaaggatgagttaatgttgttttaatattcaacttgattcggctcagatctggattatttgtagcttttccttgaatccaactatacttagtaggaacaatcttatggttgatgtgaaatactgcatgtgcatgtgtttgttttttcccctatatatgtgaaatgatgtttttctattttcttaggaacatatctattgtatatacaccattattgatgcatttaatatttgctagtatttcattcttattgtttacacaccattatttgtatttttttccttttttttttgctttactcagttatcaacctgtgataattagttggttctctgtttttgttcatatgttttcatttgatatgatccccatgtaatgttccatttgtccaaatctgaagcatttcttttgttgtcttcaattgctgctgctattgctgcaaaatgattgtagggtgtgtgtagagatttcaaccaatttaaggtttaagctatgggcttctatgtccaatggtctttttctcttattaaatgacttatttagtactccattaatattggcaagcatgaacatcgttgctgctcatgttgaagtacaacctcatttacatgtataaaatgaacaccatgtgtttatgcgtctcctaattaagaccagtgaattttcttctgctttctttgtctatctacaacaaaaatatttttgctttttgctgtctcctgtgtgtgtatacttatgtttatagcaacttatgtctcaaagaatattattccaacattgaacatgtagtttatttatgttcacacaaatcatctagtttatttttgtagataaactggagtatatttatgctattaatctcacacgtcaaatttgcaaatttgctccaacaaactgacatggcacagactttgaattgaagttatttatttttcttgttgaaataattgttccataggattggtttcaaattttattttctacttgcattattctgcttgttgtgtagattcctaactatgaaatgcattgtctaggtatataattgcatatctctttagttttataaatttgattcaaaattgaagtgtactggattggaggattacttgaagaataatcttccagttggctgaggacacattttataatagaaatcatgatctaaaataaacatatggaatcagttacatgagctttatattgaagttacagagttttttccaatgtaattcctatacaatttcactgtaatttgattagataagttaaaggtcagatttaatttcataataagatttaaagttttatcccaattgatgatattactcataagcaaatcatagttttgcagttcatctgttcagaagcatgcagagttagagttgaagaatttggtacctatcatgtgtagtgatatgtctgaattatgatttctgatttgaggtgtggtctgaattttttgatatttagttggtctgcagtaatatgtctgaaatctgaattactgattgagatttatgcacaaagcaaactgtttgttttgtatgatagagattttttgaactttttagttctgcatgagttctgatatgaccagaaaatatgcaatgcaaaattcatgtcattatgttgttcaacctaagaattcaatttgtgtaattctgtaaagtctttagtctacaagatgtcagttacatatttttagttttgaaattacagtgtttattttatgtgtttcttgtacaaaatgactgtaatttaagaataaaatttataattctagtgaatattctccatttgtgaagcattgtacttgatttgaaatgtttatagcaactttcagcaattttgagttcagttttatttgaattttgagttcagcaactttgttatctccaaatactttgatgtgaaatcttttttgtattttgcagctatatgtctgaatactctgatgtctgtttcttaagaaaattcagagcaagtaattgtctgagaattgatgtattgtaatttgatttgattatctgaatactctgaaatctgtttatttgcagctat

SEQ ID NO: 1616 - DNA, 11295 bp, Oryza sativa
  Intron number 1 from transcript LOC_Os03g41438.1 (locus LO C_Os03g41438) derived from phytozome v7.0 (chr-ID Chr3; po s 23053519 to 23064813)
aggctgagacccactcggtcgacttccaaactaaggtgatcaggatgatcgattcccccctacttcctgtttctactactccctccatccctaaatatttgacgctgttgatttttttaatcatgtttgaccgttcgtcttatttaaaaaatttaaacaattattaattcttttcctaccatttaatttattgttaaatatacttttatgtatacatatagttttacatatttcacaaaagtttttgaataagacgaacggtcaaatatattttaaaaaatcaatggcgtcaaacatttatggaaggagggattactagcaaagtgcccggtggaatctatgttaatgctaaattttaatgatacgttaatcaacgaacgatctccaaatataattatatggttccaaaataccactaaacttatgaaattaaggtactcagggataagcaaaaggagattgagagcagggtgccagtcatcagatgaatcggatcgtgtgactgttgtgtatgttttgtcaaaataaatgtaagtagtacctaaacacacaacacaatagcatgcaatacttatgtctgcacaaacacgaaaattgttcagaaacagcctctttcagtatacagaacatggccatacatatcaataatttaataattcttgcgtcaaaaaaataattcaataattcaagttccacatgttcttttcataccctggaccaagatgaacgggtgtataatttgtttttccctgatcaaagcttccacaagggctgacttcaacccttatcacaaaaaccaacttgactggaacacaacagctaaccggcctcgatctcctcctgtctatatttgaaaataatgagaccaggctacaagatcgatgaccttcttcctttggatgaaattcagaaatccttcggccggctgaagatgttctgcatttgcctttgttgcctctccgcaggctcattccccagtctggtcatctttccgagtttttgacaatgtgaggcccatctcaatagccatgggttcaccttcttgacctcgatccaggccccaatcaatattctgttcgaaatcaacacatccaccagcagtaggtttgctcttgctagaaattgttagactggccaggttgcagacatggctaacttcaattcattttgcatctggcaaatttgcccaaacctagtgaaaaatctactggcatcatctcagttctttggcttcccaactgctgaaatcaactcaataagaaaagctgaatgttatttaaccacagtattaggcccgccacatggttatgtcgtttaattagcataggtgacctcactgaataactgaagttggcaaacgtgaagttggcagagatgatgatatttgcccaagtacatcacacatgatgcgaactcactcgtgagggtggcccgatcttcacggcagtaggtatgaagcaaagggcaatgacataaaccgtgcacctcaagggtaactagctacgagcagcaagagaataactagctttatacctgttaaggttggatgcgtccaagtgatgagggtgagaatgatccgaaacctcctgtactccgacccatcaaaccgagcaatcatagatccacaatccgaaactaatccacacgagaggccaaagagccaaaagcatgaactagggggtaccaaaggagccttctcacaaatccaaaagaactcacaagaacaagagatttaatctggtccaacaaaaagtaccttgaagtaccggtactttacggtatcaaatgtttccgatcgttagatctaacaatgcccattctgtctagctagatccaattatcggaaacgatttagtaccatgaggtaccgacacttcaagatatttttgctggaccagagaaaatctccaagaacaaagggggtaaaacacttgtatagtctgtagcaatctctcatacatgaggttttcagttgaacaaaagttctctaatggatggagtagatgaaactagacttgtccctctttccaacagtgtatgccaagcaacccatctcttgattggctaggtcacacatgccttggaagttgacattttgtagtgtaaactatcttcttgttggtgtaaacaggcactggtagtgtatgggctgattcctgctcagcgtaacccttgtcgttctcaacgtaacccatccatcttagcattgtgatgatgtctttgggtgtaaaccttaacgatacaaaggtaaagcatttaggtagtataaaatttacactattatttgggttaagttgagcaaagagtgagttcatctcttgttgcatttttctagcatggctacacgtaattggactatgatatgttggatcattcttgctgagatgtaatccatcaacatggtttcactactacataacctatttttccatgcggtcaaattgatttttccgtgcggaggttttccccatctggaaccaggcgtctggaaaaataaatattttcgggtgacccaaccgtacagtataattgattatcccgtgcggttaaattataccgcccacacgaaaccaaaacaaccccaaaaaaaaagcgaaaatcaccaccacacgccggaccgcacgcacccggccaccaccgagcccgccactatcatcgccgtcgagcccgcccgccgccgccacagccacgccggccgccaccgccgccagatcccggcgggggacggccatgaccgccggatccggccgactcgccgccaccccgctcgccgccgctgccttgacggcgcacgcgacgacgatgatgtgcacgacgaggacgacgaccaggagtcacccccgcccgctcgctactcgccgcgttgtggacgatgagggagccgagtgacaacgtgcacgatgaggacgaagactaggagtcaccgccgcccgctcaccgccgctgccttgacacctccgccttgccgcgcgcgtggaatgggccgccgctgacgtgttgatggaggaggggaggaggaggaggtatggtagagaatagagataaggtagagagggagaggtgaggagtggttgagggagaataaaagggaaaaaaggaagagagaggatgtcaaaaatttgaagtgggtgggagggaaagaagggagatatttttctgtgcaatccacttaaaaagcccgcacgtgaaaatcgatttttccgtgcggtcctcttaagtcgaccgcgcgggataacgaggattatcccgtgcggtcggtttaagacgcccgcatgggaaaatgcattttcccatgcgggcgacaaccctgcgccggtccccctattttcccgtgcggttccacttacaaaccgcatgttaacaaaagggagcggtgtgtccagaaaaatatatcatgtagtagtgtttacatcatcttcattttcttcatgtgagggcagccacaatatggccataagaagaggccataaggttttatagtgaccatatacattgtgaaacaaagccataaggcattaaatgcaaaagaaagctttaagcttatggcttgaccacaagcaataaaataatagggtaaaatgaatgtgaggatgaaaaatttgtatggctgataaaagaagtactagaatagtacattgtgggacccatattaaagtttactcttgctttaaacattgtggtaataaccataagaatagtgggacccaccttaatgctacttatgatcataaacattggagatgtcctgatgtatgacataaaccatcaccttgtttatgtcatgtgtagctgtaatgtcctcgtcaacacagcgtggggcaccgacggcgtccacagctaggaacttgtatagggggtacgaccaacacagggcgcagatgcagcgatgttgacctcgatctctactagctctgcctccttcaccccagactcgatcggtgcacgcatgacttccgccggcgagttttgctacgtgatggaaggcagtggtggctcagggggggctggttagcagggacagcctggggcattgtcgccgctggattgaggcgatgtcatggtggtagaggtgagaccgtacaagttggggatggagcggtagtgctgagaaggtagggcttggacggcggcagaggtagaagatagggtgttatacgggtgagctgccactgatggtgaggtcatcgtcgcaggacggagaagcagctttgcgagagaaagagaagtgattcgcaacagacggtggcttggcgattcgtggaggcggtgtggcaattcgcggaggcaacacgacggtggccaagggcggagaaagtgaggcacgtgagagagagacggaggcccggggagagagagacatgactggagagagattaggatcgaccggacttgacctaactctaccgatattgtgggttccacttatcagtggaatactcgaaatagaacggacaccaccaatattaatgttttaagtatcatagataatcaatctaggagtaaggttgtgttctaatatgctactccttctgtcccaacgaataaggcacacatgtattttaatatttaactctctaaatatttaaccaatacttttttaaaaattaaatcttatttgatgaaaataatattattacattaacatttgaatttatatttgatgaaaataatattattagactaacatttgaatttactatcaacattatagtaatatattatagtgtatgagaaatttaaaatcaaatattagttttgaagatcgtgccaagtttaattacgctttattgagtgggacggatggagtactatggatagccacttcctctatatttaccattagcactggaactattaaacggtgtgtctttataaaaaaatatttttttaatataaagtttatttaagtaaataaatatatttttttattttacaatagttaacatttacttaatgagcgatgctacggtgctctctactggtcgtattatactaccagtattattatggataaattaattatctactaataccatgattaagagtagctgttatttatgtttttttctatctaaatctatctataatcatccagcgcatggctcatattccataaaaaatccaataaaacaagataaagagaaaaatatttactcactgttaaatgacgattataccgtttcacacctttttattggacaataatgtccctccatgtttctactaccgctaactaggatggtaatataaatatatctgaactattctatcaaatgaaattaatggtttagattgctttctgctagtagtagagatactgtagtgaggttcttaattaattatgcattaatgactaatctctttttttgtaaaaatgagacattttttgtgcggaagtgtcattaacggtctcgcggtaatgcggtagctagcgagatcgcgcagcactaacacggtcccgcaactagaaaacacggcagcgcgtcagtcctagggatgaagacggatcgaatacggtcggaaactagctctatcatattcgttttcatattttatttctcggaattaaaatcggaatcgtaaacccgaataaaaaaaggaatcgaatattatcgaatactaatacggagcgaatacgaatcgaaacgaatacggtaacgaataattatcaaaatatgaagacccctcaaagtaagattcttaaatcgagaaagagatgcagcaattagctttcaaaaacaaaacttcaacaatttcaaaatttatctgtatttataagggcaaggggagatagaaaatgttgtgtttattttacatacaaatttatgttattatgaaataaataaattaatgtgtatcactgaatttttcgcaggcacattaattttttaaaaaaattgattgaatattttaaatttgggttgaacatttcaattggagttgagaatttcgaaaataaattaaacattctagaatttgagttgaattttttaaatctaagttgagaattttgaattcgaactgaaacttttcaatttttgaattaaaattttttaaaattttcagaattgaattgaaattttttgaaaatttaagtggttatttttcagaattgattttttttcatttgtttgtatgttaatcgatttttccatacgagcctcttaagagatccgcatggaaaaataagctcatatgaactccaaattggatgattcttttttctaaatgtttctaaaatcatgctctatcatattattgtgttcttactgctattattttggccattttttcttgtgactttgttttatcaattaaaaatttgaatttcaaaacttcaaataatattttgaagctgtaattaatttcaactgaaaatgtcatgaacacaaaagttgtagagctcatcaagacatacaatttttatttttttcatttttttatccgacaaagtgatagtaacattgctcacaaagtttacatctctcttttatggagtagtatataaaaccagataagtaagatgtaaaatttatgaacaatgttactatcactttgtcggatgaaaaaatgaccaaaataaaagttatagatcttgataagttatacaactttgttgttgatgacttttttagttgaaatcatttagtatttgaaaatgttgtttgaagtaaggggaggtcaaatagactttgggcggtcaaaaaaactttagggagagtgagttaagcaggtgggtcccactagtgggtcctacggcttttttttcttctctctctttcttggtttctccttctctctctttcttggtttctccttctctctctttcttggtttcccacggtcaaagatcctttctcccgattcttctccttcccttccttttcctctgctttgcaggtcgcagcttcgctcttccctcgtgctcccttgcgagagagagagagaggtgccggcggtgggctggcgcagatcaaggcgccgaggaggagatcggggcgccggcggctcgggccgggcagcgtggccggaggcgccacgggagggtggaggcatgcggtggtggggagcgggggaggaggtggcggtgccgggagcaaggggcgacgcccggagggggagctcaacctagagcggcgggcggcgacggcgtcggtgggcggcggatccggcggcgccgccctcggggggggggggggcgcggatccgccgcccaagggaggggttcggtgctcggccccgcgacggccggcggcgggcggcagcagcggcgcggcgaagctggcacggccggctagggtttcggggtttttttatttttttatttttgctgaaaaatattctttttgcccgcatgtaaaataccggatatccgatgaaaaatttcggatggtttccgaccgttttccgattccatatcatcggatatcaccctttactaaattcgttttcgtatccgagaaaaaaaaattcgaattcgtttccaaatccactatattttggatagttctgaccgaatttttccgaatcaaaaaaattggtactatccaaaaaaaaaaaatttccgacggaaactatccgaaccgaaccaccagtcttatccagtcggtcccgtgggcaggccatgcggtacgtactgtgagccagccgcgcgtgcgaccaaccagcagctgcatatatgcagtgacaaatgcacgcatgccttcatgttgtcatgcatgttgccggtctcgcatggccatcccacgggactgcgaggtgccgctcgaccggctagcgggactgacgcggtaccacgcacctacgccgcagggttgaggcagctgtcggtccggtgttttcacccccgcgggaacgtgtatatttcactattcttgtaaaactatatatataattaaaaaaaggttagaaataatggaaattttcaaaaaaaaattcttatcattcatttggctactatatttatgcataataatcgtaggaaaacaaaacaacatagctctgagtacataaaacacatttaccgcacttatataagcttcggttatcggtattgtgactatttgtgtgtatatgtaactgattagtggagattccacttaattctggaaattgtgcagtgtgaaaatgccaaataagaaaaagtagatagtagggatgtggatttagagcctactaatgcgaatatattaaaaacatatataacaatataatagggatatttttcataaactagcatggtggcccgcgcagattgcgtggctagcatcattatgttttctctcatataatagcatatatgttttctcattatattattcaaatatgttaaaatgacaacataattttaaatttttcaataactttacaaaactactaatgtataatattcatattatattttatatacgagttagttattaattatttttagtatcaaattttagttatttgtaaattatatatatcctatatggattctagactcgtctttcaatatttcttttttttttaattccgaattttctgtaaattgtatttctatatagactcgatgctcttcttcctatattatttatttttatttctgaattttcatattatattttatatacgtgttagttattaattattttaaatatcaaatttaagttatttgtcaattatatatattcctatatggattctagactcgtcttttaatattttttttaattccaaatttcctgtaaattgtatttctatatagactctatgcttttcttctaatattatttatttttatttctgaatttttattatttataattgtatttctatgtggactctaaactcatctttcaatattctttaatttttaatttcaaatttcagttacttttaaattgtattcctatatttgtattcctatattgaccttaaactcttcttcccgtgttttcttaatttcgaattttagttatttgtaaattatattttttatacggactctaaactctacttttaattttattatgtttattccaaattttagttagttttaaattcctatatggactctatactctacttctaatatttcttattttttaatttcgaatttcttttttttaattatatttctatatggactctatactctacttataatattccttatttttaattccaaatttctattattttctaattatatttttatatggattctatactctacttctaatattccttatttttaatttcaaatttcagttatttcctaattgtatttctatacggactctatactctacttctaatattccttatttttaatttcgaatttcagttatttcctaattgtatttctatatggactccagtctcctcttctaatattccttattttttaattccgaatttcagctatttctaaattgtatttctatatggactctgcttcctaattgtatttctatacgaactctatactctacttctaatattccttatttttaattccaaatttcagttatttcctaattgtatttctatatggactctagtctcctcttctaatattccttattttttaatttcgaatttcagctatttctaaattatatttctatatggactctgctttttctttttctccgattaatgtgagaatttctaggccatgagagcgaacgtggaggctcctttttctagtcctttaataatataataatagatttagggcttcttgaaacaccttgtcttaaaacatggggtttccaaaaacaaatcacagtaattatggttttgtatttcgtgttactgataccccaaaatctagggttttgtaaaattgaatctaatatatcctcttccaatggagatagaaaactttgcaaacgatgattgtaccctggggccaccttgcaaagtttaaattagaaccattttggctgactttcaaccttttacaaaatttaaaagttgtccaaaattatgaaaataaaaatattttacagatgttgttaaattcagactatatttatttcttttttaaaaaatatatatgttcttattttttttatttgtaacaaatattgaattccgtaaaatatgattaaattcagctaaaatatgttcagattttaatttggaaggtggtccaaaggtaaaattgtcttttgcaaagtcctatctcccttttgaaataggatatatcaaaataatggctagaatgccttttggcaaagaaccactagactaaagtgtcctatagcagccactaaactagagtgtcctagaacaaatatcataaattgagtgtcgtagagaattttgcacttctattatttgatatcttgaattgagctggaaaatgttgaaacaatggtcatagtgtttagcatattgccacgaaaccaaagtttccaatggtcaagacatgtatttagaatgtcgcacagcaattgccacgaaaatacaatgtcctatggaaattcttgcgcagattttactattctgggttttcgttgcttcctttttagcatacagtttaggtagaagttactacatctctcctttaatatttatgttaggaaacgataggcaaataaacgataaagaacaatagatcaatcacagaagacacgagatttaacatgaaaaaccctccaaaagtaggagagaaaaaaacacgggcgccagccggtaaaatatcgtgaggttacaacaccgaacggcggcttataagatatatatatgaaggtatcttcactacactatatcaggataacgatccgtaccgcggcttcagcctctgcttcgctccggcctagcctccggcatctacgggcctctacttcgcttcaatagaagctgacctttattatgtgcaaatgaatttggatcacaactcaacaatttgaagttggttagttggaaattgaattgacaaacgtcatatttaaaagaatagagggaatactttctattgtgggaattatttatttgtaagaagatgagcacattactaatttgacttatggaatgattattgatacttctgtacaatgatgccacgacttgtagagtgttactgactcatgatcatttatatcggtatgctcatttgaagtgccaatctttcacgagttccatcagtacatgcgaattccttcccattgactgataaaccttccatagaattatttcgtgaacctctcatctctcacattctaaagcttgacattgatcctaaatgatggaatattttctttttattcaggccgctgaagttgctagtcaggtgaactc

SEQ ID NO: 1617 - DNA, 399 bp, Oryza sativa
  Intron number 11 from transcript LOC_Os06g44410.1 (locus L OC_Os06g44410) derived from phytozome v7.0 (chr-ID Chr6; p os 26811959 to 26812357)
tgaaaaagcaaggaaagcgggttcctataattgcggtaagtttccaatttcatcctaattctctataacaggcttagtcccttgctagttcagatatttggtccagcctagatcacttgcaaaacaaatttctaactgctcatgtttagaatgatataagccactgaaggtgtgccttgttttcaattttaaagaatcggcctagatttgcaaataaagaaaaacagaattacatgaagtttctctttcatgataaatagtttaagtagatttcattttgtgacatttctaagcatgtcggttaccaggattgaggatatttatatagggattaaacatattaagttcatatttttctgggacactgtataacccccaaaactcttctgtttcattcag

SEQ ID NO: 1618 - DNA, 1294 bp, Oryza sativa
  Intron number 1 from transcript LOC_Os07g01920.1 (locus LO C_Os07g01920) derived from phytozome v7.0 (chr-ID Chr7; po s 560860 to 562153 reverse strand)
acgccgccgccctccgccgccgcctcacgacgtaggtaacgtcgcttctctcccctccctctacctgctcatgctcgtgtgtatgcttagttgattctgatgagttacgggttaatcgggtacatggtcgttttcagttgattctgtcattagttagtcacgaaatatcgtttttgttctggggacatcttttttctgttctgcggtctgttccttgtgttgattgccatccattcaagcgggtaaatcagatttgatggtttggtggataaaaggtagtatgtgattgttcagcacggtttagcagcgggctagctgctgctaagatttaacatcgatatggaagtttgagaatcggtggactctaatacttgtgcgtgcttccgttgctgccaagccatattgcttattgtctgaatgctcgctcttaaccatttcatgtgctcatatgagcaatctgatttttgtatcaaatatgttatccctccttttttttttacaatagcagatagtgtttatgtgtgttaattgtgaggtcaatttttttttacaatagcagatagtgtttacgtgtgttaattgtgagatcaacttgtgcattacatgtatgtacatgtcactggttcgaacatgttagactttccttgttaatggtgatttttctaagccagttaagtagatggtagcagataaaagttctgtatgtcgactgtagaattaaaatgttcagggcgtgatctgtagaaagatgtagtaggggtggctggcaggttgcagattcaccagcactgttccttttttcccccaaggagtatatagagaggaacaattagcttgctggagaattttcctatgatacgtgtaacatgttttatgtgatctgtcagaaggctgttactggtgcttaggtctatatgtgatttattttttattttgtttgtggtgtcttgttacattgtgtaactggctccttgaagtgttttacggcctttatccgctgcatgtgctaataaacacttttaagttgcacaaataaactgtgggttccattttgtcttatatttttagatttactggatattgcttgggaatgtaagttgcagagtgttgtagtaaatgatattatggtttgttgttctgtgcaatttactctactgttttcaatggaagggttcatatacatgttcccaattatcttatttctgaaattctccgtattgaatcctgttatcctgtattgatttcatatgcactgttgtttgtatgacagaaatagtcatctcagctagtgaaa

SEQ ID NO: 1619 - DNA, 1852 bp, Oryza sativa
  Intron number 2 from transcript LOC_Os05g06399.1 (locus LO C_Os05g06399) derived from phytozome v7.0 (chr-ID Chr5; po s 3284277 to 3286128)
tctaccatctcggtgagcacccttcagcctatagaacatacatgcatgcacccaattaaccaatacatgattgtagaagcacatgcatcaccacccgaaaacatcctcctttcggactcgccgccggcgttactccgatgtccactgaccgagaaaagtagaagaatggaatcgcaataacatgatcttcattttgtattttggttgcacccccaaacgagccatcgtttgtcgccggtgagctcgagatcgagctcagccatggctgttctgcctctgtgcgtgagaaaagaagtcagggaccttgtttcgagaatttaaacaactataaggtttaatgtgcaacttttcaactcactgacatatgaggctaggtctgcgggttgattcttagaaacctcagggatctttttgtatattgatcattcactgacagtggaccccttggaaacaaaaatctgaaattataaaaggaaagtacctaaaacttgtaaaatccatataaaattaaatatagctcattttaagatgatacaaatttctgtcaactcaccaaattgtgaactttagtgttatggaataaaaacttgcactcacagtacaaatttagcctctaaaatttatccaagttaaatcacacataaagcatgcacaaatttataaaatgcatacaaaattcatttcaactcattttggagcaaactcagtttctacagatccaccaacttatgttctcctataaagcaaaatgaaatagtatacatactatacatcgaatgcctctaaaactattacctttaaaatgactagttttacataagctgaactttagaagtttatataaaattcatcttagatcctttttgagtaaacccaaattcagtagaatcatagggttgtgcacttcaatgttataaaataaaaagacatacttacagtataatgaaaacccctaagtatttaagtaaggaataagcaacatggagcataccttaaatagtaacatttgtagaaaattcatctatagtctaaatgaagtgaaccaaattttctatagaaccagcaagtaatatacttcaacctagtagagtgaattatagcaccctcttacagaccatggctctgaaccttaatttggtagaataggtactaaacacatagtaatggttaaacaatacatatgaaaaagtatatatatgcttggtagctccaaataaatccaaataaaacttgttgaaccagtgaaggcatagatccatccccttccaccaaaacttagtatccttaacttatataataatctccagattgatatgttaagtttctaacatagaacatcccctagcttataaaatgtgaagtaaagtaatttgaacactaaaattttataaactaagattagattagttaactaaaatactcattttatacaacactagcaagttagagcaagttctggacctaaatctccaaagccatgtacacatagggaatatatgcctagaacacgttaaaacttgtaaaatacataaataattcatattaactctaaaaattatgaaaccaaatttgttagtcttagaaaacaaatatcttcaccccagcaaacataaacttaataagaatcaccttacaacagcatttcacaatagtaactaagtaaatcctacactataccgacgaaacttctaaaattcataactcccaaataaaatgagataaaatagaaattctttcacctaaattaattttagaccggtacctattcactgtgcacaaatcatccattttagagcattttggatttttcgcatatttcggtgtttaattgcataacgtgtactttgtatag

SEQ ID NO: 1620 - DNA, 2537 bp, Oryza sativa
  Intron number 1 from transcript LOC_Os04g01354.1 (locus LO C_Os04g01354) derived from phytozome v7.0 (chr-ID Chr4; po s 259091 to 261627 reverse strand)
cctccttgacctcaaggccaagtttgcagatatctgtaagcgtacttgtttgtcgttaaatactactactgctacttaatttctcgttttaaatatatattacattattgacatgttgttatatcaccatttattttatttaaagatttaaaatcattctaaagctggttatactccgtaacaccagctaaataatgcttacacttttattcaagtaagataaacagttcactgatcatgcctagtgcctcaattatcatttttagcatgtgttagggacgcgcacgtatgtgtgtacgtgtattgtggtatgagtgtggtgtgtgtatgtgtgttaccctcttaagataaagtaaaatattatgtcaaaagttaagggcatcatatatttaaaaatagagatagtactgcttagttattacatatttactatcctctccgttctactgtatgatgtgttgaattttttcataatgtttaaccattcatcttagtaaaagaatatgaatatcatttgttgtaacttgttttatcattaaaaactataatcttaacttatgcttttatagagaaagtgtattcatccatcgaggggatatcccctagtttcatgcatgtcgtttaaatagttataaaaaattaaaataaattgacaaaatagattaatatgaaatatatcactccacaagcatacaagttaaaattcaacttatataaattataacaaaaataataaatatttttagtttaattttttttcgttgcatcttggaaaagtcaaatttagccttgcatgttcgtggagtgatatttttcatattaatttatgttgttaagtttacatatatatatatatatatatatatatatatatatatataactatttagatgatatgtaagcaattaggggatattctcttgagggatgaaaatccaaatccgcttttatatatatgtttgtaccaggggcgaagccaggattggggattaggggggagtggggtgaagataaaccatgagaccgaataactaatattaatagcaaaggaggtcaaatagtcaccgtcaataacaatcaatgcgtaaagtagtcctttaaaaaaacatgaattttagctctttaatgatatcattgaaagtttgaaactagtctttattgctaaattcttttaatgtaaactattgaataatctcacaaataagtaccatctattttactttgaaaaagatgagaattcacaaactaattttgtagatcatgtttcttgctaatatttttagacttgctaactaactaaactgataatactttcaagctatacaaaaacaaactagataaatatacttatcttagctaaccttaatataaagtaaaaatatgaggggtgtagtggtggtggtatttggatagggcctttggcaacccccttaattagctgcgctacttgtttgtactaaacttttaataaagtaaatgatcaaatattatgtgaaaaataaactgccatatagtttaagacaaggataatacgaggaactcttgcgccatacatacatacatacatacatacacacatacatacatacatatatatatatatatatatatacatacatatatatatatatatatatatgtatatatattttccaataaatgatgagctacaaaaggattcgttttttttcgtgtcacagctgattactcctttttttccattttaaagagtggcattcgatgtccaatatctcgatcgaagtatggaggtcagaataaatagaataatgatatctttcttcggagcagtttcttttcccgtcctcctcaaaaaagggcgtggaaacagatagaaactcttgaatggaaattgaaaagaaatgtagccccagttccttcggaaatggtaagatctttggtgttgatttggcattattcaacaagaaaaaaatcttatatatatatatgacactatataggacactcatatggggcaccatggtattaaatgcacaaaatcactcaaatttttcaaaattttcaaattgtgagtatatacctagttataataattcgattcatacctatacctatcaacaaaacaactcaaatttaactttatttcacaatccatgattacatacctaactaattatatgtatggatgctatatacctagaatcaaaatctaacaaaaacaagttcaaattcagttcaaacttgctttgaactagttagtaaagtggttaatgttaatacctaagtaattgaaaaagattcatactcatttaaattgggtatatactcaatttcaaaaatggtgcccgggcaccatggagcaccaaacaaatttactatatatatgtatatatatatgtatatatatgtatatatatatatgtatatatatgtatatatatatatatgtatatatatgtatatgtatgtatacgtatatatatatatatatatatatatatatatatatatatacacacacgcacacataatagaaggattttgcaggtgagaagaca

SEQ ID NO: 1621 - DNA, 3671 bp, Oryza sativa
  Intron number 3 from transcript LOC_Os02g42650.1 (locus LO C_Os02g42650) derived from phytozome v7.0 (chr-ID Chr2; po s 25649264 to 25652934)
cagctaaaacaggtaaaagaaatggtccaactcgattgccgtcaatttcaggtcctggctagtaatagtactgcttctgcctttgcattcccaattgtcgctcacttgcatagttgcacgcactctactcaacttgcatagtacacttacctgatagcaggggggaaatggtgttttagatgagtaaatatattgtacagtgctctgctttcatggcatccatgcatgtgagtcagggatggatcactcttctcagttctcacatgtggttgggggacacggctgatgatttcctggacgaacaggcagcaaaggagtaggccctttgctttgttgcccccttttgtccagggcaacagatctatagttctagaatcgcatgttgaaagaactgcgccaagctaaaaagaaactactataccgattatctaatgataacttgtagtactagtacttgaatgtaaataattcagtacttgctatattttgagatggtgggagtagctccttgcagttttttcttgcacgttaaacatttctgcagccatatgttacctactacaccatttgttatactgtactagtatcacccttccaaacccctactggtttcagccaactttttccaccatgcatattgaaacatatccattaatccatctatccaccatgggtgccattctagttgacagcccaaaacaagtgccctgcttggcccccttttaggcttcttggctgtgttcggcatcaccttttcccaatccttctcccacattttctgcgcgcatgttttttaaactgctaaacggtgtattttttataaaaaaaattctatataaaagttgtttaaaaaatcaaattaatccattttttaaaaaaactaggaaggtggcccgcgcgcatgcgcgggcacttataatattaaaaggtaagatttttattgtttgtttaaaaattttgtctcataaattaagggaaaactaaagtttggatacttttattttgcaatattttttgtaataatttaagggttatattttttaaggtatcttgaaaatccattcacaaacttttgagtaggagatggattaagtacttacgacttttgaatcatgttttctttctcgagtaaataataaattattgcttgtagtatggttacaaatgaaaaatacgggagcaagatactcaaaatttttgtgattaaatcatctcatgaagacgcatgacataataagaaagggagggaagcatatacatggagaaaaaaataaagggaaaaatgaaaatgtggaggagaagcgtaggtacccacgtacgtaggtgcgtaccgaaggtggagaggtgggacctcgtagtatttagtttgttataagatcaatttaatctaatggtttataatattggacccaccgatttaagtaaaaatcaagtaatacatactttgttttttttcccttagaatttctaatattttctctaatttattagagcaacacgtggtagcttaggggaattttaagaaattttaatggacttaccacatgtgattagaatattaaccatgtaatatatatgtatgggatatatgttaatattcgttccagcttcgtccatgtttatatacattgctagcaagccattagaagtctaattaatactagtacatattttgacacctatttacaattgttcatagtagctcttacagattcatcttaggctcttgattatgcgttgatcaccaatttactgatcaccaagactcgcatgaaaaaaaaaatactacttagggtttaggacaactgacattgatgaattatctgatttatgtgatagccattagaagtagtacatattttgacacctatttacaattgttcatagtagctcttacaaatttatcttacaatcttgattatgcgttgatcaccaatttactgatcaccaagactcgcatgaaaaaaatatgtactacttagggtttagaacaactgaaattaatgaattatctgatttatgtgatagctatttgagattataaactaatgaattaacttctaaaaagttaaaaagttgttttaaaaagcaccatttaggaacttggaaagcgtggagcgtgcaaacaaaaatccaaaagatggagtcggaaaaaaaaatacggccttaaactcccttataacactcttttcctagtaagagttctattgatattcactaatattatgctcatatttataacataataatttctttcaactgtaagaacaaataattgaaaatccaaatacgacataacacaatacattataattattatgtaatcaactcttggtttcaggttaaatagagctaagtgctagaaaaactcaacccacggtgcttaattcttctcttattgcatcacacctttaattttatttttatgttattaacaaaattaatcatctccatatacaatttgatacgtggcaaagcggtagcactgcagcagtcgtgatcaccttagatgcctcagacacgatgctttgtcacaaagtgcgaaaggcaaaggtgcaaacgtgcattgtgcagcaagccaaaaaacgaaaactttggacactttatttattaacaatagatccgatgatgatttaaataatgggtccaccggttctagtggaaatgtaaattagttaatatagattttaaattgttaatttaatgggtgcacactataatggtgtagactttattttaaaacagtgcattatttgagaataataatacaaagtaatgagtacaccgatttaagtaaaaattatcttatattattaatttaatgggtaaacatataatggtgtaaattttagttacctgtgtttataagagttatatgatggtatattctttgtttgtaaaattatgattatttaatatatatatcaattgtataaatggaaaaaagaagaaaaaagaaaacaaatggagggagccgtacgtactacatacccacatgtacgtacgtgaccacgggggaaagatgagaggtgggacccatagtattttgtttgttttatgatcaattttatctaacggggtataatattggacccaccaatttaaatgaaaattaagggctagatgttttgcttttttattagaatttctaggaatttctctaatttattagagcgccacgtggcaacttgagagcgattgtaggaagtttaatggacttttagtatataatagatagatagatagaagattaactaatacttaattaatcacgtgctaatggaccactccgtttttcgtacggagacaataagttcccaacccacatatgagaacacagcctaattatgccgcgcttttttaacgtgatctttcctccatatgagcaccaaaggtagcatatgcactatccttttttggtccaaaaggtccgtaataaactccactatcaccactcaccggccatgctagcatctctgcttgttggatatcagacacacagtaccctaccacccttcattctaaagagcatttgttctgattttcttagtgaacacaccgctacaagaattcaaagattctactcgtagtagctgatatttggttaattacattctggggtacactgagtaatttgcaattttgccgtgggtgcaggcaaactcggcaca

SEQ ID NO: 1622 - DNA, 2741 bp, Oryza sativa
  Intron number 3 from transcript LOC_Os05g07070.4 (locus LO C_Os05g07070) derived from phytozome v7.0 (chr-ID Chr5; po s 3720830 to 3723570 reverse strand)
gtcaggtattcaggttagtgaatggttccagacatattagttgcatatatataatgagtaaattggaagttatcacttttaatcatcttaatcctttgtgtcattctcacctttacaaaaggacatataccttctcattcttctcccttttctcaaactgttataaacttataatagtttcctttgttttctctagcccttatagtttgttgctgttctaactctaaaaatgaaaactaaaacaaggggaatttatatctttgggaatactacctagctttttatcatacaaatgttgtgtaatacctttaccagggtattataactgttaatactttgaactgagctactaatgacattgcaggtactaattgattcttccctgtaatggagagttttattttccttgatttaccaaaatcaagcttacattaaggtgtaacaaatgggtgttttgggctccataatcattttgttgatgctaaatgctgactactggtgcagcaaatggaagagctcttccagttgatatatgccatttgaggacatgtgctttgtcctcagtataagaacattggcctaacatcattgttggagttgcattgcccttagagtggggaaagcgacacctcttgcaagatagtaacagcaattatatcataaattacaagtcaggccttccaatgtggttttggatgaggcaattgatacattgtcatttgatgctgaattttttgttcgtctgacgactggaaagggggcacctacgacgattagcttagtacttagtgatggtgtatgaagagcattgatagtctcatggcccattgctaacatgtagagaaggattttgagttccttggaagtattgactggaggagtgtgaactacttcgcaaatagatgggtgtaaaatctgggaaagaaaacttaaagagctaaatgttttctaccatattagttgatctgaaggtgctttccaagtcaaaatcagcttagcatatagaattgacttggtgatggcggtacctggacccttgaagcagcagttcagaactgattgcactgagtattttctctggagatatccatttgatggaggtggaaggaaagagaggctagtcaatagtaggtcaactgatggtgtttgaaacaagatgcacttactcataagcagaataaacaagcacaacaatgccatgaagggaaccttagcaatgccgtacatctggcatcatttaaaacggggcttgttccactgttatactatgaccatccgccttgatggttttgcctggctattctgaagctattagttagcgttacaccttttaagttttacacatccagtgttgttcttttgtttttctaatattatgtacagatatctctcccacatgtcatagctcaatatgacaagggctttatccttttccatgtaaatatttgagattcagtcagattcttatacttgctacttgctagaatgtgaatgataactgtactgttggaagagtgttgtcatacatacaaattagttataaatttgtttctacttttgctacttgtattgtcattgttacataagattgcaatgcatttgatgttccttgatgttctgatgttgtcttgttatcggccatactataattggggaaaaaaagaaatataaagctattttagtatccacaaacacatttttatgttttttgtgaaacatggtattcatatgctgttgtaacatgtatgccaatattatgttggtttgtcctttggagaaaagatgaatgtagtcttgatatttggacctattttgtctcaaatcatgcctgaagatgtaaatataaccatattaataggtgaatagtgttgaaatgttgtatgtttttgagcttgaagtcaaaacatattaaaacaaccagaatgcttcttagaatctacacatgcagcacaaccaatgttttgagctatcacttttactgagactgctgcaatctatcaactctgccttttcttgattatatcttttcccccatgaaatataaccaacatcatgtatgaaaaggtgcaaataattttatgtgtacaacacaaacatggatttgggcacaatatatttttggtactgtttagactttaagttgtcatggggaaatgtaatcggtgtcatagttatcctgcaaagtagtcatgaaattttggtggatttcgaattgttcaacagctgcacctttatcaaagccatgtctttatgcattggttcttaaattaagtgtcgaactgttgcttcctgcaacagattggtatgcaattccatttctggtttatatctggaactgctattctgcggccaaaacagcctttgttttggcttattttttgtctgaatacaatgctcagatttccttcgaagtgttcctggatatgtatgacaggaactttcatatgtgtagaatgctttgtgttaaattaagtaagacactggacatgatgaatcatttggcccatggcatctcagatctgtgtgactcaggtctcaaatataacgcttctaaggttgaaatgctttgttcctgaagtttatgaatttgtgattatgcatatattatcttgcccttctttttctagtttaaaacttcatgtttacagtccatttgcagctgcaatagatttgctggaaaactaatagagcaacttgttttcccagattaagccaagtttgatcagattgttcacgtgtta

SEQ ID NO: 1623 - DNA, 1780 bp, Oryza sativa
  Intron number 6 from transcript LOC_Os02g15790.1 (locus LO C_Os02g15790) derived from phytozome v7.0 (chr-ID Chr2; po s 8918868 to 8920647 reverse strand)
attacgttcagacacattcagaggtaccactattgttggattcagtgccatcagatttcttcctcttacagtaaattttatattggcattagtattttcactagttacttccaaaattccattgttccctaatatgagcaagaagaatactagtgatttgttgatttccatggccacttttcattatttgtactactatagtgtgcatggggtagcatatccagcgtgtaagtgaacggtcagtcctcatttctgtcttcaactcttcaatatcatgtaaaaaccattcacaagattaagcttccccagaagtggtgaacgatcggtcctgttctgtcaatcttctcaatatcatgttaaaactatcacaagagtaagcttcctcaaaattggtggcatcttgagctttcgtatgaagcttatgatgtaggaggctccactgctttgagaagctgaaaccctctgcaccttattggggtaatttccagtagtagtggctaactggctatatccttgaaatagattagcttagattagtaatcctcttgttgatttgagataggactgaattagtgatgagattagatatttagatacattattttgggcacaccatttgacaagtaatccctgtgaaattttctccaaccaaccctgtggtaccctatcccgtacaattggccctgtttgattcagcctgttaattcatactagcttctttgaaaaccaggttttggaggaagctcagccttcctaaacaacagttttaaggtattcctttcagatggtgatatgcattccaatatctgagttctgtagttgaatcatgaacgccaagacccacatagtaaaataagattgttgtgcctttgtatgaactttttgtgcttgttttttctttttgactaaactttttgtgcttgtgagttagagtatggaagtattattacattaaaactgattaacattattgacagaaacgttcataaactatatgtataaaaaatgtcacttttatatattaatagaataaccaaatattataaacgcaacaagcctctataattttagtggtaagcacagcaaagccttgtatacagagcaactctgtgtacacagttttatatattttgtttactcattagcagatgttgatcgtgcaataaataacatatcgaattgaagttcaggttggcgagaaaccactatcatgttaccgtgttatatttttggtgtgagatttgtgatccagtttcgtaagtttgggggggggggggggtgaagaaaaccagtttagggtgaaaaatggactgcaagcaaagttcaagtgctacaaaatggacttataccttttttataaatttaattatagttacaaagttgatatttgaatgactaaaagactgcctgtgcctaccttctggaccatctacttgtattctttggtttctaatcctgtacgtaaagcaagacaaataggctgtgtttagttaccaaaattggaagtttggttgaaattagaatgatgtgacggaaaagttggaagtttgaaggattattttggaactaaacatggccatagttaaggcaattttgaatatgtttgtttacaaactttatgaaaacatgtatgcttgaattcaatgtgattgcaacttcctttcatttcaactagtataattaaattttctctaaatcatttcttctttcttttcctttttatctatctgatacaacggtttaaatgtgatccaggtgtcccacgtggaggtccttgcgc

SEQ ID NO: 1624 - DNA, 508 bp, Oryza sativa
  Intron number 2 from transcript LOC_Os10g27300.1 (locus LO C_Os10g27300) derived from phytozome v7.0 (chr-ID Chr10; p os 14332493 to 14333000)
cgaggggcaagcagcagcagctagcagagcaagcggtgagtcctagcccggtgccggtgttcatactcttcgtctctgtttcagtaatgcatctagatgatgtgatttataagaattgagcttcgcgattcatagttttgatttattcgtagattttcgatggagaagaaaacaatgttgttaaattattatgcaagcaattcaagtagtaccaatcaaactgatgagaacagaatggaatttttgctgattgtgcacaaaataagaataacaataggtaagttttgtcacgaaatgagagatgaaataaggatggtatatttgttggtaaggttataagatcatttcaaaagaattggttagataaatttaattggttagaatatagtgtcaaaaaagactctgcatgttgtttctattgttttctttttaagatataaatacaaacccataaattaacttggttcttttaggtcgaacctaccctctatttctatcctgtatttgc

SEQ ID NO: 1625 - DNA, 11893 bp, Oryza sativa
  Intron number 1 from transcript LOC_Os12g22284.1 (locus LO C_Os12g22284) derived from phytozome v7.0 (chr-ID Chr12; p os 12571946 to 12583838 reverse strand)
gtgcgggaagacgacgcttcttgacactctcgcaggttcgttttcgggctcatcactgttacacgtgcatactgtgataccgttaaataaagtagtattagtagttgtgtatttgaggctttcttcttcttttttttattttgaaattgaagtggagaattatcgggggaagcacgagtagcgtgatgatggagtcccattatgatttcaatcttgtagccaacgaatattatacatatgtaggtgggcttttaacatgatttaatttattgtgatcaagatatatcactagttttcatctctgagagtgtgttagcggacatattcataggggtatgattgtgatattacgtctgtagtggtgcgtgcatatgcgtctgttggataatctcaagaaaataatatagagaaatataacaaacttttaacattaaccaacctatcaaaattttatttgtgaaactaaattgttttcttgggacaatgaatagggtattgatttccttgggttttttttttttgcaccagtaatttcctccattgattttttgagactttcatgcgaatcaatgggcatggcatctattcctacgtattgttgcgtttctctgttttcaaaaatcttgtgttcaagggaagccttaatttgtccccaaatagaatcaaccttcaaaatattgtgtgattaacgaagacaattctctcccaacaaaacattttgtttcaaagtccaagtacatataaaaatttaagatgcgcaatttatatttatatttatgtctatctttacggaatgatatatattttgctatctccccatccttttcatgtttgtaaaaataaaacctctgggtatcgttttaaattataccatgaggataatcctcaggcacgttaattagaaaatatcaaataggtgatgcactagctatgttggttcatgtacatagaacggacgcattttccgtctttcctgagctataggggagccaaagttaagaacaggcaaatatgatacatacccactcacacgtgcatatttttcaaagtcgaatggaaacaattttagataagaatggtagaaccgacccaaatctacaactctatacttgataatcttttcatctaaggtcatttacatgttcgaatattcatttcaagatctatttgaattattggattttaaatattttcaaataccttcatgcagagacaaactcttctatgaaattctcaacgagatctacagaaataattttaatttttttctattgcctaaaaatttaaaaatatagcagtaccgttttatgtgtataacaataagggttaattggattcataccattgcaaatttgctcaattaaaaaagtagcactatatatatttatgatatacattacgtggcactaaaatattataaaattagaagcaagccattaccctcaagaattgtgtcctgttcttacccaaacctattcttttgtgttcatcctctctcttgttcatcttctatctcgatcggtagagccggcgatgcgtgcctgcgaggtggcggtggtggatggatgggatctgccaaaaatgacgatggatcgagacatcgccactaccacgacgagcttgtcattgccgcgaatttgctcgcacgcgactgctgctcgctgttgtcatgactgctgcatcatggactcttgtcctttgccgggattgaggaggcggccatctcccagtcccactccctttgcgtatggatctggccaaggggaaactggtggcttgctgcacctctggatctggtgggagggggtcagaagcattgggagagaggaggaaattaaagctctgaccacagtcgtctaatcgctgctgccgagtgtgctgccgctgctgcggggaggaggggtcgccatcgctgaggggtcaccgtcgctgccgcggggagaagagtcgccaattcgccattgccgctagcaggaaggggtcgtcggcgtctcaagagcggaggaaaagcctcggcctaatcgagctaagaggatgaacaagcgagctgggtcgatgaaagtcatatatgcagaattccattcaccaaaatttaaaacaagtatagtgtctgtctacttgttttgaattggtgttataatcactatgcccaaatgagacaaattcaaccgcgggtgtggttggggttcaattatttaggtgccgaactggtcgagggagaggtttgcgtgcacactactaagaccataattgtgaactggagtacaactaattgagtgcacacgcatccactgtacttagctgtagggtatagttcaacagtataggaaattagatctccctagttgtaatacatcgtatttggtcccgttcgagtgagctgattgatggctgatgggctggaatacatgcatgtaacagtaaacataaagataaaatgcaaagactctattcggtttgcaaactggttacgccgttgtatatatacatgtaattaaatcactaaatctttataataagatattagataattatattttgataaaataaatatctattttaacttctaaaatctgatgtgttatgtatgagaataaaaaatttcaactagtattttgttgtgttttactcccttctttccaaattgatcatcatatatgtttatgcatcaataccaaggataatttaaatcacatcaatcaagacaccatacacacattctctcagaatgcatgcatcgattaaaacaccatacaaattacatcttagcatgcacatattcttgcacaatgcattaattgtattctgataaaatccgtatccatacggttatatgatgatcaatttaagaaattttgaataccattatatgctaatcaatttaggaaggagggaatacatttcacctaaatgttctaatgactaatttttttacaacatataacttggatttgctcatggtaaaatgtaataaaatatttggaccgcctaatttttagcatggtcggatgcccgattcttagtttagccacaaaatttatttgctaagggggtgataatgctaattttggttaaaatattaagctagatgggaggggtgctaaggccatccccaaccctccatctcatctagtgtccatagcattgaatacattgtaacataagcaaaaatatgatgtggcaagagagttaatgagcaaagaggtaaaaagatgaagaaaccatttctcatgcaagaaaccatctctacacaataatcaagaataaaaataatgggataggtggataaaaggagagagaagaaagatgattggatggtaatttaatttgaaaacaccatccattggatgtatagtttctacacatagtgtctatatgacatgacaagtatgaaaactactcgatagattctgggttaggggtgacctaatcaatttaggaaggagggaaaacatttcacccaaatgttttaatgactaatttttttacaacatataacttgaatttgctgatggtaaaatgtaataaaatatttggactgcctgatttttagcaaggtcggatgcccaattcttactttagccacaaaatttatttgctaagggggtgataatgctaattttggttaaaatattaagctagatgggagggaggctaagccctctcctcccctcgtcttaggaactgctttaatgttgtaaataaaaatatttctgaagtgttctcgtacaaagttttagttatatagtagtttaattatagatggaccttttatacttgatctcctgtaaattaacatatgtcagatatacgaattcatatagttggtaacttgatgtatatagtagtaataactatcgtgttggcctaagtacatagtaataataataataaagtaatagttcacaaatgacaagtgatgatgggctgtatcagattaatttgtggagttaatattcggatagaataatccatgttcgttgcctacaatcttacctataacttttgatgcttttcactagtaacaattactatattctaaaactcaagatataaatatgtcacatcattacccactagctagtgcatcttaaatctcctgaaaaataacccgctatatacaatttattatattctaaagctcaaaatacaagtcactacttcaaaacaacggataggtgccggtggagaaatctgtcacctaaagccggttcccaaccaacacctatcctcttctttgttgtagtagtgacttattccctaccagcacccaacaagcggcatctttgaggagagctaaaaggtgccgattcaggaacctgcacctctttacccaaccaaattccatagaacatttaattcatagaatgaacatttaatccaagaagaccaaacactaagaacacaaagaatgggccgatgtcgaggagcggagggtgccacgcctgtcgccacctccctcccaccggatctggtagagggggcactgtatgtagcggaggggagtgcgtagccaccgtcgcttgggtagctcgctgcctcccctcccgtcgaatccggtggaggagatagcgtcgccactaggtggggatggtcgcctccgcagctggatgggcggagtcgcacgtgagaagagagagaagtatgcaagaggaagattgagagagaaaggcgtgtaagaaagggacaccggggagagggaccatgtcctgctcttcttatcagctcgagcgaataaggacgagtggtcggctcggctcgatttttcgtacgctggtttctaaaaaaactggtatctataatatattattgatgtcggctttttaattcactagcacctataataaaataaagatgtcagtttttttttaaaaaaaaagagatcatgttggttttttatagaactgacacatataaccgtttaaaggtaccaattttttattagcccatggaggtgggaaaaatactataagtgccagttttagctattccactatctatagtgtcaatctatttatgtgcctttcgatagtagcgagtatgtcgaaacatcaccccaaacatcactttcttaatattgcaacatatatccatatctagcatttctataatatataatattcatgtaaagtgcccgatatcacatagttttgtacaataattattactacatactagtgcacgctatctatgaaatgtgggtccagtattattatagtaaaggttaatgtttgcagcgtcattattgcaaatctcccctttcaaagagatctagtactaatatttttgatccgtacatgccgtctaacaaacattaattggccaagttggggtaagattattcatgcaaactaatgctattggtattgagtaatacatacagttcattcttaactaatcgatctcataatttgttgatctaattaacccatatcaagtttgagttgatggtaacatcaacaggataagcagcgcgcctaatcgggtaacaaaaaaatcattgcgtaattgttttataaccacagcctgctggtttgaccgcaaggtaaatcaaaaacttaaactaatactaactctctataaccttggactcgcggaaaaataatgaataataatggtcgcaatccaaggcgctggagctggacacatgcatacgcctactgctgctttgcccttctgacgctaactagaaaattaattaagtcattgattattagttaactaattaattaaaagcaatcaatcgaagattcttctggctgcctatcattaagacgtacagagaaagtatgtattgtgttacagtggcttgttgctacaatatattgtctccgttctattaaaaaataaataaaagatatgacgcattttaatagaatctaggcagcagagttgcattcagatttatattactaagatatgttacatcatgtattaaattattactaagatatattacatcatgtattaaatttgttttctatgagatgaaaagagtatttgtcaataacgtaatcatatcatcagtaatatacaaatgaagtaaatgctaaaaaaaagacataaactagaggtgtactgtgaactagtgggtgcatagtgatcagtccaaatcaagattaaatcctgatggccacaattacaattttttttatctagagaagaatattttttacccggtttttacatccaataggatatatacatctatttttaaattagaaacttagcctatcaaatagagaatttagccctcaaataacccaatctaaaattcgcaattacatacgtgtggatatgttttcaaaacaattttactgaggtttgaggatttaattttagtgaggtttaaggttttgaagacttcttttagtattcaaggataattgggccatcattaatttatcgaagaaattaaatataacagtataaggccatttccaacccaaaacattagacatagtttctataaactccacatcaataagaaactagtttaatgctacttatctcacatgatattttggatgttgtgtataaaccatgtctcatgcaagacatggttttcttctttttcacatttatttacttgccacctcattttctattctagatgatagcttatttaatactatggtagatattattctagtcattgtgttgggaatggcctaatgttgacctaggtgggcagtcaaggaattagtttgtcgttacactcacgccgctaacgctgtgcctatgtaggccctgttcagggtgtctttagttcatgctaaaattagaagtttggttgaaattggaacgatgtgatgaaaaagttggaagtttgtgtgtgtaggaaagtttcgatgtgatggaaaagttggaagtttgaagaaaaagtttggaactaaactcggccttagattccaactttttttttaaaattctaacttttccgtcacatcaaactttccacgcacgcaaacttccaacttattcatcgtatcatttcaatttcttcaaactttcaattcaattctaatgtggaactaaacacagacaacttctcgtttccaacgcgcttcaggtataagtacgaaacagtgccttgatgcaatcgcttcaggtggaggacaccgcactgattcgtggtccaaagcccagaaacgtacacccgaacagaaacgatactctcaccggtcaaaagggaaagaatacctaatatcgtttctttgttttaaaagaaaacaatcatcaatttctcttaaaatattatatattacatataggagcttcagttcctaagatgtcataagatacttccttgatttcatcatatcaaatcaattacagaagcaatagacaaattacaaaatatttttcaggacattcttgttcgtttggtgaggttgggaactcacctccagtatacacaaaacagagtatctcattagcgcattattaattaagtatttgctagttttttaaaaataataaattaatatgatttttaaaacaactttaaaactcacatttatcagtttgaaaaacgtgcacgcaaaaaacgagggtggtgaattgagaactctgtcaaaagaaaatagaggtttgcctgtttaaattagcggacataaagataatggataatccaaccgatgaggctcttaaggatgagattaaccgatccttagtccattcttttgttgtttcgttcacttcgaccactcgaaatgttcttacagtatactttactgatcgtacaaagacaatggatcaaattttatgatgaatataaatatgtagataacaaaccccttcaaaaaaaaacatttcaaaacttcatttatctattatatactaaaagtccattaaactttctagaaacgctcttaagtcgtcacgtgacattcctataaatactcataagccgtcacatggcactgtttaatctcaccgtcaattttcacttaaattggtggacccattattttacaccattagattagatctactattaaaaaattaataaattcctcctacttatatgatacacagagtataactgttctctggtacatacgtaccaacgattgaaagcaattacctgctgttcacaaaaagaatcatacaaaaacttagataaaaaaagacagtcaaaaatacatgcatccataaaaatagatggtcaacagaagtacgtaggtgagagagagaggacaggaagagactaaattctttattcaatctaatctaatgatttaaatactaaacgcatcgatttaaatgaaaatccagggctatgttttttttaaaactatctacttatgtatatatctattatatactaaaagtccattaaattttctacaaacacttctgaatcgtcatatgtcactcctacaaacgcttctaggatgtcactcggcgctttaataaatcaaagaaaataataaatattctaaaaatacaaaatctaaccatcgattttcctcgattttcctttcaataaggtggacccatcatgcattctctactgttagattcatcttaataaaaaaaataagacagggaaaagacccatatttttgtaaggtggactcggacggtctattatgctataccgcgcgtccggttatgagtcggtttggctgcggcggcaagtttatcgctaattaacttatctctgtatatacgtagcacaagctgattagctcccatattgtgttaccactaactcatagctatatttattatatatacggcaatatatataaatggaagctaggagattaacactaagattatacatatatatagctaattaaattagttatacatgatttgtgaaaggagattaacggcaatataacatagctaattaaatcagtttgcatgatttgcggcaacattacatagctaatttgaaccaatgcatttggcagtctcttgataaattgtccagcttacatcggtgtatctaagatctgatctgttttaagtcatcgtgatgtctttaaaattaaaaaagattttttaaaaaacaaaatacatgataatcggttttaacttaaatcgtttagaaaaattagaaaaacaaagtcccctccacctcaccctcaccatcacatacgcacaacgctttccgttccctccacttttaggcttgggttctccgctctcctcttctctctgtatcttttggagtaacaatgataaaagagaaacaaccaataatatcgaaacatccatagttatattaagctacatgtctcatatctattctaattattgatctatacataattaaaccaataaattaagattcataataactggtataaaatagaaaaaaaattgtcaataggggataaattgaaccaattatagaacatctaacaaatttgtaaagaaatggtttttaattttcacttaaactgaaacagccgttgccatatcaattaaattggccttccctctatctacgatgccatggcattatgatggcattatgagttacttcatgtattattatatatgtaattcacactaaaatagcaatatctaattggttaaaagtaatatttgttagtattagatttaaaatttaagactcatattgactaggtatatttaaaaagctctataggtcacacgtatcatagggaagcaagttctagattatgtatatctccttcgcatttattgatcatataaagtatgtgtaacaaattacgtcaatatgaacaaattagagaaagggctagcttgatagtacaaataaacatatttattagcaataattgttttttaagatttgtaaaacaaggctctaaacattcaattaaaaaagaaaaacaccttactttttatccaaacttaatttattagaaatgtatggtaaacaaacaaactaattaagtctaccttatttttaaataactaggaaggctgtaaatatttagttgtatagatgaattaagtactattatatatagtataaagctaacaaatagcttagaaaatttatttgagcaataccaaaacgataaagaaatttgtgaggaaaacgaacttatgaagcatggtatatgccatccgtttgatattccacccatataaattcatcaaaacataatcatgatacatgcccgcgcatacgcgcgggctatcttcctgtttataaaaaaattgtgtaattactactcccttcgtttcatattacaattcctttgacttttttcttattcaaactttgttatgtttgaccaaatttgttaaaaaaataaagcaacattttcaatacaaaacaaacatattatcataatatattaaatattagtttaatggaactaatttggtattatattttttttaaattttttttatgaacttaatcaaacttagatatgtttgactagcaaaatatcataacaacttattatataaaatggatgcatagtatttttttcactttcacctgagtgcacaccatgtacgttagtactccctccttcaaatagtctaggtcctttttttttgcaccaagaccaaggtatagttaactcattcatcttatgacaaaactaataaacatgcaaccaataagtattaaaatgatttcttcggttccgatcaaaagtttaatatagcatataataactacaaataggacttagacttttagaaaaaattaaagaataaaataggacttagacttttggaaggagtgagtactagagggaagtgggcagctacaaattttagggtaaaacctattttttgccctcaactttgctcaaagtccattcgtcatcctgaattacagaaacggttatttctcactttcaactttttaaaaccatatacttgggtctaaaacatatggatttctgatcgatgtactagagctagtggtttttttttctcacataaacttaatttagggaagtttcgtaattgtgggcctacttaggtgacatctacatggacaatgagtgcaatgtcaatatgaactaggaaaggcaattccattgcaagcaaaatcaataaaaatattatcatagtatttttcttgtctagtttaaaaaatggagggtgggggtaaaaaaaaccggttttatagtttaaggtaaaaatagactttgagcaaatttcaaagattaagagcttgtttggaatggaagacaaaacgtaagaacacaaagtacacgaatgcagccgtataacagaaaatgtaaaaaattaacacaatcgatagataattggggtttgagatgaaggaatttcgtctcatctcattcttcaacatagcaaaagtaaatattgacttttactggacatttattttccgacattattggtgcaaaagtaaatggtgcaagaaattcttcctcggttttgcctcctcctgttactgtacattgttccaaacagagagacagtgacttttcatatgattttaattcgcttcgactaaccctcgcttaaaaataaattttaccctaaaatttactattgatcttcgacgatcctttctgtagtatcttgtcgataaatatccaagaataaaccctctattggactgctggatatttgcgcctggtgattagtttagatgaaataatatcataaaaaacatttatctaaaaaaaatatcataaagaacattttttatgatattatttcatgttagacataatgttgccaagtgtagcttttattcagcattttttttccattttttcatgctgaaacaagatggcagcagacaatataaatcatatatattgttcatggatgcaagattataatgcttagtaaatttatactattcgtctccatactcttctccatctctcgttttaaccattgatgaatttatggcactgcaggacggttaggacaagaa

SEQ ID NO: 1626 - DNA, 2254 bp, Oryza sativa
  Intron number 1 from transcript LOC_Os10g01680.1 (locus LO C_Os10g01680) derived from phytozome v7.0 (chr-ID Chr10; p os 448070 to 450323)
gggtggtccttgggaagcccctcgtcttcctgcaggtatcttcttcgattttttaatacacacatgacacatgcatgtttaattattaatatttttcttcctttaaaataatgcataactattattaatttcattgtgatttattttataattaaacatatacttttagtattacttttttttacatatttttaataagaatgatagctgtatgtttaaaaatcaacatagctaaaaaaaataatactatgtagtactatgactttggttgtttcaaaattaaactaaccaaaataaaaaaaaagtttggagggagtagcaccctttgagttgcaaattgatttttcacaacaaacatattatcacggacggtgaaatcttaactacttaaaaaaaattcggtaactttcagatcccacaattttttcgtccatataagtccgactgagtggcatcctccgtctccaactctccacatgaccaccgaacacaaccacaccgttaacgcccaaatcccaaacataatatatatgcgaaactcttagtgggcaattgatcgccggcgatcgattcccctcccctcccccccggtcctctacgtggttttcttttttggcaccgcattattttcctattttagtaaatttatgcacctaaattttctacacctcaagtttatacatgtaaagtttatatatccgattcaaatttgaatttgaattcaaatattttttatatatagtatttctatatatctaaagtttatacacctaaagtttatagacccaaagtttatatacccgattcaaatttgaatttgaattcaaatatttttaatataatattctatacatctaaagtttatagacccaaagtttataagtcaaaagtttacatacccgattcaaatttgaatttgaattatattcgattcaaatttgaatttgaattcaaatatttttatatatagtatttctatacatctaaagtttatagacccaaagtttataagtcaaaagtttacatacccgattcaaatttgaatttgaattatattcgattcaaatttgaatttgaattcaaatatttttatatatagtatttctatacttctaaagtttatacacctaaagtttatagaccaaaagtttataagtcaaaagtttacatacccaattcaaatttgaatttgaattcaaatattagtttatagacccaaagtttataagtcaaaagtttacatactcgtttcaaatttgaatttgaattcaaatattttttatatatagtatttctatacataaatttttccaactttgttgtttattatttttttagaaaatctattatattgttaaaggattagaaaaaggagcctccacgttcgctctcatggtctagaaattctcacattaatcggagaaaaagaaaaggcagagtccatatagaaatataatttagaaatagctgaaattcggaattaaaaaataaggaatattagaagaggagactagagtccatatagaaatataatttagaaatagttgaaattcggaattaaaaaataaggaatattagaagtatattatagagtccatatccatatagaaatacaattagaaaataatataaattcggaattaaaaataaggaatattataagtagagtatagagtccatataaaaatacaattaagaaaaaaatcggaattaaaaaataaggaatattagaagtagagtttagaatccgtttaaaaattcaatttactaaaattcgagattaagaaaaacatgggaagaagagtttaaagtcaatataggaataaaatttacaagtaactgaaattcgaaattaaaaattaaaaaatattgaaaggtgagtttagagaccacatagaaatacaatttgaaataataaaaattcagaaataaaaataaataatattagaagaagagcctagagtctatatagaaataaatttacagaaaattcggaattaaaaaataaatattaaaagatgagtctagagtccatataggaatatatataatttacaaataactaaaatttgatattaaaaataattataaaatacaatatgaatattatacattagtagtttcgtaaagttattgcaaaatttaaaattatgttgtcattttaatatatttgaataatatattgagaaaacatatatgatattatatgagagaaaatataatgatgctagttgcgcaatctgtacaggccacc

SEQ ID NO: 1627 - DNA, 687 bp, Oryza sativa
  Intron number 2 from transcript LOC_Os12g43300.1 (locus LO C_Os12g43300) derived from phytozome v7.0 (chr-ID Chr12; p os 26839958 to 26840644)
tgcgcctgtaagctactccctcatcttttttacagtacttacaaaaataatggaaggtgccatattctgtagcgtaaaatctggtatctcttgatacctccggtagtatgagtatcaaatttgcactaaaaattttgatacctcttaaagatggtaaaatttctcaattgtctaatatagatatttgggggaaagtgttttcgtttgatcaagagacgttccctctttttacacccatctaaaaagttatagaaaaaaaatagaatgatatatcgctccacagagttcgaattcgtttttttataagttgtataataaaaataacaaatataaccctaaatatctgcatagtagtttagtataattttgtttaacttatagaaatcgaatttgatttgtatatttgtaaattgatcgatgtatctcaaaattgatctatcttatcaatttttaaattatttttagtcatttaagtggcatgtaaaaacgagaggatcctctcaaggatgaaattccatctccaatattagtaattgttttttttggaactaacatgcatattaattttgtttgattaactaacatgcctgcatggatgcgtcatgcttgctctatatatacttaatgaaaattctgaacaatgtttgtttgtgcaggaacagagcaagaaagttgttggcgatagcc

SEQ ID NO: 1628 - DNA, 782 bp, Oryza sativa
  Intron number 1 from transcript LOC_Os10g02220.1 (locus LO C_Os10g02220) derived from phytozome v7.0 (chr-ID Chr10; p os 774464 to 775245 reverse strand)
cttctgccctgccctccattgccccctctcctcaggtttctctctttctctctctaccgttgggctcagagtttatttagttcttctgcacttttttggtaggattctatctgtttcagagcattttttaggtatttatatatatctctatgcaagttgcaagcaaatctttcttcttttgtggtattagttctacacctgaacttttttatggatgcaaaaaaagatatcagcatcgaaggaagcagtcttgttctttatgagtagggagctcatttcccccaggttaaattgtgggatggatcaaataattcagggctaatttttgttctgaacttgatttcgtagttttttgtgtattcgcattcaagattgaataggataagaaataggggtatctttgattctaaatatcgtagtcaaagattctagctgctggcaaatatatatggatggaagaaaaactataatatatgatttcttccttccctgcaaagtagttaatttgaccccccaaaaaagttgaacttatctttgttatcattaaatttttaagttccaagctgacagaatatggtgtttgcttgcaagaaattagtcgttcacaatatatgcagtcaatagtgttacatatcttctaatatcgaaattgcgtgatggcgttattctaagacgaaaatcggatatgagaaatctatcagaaaagaagtgtgagtcatgatacaatttgctccatataatcttcttgactttcttacattttcctatattatcttgcccag

SEQ ID NO: 1629 - DNA, 1344 bp, Oryza sativa
  Intron number 1 from transcript LOC_Os05g40680.1 (locus LO C_Os05g40680) derived from phytozome v7.0 (chr-ID Chr5; po s 23793054 to 23794397 reverse strand)
caaaatcaagagaaacaagaaggctccagttcaaggttagttcaaggctccaattcttatcccctatatacaattcctgaaaaagatcaaagagagagtttaggtcaaatatacaattcaaaagaatacatgaaattgctgaatatgtcaaatgaaacaaggttaacaatccactttgctggataaatacaacaactcagaactgaaaatttcatatgtttgctctgtagatctgaactatgtaatgttagaagtaaaactacactgcattcagtactacgaaactgcattctggatgattgtattactgtgtactattgatgaataccaaactaactttataaaaaaacatgacagattgattaatcttccaaccttactgaatttcactctgaagatatcacagttatacagttatacagaaatataacaactaggccatatagcatatcctgaattgtcatacattcaattttatcagcataatcaccatattaaactaatgacaaattcaaatctcaatgtcaaccacttgtctcatccaactcaatattacataaaagttcaatatctcatacagcacaaacaaaagagccaattcatatgaactcacaaatttcttaacatgttacagtaaaaaagtaataaaattacatacaagaatcacaataattctagtattaactcattgtaaaaagattagttcagtaaacaaaatagtttagctcacacaatcatgcacaaattcaggaacacattcaagatatgttttaaactcaagactatctcagttcaatgtttctctcatcatcagacaacaaaatgaagatttcagataatagatcattgttgatttgttcaatgtctcaaaatagaatataatgaaactagttacagtgaacttgtattacaaatatatagagtgaacactacaatttcaattgaaaatacatgtaactacaaagaaacaatgtaaaattcatatgaaatcatgatctaatgcagtttcaatctcaatttcaagatgatttcagatttttcgagcaaaaaacagggtatcaaatacttcaaaagtagtacatatgtaaaaaccaaaacaaatcatatctaattgaaatagaaagaaatagaaaagaaaaagtgccatcagatattataagaaaaagtgccatcagatagtttgttccataagtaaattttaactggaattacagtagcattatactcaaattgaaatacttatttactgtaatactacttatggaacatactcatacaggtttgaaaaacatttaaagactatcttgaatatttctttacaggtgtcatacaaaaggacaaaga

SEQ ID NO: 1630 - DNA, 1120 bp, Oryza sativa
  Intron number 1 from transcript LOC_Os10g15310.1 (locus LO C_Os10g15310) derived from phytozome v7.0 (chr-ID Chr10; p os 8049191 to 8050310)
tgaattcagtgcatccttccctccttcgatcttgattttggttcatgttcatttttttcttgattttggttgtggcagcgatggcggcaagcagcgaggtcgcgatttgcgaggggcgctgcggcatgcagggagcggcaaggagctgggcttatgggggcagccgggcaggggcaaacgcgccgggcgcctaggtggtcagatgggagcagagcaacgcagcgcttctccctgtatcaattcttttggttccaacagtgagtcagtaagtatggcattttttttttcaatctttccgattctagacgtgtagtttgtattgtcaattgaggggatttataatttctgaaatttattggtagatcttcaaattgcaacggagaagaaaacaccattacttaattacttcatggctccatttttgttcagacttactgtaagaaattcccctggagtttgggaacatgcctaaacttagctacctgtaagtgatatttgtctcatgtagatgatgtttttctaactccagttgatgtggagcactataggaggttaaggtttggatttttttccatgcatggcaacttaatgacaatgattagtggggttaaagatttgtggatgataaatactgaagaattttgatgaccctgtggtctgtgtccatcagtatgattttcgtaattttaagtgacgttgttgtgcacagtactcacagccaacatgctcagttctccttgtgattaggaattgcaagcaagagaatacctccactatagtctataattgcactagctagtcaattcccttgaaatgttaaataatatggttgctaaaatgaatttaacatccatggacaacttactgaaatgaaaaatggcagtatcgttttaccagcaaccattgcaagtataaacacaccatatatactatgtcatgtataatggattgatgggtctgtgaacacaacaacaggaataatcacaattagaagtaattttactctgaaattggtcaccgctcgctacatatggttctatctaatagaactgatcgattgattttctctgaatcgctcactacatatggtcctatcgaacaggaataatcacaactgggc

SEQ ID NO: 1631 - DNA, 402 bp, Oryza sativa
  Intron number 2 from transcript LOC_Os07g39270.1 (locus LO C_Os07g39270) derived from phytozome v7.0 (chr-ID Chr7; po s 23506348 to 23506749 reverse strand)
cctggccaattatattgcctatcggcagaactgaggtgatgggtactccattgattattgttgatttgtaactttgtaagctcattaagattcagatttgaggaatatctgaattatcttgtgatacgtgctagttgtagtttcttatcttgagaagaatatctggttgacaaatgtcaatttcctagttagtcagtcaaaacggaataatgaaaatcagcctctctgccctataccccaattgcttgattcttgacaattgaacacatcatatcataaaggaagaaaatattttatcttcattgttttgattgattatcatagttcatgttcatacctgttttagtgtttatcctacgcaattgatttcgttttatgtgattgtatcaggttcgttttaca

SEQ ID NO: 1632 - DNA, 557 bp, Oryza sativa
  Intron number 2 from transcript LOC_Os04g45580.1 (locus LO C_Os04g45580) derived from phytozome v7.0 (chr-ID Chr4; po s 26781349 to 26781905 reverse strand)
tgacaggccatcggctccgactgcatactccttcggttagttcatcacaagttcacaactctgggttttctacatctgtaattcattagttctgcatctcctgttaggattttgcttatctggtcagctcttatgtattgcattccagttgcttcaaatcaggacaaaccttgtatatttctttaaaatttaaaatctcagaatttaacatacctgccggagtccaatcactggtaatttgttacttatacatcgtcgtttgttacaagtaacagaacacatcgacacattcctgtcccagtaaaaaaaatctgacagaacacctttagaaattaagctaaccctcctgaaattgaatgtttacatttacaaatgtattggacatttttttttggtagtggacaactacacaccactagaatacagataagtgggagtttagtttgctcgtactacaagtatgctctttaatattctcactttccagctgtgttttttgacacaactctattccaattgcagatagggtattccgctctgactgcgatacgaacgaa

SEQ ID NO: 1633 - DNA, 2847 bp, Oryza sativa
  Intron number 4 from transcript LOC_Os10g25560.1 (locus LO C_Os10g25560) derived from phytozome v7.0 (chr-ID Chr10; p os 13163380 to 13166226 reverse strand)
aggtagactctgtttttctctctgttacgtcccgaggtcatgatgggacaaccgccgctgggaggataggtagtcggtgtcgactcctggaaaagggatgtagacttaggtaggggagaagaacattggagggagagattggactaattgatatttattgcttaattctaaatgaatacaatcccatcccttatatattgaagcatgttgtcacggcctgaggccatgatgggataaccaccgccgggagatagccaggcagcgtcggctcctgtagaagggatgtagacttaggttggagagaggaacattggagaaagagattagactaattgatattcattgcttaattctaaatgaactaggaaggtagcccacgcattcgcgtgggcatgcatcatagactgtgtttgagaaacttataaaggtgaaatattaaccgaaacatataagtaaacggatgtgtagcttatgaaaaattatagctgtttcaacattgattgtttctcatctattttagtagctaaaaaataaggatggattctaaataatttaagcgaaaatgtattataagatgttttgttttatcttagaatttcgtttgatgtttttatattttttaagacataagatgttttgttttatctcagaatttattttgttgtttttatattttttaaaacatgacatgtctcgacttaaggttttattaaaatagatctagttgatgaaaataatgaatccatcaagttaagttgaattgttttctaatttttaagacatgatacatggttacctaaaagtgctatatggatgtttaatcaatttttgttatgtagattgatttaatatgatatagtgcatatagtcaagttttttgaaatatcgcattcttatattgaggtttttcaatttcttatttttcatgttgttttatacttatactttttaatttaaataaagtcatgagtatgcaattcttattttatttcatgagattgtacaactaatttagttatttgtgtttattaactgctatgaggtgatatgtcatataatcaatattgccagtttgcgtccttctttacaacttgatagcataggtgtttatccaatcttggatagtcaatttcttaaacaatgaccttgccaataaatcttggctcagcgattggtgactaatagtttataagtataattaatacgtagatttgaatgtgaaatacaattgatccataaggtaagccctatatgggtctatatgggtcaagtacgctacatccatatgtccatattcatagtcctaggtggtgtcaaatctctatctagattgcctatttttggacgatgggagtatttagttacttgtaaaagattggtgtatatgttcaaatgaaaacttttattttaatacataaaatatgggtaatataaatcttgaattatatatttaattataaataaaagaaattcaagtaaactaaaagtaggtcggatataacttaaaaaatttaattatttagttttctaattattaattattttgataaatgagttaacatttagaataccaaagaattgaataagagacagagaggaagagagagccgaaggggagagtacgtatgcatataattataataatttttttatcagttatagtgttttagctgctattactttattaactaaaaataaaataaaatttttaatgatctattaaaatctatcttttttaactcatctatacctacaatatattcatagttgatattaaaaatatgaacactacaaatcatttttttgtaagtagcacactacaaatctaaaaatctaataatgttattttgactttttgttgtgttagaatgggggtctaatttttttaatattactcaatgtcatgttcattttacttttattatatctattttttttatcaagttttgtacggtgataaaatatatatcactattttttataattctataattttttaagtgacacgaaaaagtcggatgatgtagccttaattaatgtgacatatttcttctcaaagttgaattaaagtggatatgagtttttaaatgtaaaatagtcaacgagcggatcatatattagttttatgattaagatgttatatttgtttaattgtttaacaatagcatttttgttttttctaaaagcgtgaaaataggaaaagaaataggtaataaagtgggggacataattgagaggggaagtagacgtaagaaacgtacgtatatacgtacgtcatgccaacaggcccaggtgggcccagatatgagaagacgattttttttcaaagataaatctaatggctacaaataatgggtccaccaaatttaatgaaaattaacggttagctttatttttaagattttctttagtgccacgtgacagcttaggagtgtttataggatgccacatgacggtttaggaacgtttgtaggaagtttaatggacttttagtacataatagatagatatacataatagatagatagatacagtcccatcccctatatagagatggtaggactttgacccgaagtaactaacttgatacgatctatcttatctcataatcctatcttatcacataacctgatgctacagtacctgtggtactgttcactcgccaggaatcaggtccatgggccttggcctctcggcccaatgcctacgacactctctccctaaagaaaactgacagcatgtgttcttatcttcagaaaattatatacaacttctgtgtagcttcagcgatggattatttttgtaccaagtcggtaatcacgttgagtgattcctttcaggagtacc

SEQ ID NO: 1634 - DNA, 1391 bp, Oryza sativa
  Intron number 1 from transcript LOC_Os08g07400.1 (locus LO C_Os08g07400) derived from phytozome v7.0 (chr-ID Chr8; po s 4154526 to 4155916 reverse strand)
aacgccagcggcctctccttcgaggagctctacaggtttcccatccccccatcccccatcccatcgcgcttctccctgtcagtgctgtacaggggcagaaagaaagataagaggcctgatttgatttgatttgatttagttttgcggttacaacaatgcggagatggcgatatgtgatgcgagtatttggacatagttcattaaaaaaggaattagaaattttgtttgttagggttgtatattgcagatggagtttaggacagctcctagattcatgatctgttatgtgggatttgaacctcactataataattgatgctcgcttgtcggttatcgctgtagacgtaacgccccattatgattggtagggagctttgtcagccagatggaaatcgtatgcagttaactgcttaatttgtagagcattaaatacttttaacttggtttagaagtttgggagattgcgtatgtcggttcattgatgggtctcttggttcgttatgcttttgctccataaatttaagtgcaatggattcttaagtcatgttgtagtgctgttgcattttctggctccttttttggtggccatgctatcaagcaatttggatgttgcaaaccacatgtaagaggtgtttgagaaagtggaaaatactccgttttattagaaggaaaataccattgattctacaaaatttaatttgtgaagaaattcatcacttgagagtttgcgtgcctattacctctagggaaattcatctcagatcaattctcatcacttgagagtttgcgtgctctatgctatgcatttgtttgcgcataaaaaaaaactcttatccccttgaaacaagattagctgaacagtgtctcaaaatacttatgaaagtctttcttctttacatcattgttttttcagtggaaaattgttattttccttacataagaactctatttctacaatcacaaagcatggtcttttactattcatgtagtctgtaggtagtgcttctatcatactgaaactggattactgcagtacccataacttgttcaatggaactttgtagttgttgttatgtcccttgcatcattgtatactcttaaaaaagtgcaataaatagaattttaagagagaaacaaaggccaactgccctgtttgcttgcccttaagcgatgtgttattgtgatatctgatttttctttttctttttggttctggaaataccttcgatattattattggcttttcatggtatcatgtctgagctaccagcctttcatggcacagtatactattattatttgtttggaaccaataagccttcttacgtaccagaacataatattgtccttatattctggcaggactgcttataatctggtacttcacaaac

SEQ ID NO: 1635 - DNA, 478 bp, Oryza sativa
  Intron number 23 from transcript LOC_Os04g52020.1 (locus L OC_Os04g52020) derived from phytozome v7.0 (chr-ID Chr4; p os 30703447 to 30703924 reverse strand)
cattccgaattcagctgtggagtcagtattaacaggttggttatgatttcccagaatttcctgtcagatggtatttgttgtggttagtgtccaatggggagaatcaggtacggcttgtggtagttgaactatggagataaaattgtgcaacggtaaactgagctactgttatatcatggagcttcttgggcagctcatttgtttgtggatggcattttctagtaagatttcattcattgggctctgccaaaaagaaaaaaaaatcgttgtggagaaatcagaaggaccagaggtggaatgtgccagtatttttttctccttttccagcactttaaatgttgaacactctgtgtggattctggtcacttccattcctccaatgccatgtatcatctcaaatcaagaccatattcttatttatgagagtggtaaacattatgttatccttttgcaggcttacagtgggtccaagatattg

SEQ ID NO: 1636 - DNA, 901 bp, Oryza sativa
  Intron number 2 from transcript LOC_Os03g43360.2 (locus LO C_Os03g43360) derived from phytozome v7.0 (chr-ID Chr3; po s 24175792 to 24176692 reverse strand)
attgatcttggctgcactccagttgaaaagcttaggtatgcttatcatcatgtatatgcactcaaattttattgagattgcttgtccctgtagcttgtaaggtcaaaataactgtgtatttgcacttcaattttgactgtactgttaaatttcctgcatcttctatttattactcctatatgatatgactaccaagtggggcatagtatgaatagagcatgtcaacttggtactttgattgagatttccttaataaacaaaacactaggaagtaatacagtgggaaaaaagtagaaatgttacatcctgaatgccttggtgactgtttgtttaactccaagtagctccccactatttgagtaaaatatgtacctcagggtttaaacagtatcacctgggatattatggaatcttagacactttttagttaagctctacgtaatacagtaagcaatcatacaggactattttgtacagtgttgattctgttgacttcagtttcatgctttttgttctgcagaatgtaatctggaacagatattctgcctcttgtaaattcatatgctctaaagaagaattttgttttcctgctcttatttctgtagttccttgttgagtgtactgatcccaaaggtttgctctcattttactgtatgggtactttgtagcctgtgaagccattggtacttgtttgatgatttatattgcatcctgtgaaattgcattattaaagtatttatcattgaaaatgcatctgatttattttttgcatatgtcctttagttggaaaataaatttgacgtacttctattcatgtgattctgcactggtgtttgtggcctacacctacttatactcatttctttatgttccaacttcagggctgatcacaatctacaag

SEQ ID NO: 1637 - DNA, 7261 bp, Oryza sativa
  Intron number 2 from transcript LOC_Os11g34660.1 (locus LO C_Os11g34660) derived from phytozome v7.0 (chr-ID Chr11; p os 19831594 to 19838854)
gaggtaaagctttactgcatatgtggagatagcggtgaaaacggctcggatatagatagaaactagctttatcatatcacatcatatttttattattatattttaaaaaaaatcagaaatgaattgaactaacccggatataaaaatgaagaggagtattattaaatacatatatggagcgtacatggatcggaacgaatatgatgacgaatatttatcgaaatacgaaaaccgcttaaaccatgctatccctacaccccgtatagctgttggaaatatagtcattaatcggcatattttaatctaaaagattaaagcaatgatcatggcataagtagtgtagggtgatcttaacataaccagtagcatactatgcgcatcatgaatgacaggaacaggaacataacagtaacgcgataacatgctagaggcatcatgtagaacaggaacaagaacatagcgcacatagtatagcgatagcgctaacaacagtagcaggaggagaagattatacctcgaaaatggccctccgctggatggtgaggcagaattgcctccgttgttgttatcgttcacggcacctcctggcgcaccagctcctgtcggcggcgtaccacctccgccagcagtggcggcggcaactccagacatggcgatgagcagtcgtgcgggaggtactccccaaaaacctgatcacccgcctacccggtgcagatctcaggcgaaggtgtggtttcggaggcactgctccttccaatctctcgagcgcgcaagagatcagaagcgaggaagcgagagcaactcaggcgcggagaaggagaaactaacaccgggaaagaagcgatgaaaccggatcggactcgcggcctccttatctatcaggagaaagaacgtggacgcgctgttgcggagggaatcgtgggaatgtgggttagtggctgcaaaaggatagtgacgtgacgcacgcacgccgccagccagccacgccctcgccctcgccctcgcccacgcccggcccggcgcgcgcgcgcgcgcgtgtggcattccgacccccacctcaactggtcaacagggagcctccaataactccctatttaggttgagatatttctcgcttaaatcctgaggtggtattattatcctcaacacttattatgggcctttgagatttaatattataagttgggcctagcccaattattctaacaatccccaccaaatttcaaggctcataagaaatgttctcaatgttgtgcctgtttgatataccagggttttggtggagactgttaagttgaacttccacctaggaaatgagctacatcagaccacaactgaacaatggactatgccttgaattgtgagttttgtgtgatcaggtttcactcagaaccttgactggtactgggctgccgttcgcatcccctctgtttggagcatataagtcaaactccaggcctttcatgagtatctagagatcacccaaacctcatggactgtgactagcagttaaactcatataggtgtgttccttctgagatgttctgcaggtcaacatctctgcttggaaaagccactcggatcacattaagacataagtcatcctaccatgcaggaaagaagagaagcacataatgaaaatgagccctttttcaagggtctcttctctcagtcacacaatagtttgtttcaccatccaaattcacgggatctccgatcacaatggacaggtttccactattatgcaaccttaggtgggtatcaagcccatttccctcgatgcactgtctatcacattacgtggtagccccttggtaaactgatctgccagatttctagccgtttggacatagtccaatgctatcactccggagtttttctgcattctgacagatttcggtcttctcttgatgtgtctagatgacttcatgttgtcctttgaactgttcactttaataatcactgtttgattgtcgcagttcattaggatagctggcactggtttttcaaccaccggcaaatccatcaggagtttacgaagccactcggcctcaactgtcgcagtatctagtgctgtaagttctgcttccattgttgacctcgttaagatggtctgcttgcaagacttccaggaaacagcgccacctccaagtgtgaacacatatccacttgtggcttttatctcatcagcatcagatatccagtttgagtcactatacccttctagtacttttggatacccggtatagtgaattccatagctcatagtgccctttagatagcgcattactctttccagagcctgccaatgatcatctcccggatttgagacaaaccggcttagcttgcttacagcaaatgagatgtcaggcctcgttgcgctagccaagtacatcaatgaaccaatgatttgagagtatctcagttgatcccttgctattcttcggtttttccttaatagcacgctgggatcataaggagtaggagctggcttgcagtcgctatatccaaagcgactcaaaaccttgtccacatagtgggattgcacaagtgtaatcccaccctcatctcctctttgtagtttgatgttaagaataacatcagcctctcccaaatcattcatttcaaaactcttggacagatagtctttgacctcctcaatcacattaaggctggtcccaaagatcagtatgtcatcgacatataagcacaagatcaccccttctcccccaccatagcgatagtgtacacatttgtcagctttgttcacaacaaagcctacagatgtaagcgtggtgtcaaacttctcatgccattgcttaggtgcttgcttgaggccatacaaggatttcaatagtttacacaccattccctcctgaccttctagtacatacccgtctggttgatccatatagatctcctcctccagctctccgtttaggaaagctgtcttaacgtccatctgatggacgagaagaccatgagaggctgccagagcaagtagtactcgaatcgtggtcaagcgagcaactggtgagtatgtgttgaagaagtcctcgccttccttttgggtataacccttggccacaagccttgccttatacttttcgattgtaccatcaggcctaagctttttcttgaaaacccatttgcatcctacgggcttgcacccatatggacgctcaacgacttcccaagtaccattagacataatcgagtccatttcactgcgtactgcttccttccagtagtcagcgtcaggagatgaatatgcctcttctatggtcttggggtgtcatccgcgaggtatacaatgtagtcatctccaaaggattttgcaaccctttgtctcttactcttgcgagtatctacaatgttgtcctcctcaggattttcctcaggcgtttgatcattgtgttctatcggtgcaaagtgctcatggggcatgacagtttctttactagaagtgctaggtgtacatttcataggaaattcattctcaaagaatgtagcatctctggactcaagaattgtaccaacatgcatgtcgggtactctagagtttactattaagaatctataacccacactgtggatagcataaccaagaaacatacaatcaacagtttttggtccaagtttccgctttttggctataggtacatttaccttggctaaacagccccatgttcataggtatgagagatttaatttcttcctttccgattcctcgaatggtgttacttcattatacttcatttgaattttattcaggacatgacacgcagtcaaaactgcctcaccccaccattccttggaaagccccgcagtgtctaacatggcattcaccatctcagttagagtacggttctttctttcggccaccccatttgattggggtgaatagggaggcgtcatctcatgaataattccaaactcttcgcaaaaggatgcaaactcattggaaaaatactccccacctctatcagacctcaaccgtttgattttcctttcaagttggttttctacctcagttttatagatttaaattaatgcaatgcctcatcctttgtttttaatagatacacatagcaaaatctagtgcaatcatctatcagtgtcatgaaatatttctttccccctttagtcaacacgccgttcattttgcacaaatcagaatgaacaagttctagaggtgccaaattcctcgcctcagatgccttgtgaggcttgcgaggttgtttcgattgaacacaagtatggcatttggaaccttttaccaaagtgaattttggaattaaactcatgttagctaagcgcgtcatacaaccgaaattcacatgacagagtcgcgaatgccacacattagactcatcattctcgctaatatggttcacagcattatgattattacacatgtcattcaaagaaaagcgaaacaagcctccgctgtcataaccttttccaacaaaagtctcatatttagatacgacacatttattggactcaaacacaagtctaaaaccttctctacacaatagagagccgctaactagattcttctttattgaagggacatgctgcacgttcttcagctgcacggtatttcccgaagtaaactttagatcgaccgtaccaacaccatgaacagccgcaagcgacccgtttcccatcaacaaggaggaacctctcccgacctgataagaagaaaacagagaaatgtcagcacatacatgaatattagcaccagtgttcacccaccaatcaggtgaatgaaaaacagagagaactgtaggtaatattttaccgtaccccgatgttcctccgccctcgctaatgatcatgttggcagacttcctgtctttgcgctctggatagtccttggcccaatgcccagacttgccacacacaaagcagtctccctttgcctttcccttgcctttcttcttaaaattggttgcagccttgggtttgacatcaggcttgactttcttgttattgtgggatgcatgagggttcttcttctgtaccatattggcactagaacctccctcaacctttttgccccggacatcctttgccctcgccttctcctcaacacccaaagagccaatgagatcaggaacactgaactcttgtctcttgtgctttagagaagtggcaaagtccgaccaagaaggtggtagtttagcaataatgccacctgccacaaacttgtctggcaactcacagttgttgttctcaagttccttagccagcatctgaatctcatgagcttgttctactacagaacggtcatcgaccatcttgtagtcatagaactactccataacatacagctcactgccggcgtcagaaactccgaacttggcctcaagtgcatcccacatgtccttcccagaaggcatgtgcatgtacacgtccactatgttgtcagggagtacactgatcaatgctccacggaacaggcaatccaaagcctcgaacttagcctcttcctcaggagaaagaggtggttcacttcgtttgccccgtgaaacatagaagcactgcatcgctgtcaaccacaatagtgcacgtgctttccatctcttatagtttgaaccatcaaaagcatgtgatttcagtgcagcagaaaagccaactaccgaaaatgacctatcaggtttttggattgttggaaatatagtcattaatcggcatattttaatccaaaaggttaaagcaatgatcatggcataagcagtgtagggtgatcttaacataaccagtagcatactatgtgcatcatgaatgtcagaaacaggaacataacagtaacgcgataacatgctagaggcatcatgtagaacaggaacaagaacatagcgcacatagtatagtgatagcgctaacaacagtagcaggaggagaagattataccccgaaaatggccctccgttggatggtgaggcagaattgcctccgttgttgttgtcgttcacggcacctcctggcgcaccagctcctgtcggcggcgtaccacctccgccagcagtggcggcggcaactccagacatggcgatgagcagtcgtgcgggaggcactcctcaaaaacctgatcacccgcctacccggtgcagatctcaggcgaaggtgtggtttcggaggcactgctccttccaatctctcgtgcgcgcaagagatcagaagtgaggaagcgacagcaactcaggcgcggagaaggagaaactaacaccgggaaagaagcgatgaaaccggatcggactcgcggcctccttatctattaggagaaagaacgtgaacgcgttgttgtggagggaatcgtgggaacgtgggttagtggctgcaaaaggatagcgacgtgacgcacgcacgccgccacacccacgcccacgccccggcccggcgggcgcgcgcgcgcgtgtggcattccgacccccacctcaactggtcaacagggagcctccaataactccctatttaggttgagatatttctcgcttaaatcctgaggtggtattattatcctcaacacttattatgggcctttgagatttaatattataagttgagcctagcccaattattctaacaatagctagccataatttattatgggctgtgtaatttgaggttctaggcttctagctgcttatgttttcccctttccaatacactttgtcgtgaacagctatatttccccgacttgatcaagggtgtgtttagttgggaaaaggaaatttttggtgtcacatcgaacgtttgaccggatgtcgaaaggggttttcggacacgaatgaaaaaactaatttcagaactcggctgaaaaccgcgatacgaatcttttgagactaattaagccgtcattagcacatgtgggtaactgtagcacttatggctaatcacggactaattaggcttaaaagattcgtctcgcgatttcctccataactgtacaattagtttttctttttatctatatttaatgcttcatacatgtgtccaaagattcgatatgatgtttttgaaaaaaaaatttggggaactaaacaggccccaagtatgatatctaagtcgtggtggaatactgtgtgctgatcgacttcttgcttgtattagttgtgtatgcgtaattaatgtgcgagcgtgttgcgcgtcatctatgcgtgcttgtgcatattggtcccagcattttgtgaaaaatcccaatgtttgtacaatttttgtaaaatttagtctatgttatccaccaggttca

SEQ ID NO: 1638 - DNA, 2130 bp, Oryza sativa
  Intron number 1 from transcript LOC_Os05g16060.1 (locus LO C_Os05g16060) derived from phytozome v7.0 (chr-ID Chr5; po s 9064338 to 9066467 reverse strand)
gatcggcactggagtgggtgaagagtggcgacgcgtctgggagaggcagaaatggagctcggcgtttttagggcgtcgacacgtcgtggccacgcgtcgcgcggcgtccagagccggtcggcgctcgatctctccctctcagtgtttctcggtcggctagggaagttgcacagaggaagggcaagccggagggactgacaagggggcccaggtcgaagtaaactaggtggaagagagatgtgtaggcagagacatgggtgagcttggtttttggacgaatttccggaattattttctcctctaattttgtagcttcaatacttaatgtgttgatcagattaactagtgttgattttactggaggtaggtgtatgtacctagtttccattttctttggttgcactcaaaaattatggatagattactcacagaaattagaggaatatgggttctttggaaactagttcgaatttttaggagacctaaatagagaagataaattctggaaaatttatttttattcattataaatgacctagtatttgaataaattattttacttatacacttttatgcagttaaatgcacttttagacaaagtatggttttagccgattaagaactacagttaatctagtttttattagtttgactgatttatttgaggtaccaaatttagttattaaatcataccaaaattacagtgagttgcatgtgttgattagagcctacatgaattttcccatggttttatcttgcacgaattattttagataattcgcaagacttatgtcttatatatgtttccctttcctaaatgcatgtaaatgtttataaaagttatatttggactctcattaacctgaggtgatgttgatatgttagaattacaatttacattacacaggtcataagctccttacctattatgcacaagtttactttagtattaaattaagagaatgcttatagagatgattaagatagaatataccctatatgatataatttatttggtcacttccatgttcatgactagtcttcagatggatgaccaaaatagttttgtggggcttgacattggccttgttgatatattttaaggtgtatggtttctattttaacttcctctagctagcactaggccctaatggtttagttgtttatctagatcttagttaatattcatgagacctattatgaaatgcaaatcgaaaatccaaatgcaatccaaatccaaatgcatatgaaggactcaagtcaaacatgtctatgagagtatgcatgcttacacataaatttatatttttgtcctaggttagagatgcaaaggttttaatttgttttaaaattttatcatgcaagagttagatcaacttcacctaggtttaaaatggaaatttttggtttacaaaattgaagaactttcctttcaactagttttgatagaaattccttaatcctagaattcgggtatgttacaccaacatgctacctgatcggcatttttggcaacagccatgctatgcctcgcaccatccatccatcccaaaagagaagacacaaagacaatatcaaaatccgatagcaatagagctgaaaggcattgtcgctgccaaggaacccggcttgcttgtactccctatcacctatatagtccatggcaagctctctccatcctccattgtcaacgtcatcatctccatcctcttccttctccaaagaaaacaaagggcgtgccaccgaagtggaagaagtagagggcaagaagatgggggattgagcccagagcgacggcgatgtgggggaggtcgacataaatggtggttgcacggacattcaccagcatgagggggaagggggacagacgagcatgaggggaacaagggagagagagatatagacttggggggagggggggatgagctttacgaaggtccagaggataaggcaatgtgtgtgtggtggcctgatactctgatctgttgaatggatttcgtcattaatttatcccgttaggacaggacaccgttgcgtagattttctgttttttaatgtgcttgatttttttgcttcctaagcttttcttttgcagactgagttgatcgttgagccagagaagttcacacc

SEQ ID NO: 1639 - DNA, 2110 bp, Oryza sativa
  Intron number 5 from transcript LOC_Os12g22284.1 (locus LO C_Os12g22284) derived from phytozome v7.0 (chr-ID Chr12; p os 12568157 to 12570266 reverse strand)
aaaggggtatgttacgattattaattagttgaattttctttaagatatacttcctttgtttcacattataaaatgttttgggttttcaatagattcatgcatggatccatatgtctttatatatgtgtccaaattcatatatatggatatgttagtaaatctagatgagagaagaagaggacaaaacgtcttgtaatgtggaacggagatagcatgctgacggagcgtggggctcctcaccgggagaccgcgcaggcccccctttgccggttcggccgggggcgctaagtgaggttcttcaccctcgatctgtggaatgttcgcgagagagcaaatgcacgagacacgggcgatgtagacaggttcgggccgctgagaagcgtaataccctactcctgtgttctggtggatctatgtgtgaaggagttacagagagccggagagcaagagagttcaggctctagaacccctcttcctctttctcttctctacgagctcaggtattctcagagtcgtctgagagtccccccttccttcggtgggcaaggtcctccttttatatctcaaggggataccacatgcaccacttctacctactcttcttttgggtggggacccaccctatcttgaccaaaacttggctcgcgccttcgcctggaagctaaatcacagcttgtccttgagtgaggcccagcgccgtcactcgcctgacacaggggataaccctgtcattccttcattatgggtggagatttgcaatggccgctgtccgaataaccctccgatgggatgggtcatacctacctccactccgccggaagcagatgcaacgtgggagcacggttgtctgccgatgacgtgaccggcgtcagaccagtcacagaccggtcattcttgtccaccgcgcgtcagtttagcatgccgcacgtctgcccttcttcatacaatgacttccttgccatggttgcgatgaagcctggaatgaatctggccgggactgacataccaactccaggagttagcacgccggctccggccagggacgagtgcctggaggctctcatcattccgacgggacggggcgaggcgtgtgacaggccggggcgaggcgtgtgacaggcctcctgttgccacctaacccgcgatctgacaggtctgtgaccggtcacacactgcgaccggtcacggaccggataagcgtgcgctgcgctgcattaaatgcggcgtggcgcgctcgtccaacccgcaataaatgtggttaggtgagccccgctgtgctcacctaacccatacacgtggcgccaaaatcacagggggtcggggcgccccagccctcggggccaaaacaggggcggcccgacccctcggggagacagagggagggatggccacatcatcctcgggcccgacccccccgagggggtcaggccacgtgggtgaccgcggctacccaagcctctagtcacgataccctcggccccatgtcaccgacacatgctcttagttttgttcacagggcactctgtaatcacagataaaactctatggacggatatgtggtatatatataaagaaattatgaataaataaaaaatttaattgttactcagcattctatgaatttttatagaccaattcttacaaccatccagttttcatttcaatgaacatgcagtccttcaccattgcattttgttactgtttatatttgatcatgtcccctgcctttgccaacctactatatgaaagtttgctttctccaaaaagtcattcttttaactgctatcaataaatatgtgttttgctttattttcaatttgacaatacttttctactaaatactgtttttttatcgaagtcacttcatcattgtttcaaatagtaaaaccgctaaatctatattatagtttttttttctttttttgcgtatgctcacggtaatcgttcgtttcgatagagctactaaaagtacatcatagaagtttgaaacataattagttgttaaattattatgtttgcattgatgcttcatggcctcatagatatatatttgcttttgtattatgtgttaacagggtggaactccatttagaaggaaagagcaagccag

SEQ ID NO: 1640 - DNA, 11140 bp, Oryza sativa
  Intron number 2 from transcript LOC_Os09g02690.2 (locus LO C_Os09g02690) derived from phytozome v7.0 (chr-ID Chr9; po s 1198665 to 1209804 reverse strand)
caaaggttttcttttctttcttcctgcgctcatagtttctcagttccatttttatctgcttcggtgtttgttgtgcggagcaagtgtttaagttgcagtagtgagtgacgcaactagtaatgtagcaagaaatttttcattaggtagtctcacttcaaaagttcatatagtaacatcacataccaaaattttcggacaccgtaaatcccatatatagatatgagtacaaatttatatatataaaaaagatacaaatgtagcaaagtgcaaaacaaatagaagtcacaaatcaaactttgttatgctctccgtttagggttattttgtcaatattgttgagcatgttttgcaatacaagtgaacatctcaagaagatagactctttatatctgttcatcaatgaaaatgaatcatgaacgtaatataaattgcacgaagatagtatagtaacattttactaccattaattcgggtttgcacatatggacttatattttcagcagtattaaaatgttaaaatgccagatgcatacgctaatttggagtgattagagtgatcaaataattggccaggaaaaaaaaaccagaaagctattaaaccccagtaccccacctagttttccatggacagacaagtcaattgtacttcctccatttcatattataagactttatatcattgcccatattcatatatatgttaatgactttagacatatatatgtatctagattcattaacatctatatgaatacgaacaatggtagaaagtcttataatataaaacggagggagtagctcacaatcgtgaagcgagagagacgcgaccggcttccaccgacaaatcagctagatgagccctataggaagccaggaaaaggggcgaacggtggccgaggggttggcggccaacgacaaacgccgtgatggcctgatggttgacgggcgggaagggagacatagccgggttctcaaatggcctcccgggacctccacggctcgaggagaggtggactagtggagagagatgttgacgcaccgaagtgagtgtaggatcgagatgtcgactagagggggggggggggggtgaataggcgatttaaagaataaataacacctaatcaaatctaacctaagttgctaggcttggtgagggtgaactctaactaagcaactaagttatgttttgcaaacctagggtgatagtggctcaattatatctctaggaaagtaaattgcacaaatgtaaatgcgacaatcaaatgagacaatgagacaagagatttttcaccgaggttcggaaactcgccggtttcttactccccgttgaggcaagcccaactccaccgctcaaccacgaagccaccgcacgcccccttcgtcaaggggtgggcaaggcgggagccggcccacggagaggactacccaagcctcgatcactcggggtagttcttccttcactccgaaggtggtgaactccaaaccactcacaaaccggcactgggcctcctccacaatcttctcggagaggtcaccgggcaactcctccacaagccgtctaggaggcggcaacctccaagagtaacaagcaatgacccggtgtggagatgatcaagtgccacactagctctacaatggaagcaaatgcacttgactcttggctaaacaaccctctaacacactagatggatgaacataaagctcaagtgagtgtgagagaggtgcaaggagtgtatgcaattgaattgggtgccaagagagcccccttgctgctggtgggggagtatttatactcccacccaccaaaactagccgttgggggcgaaatcccccaactctgtgctctgccggtctgaccggaggtatgtggccggtcagaccgtgctactcaactagccgttgtagccctgtcagagggccccattggcctggccagtcagaccggcatggggtggccggtcagaccggcctcggctcggtcagaccgccatcggctcggtctgaccgaatacggctccgtcggctctgtatcggccatcctgagcagcaccatctcggcctccagggggccggtctgaccgcgcaaatgccaccggtcagaccggccttatgctccggtcagaccgccttcttgcggccggtcagaccggccagggcacgccggtcagaccgccactatgtggccggtctgaccgcccctggtcaggccgaacccagtgaatttgcaagtgaatgtgtgcgtgatgaaaaaaagagcacaaatgaaaatgcaatgacctaatgtggcaattataatcatctctttgctaggtcattacccttcttaatagtacggcgaaactaaaaataaactagcaaatttgatcgccctacacctcgatcaattctaaattaaagcgctagttttaccgtcttctttccctttgctttgcgtcgtcaattttaatccatcgataatcatccatgcacacatatgacgtggacctaacttaaaatgtatagctcaaagacaacggttagtccacaattagcacttatcattaattaccaaaattaacaccgggggcctagatgcttcagtgaggcaacacgatgaatgtgtacaccacggtgccacagcaaagggaaccacgaggctcaggcgctcagccctagttaggaatgacaacagctctgcacctgtcggtttcatcaccccattcccaccctgaggtaaagggaatcatccgttcccatctccatccccacgttgttgtaggttttcccgtccgtccctgcagcgggtatgggtcacccatgggtctttacacccgacaacactatcaaaatataaagtgcaagccaggaacaatccccaacccaggtgacaattagcctattattaatgtattgagtatgcaattagcagtgaaatcatcattaaatcggctgattgaacacaaaattgacccaaaagaataggcacaagcaaacagagtgtaacttcagtgcttgaaaacaagtcaaccttccgtgctgttagcctgctacagagcagcaagatgtttccttcaaagagaaagccaagaagttaacgtagataactaactctggtagcatacaaatcaactactagctgactgctggttggtgatgagtccgcagtagtggagctagaccttgggcgtgcggcctggttgccttgtctcctagagacatgcggcgtggcttggatcccttcacacgaaggcgtcggccatcggtatcgactgtcgatctggtgtcggcctggaggtcctgtaggctggaggcgacgaggcagcgcatggatctggatggagggaagcggcggaggagaggactctatcaacaatgtgagtgtgggatctagggttttgggggcgtatatggtggtgttctttttttctaaagatgaagatgacgtttttttacgcaaaacgatgtgatattaatgtatgattgattgagttttaatcattacaaacttgaaaagtagattaatatgatattttggagcaacttttatatagaaaatttttacacgaaacacaccatttagcagtttgaaaagcgtgccatgaaaatcttaatcttcatctagctcttgttggagaaagaacgggacctatatctgaagtagatcataacagttgggtttttaatatctatatgggtgtgagttaggccaatctagattgtaggccttgacgcgtccaagtaaagtgtcactattttggcaaactagaccattgggcctaggactgctgcatggccatattgtactaggtaacctactacagacaagtcaactacaagccaacatcgaggcatgcatatgcatgctcctaatgatatagtcatgtatcctcgcactagaaggatagaatgagatatggtggcacatgcctggttcatttgaatgatcaacgtgcaagtatccctcagcagggaaggggatccttttttttttgcggggaaggggggatccatttgatcatgcttggttcctcaacaatggaacaacaagccacacgatgggtgtcgtgatgccttctccaagcttggtagcttttgtaggactgccaagtttggggacgtctctagggtctgcattgatggtcttggcatgatgctcttcttctataagttcggcgatcactagcaatgtcaagagtctaatatatttcttgactattcaacaactgggagaactcactgaggcttgttcggtgctctgggttcccaactcctgtcccacgttctccgcgtgcacgtttttcaaactattaaacggtgtttttttttgcaaaaagtttctatacaaaagtttcttaaaaatcaaattaattcatttttgaaaaaaatagctaatacataattaatcacacgctaatggattgctccgtcttccgtgagaggatacaggttactaaccccaagttacgaacacaccctgagtctagatgaaaagctatggttgagaacgatgtcacgtaggttcaggatcctaagtggcacagcgtggctgtatgttctcaacatcacgcttgtatagctggtgtgccatggaaagaccttgatttcacctatcctgaatttattcgcaatagatcaatataggtctagaacttctagtctcggtccgaaagttctcgtcaaattactgaaagttctagttagcaagaatatagcccacgaaggggaaatcacaataagcatgatttgcacaaggtagatacaacaatatgctatgtaaattgataggtaaacattgcacaagctatcacaatgcaacctcacgaagagaatagtaacccaaacacaataacggtagagagagagaaccaattctttttaccaaagttcggatccaacgatcctgtctccatcgagaggctcctacaagctgagttgcattcaaccctaaaacccaccaattaaattggttcttactcagtttaccccttttacttatggaggtggagtagaacctccaaaaacttcccaggctgtccacaatcaccagatgcttgcgagtgacatctagttgactaggaggataacctcgaagagtaagaaatgcgctaaggaacaagctcggtgctgatcatgcccccatgataaatccctacttttaacttgcactcaatcccaaaaatctgtctaatccctgcccacttgatacactagaagctttagatccaagaataagagagatgggaaatgtctaggaggctatgataatccgagcaatatacagactgcttactaaaaagtataatgcgcatagctataagctaactacatctttaaaaattgcatagtaaatgactttaataaaaagcctttatgcaacgaataaaggaattttgtaaggtattgggttcacacagtgcgtatatcgccaagacaaatatgctaagttcctataagacacacaacaccaccacacttgaaaatatattgcatatgtggtgtaaaatctgagtaaaataacactcataaatggattcaccaaccgcctaaaaatgaccaatatatattcaacctaaaccatgatattggttgtatcaaaaaatgcacgcatgtgacgaaaagcaatgatataatataaaatcaattgcttcatgaaacccaaacaatgtctctaacttataaaaagttaacagagtagctatatatataaagatttagtgcttgccactgtttaaattgtactctgtaccaacccctaacaagttgtataacaactgctgtatcaacccctaacaagttgtgtaacagctgaataaaaggattttaaggtaataagtcacttgaactcgcacatattgccaaaaacaaatatgcttaagtccatagggacatgcgatagaccacacctagaatatgggttgcatacatattgggattagccccgaaatatgcccatcaatgcccttgctatatgacatgtatagcatacctattaataagctcttgagtgatagattttctgggtaatgtagatgaagtgcatctcaccagagcgcccaaagtagatgcgataatcaaatccggactggagcaagtactcaaccgatggccctcgtagggaataatgattggtccaatctttgagcgtaggaagtaggcacatggccatgaattcatgtcacatatatccaaaacaagtccaaattgaaggtatgatccttgtgcttgagctggtaaacccctaaaatccttgtgcttgtgattgaaggtatgaagtaggcttgtccttctgttgtagttgaaatagtccattggcggcagctgatgtagttgtcatggaggcgagatcaccaacgtgaagatgatatcgcccatcagaagtgacggagatgttggtggtggagacgaagttgcccatcaatgatgatgatgaaatccaccaaccgtggagacggagaaaccagtcagcgatggtatacgcaaccaacagtaatgacgactggtggcaacagagatggttagctgtgaagacgaagttgcccatcaacagcagcagaataggctaggtcaaagtggcatagcaggatgttgatgaagatgacaatgttagtgatctagtcagattttaacgttgatgaagtccagcttcctgaagtaaagaacctgatggatagtagttgaccgaagatgaagataatgccgatgacgaaggtgtcgatggtgacgtcaatgataataatccatcaaaatgtcgagaatatatccatgctcgagcagttttcttgacgttgatgtgtgcgtgacgaagattgatgcaacacctcttgattatgaagatgacattagaacttggtattgtagctattggagatgcttcacttggaggaaagtagatgttgatgctgctgtccaacttgccgaatctaagtagattggttgataactccaaactccataggcccaaacttgttaagctcaaagtcatatacgagttgtactccagagggcagagttgaatctaaccaggacatgtaaattaaatcttgaacttgatatttgtgaaactcggagtaaaccgtggaagtagctgagatccaatgttgccgatgagaatgtcagagttgttgaagtagaacgcttgctctagaatgaagatgaagataatgactcccaaagttgactcgttggctggttaattgattacttcatcttgacataacgtttgtcgagatttagacgtgtttgtgcagcccccgactctatacttagttgggaacaactgaacatagagtcaagaaactatagcttcttattgtcgagtaaccatcacttgagtaaagatatgcgttgaggatgttcgagtagaaatcttgaggattggagcaccacttgtagtagattagcacgacgtcatatttggtggcgcatgctgagtgaagtagcaaagctggtgaagtagaggcgatcggaattgctggtgatgaagatgatcggctgcaacagaagcaacaatatgtgaagatgaagttgtctaataatgatggcgaaggcgctcacccgtggaagtgagagcaccagtcggtggcggcgtaaacaagctggtggtgaaaacatggtcacccatcaatgacagcataataggccagcggtaaaggcaaaggcactagccggctgcggtgaagacaaagatgcccatcagcagtggcataatctcacaaccgtgggggcgaaggcaccagtcgacggtgatgaaggcaagctggcggtgaagacgaagacgaccatcagcggtggcataatcgcacagccgtggaggtgaaggcaaaggcaagccggtggtgaaggcgaatacacccattagcggcggcataataggccagccgtgaaggtgaggacatcagtcggcggcggcgaaggcgactgacggtggtgttctgactgatgcattcctgaagcataagagataagcttatagacatgaatccctactatgcatatctggatttggatcctatagtataaacatgtaggatgagtagtctttgatgttaatataatactcgaggaaaattcaagcattttgcaatatttataaatatgtatttctcctcgtatcaattttagtttccttgagtagttgacttcctatgtttaaacactatgcccaactagtcatagcccccaagcaccgggagtcggctcaaggcaattcccaaacatgcataggagtaacatgaattcgtcattcatggaacagagctttatagatcaaaatatgtgctaattgggtacttcaacaattatcaatagcagaaaataaatgattttatctctatgcttttgatttattcgagtaatactactaacgaaagatctgcgctcgtcgatggtgctggaactgtgttggcgcgaactaagtcgacaaacacaacgacctgggagatctgcttaactccagtgcatgaccaaaacttgatgagatgtgggtgtgctagtcagtttgatcctacaactgacaagatatataaattgaagatcaccaaagagctgatcagctgacaagccggtggactagttccagccgatgcccataccagctgatgtcgatagggttttgagctatcggctatatgtttgatgtagaatctgacacttgatgtaaataatgatataaagataatcggctgatgataatgtaatgtaacaataatataatccaatcggctactaatggtaaagtgttgattcgaaggttaaaacatgcatcagctggaggtccgatgtcattaaatccaaacgactagataaatagtaaaacctttgttgtgatcggctaaatcctacttgtatgtaatccttgtaagccgatgcaacgtccagattactcatcggctgaaaccccaatgaaacccttattggcaatcaaaaagcaggcaagagattatggttctaaacacgactagggcagttgcagcgcaaagtatgaaaagaaacaaaaatatctaggcaatcaagcctttgactgattttctgggtggtggcaggggcggatacaggcatggggcagctagggcttgagccccatgcctggcttcatgatccccattataattttgaaaaataccatgtaatttctaaaaatatttgaactctcattagttcagccctacgcgtgtagattttctggctccgccactgggtggtggataccttagttaatctaatctagcaagataatttagtcgatacctgcataaaccctaaaacgaatctcagccgatatgagcaaattaagatgctaaactagatttaactaagatatatgataactagcggttgtagaagatagattagaacgtctaaaacgacgccctaatctgccaatgcaaaccgctgagacaagtcatacctcttgtcagaagatctaagctgataccctaaatcgaagtaagaattcgtcgaaaaagtagaaatgtaaaaggtggcgatgcaccgaagttgtattgatcgagagatagtttacaataaccctgggtgtacatatttatacctataggtagatactagtccttcttggacaagaaagaatcttttctaaagataaaaggaaaacataaagtccttatcggacactaaacacactttcctaaagataaaaggacactaacaaactattcctaattaatagttaaactgccataccgcatcctccttgaactcggtcacttctggataagctttcttcagtagattaatttccttaaccgaatctactaagaatccgactattggcgacttgataattcctataagccgattcaaatactctgaagccgatactgactctaggccgatgatgactttggggcttaccaaatttcactgttaacacatgccccccaattttggagtatgagaactcatgcttcaaaattatcttctttctgattttgatgactccaaaattgatcgtcttctgtatatcacaatcaactttcatgagctgatactgtttgcatcaaatgagctaggctgttgaactcgtggcaaaagaatttgtccttggtaggtgttgatagcccttggaatgcaagatctgctagctaccccgatcacactcgttgacggaaaactctcgacgcgacccctacctggcgcgccaactatcgaatctgaaaatcggcaataataaaaggggtagtgcatgagacctaaaagtggatggatgcggagacaaggatttagaaagtttcatgctctctcgatgataagtaataccctactcctgtttggggattgtatccgtcgagtgtgtattattctgacgatctaatagtggttatgcccttgaggggctccctgcccaccttatataggtttggggagggtggggggaggttacatagccaaatatggcatcggtttacttaatctactgtacaatattactgaaccaggactttagaccgttcctttatatacaaggaaacataatacccaagtcatgatgtgttacatattccataaacataatctctcccatatatccagtcggttaacccagccgtgtgggtatatggcacccataatctccacataagagatcaagaatcagaaaatgctgaaacatttcacacaacgctaaaacatctgtgcccattattgtctcaattttgtgggtgattgtttgtgagagttgacggcaaagctgacaccattcccccctttttttttttttacctttttgaccgtcagcttcattgccaataatatcaagtgctacttctatagaattccagttcatattgttgtgcttttcttcctataacctggtgtaccttacatttttagttatcaaaattattggtgtatctaacatttttagttaaccggattgtttgtttatctaacatttttggttaataggattgttagtgtatccaacatttttagttaataggacatagatcagtgcacgttagccttcaaacctccttgatgtattctttccttttagacctctcatgttgtttctactctctaatctcatgatattgtaagttatttcctatcataacatgtttagttcagttggttgccaaacaagtcataattttccattgggcttcccttgtttaagcagcatgaaggaggaactactgca

SEQ ID NO: 1641 - DNA, 917 bp, Oryza sativa
  Intron number 3 from transcript LOC_Os12g06640.2 (locus LO C_Os12g06640) derived from phytozome v7.0 (chr-ID Chr12; p os 3218259 to 3219175 reverse strand)
ggactgattaggcaagcatatatctgtccgtctgtgtaagtggagtgcgcattgagttgctgagcatgcgcatattcttatatggaaaaccttattacatgttacgaaatatgttgttctgggataactttctcagtagatcaaatatgttgttacaaaatatggaaacactatgagaatagtgcatataagattgatcaagagcaacccaacaaacaacttatttcttttttgtcattccgcaatcatttattggaacactttagtgcctctaaagctggagaatgtgtcatagataaaacatatgatagagcaccttatcttgtctgttttatccatccttcactatggcttgtgagttatgaggtaggaaaaacaattgcagaccaaaattcgtgtaggaatgtcatctttataggcttataacgcagtggcattcagaagttatagggagtgaacattcatcctgatgaagttactagttccgtagtacggagtacataactactggactacatggtggtttgtgcaaaagcaaaacaagagctttctagcttctgaagcaattgcaaaaattatgtagatttgttctatatacacagtcatattggggttggagacataaataaattgttattaccattggtttaccttggttatgagttatgttctcaaaatgcattgttgtagctttacgtccttatatttttagtggttttatcaaatgacttacttccacaatcagagtaagtgaaaacaaaaatgctatatacggatactttctatgctatggtgccttcccatgcagggttggctcacttgttaattacgataaagttgtattcttgactgattatggattctgtcaagttgtgtctcatgaatttgcttcttcttttggttatttcaggtcgctg

SEQ ID NO: 1642 - DNA, 529 bp, Oryza sativa
  Intron number 9 from transcript LOC_Os05g47850.1 (locus LO C_Os05g47850) derived from phytozome v7.0 (chr-ID Chr5; po s 27378447 to 27378975 reverse strand)
ctggaggtgatattgcaatcctttggacattcttggtaagagcaaagatttttgttttggagttctaccaatacctcaataggttcatgcatagcatatacagaaccatataggtacaaagaattaatcatgcagtttcggtttgtattttagggagattttttattaagaacactggggaatttgtagttggtttgtattatatcaacacctcatctgttactgtatcaattaatcaaccactagcctgtaaggggcttatcttttctgatgtccttctcaagaacattttgatgttagtaatgggcttagattctgagattttgaaaccacctccatttttttatttgagagatatttataccagcataaatggattaatggattttctcccgtactattcacttaggtctttttgttacacaagtactcctttgtgaatccttactgttattcagcattaaatgcaactttgaaatatcggcacattgcaggagccaagaggatcgccggcagaccttgacaactg

SEQ ID NO: 1643 - DNA, 719 bp, Oryza sativa
  Intron number 1 from transcript LOC_Os10g02220.4 (locus LO C_Os10g02220) derived from phytozome v7.0 (chr-ID Chr10; p os 774464 to 775182 reverse strand)
gctcagagtttatttagttcttctgcacttttttggtaggattctatctgtttcagagcattttttaggtatttatatatatctctatgcaagttgcaagcaaatctttcttcttttgtggtattagttctacacctgaacttttttatggatgcaaaaaaagatatcagcatcgaaggaagcagtcttgttctttatgagtagggagctcatttcccccaggttaaattgtgggatggatcaaataattcagggctaatttttgttctgaacttgatttcgtagttttttgtgtattcgcattcaagattgaataggataagaaataggggtatctttgattctaaatatcgtagtcaaagattctagctgctggcaaatatatatggatggaagaaaaactataatatatgatttcttccttccctgcaaagtagttaatttgaccccccaaaaaagttgaacttatctttgttatcattaaatttttaagttccaagctgacagaatatggtgtttgcttgcaagaaattagtcgttcacaatatatgcagtcaatagtgttacatatcttctaatatcgaaattgcgtgatggcgttattctaagacgaaaatcggatatgagaaatctatcagaaaagaagtgtgagtcatgatacaatttgctccatataatcttcttgactttcttacattttcctatattatcttgcccag

SEQ ID NO: 1644 - DNA, 10923 bp, Oryza sativa
  Intron number 2 from transcript LOC_Os12g19350.2 (locus LO C_Os12g19350) derived from phytozome v7.0 (chr-ID Chr12; p os 11216135 to 11227057 reverse strand)
ctttacatttggtttgttttgtagctccagaggttgataaacaggttgatgctacgttgattcggcttcgtgctttatatacacgtgccaaagaactttgtgagagtgaagtcaggtaatttcatgaagcttgaactgatagaattttccctttttttgttatcttaagatgttttcttaaaaaggataaatcaattattgtcaaagctccatgtcaaaaattttgtgaacacacatttgttttctcacttcaattttcttcgtgctcctttcaaaaacattgctgcatgctgttcttcttaggaaacatttattaaaaaaaaaatcaactttgaccactgttgtactagcttatctattgaagtcatcaccaatttccatgcgaaatgcgagcagacttatcaatttgaattttcaatattgtgattaggtgctgtttctgtggttcaatcttgttgaaattgcatgtgtcagcaatgtacattgattctgtcaatttctttgtgggtcaagaggaatgagttgaggtggtatttcggttacttttcaagcttctggatggtgggtttaaataatcattagtctaacaaataaatcagatctgtgttttctctctatccccagctacaactgtgcaatagaagttaacactttattctaagttcataaactattatatgaaaagatgctataaatctaagttgtttagatataaatgaaacaagcaaacatattagttccttttaccaatctagagcaagaaaaatgccactatgtgagaggcttcttcaggcctgtcgtggcagcaatcatgtggcaagtctgcattgtcaagggatgaggcctgtggcagataagtcattaggcttagtcagttgacttgttattctgaatggtcaggttatctgttagttggtctatccgttagttgtgttggcatgttagtttgagtgtatgccatatctataaagggctgcctaactgttattggaaggttaactaaaaaaaaaaaaaagccctgtactcctgttcatgttccagccctctcctctgccaagtggcattgttcatctagcgcttcctcttctaaagaaattccatctggcctcttccggtggtagtcattctgttgtggacttccataacattataaatgaacacaaagaacaatactgatgaacacaatcagtgtatcggttatattgaaatcttacatgctgaagcatttttaaccaggcttagctaaatttaggagcaagtatgttgaaattttatttgttcaagtgttgcacatgctattcttttgttcagttaagatctacaaaaaatcatggaactccctacagtctgatctgctggataagtcttaaaagctactccctctgccccaataagacttcatttctagcccttcaactgtccccaaaagactccatttttagcttcttatttaccctcggtccgcaaatcgagaagtttacttttatcccttcaataccccttacctaccacttcacatactactttcttataatcaggggtactgtggtctttctctcaccactaatttgtcaactttgtctcaaaagtggagtctttgtgggacagggtggagtagaaagtacaaacacttccctgcctgaatctattgagtgcatgtacaaaaatagatagtagtcgtgaccaactgtttacctcagagaacagttttggttcagttataacaatcaaaatgaagcgctaacaatttcaaaaagagtctcagaagttcatcatattggttttgacttctcaataataggtacagcatcctatatgcctgaacagaagcttccgttcaaaaagtagatgactgtaaataagaaaagagaattgagcatcacatactatgtgaaatgttgatttactgaatttctagtaaaaaaattctttgatgaaactaaaatttcacttttgatgtcatgaatatgctgtatatcttgcacatgttaacctattttactttttttttttcagaatttagcatagaatggtggactataagcttgtttgatttttttacttttgtgcaacttgcctataaatgaaatgatcgcagtcctcctgtgtgttcaagaaaaaacttttgtgcgacttgtcagcagaaagttcctgcttctttgttaggcacaatttcttcaaacattgaacattggctttgtagaacatggttattcatgctggccatcatgggatcacaaacaatacaacagcagcgctttcacttcaatgattttatattggtgctttcaattactattttactgatatttgcttggattatctggtccgctctgagtgcatgtcttctattggaagaaacgtctcctgcaatgtgatcaaatatttcgtattactttgcagtgcatcgtctgctttggttggactattggatggtttgttgcaatctggaacttcagctgcacaacgaaaaaagataggtaagcactagaaaagattttgcgagtcaggttcaggacaaattattgttgagcatgaaaaactaaagatgcttgctacatttgcagaagttggtgagcagaaaaagaagaggatgaagtctgatacagatactacacgattctcctctgcatctatgaggagccaacttgaccaagctacaaacctgaaaggagaacaggtttcaacttcagctgaatttggaaatatcagttagtttttgtatttcagctgtttgtgctacagcaacgctgatgaaaaaaacacttctactttccatgtgaagacttgttagtaactttcctatgtggtgttttagttttaacagggttgtttaaatcttgttcaggctgtcaattttgcaatgtgttccctcaaacacccaacatgcctgactctttttatttctgcgtcttgaatactcacaactgccatatatagattttaggatggttttacatgaaacctactcatgggatgtacatgtgagagtgagatccaattatcctatttaacatagcattttggtcttggagtcatcaagaactacttaaaaaaaatgtattgctaaagatttagtgaagattgagtaagcaaaattttgaagaagtttgcaaaaaaacatgggaagaatattcaaccggaacaaatctccataacgtttgtggtacccggctggggtttgttatctattttatgtaatgattttttttcttgcatcaaagacctgtacctagattttattgcttcctgaacattattttgtttctctgagctggagatgttactgtaacttctattatccttaaatttggacttgttcagcatcatgttttaatgccctctgtactgctggaaaaaccagcatacagaagtaaattataatttatgtttttctagaaaaaaagatactttcatcattcagttgcaatgattttgtgttgtggaatgaaaacatcattgcattcttacgaaaagaacgctgcatccatttttgtatgtaagtttatgtaaatttaatgaacattatcaattaaaaacaccaaaattactgaaatcctctgcataaaaactgttcaaccatacttgttttgttttcacttgttaagtctatagtatatatttaatcaaactaatcggcaagaactccaaggtccagggttaattaggattgtcttgatattaccctttccagtctttgaactgacatctatttgagacattttaccatgcgctaaaaaaacttgatacttgatgttggtacttgtagcggatgatatgcttgataaagaaatttacccttcctttctctttagcacatcatcaattgtgcataaatcagttctgctcttttgcacatgtgcgataacatgctgtatatattaaatgtctcacatttgtgctatgccatttcaggttgcagctaaggtcaaatcagacgaagaaaaagatgaatggtttgtggtgaaggtgatacatttcgataaggaaacaaaagagtatgtcttattcaccttttatctatattatatatttcttgtatgaaaacttgctctaggggaaaaaactttgtgcggatgagggcagttttagactattaactatttcctaatctgtcttattgtagtcattattacttgagaggaccatgagtcctgggtctatggagcattttaggatatctgaggtagacaaggaaattgtaaataacaagaaggttatcatttcaggttgcatgattatccagaagagcctggcaaacatgaatatgaaaacagccagcagagctgtggggctactctatttatatctttctatatataaccaaagtagttggaatgccagctctttggttgagccacgccatccgtttaattttgagctgtttgatctcaattactgtcaccattaaccattagatctaagattagtaggagagaactctagtctgtgaccatctttatagtgaaaagctgccaccactttgtctaccacgctgcctcttattgtggttttacctcgtcctctcctgtacttggctgctcctcatgcccacactgctttctcctccaccacactgaactgtgctgcctctatgctccatccttcctgagacgaggcttatgcagcgccctgtttgtcctgagagaagaccatacccatgttcacaatagcacagcactacctccatttaacccctcttcctgtctctaatggactagctctctctcttggtgcaaatggaccatagtgccacccttttggcttagtcttgtggagacacgactcgtcatccctactatgaaaaccacttgcaaaatcatgtccgattcctttggatcgtctgacatcatcttagcccccagtgcccatttttacttcctacttgaatatatgtcgtatttttattggggtgtgtgtgtgtgtgtgtgtgtgtgtgtgtgtttggggaggggggggggagtggggttctgtaatattgctattcttgaaggaagcattcatgaattcattgaatttgcagatatgaggtacttgatgaggagccaggtgacgatgaagagagtgcccaaaagtatgagataagtccaggactgtcattttggtttcttgtttgcttttactataacaatcaggtcatttttcaatatattccgattcctgaaatgttcattgatactgaacctttgggaccatctagttcattttgttaatcctacgctacatttgaggcctcttgggtcaacctagaggactaaacataagctgctgttcctcctttcctccccctacctttgctgctgcgaccaggcctcttctgcctgcagctgttgtttcctggtggacagacagcgatgtcaagcgtgtgtgctgtctgagtctggcctctgatctatctggccagatcagatattgccacgacactagtgtcaggtctcccatgaatcggttatgccctcaggcatgcagattttcagatggcgtccttacctagttgccagatcaggtggattggccatagcactatggcagcattgtctgtttgtctattataactagtgttcaagaaggtgctagatggtcagcggcaactcctaaggtgcctaggttcaacttaattaggggcttccaagcaattagcaagcatatgtcatacaaaaaaaagactaatcataactgatttctgggatgcaaatccttggtctgaccttcagtctggtcttctttggttgggcacgatgataagtcaatgatcctttgaggtgatttaggtgtagccttcaatttccttgatgctaggccacatcatgttccctggcatcaggatgctggttgttcctgttgaagcaagctgtcgcaaggttggtgtgggtgttccttggtattggcctcagcatgattcctttattggccatgtcttctactccctccgtttcaggttataagatgttttggctttggtcacagtcaaactgctttaagtttgaccatgtttatagaaaaaaatagtaatattttcgacccaagataaatttattataaaaatatatttaattattaatttaataaaactaatttggtaatgtaaatattactatatttgtctataaacttagtcaaacttaaagcagtttgactttgactaaagtcaaaacatcttataacctgaaacggagggagtatttctatcttgtttctctttttttatcgctgattatggcagtgtaatggttatgagcacccatggtgcagagaccaggaatcaccacttctagtttcattaaaaaaaatcctacagtatcctacagccacaacccacaagcttttgtgtgaccctttccttgataaccctaaccacaactcatccgctgattcttcaacatcagtcggtttggatctctgctcttgtactcctttcctggctcctacatctttacaggatccaccaaatgtgtgtttaggcagagaggtgttactagtgttgagaatgggtaagataataccatacgagggattaatgattctgtgaaagtaacaatagtgtgttaagtttattctaataattaaaccttagtccctttggattatttatagatatttactgctaagatgtgactcagttaattttgattaattgagttgaattgtgttgtagggttgaaaattaacttccatcaacttcctcattttccttacctgtttccctctactgtactactgtaaaaaaaagaactcagccccaaggggaaagacctccccagaggtattgcaactaagaaaaagcacccgaaactggggccgagaacggtcacaaaaaccggttttccctacatggggagaagccctcaatggatcgaaccttaacccgtgctttgaggcccaccctccataggtcgattcttcttaacccatgttttttgggggaaccagcgagtgaccttttttggtgaaagaccaggatttgaaccctggtcagtagcttcccaacagaaggcatttaccaccatgctatacgcatgttcgctgtactcttgttaaagcactctagttttttatgtatatgatgtttagtgaaacatttgcaaactctgagcattaatttgcactataattgatgtttgttccacatgtaaaataatgttacttcccccttttgtaataggaagtacaagttgcctatgtcagatattattccatttccaaagagaggggatccttccagtgccccagattttgggcagggtcgacaagtcttagctgtttatcctagcacaacagcactatatagagctactgttgcctctaatcgtaaggtaacatcttaaaatctttcatgaatcctatgtaaatcttttaagtcttgacagtaatttgagtttctttctgtgttctagtcctgtcctgtccatatgtatggatgtattccctgttatatggtcagtttcatctatttacatattcaattataccatcaagatgatgagctttttctgacacttgaaacttttagttctgtcaagaagtatggttgattgttgaaaacatttaagttgaggttaccttgaaagtatgaacttgaaaataagtcatcctagaaatggggagtatatgagcatcaaaatgctttctaatccagatgctctcccaccaaagtaatggatttggtagttgttattgattgaagctgagatgaagcatatttgttatttgtatagatacattttctgtcccatgacaatgtttgtacaatttatcacttatgcagcaatatgtagaccaatttcaagttttcaacataacaattcaattcgttgaacatgagaagatggtagatatgtgcaattagttgagcacacttgacaatattgctaaatacacatgctaattatggcaggaagatcccatacatgggtatcttatgttcttttttcgacagtgcaaaaggttaccgagctcttttaactctaatctgctgtataatgcatgtttatcccaatattttgaacttacacgaccgatttcagttatgaacatacaaaggaatctctagtaagtagtttgattagtttcccttttcatgtcagttcttagccttatctttaggaatgcatctgcatacttttgctgagattcccgagagatgttacatttttgttctctcacttcagaataacataattgaatggttagaacctatgtaaaataccactatttttaggtttcacaccaatgtaactggcacttgaaattgaatagtacaatttaagctgaaagaatatactgtctgaaataaaaataacagactattttcgttgatacgcgtgcaaattgacatatcatccggttcacatcggatgctggttgcttcccaaccaaattcagttattccagtaaccatattgttttgcactggtatgggtgtaactgcaagttgtttgcttgctacttcttgccagcagtttggtggaaattattatcggcctgttggcactacctggtcaagttttgaattcctgatactattagcatattgcctgtgcgttgcaatgggtttttacttaatgaaaattatcattaacctgcattaccatcatcatctcgtaatttctatatatattttgttactgacatgtgggccctctagctgcacagtgtctttttttcctttccacataaacagagttggcgattgggtgattgacatgtgggccctctggccccacatgtcctttctccattcctaaaaaggttgggagttggtggtggggtggtagattaaccactcaccaccaccactcctttttggagtataaattgcactgatttgcatagcaataagcatagttttgctataacaaattacaaattcctattgcatatcactatttagaacactacatcccagtttgattgtcttaaggttggctatggtatctgacttagtgggatgtagtttgattatcttgggaccactaagtcaatcaaggttcgtttcgaatacagttatcgtatgtttgataagcattgctttgcgataataaattataagttctgttatacagaccgctattttgcacaccatatgccaatcaaggcttcaaaaaccagttgccaaagaaatcatgggcacccatccccgaaaccttattttactggatatacatggaaatatgatttcttagtcttgagtaagcaactagtgtttctaatacataacttaagagttctttgtttttttaattcaaatactggtaactgcctgccagttacattttcttaattcattttttgcgaggatttcttaattcaaatttagttttcgaaattaaactcttcctgccagattgttggtgactggtcacaggctctgaatcagtaaccaccaagattttgagctctgatgccaatttgattatcttagggctctctcctttggagctcaggaatcctatatctcacaggaatcctagtagttccttttttgaaggaatcaggaaaactcatgtattcgaaacaaaccattaagattgtttgtatccaaactcatgctaactgttgttctaacggtctgaacttgagaagttggttaccaccttggtcttgagtggtgactgatgaactattggctgccaaaatagggctgaaaacttagaagggctgaaacagaaacgtgtaacctggtttcattgttgattagtggctaatctgattactactatgatactatcgaataatactatgctgttaataccagcaagctccgtttacatgtgtgacatgtcttgtttatacgaagaatttcaacattatgtttcatggacatgattttattccacaaatgattccctaacatgtattggttttgcagagccatctatagtatcttttttacaactattacatttctatgatttctattgtttgataagtgattaactatttttgctctgtcatcatgctgatgtgaaactgggctacaaacaatgcagaggaaatctgacgagtaagtatttatgtttttacaactttgtatagtctcatgtgttgctatttaattttatgtgtttaggatggttctgtatttgtttaatttgtatttctaccttactgcagtatctggagaaaatttgtatttctaccataacttaataagctatgcatatacaatcatacattacgtgtttccagcgagatctttttttttttgtgttcagatatttttgttcctccttccagcatgtaactcattatggctaaagaaaaacaatggacctacaaaaactcaatatctagaacaaaaaacaatggacctacaaaaactcaatatctagaacaaaaaaaaagtactcctggctagaaaaaaaaaacagaagtctgctaaaaaaatcaattacttacaaaaagtgagccccaaaagttggtgtgatatggattctccaactcggatgatttttttggatggtaccaagcaaactggaccttaaaataaacatacatgtttgtgtaaaaggttttaatcggactttcttcttaatattcttatgactaacatttcaatagcaacatttgcttttcctgaaaatatgcttgtcttatttccttttggcagttatctactcttgtttgatgatgacgaggaggatggaaatctaccacaaagagctgtgccgttctatagagtggttcctctcccggagggccaccggcagtgaaaatctcagttggatccgtctttaccccggccagtgtagtgtgtgaagataggagtgtgagagtgtctgcctgacaatgtagtaattttgttttatctgcaccttgtccgcagcatgcagattgtactaccaaagtgacttctaagatgtccaaggttcagcgatcatgtaaataggttgattcagtgttgctctataacaaaaataagtg

SEQ ID NO: 1645 - DNA, 1220 bp, Oryza sativa
  Intron number 1 from transcript LOC_Os01g28680.7 (locus LO C_Os01g28680) derived from phytozome v7.0 (chr-ID Chr1; po s 16045869 to 16047088)
ggtcgtcctccgtctcgggttgagtcgaattgaaggtacaggttagcctctcctttccctccctcctcatccgggtcgcttcatgagccggcacagattatagcgagttcggagttccttagtagtacgtcttaggattttatgctggaatcgtcggtacttcgtttgcagttactaccaactttgctatggaccaatcgtccgcttaagaatctaacgccatggtagagatcataaaggcgatagggatacgctgcacacgcatatttgtccgtttccttcccttcaggttattaaattattttttaaatcgtgtagggaatgactggctgtagaagagtccaagcctccggctatcagctttactgccctgcttggagttgcctggatagctggattgcaagcttgtgtccacgttaaagtcttgttcttttcgaggtgaatgcgaaatttatatttgtttttttccctcctcctttcagttcctatttgaacagatttagttgtaatcatctgtacaaagtgtatgtcagatatccttttttgggggaaattagctcatcaccacccatcagcgattgtgcattgccaaaaaaaaaaagaaaaaaaagaagaggtttttaaaaacgaccagaatacccttaggtatttgttcattgtttcattttcactaaggccaagtttgattttgactcttgcccctcccatcgagaacatggcttctttaattgagatggacgaaggctttattctgttcattttgagttgtgtcatttccaaactgaactgtttttctagtattgttttgtagtgatgctcattttgaatactattttcgtggtcatattggtgttgctgagctactcagccatttccttttttgtattattaaattaataataaaaaactgatttacctctacaagcatgcatgtcccgtttttattctgtaatgaaagatgcagcggaagagtatcattaatatcctagaaatataatataataaacgattacaaccttttataactataattttcttggagttacttttgaagttaagcacagtagctgtctttctgtcatgcagactgctgtactagtatatcaattgatcattctttggaggtgttaggtattcagtgaatatttagcataggaaagttgtttgattattgtcagaagtgacaaacttcatcatgctcataatttcagtatccaaac

SEQ ID NO: 1646 - DNA, 680 bp, Oryza sativa
  Intron number 1 from transcript LOC_Os11g37130.1 (locus LO C_Os11g37130) derived from phytozome v7.0 (chr-ID Chr11; p os 21456138 to 21456817 reverse strand)
ccaccgcttcctcctccgccgccgccgccgtacgggtactctcccacaaccaacagacgattcattgattgatttgattgtttggattcatttagtagtagtatctaattaccttttagttgtactccttattctttgtattactatccgtcaaaagtattcatcatatcttggatggaaatagcaactcttgtcacaagctctatacagtgcacaaattgggcggcattcaacattttttgtccttgtgctgctcaggctcagctgctgcccaccataagctcgggaaaatgcctgggatcacctggctgctcgccacttcttccttcgtttccataactaccattcctaacctcatctacaaattttctcttgggctggaattagacgtcaacacactaccatctttgtatgaaaaacaggaaagctaaagactaggaaaggaagagatcaggatttcttatacccatctaatttgtcttcgccgctataactgcccatctaccttcctgctttatatagctggatgaaggatattccctttactatatttactatgcctgtattcgtatcgtgctgttccataattctttgccaaattaggcatctcacagcctttgtgtttctttgacttcttcaatgtagagagcaaaagaacaagtcgtggaacgggtgtttat

SEQ ID NO: 1647 - DNA, 1423 bp, Oryza sativa
  Intron number 1 from transcript LOC_Os12g05370.1 (locus LO C_Os12g05370) derived from phytozome v7.0 (chr-ID Chr12; p os 2427078 to 2428500 reverse strand)
cccgccgcctcctcctccgcctccgcctctacccagtaagtcctcgattcgccttccccccgcatcgccgattcgttttccgcccgtgctactgtacgccgtcgcgtttgcgtcgaatccaagcttcgattctgcggtgttgcggcgccgcagctactccgattgtttaattgcattggggattgaattgaattgattgttcgttcgttgggtgaatccaatcacgagtggaacctgcggtttgagtggaactttcacaaccagattccgcacgttctactactatatcagtattagcttgattattgggggggaagtgagtagtggcgttgaaattgtggtcttcgtagttgcgagggcgccctcaggatgggtgaggaaaggggatctgctacccattataaaattaggattggatactttctgcttcggcacttgtcattatcactgtttagttgggggaatcttgcggatgttactttcatttggtgttctctcattcttcacgtatgcgtgaacatgcaactagtagtactactagtagtgttattcttgggggaggatttgggtatgtcacatggttcagtttgcaagtgttgaatgtgactgttgcttacactgcactatgagctactaatattagtgagaagctcagttactgagccgtgctagacaaccgctaatttgtgagcaacagtcactcaacctgttgcctaaaattagctgttgcctttagcattttctgtactgagatttgggaagtgtctgcttgcttctattcacttcctggtatcatacatatctgatcatggcaagccatagtcataaacaactgctactaaaacatcttgaaaaaacagcaccgtgcaggaaaaaaaaaagttatgtgatagattaactaggtccatgttggtgttggtccctgaggaaaaaaaaagttgcttcagtaccgaagtcttgattattgtgcttgattggagattgactatgagtcctgagatccctgaacttgcattgctactgaacagctaaggctactatatcaatcaaaaggaatacaaaattttaactgctcttgggtaaggatgggtcactgtcatcaagtgggtcaaacacttaaaccccctcatctgtgcttgatgtgctaatagcaaggttttctttttgaaagacaatgctggtactgctattgaggattagcttgattgtttgatgcatttgactgttatctggagtgagatgcttctgttatattggtgttgtttgctttcttatggtcttgtactaaataaagtagaaataatgagatgacactgtatacgatttttactaattgttcccaactccaccaagcctagattctgaactgtttgcttcatcactggcaggtgtgtagtctgtcttgcagaatacgaagagaaag

SEQ ID NO: 1648 - DNA, 621 bp, Oryza sativa
  Intron number 9 from transcript LOC_Os04g38640.1 (locus LO C_Os04g38640) derived from phytozome v7.0 (chr-ID Chr4; po s 22773389 to 22774009)
gattggtattaatacagcaattttcacacagacaggttagattatctcaacatgaaatgtattaatcaaatagcactgaattgtttcatgctgatttgcggaggtaacattagtagatgttcatgctttctctacagatgtcaagcactgcacttagcattcaaaagagaatatgtccaattagtaaaagttcatcctcaataaactaaaatgatcataacacattgcaaagcttgcctcgatccctgtacatcagttcatttcccagagtactctggttgatggcacactttgagtgactttctattttgatggcatgattagtgagtggtatcatctatcatgtttatattcggattcacagcattctttgaaattgttatttgcttgcatcctaatgggctgtaagaattgacataattgattatagttgactcaaaatcacctccttgaagctgtgcattagaccatttgtttttgttgttgatttggtagagcataaatcagatattcagatccaactatgtccaatgtaacttaaattcctatgttagtctgagattccattatttcttcaatgtcgcaggaacatctgctggtgttggttttgccatcccgtca

SEQ ID NO: 1649 - DNA, 2332 bp, Oryza sativa
  Intron number 2 from transcript LOC_Os11g35750.1 (locus LO C_Os11g35750) derived from phytozome v7.0 (chr-ID Chr11; p os 20519484 to 20521815)
acgtaaggtatgttataatcccttaagcactctgaagctttcaattcacatggatctagattgttgatagaagaactagagaatgttaagtattcttttttcaaaaaaaaaaaacttcctgtttcccctcatttacttttcccttcctttccttttgatctgtttgccacctaactctacgctttttgtttaattttgcatgtaaagttggaactgaaaatttgtacaaatttatgtgtgtttctctttatttatccacagattaagagcttgaaggaccaatactttactgaactcactgatttatgcaatgagatgagatgtttcaaaagctacagagacacatgccacctcagattccaatagatcattatgaagagatgaaaaaatttaaattattcttggagcgcgcattgcatttcctggaaattaaaaaggagaacattcagcctactatttgggaaaaaaatcccagaatacgagaggcaaattatcaatgccataagttcacaaagaaggcagcctgtgcgcaaacaagaacaacagtttcaccaatcatctacgcaaattactaactcgaacattccacagcaaccgcaggcctctccaggtgtgcagtaaattttttgcaatctttcctttggtcacttctctctgtaattttttccagttataagcatgagcagatttcactcgccgatgccatcccttttcatgccgtttgtagcttgctacttcctctggattgataatacttgtcattttggataatggtgaggtcaaagtttaaaatctttgactatgaataatttctaaaatatgattacttttaaaaaatatttcaattgttgatatttttatatatgacgacaagtactatcgaccccgaagggagtatttgataacatcgccactaatgtatctttttgtgtgctgacaaccttgacatttatgtgccatctacgtactccactactcaaacaacacattcaggttcaggtgattggcaagagtagttgtatcaaatggtaaggcatgctaaaatcactttggctctcccaagcttctaattcatcatgacttctctagagttcataataaacaagctccaaaataaagaagctgagatcatcctgatctagattaaaagaaaacgaaacaagacataaacttgagctttcttttcctcgaatatgaaggagcgtacacaatatctaaaatatcaaatatactaacactaaacactcgcaccacaaacttaataaacagcctaagcatggtgaaaactaaggcaacaactatttggcacgattttgagttttagaatagttttactcgttttccaatccccattgtccctcggttcctttttccttcctttttcttttttggtcgtttctccaccaactcctgtgttttcttgttatagaaacaaataaagttgtatcgaatttttggtacattgatgcactactagtatgacatgtagatgtgctgtactctagcagtatttaagatatagatggggaatctctatgtgcggggactggagcacatggtataaaatttcttttgcagcattttccttgatcattaaactaattaaattgaacgaatataccatgattcatttaacaaatgtcgatttatttttgaatcctatgtatgtactacctctgtcctaaaatacagcaacctaaggaccggatgtgacatatcctagtactatgagtcacatccgatcctaggttgctatattttgtgacggatggggtaattgctaatgagaaatcttatcactgtcatatttctcaacttaacgataacgaaaatactgctgctcgggcgaccggcgcaggggggggggggatcgggcgatttaaacaacgcccgatttaaacgattgaaacattttcgatctacttagtgaaacaatttcaatatacttggtggaacatcgtgcaacatttaaaaataattcaataataagctaaaaaaaattttcgtcgaaatatatccatgtgttgtcttgttttaaagatttaattacaacgaatttaatggtgcaatcgaatcatgatttggataaataatttaagagaaaacgtagtttaaagtggttttgccgacatacgtcatgctgacgtcaacgctcgatttttccccctccctatcgggcgcccgattctaagtcgttccctaaggatacataattcatcgattattttccttttctgtgttcatgtccatataagcttcgaataaatttgttgatgttatgttttatgcactggcaggtgaggaacttgaaggaccagcactttacagaact

SEQ ID NO: 1650 - DNA, 3211 bp, Oryza sativa
  Intron number 1 from transcript LOC_Os01g63354.1 (locus LO C_Os01g63354) derived from phytozome v7.0 (chr-ID Chr1; po s 36718357 to 36721567 reverse strand)
ttgcgaacgcggacgagctacccagcttcttcaaggtgagctcctttactcaatttccgatctgttgcccatatattgcgcgtctggcctcttgcttgatacgcgcccgttggtgtttgctgctgcatctaggattttgtcactttgtgttgttccctttcgtaccattaggtttggctttctggatgtgcttttgtgtctggactctggagtcgcagcctcgcaatggccgcgtgttgacaattgaccggtcctgccctgttcatagaatctgtcactggcattacaatagaataaaatcacagcctgcataaacacacatgtactgtttacttttactaacaatagaagattctaatccggaaggggaatcctgacttaaaacatgcgattatctcagcgagatcttctaattgaagggagcttttattggaactgcatgttgtggaaattaggcacagtgtgacctactacaatatatttccacatgacggtgtcacataatgcagtaccagttagaaaactgttgcctgcattcatgaaccatgatggttccatcagacactgtttttcctagatgaccgataggacctttgtttttataccttcaagtctaacaacggaaaacattctgctacatgaccgatgtctatttgctcaatgcacggcatagaaagcttcttagtcaacattgtatttgtgaaataattgatcactaaacatatctgcaaattatgttgaggtaaaacatgaaacatcgcggacaaattggaatgactcttagttaagatgccaatgacgttggtcattggatctgtataaatccagtctacatatggagtaacagtatgattttactggcagtgataagcggtgttttaaatttctttttctttgtttagttagtttcttttgtttcaattttttggtagagccttctcttgtgttgcgataaagttaccacattctgagacttccttctcttctttaatgaaatcagtggcgctctagcctctcctctttttgacaaaggactttacccacttgactagagccaccaggagtaatactgtagaaaactgcactaaacattaagagaaagctagatcagacatagaacaagaaaattatattagcaagattttctttcttgacacacccttttacaaaggtctacatattgggggttcaataagaaaagtatttacatagacagacataattgtagatccattggcagcagcttatgatatgtgtcatgtatagccaattttaacaaaccctcattacattactgatgtgagattgctttatgtaaaataattgtatccccctctttgttattgtaaataaaaactatatttctggaatctggacatggttgcatagtgtaaatcgtggttgcaatgtgttgacattatggaatatataaaaaccatcaatgatctctactcatatctttcatggataatcatactggtaattggaaccctagagttgtaacatatactatcacattgtctattttcatgtagagctggtgaaaaggctgtcacagcctcataatttagtcccagaagaatcatttttatagtcgttccagaattgatctgaaacctcgacccagaaaaagctttggtctgaagctgaaaaaccatatatgaccagcacaggtgccatagtgtggtaaaggaactcagataagtgccagtatggcgtgtttatatgtggagagaagcaggaactgcagttcacacacatgtcctgtgcttgaggttgatgtttatctagatgccaatgacagtgtaacagcctacaagcagagtggtacttaagggtgatagataataatctttggcagatcctaaatttattagctatgggttttgttgttggaaattcaagtataatattgtcattttcttgttaaaatccttgtggttctggatttttgttatgttaccaataacactccagtgggctcattttgaagtcccatttgtgcacatgccttcattactgatcgttagataaaatatctgaaggagatttttattagtttgaaatgttatataagaattgagaatgttttgggtaatgttttattggtagtatgtttacgcagtattggtagaaacaaatatttgccatggaaatcctcactaattgtttgctatccagagaattccaggactgacgaaacgttttcttgatagtgacttgattaagttgatgtttaatactcattttaactgttctgttgtctataactattgagtcattttaatttactatctttcgaagcataacttaatgtgcataggagcaagctgatgtattctttgaaaataacagcatatgacatagactaaacccagggcatagttttgctgtggtatgcaatcttgttagtaggagttcttaccgatttgaggaatataatgcgattgcatcaaaaaagaaatggttcgaagcatttatgatatcccatcagtcggaaaatcaaacgctatgatgagatactacctgttcaccagaattacttcttttctgggtggtatgtatatggtggtgtgttgctttaggaaaagtggctcttcactcttattcttttattatgaatcttgtgttctgcatgcctaaaccttatgtggtatgcaatggcaatgctagtttcataaattggatgcatgtatacctctgagacgttgcaaggatttgctcttttgtcaaagatgctcaagcagtagtcttctatcatgcagcagcattacccccgtggtgttctctatcagtaaacatatcactgcaatttcagactccacagtgaacatggataccactgagtcatgattatttcatttgtttcatctaataagggcatgaggactccgtgtaaaataagttggaaatgttcaaataaaagtggtgaacaattgtttcctatctacatggcaaattttacttctaagtactacgaaaaccctgagttaagtttgtggaatttcccccctatctcagaagtttgtcgatgtttgataactttgctttagtacttttcagtttgtttgccagattatgattatttttatttttcatgtcagctgctactgtgcattatactgcggaaaacaatttccttttcttactattttagagcttcctgtgttttcaatcttgcagaaaaggaagtacagatctcacaataacc

SEQ ID NO: 1651 - DNA, 3006 bp, Oryza sativa
  Intron number 3 from transcript LOC_Os11g46870.1 (locus LO C_Os11g46870) derived from phytozome v7.0 (chr-ID Chr11; p os 27621115 to 27624120)
caagtgcaagtgccgatttccacatagagggggtaaaatcgacaagggatgcaaacccatacttccagcgaccgtagtcgcaacaataggtcagcatttttttttctttatttccacttcttaaagtgctgtggatcctcgtttcttccgtgctttcaattctatgcattcatatataacatgccacgcactaattaagtcctaagtattattcccccgattaatatcctcaaacagaaaagaagatgatgtttgactattttgtgatatttgaggtgaaattttgaaatgacatagttttgggtagcaattccttttatataatatatacaacagggacaaatatattgaactaccataaaaagtattctacacatattcatttaataaataaataaaataaatatttttttgtaaaaataaacttttccacaaataatacttgtacaataaagtcatgcatgaatataaatatgtaacagtccagcttatacaataaacttactatacacacttctaagagcgaatataataagacgatgtaagtgggctttataagttgccttatcacatttgtacttatgtcgagtagagaggagagaagagagaagaaaaacaggttacaaatttatagccagctacaacacaagttccaataaactatgtgaaagagagatgggctaaatattaacgatgtagtatgtatatctacagctaactattgtatgaccgagctatttcacaaccacagaaaaccccataggtgttggtttcccagtaggcatctattggttgacacctttaccccaatcgtataggtgccgatttcagaaccgacacctatactattaaaataataaaaaagccacgctgacctccacaccgcgacctcgctaggccggcctccgcgccggtgcccgccacccaacactgcgctggaagatgggggaggtccctcgggagagagggggccgacgagatccgacgaccgtgccgccacctcgtcgcgccggccaccaacccacgctgtgctagaggagaagggaaggagggaggtcccgtgggagagagagggccggcgagatccaagcctcctccaccaccaccgccatagcctccacctcgtcgcgctggcctccgtggtggccgccacctcacctgcgctggccggccttctccaccgccgtgctgttaccttgcccacgccggacggccttctccaccgctgtgccgtccctggaggacgagagaaggggggagggcccctgggctgggagagggccgccgccgcgttctccgtcagccgtcaccgctcctccgtcagctgtcgccgatccactagagaaaggaaggcaaagggagaggagggaagagagagagagatatatataaggagcgatgtgggatgtggtataagataagggggcgctagctgtgggtggtcaaaaagataaggatgaggtttttttaataggtgtcggttctgtaaaaaaactaacacctatactatatgtgacggttttttctctagaaccgacacctaaaatataagtatagatgtcagttctattaaaaaaactcggcacctatagtataggtgtcggttttttaatagacctgatacctatagtgcttaaaggtgtcggttctatattttttcatcgtgcggaggtgggaaaaggctcataggtgctggttttaaatgaaccagcacctataagaccggtccttatgagggttttttagtagtgtttggtcggttatagatgatttgataattttttaagctagcagttgattatattattgtacttgctttgacaataagtccataaatttccatgtttgttttatgcatagaggcaaaatagatcattttaagaaattaaaccatcaactaatggaatattggggatgtaagggacaaaccaaaaatcagagacttattttttgaggtgaagaggggttgtgggggtggggtggggtggggggaggcaaaccgtataaagaaaatataattcagatgtaatgtagtaccttcttgacccgaaaagttgaaaacaacatttgagcgggcttaattgattgtcgaggtttcacaagtttaataaagtaatgaatataaatataaaatactctggcttatacaacaaacttatacacttttgagagcaattataataatacgatgtaatcgggctttatgagttatcgtatcgcatttgtgcttatgtggagtagaggggagaggagaggagagagaagaaaaacaagctatagatttatagccagctaaataaagcacgagctcaaataaactatgtaaagagagatgagccaaatattaatgatgtagtgtgtgtgtatagatagacacacagctagctgttgtatgaccaggctatttggtcggctgtagatgatgtaataatttttggagcttgactatattattgtactcgcatgctctctatcaacaagtcgttcacaattacataaaatctaataagtttagttacggcattgtgaaagtattttttttaaaacaaatgtacacatgtcgtcgtttatatttcaaatattactacctctgccgaaataatgtttaatattgatatgtgatccatgcaatcacaacaatttgattttgactatagttattgttttaaagtacaggtctcatatatattaaaaagtatatattaaagtctgtcattacgaatgcttttacaatagcacacttgtataaaattttttaatccatataaacgagaatttttgattgagtattcaaagtagtaccttgttgacctagaaaagtttaaaataacattttttttatttaacagattaattgatagtcgaagtttcaaaagtatagtaggatcatatcaaaaatgtcacatgcatgtattttacttgaagaagtactgatttggttcatttaattatttaatttgttacttgccagcaactgctgtcgccggaggtattctggcattcgtg

SEQ ID NO: 1652 - DNA, 4367 bp, Oryza sativa
  Intron number 2 from transcript LOC_Os04g28234.3 (locus LO C_Os04g28234) derived from phytozome v7.0 (chr-ID Chr4; po s 16515590 to 16519956)
gttgataattgtatctgaatttaaatcctcagaaggtaaacttgaattgtcttttctatttttagagctcttcttttagtacagtaaattaatgttacctgcataaatattcaatctttcattgcgtaaataattttgcgttccttttggtaacaacttggctccagtaattatgcgcactctttgacagcagtatcttgtcctaccattgtatttagtattagtatttgtttgtcctgccgcaaggaaagaaatggtcattcccttgcagagagcttaactatgaattaaatttctttcaatggccttgcaggatgtgtgtgttagatgtgtattagataggttgtatttatggttttatgtcttttggctttccatgttcctgtcttttggttttccctgtatttgtatatatatttgggctattgctctctgatgaatgttcataacatggtatcagagcaggtttagacttctcatcttcttagaattttctctctcgacttctccatgattttctttgaggattatcagcctcttcatcttgaagccatgatgttcctcttgatctagtatggtgtcgctgagaatcgtccatctctgctccccaacgtcgtcaatttcttcagaacagtgtagagggctggcggttgtcctcatcaccggctgtcgtcgcttctcgtcgctggccgccgtcgctcctcgtcgcgggcctctggccgccgtcgctcgtcgtcgcgggcctccagccaccgccgccgctcgtcgcgggcctccggccaccgtcgcccctcgtcgcgggcctccggccgccgtcacccctggtcgcgggcgcctccacctgggttgtagggcgccgtcacctgggtcgccaccttccccggcgttgcctgggtcgctcggtgcctgtttcctcgatccggatctggatcgggaggtataaaaaaaagaaaaaaagagaaaaaaaaggcttctctggctctgctactgttgtgctctgatcgcacgtggtggctctatattttgggctgaggcatttaaaaaaaaaaaacttgctgccgcttgttctgttttgctctctcgctgtcgcttcttccttcttgatgatgccgtctttatccggcactgtgtctgttcctcgttgcccagttctttttgatggtgtcaactacagtcattgggctcagcacatgagtcttcatatgcgtggtcagcgtctttgggatgttttatctggtgagctaccctgtcctccttgccctattgctccaactatgtcttcacttgcaagtcaagctattgatgacgatagagcaaaggctaaagagcagtttaatgatgccatggaaaattatcagagtcagtttgctttatacaaggcttggttggatgaggatgctcgagcttctgctcttctgagaattctgcatcctcttatgtgcctcctcttacccaggtttatagtcgtaaacctcgtgtccaggagccttctttggatgcttctccggttgctcctcctcgatacaattttcgtgatcgtaatttagttacgattcgtccagaggatcgctatggttatgttgctacagttcttgctgaacctcgttcttatcgtgatgctattgtccatcaggaatggcaacttgcgatggcagaggagcttgctgcacttgagcgtacgtgtacttgggatcttgttcccttaccttctcatgctcgtcccatcacttgtaagtggatctataagatcaagactcgctctgatggaactcttgaacgctataaggctcgccttgtggcgtgtggtttccaacaagaacatggtcgtgactatgatgaaacttttgctcctgtggctcacatgactactgttcgaacacttcttgcaatagcttctgctcgtcattggaatatatcgcaacttgatgtcaagaatgcttttctcaatggggaattgcatgaagaggtttacatgcggtcacctcaaggctattcagttccagagggtatggtttgttgtcttcgatgctctctttatggcctcaagcaggctcctcgtgcttggtttcaacggttttcctctgttgtcctagaagctggtttctcaactagtgctcatgatcccgctctctttgttcacacttcaccccgcggttgcacagttctacttctctatgtggatgatatgctaatcacgggtgaagatgcggagtttattacttttgttaaagcacgtctcggtgagcagtttcttatgactgatcttggtcctcttcgttattttctttgcattgagatttcctctactcctgagggatttcatctctctcaagccaagtatattcaggatcttttggatagggcttctctcactgatcaacgcacagttgaaactcccatggagcttaatcttcatctttctgccactgatggtgaaccgttagctgatcccactcgctatcgtcatattgtagggagtcttgtttatcttggtgtcactcgtcctgatatttcatactctgtgcacattctgagccaatttgtttctgcccccacacaaattcactatagtcatcttcttcgtgtcctccgttatcttcgtggaactatcttgcgttgccttttctttcctcgctccacatctttacaacttcagggttattctgatgctacttgggccagtgattcctccgatcgtcgatctctttctgctttttgtgtttttcttggtggttccctcattgcttggaagactaagaaacaaacatctgtttctcgttctagtgcagaggctgagttaagagctatggcccttttgacagcagaggttacttggctacgatggttacttgaggattttggtgtttccgtgacttcaccgacttctttattgtcggacaatacatgtgctattagtattgctcgtgatcctataaaacatgagcttactaagcatatttgtgtggatgcctcgtatacccgcacacaggtacatgatcaggtggttgctcttcagtacgtgccttccgagttgcagctagctgatttctttacaaaggcacaaactagagctcaacacaggttctatctctccaaactcagtgttgttgatccaccctgagtttgaggggggggtgttagatgtgtattagataggttgtatttatggttttatgtcttttggctttccatgttcctgtcttttggttttccctgtatctgtatatatatttgggctattgccctctgatgaatacaagtcgtgttcataacagtgtgcttagtagctcaccccattggccctgtcacgattatttcattgtcacatagaatcctgtacaatctttctgagcctgatgaactgctgacagagccaagagccatggtcccaaagtggtaaagttctttttgtgacatcagttgtatatatttggaactgtgtatcactcttcaagatctcttttttgttttgcagtctaaaaaaacaagtctatgaaatcagtatattgatatagaattgggaaacactgtgggacttcaatcgcttctgctattctgtagtaataataataggataagttctgtagaatattttgtgacatgccatgcctttcattagtatagtaatgataataaagatatcataagattagatgggtcaactgttaaacttggcatgccccacaggtgctccagcacgtgcacttcaatgttgcattggaatttgctcctggtagaatgcaacaattgtagaagcaccaaaggattgtagaaaggaataaaactatatcatttataccttgtggatcctctggagaggaccttccaaaatgtgcctctcgagttccaagaagtcatcagactcatccagttagaggtttgaccggatcgtttctaggattgacctatctaattcgtgcccctgtttgtggttactctgtttttcagtaacggtgtgttgcaatctcactagttgtgcgctttacaatattctcacttgttgtttctagccactggaacaatcttttcctttgtaaaattctgtttccatttcacatttctataggaattccaatgcctttgtcgcatatggtggctgtaactgttgatgctgttttagatgattcatacactatgtctgtaatattttcgtgccaactttgttatgggctaatttggtgaaatagcaatagattggtttaggctgcagggagaagatatttctttaccctattttccccaagtgactcccttaagctttttataaacaaactccacagataacttggtaataaggataccattttgcattttgttagttgcttccaatgtacctgatttgctgcccttcccatgacaggtgaagc

SEQ ID NO: 1653 - DNA, 3225 bp, Oryza sativa
  Intron number 1 from transcript LOC_Os08g06640.1 (locus LO C_Os08g06640) derived from phytozome v7.0 (chr-ID Chr8; po s 3739512 to 3742736)
ctgagttctgccaagaaaccaaccaattttgacaggtatggtccgaaatccaaattcaactcaatttcaattctttttgcctattgcttttgttcaattttaggggtttactattggtactaatctactatagtatatactgcatgatgttgatgtatgtatatgtattggtagttttttttttttgtttacatagaaatgtattggtagcttcctagtgtgttgtttgagcttgagagtggttgagaggatttttattccgataaggataattaatcaatccaacttctacatcaaagatgtatccggtcagagagaagtggttgaataatggatgagttggagattcttgggatctgagactggttattattcacttattcttctagataatccttgaaacaaaagcaagcgaaagaacatgacaaggatcaagggatggaaaggaggagaagaagcacatgcatggcgctagggccacaatctccattaccaaaagcacatttccttcctacataggagtagctttgcttcttttcatggtgttctctttttatccttttgcccctttcctcctcccctccatggaatttgtttcctccaagcaacaaagcttgcaagaaaagaagtcactggtcttgttcaatcttgcaacaagactacatcttttcctaatcagtttttactttaccatgccagactgtttccactaccctttctttccccttaattaggacctactatgatcttaatctgcacacctcaaatcaattacacaatctaattaattgtacaaattgggggtgtagttgtcattttcttgaccaatctatacatgaactgaatcaacgaagaaaggaaggatgaaaggaagaattaatccaagaaaggcagtggcatgttcttgaatcttgatcacatcagaaatccatggagaacttggattggagcaagaaagatgaagtatcttttcttttgatggttagctagctagctgctcttggatttgggcttggagctgcagctgaggtcgacggcggtgccattgggccagaagaatcggaggtcgcagcgtaggcgcgtccagtacttgaacgggacgaggccacccaccttccaccgcgtgctcgcctggccggacacggtgaacggcacgacgccgtcggcgagcgccgcctccatggcggccatgccggagctgtccagcgggatccccgacgagcgcaccacgtagcccagcggcagcgaccccttgggcgggacgtcgaacgggtcggcgcgaaggatggcgatgaccacgcggtggaacacgaggcggagctcgaagtcggagaaggtggcgcccgacctcgcgttgccgttctcggcggcgacgcccagcgacagcgccgcctccagcgccccttgctggtcgtagacgaggtcgtcgagccgcgccgaccggatggcgaggtacggcgcccgcggctgcagcagcagcaccaccaccagcacggccaccgccgcgacgagcaccaccacggcgagcaccgtgaacaccaccgccgccgtccactccagcgggcccgaccggtgcgccctccgcccccgcgggtggtgcgtcacctggtcccgcggcggctgccacgaaggctgctgttgtctggcctcctcgccgccgttgccgtaccgctggtcgggggggtaatcaccccggtgatcatggtggacgccgccgccgttcgccgcgcttaacattgtgagatgcagcgaagcttttgctgcggctgcggctgcggctgcggctgcggcggcggccgccttatgtgctcggccttgtccacgccgtggcgtggcgtggcgtgcctgcgccggaggaggacttgttggtggagaggaaggtttggaatctccactttgcacgctgatcatacgacagaggaggaagctttgcttggagggttaaagaaatgggagcaaagggagaattctgatcctgggctacctcacccatgcaccaccattgctgccatggccgccgccccttttcgcgacacacgggctagcttatgtcgcgccgcgccattgatgctgctcttcttggatgcttttctttggttgcacaagccttttttttttttttttgcagttgcagtgacactgtcagtgcctgactgatgagaggagctttgaacagaggtggcatgctaatggcattggcaattgccattgataaccactcaatggcatgattgcaaagcaccagatgcctctttttctttcttcctttcttctccctttcagttgtttaagctaagaggtgttgagtggcattagcaatgcttgccttttttagtgcttgcactagggattgtcaaaggggaagaatatgctacttgatcaacattcatctttctttaaattttgtcaaggatcccaaaggtttcacaaaaaaaatgggggaaaggcaagcatctaggcgtcagttgcgtgttctttttttagtggggaatgtttaaggtgaactgtaccttctattagatcaaaatcacgattaaagacatgtctgaatgctaattccaaatgctggcaaaatctactttgagttgagaaaaaaaaaacagctaacttactaagtaaatcatttttatttcctaaataattagttcttttacttttaagtttttttttggctgatcttaaaccttagattaggtggacctaataaaacttggttacagatggagaaattgtgcctgtgatctgtaattttgaagtgatgagctgaatttggctatggtctaatctaatgcaatcagcttctatctggcgctttaagcctatgattttgaagtgatgagctgaatctggctacggagttaggcttttactttctgtagaatttggtcatacctacaagggtaaaagtgatgtaattttttgaatggaatctgaaagtgatatcttcatgcaacagcaatgttgctacttttcatgtgccattcctatagcacatagctgatactgaaacatgctctatgcatttctttctggatttgctactatgtagtctttttcatagttccatatcacttggagcatatactgtcataccatacactactattggaagaattttaagatcagctgcacacctagtgctaatttgcagaattcatttcttttcctacaattgattgttacatcaaattatatctgacttcaatgatttgtgaatttttcagc

SEQ ID NO: 1654 - DNA, 1924 bp, Oryza sativa
  Intron number 6 from transcript LOC_Os09g27660.4 (locus LO C_Os09g27660) derived from phytozome v7.0 (chr-ID Chr9; po s 16833766 to 16835689)
ggtggaagcggccaacacggcagtccgtgcagccggtgagttctctgataattttaggtccaaactttaaatgtatgctttttctttggtaattttgggttaatttcgtgtctgcctcaacatgatttatttaattttgggttaaaattcatgtctgcctcaacaagatttggatccccttttctaaagttggtagctttggagcctttaggttgtttcttgctagcagttcctctgcaaactagttttctgtacaaaccctttcttgccggaatcaaaagaaaatttatgtggtcaaactgccgctccctgacatgccgaaccggattattttgttgaaaatcgaatcggatttaattcatactagtccgaatcggacttttaagtctgcataattcgatttgcatagcgaatactccctcatataatgactttgtgcataggtttaaacccataatcacatcctcttctcctgcagcttgagaattttttgtcatggcagtgaaaagatgcgcagaagtgccgatatctgctaggccgggaaagatgatgcggattgctattaagtcttggtcaaggttcttgcccccttacatccctgacgatgtgatcttcgacattctgttacggctgccatccaaatctcttatccgatttaagtccgtgtgtaaggcttggcacgccataatatccaacccctgtttcatcagtgctcacctcgagtgctctaagcagaagccatcgatatttatggtccctggtgtttacgagaagcagaataatggcgagaatacttccttcctgatgggcctctatcagtatcagggtggtaatataatggaacaaatccatgtacaagactttccacaaggcattggtacatggagtcgtccgatccactgcaatggcatgctcctcatttccaccatgaaccacgaaatgattgtctgcaacccatcaactagagagattgtctccctgccaaaagggagttataaccttcatgcgggcccaagggctggatttgggtttgaccctcacagcaacaagtataaggtggctagatttttctaccagagggacgatgacacatcagaattggtctgcaagtttgaagtgcttactctaggcactaatttgtggaggcaaactgaggatccgccatatccaattagtgggttaactcctgttcatgtgaaaggcgccatctactggatggttaatacgccactttgccctgatccacccaatgcatttcttaggttctgtttgactaacgagaagtttagtctgcttcagtatcctccatgtaatctaaagcctacccgtttcatagaagtggagggtgaactatgctgtgcttgcttttgcagtcaggtgagcgcgttgaagatctggacctgcaattatgcacagaaccctgaatggactcagcgctgcactgtacagattccacctgatatagttgtgaataatcctgtagcaaggcctcctatagtttttcttcatggaaaaaagctgctactgacatggaatcaggtctaccagtatgacattcaaacctgtagaatggaaaagatagcttcaggggttgaagacttcacgtgctatgatccaaggaacaataagtactgggcatatctggagaaagaagtaacggatatgcatctatttaattatgctgagagtctagttccgattagagaattttgagaagtcacttcattttttgttaaggtgagttttatcacaacttctagtgatccaagatagagctgagttgcttttcgttgtggcgagtgttgaagcatcactttaataaattggacatatgctattgtttgacggtaacaatttattgttcatttatacgcactaaccatgaaacgagtttattcttcataacttgagctcaactttacag

SEQ ID NO: 1655 - DNA, 3014 bp, Oryza sativa
  Intron number 1 from transcript LOC_Os03g18790.1 (locus LO C_Os03g18790) derived from phytozome v7.0 (chr-ID Chr3; po s 10526923 to 10529936 reverse strand)
ggtcggcgtggagctcaggtacgtgctatactgctatactatgcgctctgcaatttgttctatcttattcatatctcctttagttctcgaattcgctctcaacctttgtatctcatggattggttactctgttcttgttacgattttctgcatgctagccttttctccatttctactcttttttttctaacggcaatgttaatcgtccccatttgttcttgcgattgatcatcaaaccgatcatcgcctgaacagaagcagcgctttcagtagtacgcgaggcctaggcacggcggtggtttgattttgcaaccactgtactactgctactatcttttagtagataaaaccgtcattttgatttggtaactgaaatctgatcgtaactgtttccaaacgaaacctgtttggaacagcgaccccgttagcacttagcagtgttagatttttcttggcattccgtggagccgtgctgagtgcttccgctgttgggttcagctttcctcttttcctttgacgttcttttctcgctacattttgtttggagtcctacacatcgttggctcagcaccatgttgatagtgacgcccaatgtttgttaaacaaagtaccagtacttgtaaattcagccgcccaccacaggagggaaaaatccttgcatatggtgacatttgctacaagtaacatggctgacaacccaaaccaagttgtgtttagcttttactagttggtagtagtagtctttgtgctttcttctagatggttcagactcttcagagttttttttttctcttttttggaatcataaccaaaagaacatgccttggatgcctcttgaatcttgaattcttgatgagtcgagtaaactagaggctcctatgtttcctgtagcagtagcgtattgttcagaacattactgccactacgcactgtgatctgcccggtttccacgtagtatgtttcgccgtggtcctatgcagaaataaaatccaatttactgaggtgcacccaacacagtaccactaccatctcagcaatcgagaatcgttttgcatcatatccgtttctagattgacccacaatgatttctagtcatggtccttgcatccacattccacaaaggtgttgcagatgaaacatctggttatctcacgatcacagacaaaccgcacaaccctcttcaatacattggagcaatcagtggggtcaacttcttctcttccaattacatggattacacgcacaaaaccgcgtatgcgcccattacgttaaaaaaaacatggaccaacgataaattttatttgaaaatacaccaacgtgtggtaatattcagaaacaccagaatttaaaccctattaagtgaagtcatgcacctatggcttaactatctcaccacatagttttgtgcgatcaacttttggttcctctcgatatttgtcttagagtgaacttaaaaaacaaaactcggtttgtttagcatccaagatacagaactccaaattttacaattcactctattataatttattttaatgaaccccatattttagagcaaaatattttgcaagaccaatacaagcctagatgttacatttaacaaatatatttgtgcataatactcggaaagaataacataagagttatcaatagctctggatgaaatacctagacactataaactaatatttgaaacaccttactggagaaatgcctgaatagaaaacatgttaaaataaagatatatgaatagacacgcgtatgcaaaacatattattaaagaaacgcaggaaactatatgaatgattatttgatggtgtatagaaaaaacatgggaatgttaagtattaaatcaacagtaaataaaattttgagggctaattcgaaatacaggataaaaacacacacatcaatagaggaaatgtaggactatgataggatcaacatggaaacaaaggaattttatagggctggttgtttggaacagagggttgtcttgaacatatgatttagcttctatcctatgctagctagaggttgcggtgaattcatgcgttttcatggtaatgctataatatccctccataattcgtttgagcaattccttctacgtgaacagtggcagatccaaaggatcattaatcccacaaaaatcatgtgaaaacccttcgttccaaaggaccaccagatggttttaatccatacaatctagggtcaagaaaaagtaaaacatatcttccaatcgtgcttcgtttctatcgtacgcatagtaaaaaaaataagtttaaggtggatgttaattttcttagaattctatttaaatcatggtcacaagaaatatttctatgtctttcctatgagtttttaatggttgaactgtactagttcctataggattcctgttcttacttttttcccctccatttttccaatcaatcaaagaagccctaagtaaaaaagagagaatttgtgcctttctggtcatagaattactactccttttagataatcaaatttattacacctagccattaaacaagtaggtcaaccatgtttgaccttgtggcagacgtaagtacgagtagtactccctccacctctaaatatttaacactattaattttttaaaatatgtttgttgttcgtcttattaaaaacttttgtgaaatatgtaaaactatatgtatatataaatactttaacaatgaatcaaatgatagaaaaaaataaaaattacttaaattttttaaataagacgaacagttaaatatattttaaaaaaaagttaacgacgtaaaattttagagacgaagggagtattaattaatcctgtttcaaaagtccgtcaaagcaatggtcagtcagaatagacgagcacagatttggtcattctggttgtgctgcactgtgttgacattttttgcactcttctgacttctctactgacccgaagaaactgccacgtatccaaactctttgcagttgcaggcgctagttcttagcgcgcgcaaaccaca

SEQ ID NO: 1656 - DNA, 5960 bp, Oryza sativa
  Intron number 1 from transcript LOC_Os06g28194.4 (locus LO C_Os06g28194) derived from phytozome v7.0 (chr-ID Chr6; po s 16010984 to 16016943)
acgcctccatcgtaaagcacaaactcgtattattttttttttcgcctgctatttcaccggtaacagaggtagctcccgaactggcttggatctaaatattctattctcgtggaataggataggaaactttcctttgctgtcgattgtaggatccaagataagaagcgtaccacacggggtgaatggtagaaacataaaaacttttagcgaaaataaaagttaccctcgtaatcgattgagatctcaacgtagtcagtctgaccgaccaccatgtatacaccggtctgaccgcccctatgctgccggtctgaccggtgatgttctgccggttggaccgccgcatccctgtttgtcacctgctcgccgctgctggttagactgccgccttctcgttggttagaccgcccgtagtacttcggtcaaaccatcaggatccagaaaaatacgtatcgacaaaactcttgaaagtagcttaactttattgcatcaatatatctactattataaaaattgaagatgtttccgccaaaattttagtacgtcatctgtgtttgagttggttttctaatatttatctttatctctaatctatctttatacctagtaaaaaaagtaaggattcctagttaaaaaagtaaggattccgtgtatttgattccgtacgtcgtccatacgtgtctaatccattgccacgcgcctccagccaccgccgcacaacgcgggccgaaccctgacgccgcagccacgtcgatctatctccccatgccgccatgcattttctcctctaactaattgcaaaaaacaattcttcaatcctccctcattctttccccatgatttcccctttcaaattggcttttcaattcactagatttaatcttcatttaatgatagtgaatgatggctgaccggtgatcttccctcagctgtttttatccctagttttgtggattcgctccgattttgggaaaaactgaaagaagagatcaagtagatcaaaagcccctcaatcaattttgggagatcgagaaagataatagatttgatagggatgattggctttagcattgtacgggcacagaactgccttctggaagttaagagaggcatgcaaagcaaagagaggggtagtaggcaacgctttttcaattataatgtatagcaatactgatgtttcaatttattcctgcgcacttaatagttgttgtatcactggaaaaaacgcctttacccgttacaatgcacgagcattttttctagtgtatttacaaagtgcatctaaagcacttctctctcaactctcgaactaaaattgaaacctcaaagcaaaccctaacttttctctcccaaaaagtcaatcccttctagccttaaccccttatctatttatacccacaactggttgcccctagccacgaatccaactagaactagaactcctagtcacgtagaaaacctatcaaacctgggaaacaacatccccatacaactcccaacttcccaaacttagacttcaatccaaaattttgactccactttccatacacacgcaacaccatgtgtatgccatatgaaacctttatctatgcgtgtattgttctctagcctaagcatcccgcgtgatatccttgaccgtctagatcttaacttcttccaagcctagtcccgatccatcaccagctatacacccatggcctcaagcaacacctgcacatgaacaacaaacaaaaaactccataccgagtacacgttcacaccaacttgactcacatcagcacacaatagtatcacatacggatagaaatcatctagaagttataaacatgaagcaatctagaaattcccagaaaacaacctgaaaccggctcccacctagagtttgccggtctgaccgcccggacatctccagtccaaccggcggcacccacttagtcggaccagcaacccagtgccgaccaccacactgttcaccgtttgaaacacttcactgcatttttcacaaacgcttacctttaacaattgttcatcacacaaattaagtcatcacatgattctacatcgatttcacaggaaaacgaaggtaagaatccatccacttcgagctcttttttcaattccttcgcgtaagtgataagatcatcaattgtaagcagctacgatcggtcaagaacaaagatgcagagcacaccggaaatctaaaaccttccctcgtgctggcagctcagttctccccgccgactgctcgattcttttcagcgacatccggcatatattgcatgtacgaccactattagtatctcctaaccagcagtccggatcacatatcctaaccgccaacagtggcccatatgctcctcctttcatcatgtaaccaaggcgatgccaccgtcaccccgctattttcactgaaccaccaccagactacccgttgtcatagttatccctctgaatttagagattttttaaggtgcttggaatataggagagccattaatcacttactattccgtccataaaaaaatctacttctagggatgaactggataagcatttgtccagattcatcctgaagttttttttgtcggagggtgtataatctaacgatctaaaataaaataaaaggtagaaatagaaagatattttaaatgtgagccaggtactaactttagtggtttggtgggaggcttagataagtaatttcctcccaaaatcaattcaaaaggaaaaagataaaaactgttacgtttttctattattagaaaaaatgctcgtgcgttacaacgggtaaatgctattttaattttattgtttttatacggtttagctagggtaaaatttattgtgcgaattcgtttggatattttttttagaaaatcataagctgcaattatgagtccgtatttcatctcaagttagtatgcgagtttttttaaagagatttcttgtatgattctatatgaaagttgttctaaaatatcagattaatccattttttaagtttgtaataattaaaacttaattaatcacacattattatcacatcgttttacgtaaaacacttaatcttcaagagtaattcatctataagagtaattcatccgtgaagatttcaatttacgtcatgacttaccaaatcttttttttcttttagcggggaaacatgacttaccaaatctaacataagttgatttccagaaccgatctagtaacgggtatcacccaattgcttgtattcaccgatgataattacgaagattctgcagatgaatacagttcttgtatttatatttttattattataccccgatataggaatacccgatacatgaacaaagagaagtttagagatattatattggacgtgtctacgacaaggctgtacgctggattgtcaaaatcagcgacctcaatctcatatccagttgctactagtacacccaaaagtatatgtattttttttcttcttatagaattttctcttaaattacttattcgatttacaatccgattacatcattgtgtacataacaattaaatctttataacaagatgtcacatgattatattttttgtaaaaaaatataagttacttttataatatatataaattacttttagatttcattaaattacttcttagtcataaaagtaaatacagtaaaacctgaaagtaatttatatatattataaaagtatgaaaacgaatgcaaagtaacttgttacggcattaaaagtaaatctattgtgggtttagaaacataagtctatttggaaattaaccccacaatggatttacttctaatgttgtgacaagttactttcttttttttttacgttatttgtataatatatgtaaattacttttacgctttattcaatttactttgatatgtctaagatgtaatttaatgaaatctaacaataatttagatataatctaaaagtaatttatattttttttcatcaaaatataaacatgtgagatcttgttataaagatttaattgttacgaacacaacagtataatccgatcatagattggatgagtaagttaagagaaaattttatttgaaatatagatggtaggaatatattttatatagacaagtactatagattaacacatattcggacaacatctcatggcgtcgctcattagcaccagatgcctcttgattttgattttgcaatattatatgtattagtataaaaaatacaccaacaacaaaatgggtattacgggaaacaacagagtagttgcagcaaccagaccatgctgtgcaatgcaagttgcgaagcaggaataattatcgtggcaaataattactaaattacccatatttcttattttctacttttagtttatccttaaaaaaaacaacggtcaaaagttgtgatactttccaagcatcataaaaaggcctcctaaatttgggaacaccttatttccgtgcccaaacctcccacccctgctcccccaaccccaaaaccttaacctgtaggtcttctatcggagtttgtggctcaccaaaatttgtcaaagatgaatacaaagcacgaatagttggatatttggattagaaattcatgtcatgaatgtgcctctaaaatatgtcgagctatacatagcattttccaatacttaatatgattgtaaaaagttacgggaactgatacaattaatacaatctgaaaagttaaaactggcatttaattatgaatcattataattaaaaacctacataggcttgaccatgttgaaaaatattacattctggtcaaagaatgcgcatgattttttttctgcaaaagataattgaaaaaaaatctgtactatatacttgcaaaaatactatactgttttgcatattgaagaatcaaacgtatgtttatgccgaattgtcggtccactgaaatcagtacatgcggcttgctatacgtgggccaagtaatgggccatcacaatccaaaaacgttgaaagatgctcgcagacacagggaaatgttgaaagaagtacaagaggaatatatcctccgtaattacattaatttttttctattgcacgataaaaactgttaccaccaatggtttcccaaatgcttagttaaaagaaaagaaggtaggccttgaaagaattttcacaatatattatatctattacattttgcaaacttgttcttatattaattaagttgatgataaaatattttaaaagttcggctaaatcttatataaaaaaaggaaaaacaaaacaggattttataagtagggttatttaagttattatttactgagtaagttgatatttctcgtaaaggtaggctaacaatgattgcatctgagtaagttgatatttctcgtaaaggtaggctaacaatgattgcatcggaaaaaagagtaaatttcacaaaactacatatactttagccaaatttttaaaaaactacatatttaatgtgacgtttcacaaaaatacacattttgcactaaatttattatagaactacagatttaaggtgaagtatcgtaaaactacagatttagtaacaaagttatcacaaaactacatattttagagtttaaatctttagtactagtgttatgtttgagttataaacatctaagttttgcgaataaattaacaccaaacttgtagttttatgattttttttttgctactaaatgtgtagttttgcgatattataccttaaatttgtagttttgtgagaaatttagtgttaaatctgtagttttgtgatacatcactttaaatctgtagttttatgataatttgaccaaagtatatatagttttgtgaaatttactctaaaaaaaataccaacgcatgttaaagtggttttggccaacgcatgttaaagtggtttttgtttcgccggtctagttgattcgagttttgttggaagcacattctaagtgaagattattactgctgctgtag

SEQ ID NO: 1657 - DNA, 3863 bp, Oryza sativa
  Intron number 1 from transcript LOC_Os01g73640.1 (locus LO C_Os01g73640) derived from phytozome v7.0 (chr-ID Chr1; po s 42655419 to 42659281)
tcgcgttggtcgttcgtcgcgctcccgttccggaggtaatcctacccacctctattttttttttatttcggtcgatctgccgtgcggcggccgaggcggttgcgatagggatagggcgattctccgatcatgggggtggcaggccggagatgaggtcgccggtcacgcgcgcacccaccagtagcacggcaggctgagcgctaggcgccgagctcgagcaagactgcgcctatctaggctcgagttgggtatgttggggtcggtcggattcggctcgtccgagcttttctcgagctgtttttttttttttgggatttgctattaatcactagtgtgaaaaattttgggtttacactcaaatttctgtccacttgatctgtctcaagatctttgctgcatttgcgggttcagtccgtgtttgggccgcgcccgcttcgtagttttcgtctcaatcggcgcgtctattccttttttttttccttcttgatacgcggattctccaaacgatagctccgccggagaatctcgtcggcgatcggcaatgtctcgtggcggcgggctgtggcgacgccttggcgcttggtgagttggccgcccgtgtgtgtgtcacaagtcacaaccttgaatgaagttatcttccttggctgccggtgaggtcaagtggcaatggcatagacgccggcagccggcgagaaagccacggcgttctaggggtagttgacgaggtggtcggtttgctgctgtggctggcggcaaggcacccacgccatttgcagcggcaaccagtgaggcaaccatggaaacttccatggtaagtcacgttctttgccccccctgttgttttgctcttgttgacgaccatgagagcctggtagatctaatgattgtgtttttctccccctctaatctgttgctggggatggagttagaaggtttgtgatagctagctggataaaatgatttgtgtattctcctcagatctgcttctcagaagaatggatttgtggaggttgagagagtgtcagcagactagcatttcattttgcaattaccagaccactagatttctgatgtgaggaagtatcattatgtgaacggcaaagcattttgttgctgccccttttttatctttatgtcaaaaaaatctagtggaattgggcagcatacatgatcctaaacattagaacgttttgcatgttgaaataaatttactatcttgatttagatagggtgataatttttgggatcagttttctatacatacctttgtgtccctatattttttttcttaaaaaatatttgtttctataaggtttattttcttggaatgtcttgcctcactacaagaaacagaatgtttccaagatcaagcctttcatgcagcacttgcctgcaactaggactgtagtaacaagttactccctccattcttatttagttgttgatttgagctaaaatacactgaccaaagtagcacttaatttttagtattgtgacatgattacctctaattactctccctgctaaaatacacgttttgcatttgtgatactataagcacttgagcatggtttatttgacaaattaattctttgaactgcattctcccgatggttgtcatgttcatcgaaatttgttcagttcccaaacaaaagctttgttacatctaaactttctgttttgcttttgctgtttgccttctagcatttgtttgttctatatacgagcacttgaaacaactagctctgttagaatgttttgcagctaaaactagttaaaactagttctcgttttgttcggggaaagggcgaggggttgaggtttgacaatttctcccccttcgtagcttccttaatatagttagtattgttttctacgcatctaccaagaacaagaatacctagttttgtaagcaaatttgaattaaagttagataaggttatgttctgtttttgttattcattctccctttttatcttcctttgttaagagtcgagtgcacctgcatttacagaggttttgattgttgacattgtagtagttttgtggattgatttgttttgtttgaacaaaattagattgttttcactgaaacatgattagcaaaaacttgtttattattagagatgtgtacttcttctaatagtactttgtagcagcagaagtaggggatcaagttagtttaaacctaaaatttgttctgttaaatatttcattaacagtagaaatgtagaaatttgtgttctgtgatccaaacatggaattgttttgttatttggttctagttttacctaatgcagtggatgaagaaacatattgttttttttaaaaaaagttgcttagttttgtcagccactaaaattgcttagttctgtcagctcttaatctgaatttgatgagatcaatgattctatataatccatatacctaatttagcactgagcatgactacatgattactcttgttagcaaatttcagtcacgtggcataattttggggctgtttgatagccctatggaatcggcatctatgaaatgacacacatccaaaatttctgccaacagttcattttgtgaacaaattagaagaaaaactatagtgaaagggaacttgcagtgggggatgaagcacaaaacaaaccattttggtatcccagatcacagcacaatagcagtcctactcaatcaaaagcatcttccaatcttgtaatgtgcattttgtgttctctcttatgtttcctgtgaatcagtcaccaatgatgcatatgcaagcgcctcaagcatgctcaaaacatcattagtatcatccattagtattgaccagatagtccttgctttgcttctagctagttgacagtgcatgcatatcattgagagaacaaaatctgcttgtcttctattatctatcagcgttgatcagcaacaaatcctttgttgttacagtacctagtatatacctgttggtactgtcttttgctagtttatcttactactagttcaaatcattttgcaatccattcagtccatccaagtctattgcatccttcaatttgtcgaagttatgtcaatccatctcttcatcgtcttttctacatcaccaattccctgtcagagttggctttcatcatcaccagctcccagtcggagctagccttcattgtcacttcatcatctccacgtcggagcttctcgtcatcatcatcatcatcatcaatcagtgaaggtccgaagaacaatttgtgaagggccttcatcaacatcaatatctcatcatcagtcaaaggaccgaagaatagtttgtgaaggttcattgtcttcatcatcaacaacatctctgaatcaatgaagagccgaagaacggttcgtgaaggcttcaaggtaccgagggccgaagaacagtttgtgaaggttccgaggtccacttcattgaggaggggatacatcttttcttcttcatcatccaagaattggctcacttcgacgacatcatcaagactttggagataggctaatatttagtttgtgttctcttgtttagttttcactccaaatgcaatgttattgtatacacattacatttgagtgggggtgttaagaatatatgtattagtgtgtttgtgttaaggggtatttctatctttttgcgttgtactcttctcaacatattagcccttagggccaactcaatggatgaatagttcaatccccaaatttctctcctctctcaagaattcacaagacaatcccttttctttagaaaataaagtcggaaattttaagctacgcgggaagcctctggcagtttaggcccctctcattgtcgataaactaatattaatggacacttatatttattttgtagg

SEQ ID NO: 1658 - DNA, 4693 bp, Oryza sativa
  Intron number 2 from transcript LOC_Os01g38900.1 (locus LO C_Os01g38900) derived from phytozome v7.0 (chr-ID Chr1; po s 21839761 to 21844453 reverse strand)
ccaaaaccgaaaggtactactacgcgcgtacgcgcgcccgccctttctatgcttgtctaatggcctctttttttttaaaaaaaaaactgccacaagtttttttttaatctaacttatagtataattgtaatataatttcactgtacctataatataatataatataacttgcatataagtattaaaataatatatttaactttatatctaacttatatagagattacaatgtggttacagtacaataacaacattttaattacaatgtaactatagtgtaattacattgtagttacactacaactataatatatatatatagttacatttgaaagtttttttaccaaaaatacttgcgacaattttttagcaattcttttttttaaacgcagtacaaacacataagctcgatcataacacgcgcataatcactcctataaacacacccatatgcaataacggagccaaaaaattctcaaatgtagggctcaatctatccatttattctatactaaaagtccattaaatttactacaaacactcataaatcactatgtgacgctcttacaaacggtcctacgccgccacgagacgctctaataaattagagaaaaccttataaatttcgagaaaaaaaaagaaaacccttgatttttatttaaatgaatgaacccattattttaaagcattagattacatttattaaaaaaatgcatcccacctaacctctccggaataaaaaaaaatcccatgtgatagtatgtataaatacgtaactacttactactcacggaaaaaacaacaaaaaaaatacgtgattacgattgaaaaaaagaagtattagtcctttcacctaattgctacgagagaaacatattcatacgcacttcaacaaaaaaaaaaactgaaaaagaatctcacgtgtacatataaatatgtactactattcacctaattgagaaaaaaacaaaaaaaaaatctcccgtgcacgtaaatagtacacaccgtcctaccctcctcaaatctttatacgtacaagaaaacatccaccgtataaaagtataaacttatctaaattagttgtatataggaaaagtattacaactacatttatattaactatcttataattatactgtctttctctcttttttaataattaatagtggtaactatactaatttatgaaccttggcactcctctttcccgtagaaaatttatagatatattaattatattttgattaaacaaatatcacatgaaaccaaattgtatcctcttcatgttattctcatccaaatagtcttataagtagtaaaaaaaaagtaaatttgacaacataggttattctatcattcgttaccccacaaacatttataactaatataactaatacaagagaaatatcacaacatgtattagctcatatgtgtctgaaggattagtgctcgagcaaatacttttttcacgtggttctcgccactaagtctgcagtattagattttttaagtggtagattgtaattaatacaagtaatgtgataatgtgattgaataaagtgccaaatttcccttaaaatcatatcaactgctatgttttgatttagaaaatactagtatgtttagtatcttattctagccctttaatttatatgttgtccaaatagctataaacaagttgtagattatgcaatcatacatatatttcctcagagatatacatgactgagttataataattgaatagtaatagtccatgctaacaaatatttcgaaacgaggttgtatttgacgacatatatcattccatcacatatatttccccacaaaatccatgaacatagctaagttagatctatagcatacagaagaaatatcaatacccacatcgactcatttgttcctgagagattgttggttgagcgaatattgttccacatagttctcggtaccatctaggctgattgattatttaggcaaattattggggatgactcccggtcgggcgcccgatcgggaaggggtaaaatcgggcgctgacgtcagcgttcgatttacgtgcaaaattattttaaactgatttatctcttaaattatttatccaaatcatgatctgattgcaccattaaattcgttgcaattaaatcttcaaaacaagaccacacatggatatattctgacaaaaattttttttagcttattattgacttatttttaaatgttgcatgatgttccaccagatatatcggaattgtttcactaagtagataaaaaatgtttcactcgtttaaatcgggtgttgtttcaccttatataaaaacaatgtttcagcaaatagcgaaagaatgtttcagttcactgcaacattagatctatacatatacatagtgaaacattgtgagtacactagatgaaacatttttcggtagaagaaaaaataaaccaaattcctttaatagaggtttccaaaatatgtaggtttttttgttgcaatggaatgtttcgttcatagcaacattagatctatatatagtgaaacattgtgagtacaataggtgaaacattttgggtggaacaaaaaatgaaccaaattctcttaatagagagtttccaaaatatgtgggttttttgttgtaaaagagtattttaattcactgcaacattagatctataaatagtgaaacattataaatacactaggtgaaacatcttttatagaaaaaaggggagcagaagtgggtaggcccaagtaagcacgtgggggagggggcgcggggggagcgcccgatccggctccccctgcgccgggcgaccggcaaagagcatttccgaaattattgggcaatatggttgaataaatttaagtaccgtccgtacacttttaactcttttactcttttaattagacttttctttatttgggccgttggggtctattaggctcatccacgctaatgaattaatggcttattttcattccgttaatgatcaagtagtttaaaccaatatgaggccttcatccaggtgaccctatgtccccttcttcgttgacaaaccttatggtattatattcatcctttgagttcttcaatttgtgatctacatataaaaactacaatttgtaagagctaaaagggtgaaaacacgtctcaaaaaaatgtttcaatgtacatggatgaatataacatactatataaatatataaatgtaggatcgaaacacaagaactaagccaaccagaggagggtgaatggtaggtatacccaaaaaccgaaaacttttagcggaaataaaagttaccctcaaattcgacggatcgtggtctaaccgaagttgtcctgtcagtctgatcgcctggttgccatcggtttgaccgagattagatctccggtctgaccgccgagatcagctgccgctcgctgtcgccgccgccagtctgaccgcccgtatgccgccggtctgaccgccagtgagtcgtcggttagaccgctgaaacccggtgaaacacaaatcgaagaactcttaaagtagatgacaactttattgattctctctgtgtttacaaagtgcaacaacagcactccttacaaaatctcgactaaactcgaaaccctaactaaactagcaactcaattgctcttaaaagcgataccaggaagcctcacgctccccctctatttatacatgaggtaggcagcctaaagccacgaaccaaactcatactagaagtcctaatccccataggaaaccctctagtacaagaaacaaactttatataaccaatcataccaaatttggactccttccaaattcgactccacatcccatacgcacacaatacctccatcgtatgccatatggaatcttcaccaaccacgtgcatcaactctagcctaagtatcccgcatgatatctgaccaccacggacatcgtcttaccaccaagccgattcccggtccatcaccgcaaatactctctcgaggcatcgagtcacctacacatgaaacaaacaaagaaaccatattccgagaccaagctatccccaacttgactcattgttagcaaacaacagtattacatacgtatagtatccatctagaagccataaccatgaaacaatcacggatatccaaagaaacaacccgaaaccgaaaccgacacagtgtcggccggtcagaccgcgggccggcctgtctgaccgctcaacacaagccggtctgaccagcaaccgcggcctggtctgaccggtcccgacaaaacaacaaaccctgttcaaattatatccaaaatcactttgacagtattctccaaatatcaaaaccaataatcacagatgccaattgttcatcacagaataagaaccaaaacacacattgatcttacaataaattacttcccccattttatattataggtcattttgactattattctagtcaaatttctttagatttgaacaaatttatagaaaaattaatagaaaaacatttacaacaaataatatatttgttttgtagtgaaaatattactatatttattttataaaactgggaaaacttgactgggaaaaaagttaaaattgcttgtaatataaaatagagagggtgattaatttgcacctacatgctataattctatcacattgcttgcatttgcaggttcattgagcgcagggaagatcgtcggaatcgtc

SEQ ID NO: 1659 - DNA, 3409 bp, Oryza sativa
  Intron number 15 from transcript LOC_Os05g01060.2 (locus L OC_Os05g01060) derived from phytozome v7.0 (chr-ID Chr5; p os 75517 to 78925 reverse strand)
accggaaaagaaaggttaatcccctctgtcttgcgctgatcacttcaatgtggcagcttttatctctcgcacttttggaatcaatagcttgacctgtattttctttcacttctcagaatcagataaagagcaccactccaacttgcttttcctgcacttatgtgacttcctgttatctatctcatatatttagtaaattggaagcaaatgtgtgacacacgatattcccactctgaaaaccaaacgagcggatctttactgccatttgcaatagtaagaagtgcaattgcagtgcacttatataggacatgtcctttattggttacaaaattaacacttagcatggttagggttggcttccctatccattagtggattagctaggtgcccaggtttaactctttgctgatttgaatgattgcttattgttactttcagtaggatgctggaatcatttgatttgatctgtggccttgtacttttctgtattatagggggagatcgtgaaggtttatgccaatgaacaaaaaaagattacttgtggtgagtttgctgacatgatatttgttttcttttagtgggcagcttaaatggtttgtatcagatacattttttttgttcaaaagatgatgaattactttatcactgtgcctccttgaaagaattctaggacaattttagttgcatgatggttgtttctagctgcaacatagcaacaaaacaaccaccatcctaatagagaagtggaaggtattttcttttggtatatttctaattaatattacatgaataatcatcatttatgcagatcctgaaacaaaggagctcatcaagaaaattctttcaattgggcatgtatcctatgaagttctgctgcctgtatgttatatttcctttttatattgatatgtcaatcattctcacgacacttcttttgttgtcatataaccattggactatcaatcttgcaggttaggtttctagatatgtgggaaccagctgtattggcaataaagagggaaggttacagcattaagtgtaatggccagcgtggtgttgttattacagaaaaattccagcaagccactgctgtatgtcctagaaatcattgtctttgaatttactgttctgaatgtatgccagttagaaaaagggtgcctttataaatttgtgatatatcttttaggtttgtttcgacattgaggttagtaggttacgaataattgtatatggtgcaattgctttagaaattttggtgtttggcttactgcttcctttccgaaattccgatctaggttgtttagttgtttttgcatggaagaaaggaattagtgtttgagaaacaaaataaaagttgtctaaccttaatctgatttctcagacaaactacaatgtacaatttccacaacagtttaaatataggcaaaccatagagaaccaccgctgcaaactgacccttaaactttcattaacagcatctttataaatgattagctgcatcatatttgcatcggcattttatattgaaaaggcacttccacaatggtagtcttagtacgttttgcatgtatggtaagaatcactgtcaaaaactgcagcttgaagctgtaagcagtaaaatttacactttctgtgaccataggtagcaagcattattcgttttaaactttctgggttctctaatgttccaatatagccaattctgttgaacagaattttctgtttccattatctgcacataatcttttttctaattttccagatcaatatcccatatgggcgtcctactgaattttctatattggctgctgatggtgctgaatacaatctcaagcctgcagagaatgcgccgtgagtttcatactaagccacatctgtgttagtagtatatgtttgtttttttatagggtgaatagctaatttagtctcttaagttttaccgaaggctcaatttggtccttcacatttcattttgtccacatagctcctctaaatatttgttttggcttgaaatcatccttgggcccacttaatatgcccttaatatgccatatggctatttctagttaatatttctattagaaaatgtcccttttgcccttaatttgtatacaactatatactagaaaatagaaaaccaagatgaataaacaacattgcagatgtacttcccattatttcaacatgtgcacatggaacttaagcaattgctatcgtatatatactttctagtacataatttattttcgttttacataatttattatgcttatctaaaagaaaaatcaagcatgcaatttttctattatatatgtgaatgataggggtataagtgtcatttatcaagagagttgttggttcaaggctaagtttgaactaaaatgaaaacttgaaggactaatacggatagattgaaacatcaaggactaaactgagcctcagatgaaacttgaaggaccactttggctattcacccttttttatacatcgagctgcccttggtagttgttatatcttgccctttattttgcacctgcacctgataggactaaaagacaccaggattagcttgttgttccgtcccaatgattacagaccccacaacttaaaatcagctttgcactcaacaatttgttcttggtggtcattatgtcctgttttactgtgactgcatttgaccccaattatttgtgccttcatgacaaaatgttgtgtatttgaattttccagatcacgagataccattgttctaatcttgaggctgttcagaatgaaggtataagctcatttatctcgttgaactgtcaagcatgacatgtttggttgtttcttgtattagtgacactgtattagtgatatcttggattgtcttttgatttgtgtctgctatgcggaagtgcacactctgttagttaatcacggagcatgggattctcaaggattgatggttagtttacaatcccaagtttgttggagtgggaagtgcctagtaagggccgaccagaaaccaccacctgcaacctagccataacagtggtacatgctcatgttccacattttttatgttgagggtagggtatcatttgtggctgctgcagataactggcttttagctgcaccgcattccacataatagtcgcatgagatgatacctagaacaagtgtattttgctgcatatataactgaaaattaccaaaaacaaggtggtggtttatttgatatgacagcatgacacacctattgctattggtcgatatcaagtctgagacttttaaggggattgggaaattcactttggttttgcatctcttctatggagagattaataatgtgctgtcgttataataaaataggaaatgcgggtgttttgcaggcagttgagaagagtaaaggaagaaggaagggcat

SEQ ID NO: 1660 - DNA, 2172 bp, Oryza sativa
  Intron number 1 from transcript LOC_Os08g25080.1 (locus LO C_Os08g25080) derived from phytozome v7.0 (chr-ID Chr8; po s 15224959 to 15227130)
aggagaaggccacgaaacggcggcggtacgtgccggtgaggactctcgatttgattcttgggatttgtgctttctcggtatattccttgggccatcgagggttcgatttggtgtccggattggatctttgcttgcttgtgtaggtcctggcagcttagatgattggataattctggatcttggttgatgcgagctcttgtggaatattaattgaattgacgcttttgaattgacggtttgaaaagaattagggttcgtatgtttgaaaaacgattatgaacatcaggtccccaaatatgttggagaattgtattttggctaactcaaggaaaataattgtttgttaggagtctagtaactgtacaatttgtagcgttttggtgtaattaggttagtgcttaggatatccctggttataactatagattgtttcattacgtacagtaatttcgaactagttggtgattagtgcagtaagcattatggtgggggtgctatcaaacaggatagctaatgttcttggttaatgagaacagatctgggctgcaccctcaaggctgcaactataattgggactattcatagtactatcgttgacataattcttcatgatttccagttgttccttttacactacagtccgatgaagtgtatgcgatgcattgaagtgcgcgggacttaattacagcagcaagaaactcagcattaaactatctaagtaacaagtaaactactaaactactgacatcagctcatgaaacaaagatccaaaaacagcagtataaattgaaaatattctatttacggtaaaaatccataagcacttattgtaaatttcatagatactgtaaattttggaatttttatgtgaatttcaaaatagactaacataatcatggaaagaactgtaaaactacaaattatttgttagataaattacagcgtaaatccatcatatatacaatgtaatccaaccaagagggaccagtataagtctagaagaactccggttaccaattatttccacaatcttgtccattcaactttatcactgcttaataatgaccatattaaatatttattcatctcagtgggaaagctggtggattatcataggctcatagcatataattggaaaaattggtagagtatcatagatcctgatagcataactggtgaataggtcctgatcatgcacactgctttctcatggtctagactcctcatggttagatagatggtcatgctcctcccttgtggacggtggggcagcagccagcaggcagaggcatgcagctcaacaaaagggttgcagacttggcaatcaaaacaattgtagcacacatgcacggtaaatcagcacgaatctaaagaaaatcccaagggacaacaaaggccttgtttagttcccaaaaacttctcccaaaaacctcacatcgaatctttggacacatatatggagcattaaatatagataaaaagaaaaactaattgcacagtttgcatgtaaattgcgagacgaaccttttgagcttaattaggccatgattagccataagtgctacagtaacccacatgtgctaatgacggattaattaggctcaaaagattcgtctcgcggttttcaggtgagttatgaaattagttttttcattcgtgtccgaaaaccccttctgacatccggttgtgacacccaaaaattttcatttcaccaactaaacaggccaaaactactgcaattaagctatatctgtgtcgacacgaatatggcaaaccactttaattaatgggctgcgggctgccactgagtgaaaagaagtggaacagtttaccatccttctgaataggtgttgcatcaggtttagtcttggatgttcatttgtatacttgcaggcttacttcttaaaacttacaacagtcgtttgctagttttttcattctattgtattctagtgccaatattactaagttcactatattctagtactcatcatgaaaagctcttggattctataggctcactcgtgttcgtgtgctgaaatttcctcataagttggttcatttttgttgagaacaaatctacttttttgaggaatagtgtgtcaccatcttctccaatgcttgtttatgtatatttgctgattctggtttggcaggtttctgtagttgaag

SEQ ID NO: 1661 - DNA, 4270 bp, Oryza sativa
  Intron number 2 from transcript LOC_Os02g56219.1 (locus LO C_Os02g56219) derived from phytozome v7.0 (chr-ID Chr2; po s 34377343 to 34381612)
tatcttcccagaagagggcctctcaagcagagaaggtatacctttattttcttcaaacaccttataagattgctaacacatatacacatatgcaactgcaagatataaatggtttgcttattctttgcaccttaaatgcattcactcacttttccaaagcctgtttaccatatccattctacttatggtgttgtttcctttttgtcctgacattgatgttccttttttttttggtatccctcagccaagtaattattcgtcccattacatttgaagcttactttattggcttgggaatttctaacagttcataccaagctacaaaaaattgataatttgttgtaatgcctttccatctctgaaggatatgtgctagtcaataacagattaacacaggtcatattaaaaaaacatgctagttaataacttaaatttattgtgcaattggagccttgaagactacacttgactatgcaatgccataaaaacaataacatattattttatactaattgcataaatgggggaacacctgagttcccatttttcaattcatatacattttgctaaatatgaggtgcatgcaaaactcaaatgccaaatatgttttgtcttaaactacttgtgtctagaacagtgataaattatgatatgattccttcccataaaatggggagagagtatttaagtatacaaagtaatggttcccttctctcataacagacaagtgtttcttgcatgataataattactaaaggaaagcgtttctctttaccattggagtcgggaatagaatttctgaactatgccactgttgatagaaaacatgtggcctgggaggtctgcttaactccagtgcaggtccaaagctcgccttcggatgtgttagcgtgccagttgatttgatcctgtaatcaacaagaaatagaagcaaagaagccgtggttaaatctataaatgatagccaatcggctagatgccgatgacatatcatttatctttgagccgatgtcatctgtgtatcgatcggcggtcatgaataagtaaaaaagaactaaatctactcgatcggctgtagatattaatgatatatactccttatatcgatgtatacttaaatcaagtgattgggatagatcggtcatcatgccgagacagtataaatcacttagatcgaaatatatatcaataacaggactatatatgtttatagcatagccgatcagataaatctagcatgtatcggctaatactccgatactactccataccaggatattaaagcaagaataatgtatcaaacaaaggcctaacatatttagatacagcaatatcttgatataaagggcagatttaacatatcaatgaggcatatagaataaatatagttaaatcagatacgatcagctgaaactccgatgctattctaatcggcaactagaaggcaggctagagatcgatattctaagcacgacttaatagatcaaactcaactgatgcagcattaagtatgaaaagaataacgatatctagacaatcaagccgctagaagtttcatagaatggtagatatctcatataatctagatcaacatcaatatttaacctaatcggctaccctctattaacagaagttaaccgatggcaggttagatgatgatattgctagagattatgtaagacatatgataactcgacgaattacataaacgggattagagtatcataaagatggaagcactaatcctaagaacgcaatccgtcataacgaattttacctcttgttgaagatcgaaatcgatgcagctcaacccgaaagcaagaactcgtcgaaacaaaactaaagcaaaaagggtagcgatacgccgagattgtattgaacgtgtgttgttaaattacatagggctcggggtctatttatgcccgagaattacaagatatgcccataccggacatgactattatctctaacaaactcttaagataccataagtctttgcggcagacttttgcctatatttatctataaggaatttacataagatatcctaattaatagatacaattgccttcccaggactctatccgtgcgtggcaatcatcttgaactacattaacttgaacccgatgtcgtgtacaagtcatattgtcggaatcggctgtaccggcttacttagcccgactcagacctagccgatcctaaccgtagccgatctggactccggccgattcctgctctgtttccgaactcgatctccgcttccgacttcgctttgatccaatcttctttcctgacaccgatgttaccaaatttggttgttaacagccacctaagccttgttgcacttatatttcgttggaatttctgaaatacagaaagaactattaaattaaaaagagtgaaactccactagcagcatgcatagtaaatctgcataggacccggcaactcaatcgtcatataaaacctttttgttgcaacaaatttcctatccgtggcatcttaattttctcccaagctttgcacatagcagtatcatctttttggttttcaccatcctcagtcttttgatcactggtgccaagatgtaatataagtcttaagcacaattggtttgaatcaatcaaaactaagaaaactacaatcttgggcataatacataaaatgttgtgctccattttttctccaggaatgcatagttaacttaatgctaggttttaatttatcatgatctgtacctcatcgcattgaattttaccatcacatgttttttctctatactgtttatcctttttgtaactaccatagtccatgtcattctcaccttgtaagtttctaaagaaaaaagctatatattgtcctgatgcttcgacatgagttgcttcagctcccgtttatggttataacttgtatgtgcccccatacacttttctgtttgctgtccttcctttttgttctttgactaagatccaaagggagatacagttatctacagctagacaaacacaacttcatgcgcactctcttttcctgtattgactgtccacctagggcaccatttgttgccttggaatttatttggagatgtctctttcctttccttgggtgactctcacctagctttacttgtacaagatgaaagaactgtgtgaaacaagagggctcagcctacctacagaattttgaagaaaatgcaataaatatcatgaatttcttgttcattgttgactatttcaagaaaatatttgtaaacagtgagcaaatttgaatttcaacttgattggaaacatagaggaaaaacatgtgttttattatattttttggagaaatacatttaaatgcagtgcaacttgcctgggttaaaatgaacatccagttcaatcaacgaagtctatcatagttagggattaaaccgtcttgttgaattaggatagaacgcgcattgtatttgtgccacagccttcttttttttttcgccgggttggccgaaggaatggctgaccaaatttcattaagattggaagaaaacaaattacaaacatacaagggtacatcgacaagaagttgtcgaacgtgttgtgaggcaaaaccttaccccacgagaaagggaaaataaaaagccctaaggctgaaaaacagttctacttctcacaatgtgaaaagagacctgcagacttccagatgattatttcctctttgatatcctcaaccaactgagcagggtttttgtctctttgttcgaatactcttgcgtttctttccttccaaattagccaacagatcatcatgaaaacactgccaaaaaggctgccctgtgtggcctttaatctcaccagatgtgaaatgtcatatacaagataacataaaaggatattctctgagttcgtttcttgtggcagttttctaatatttattgcactgcattatagagcatggcacctcttatgacatccatctcaacactgccacaacctcttctaacaccttatgcggtctaaatgaagctgcagcactgtggcatgtatggaataagttgtttttggttggatacaaagtcaacaaaaacattggttgtgctattcttttgcactgatgaaatgctcagatatgtgaagccttgttttcatttgcctcactctgtataaactgtagaagattgtccattattatatttttggagggttaatataacacacgagctagtactttgccgcctgacatcatccagatttgtttgaaacatgcagaacaggtattgcatatatagcaa

SEQ ID NO: 1662 - DNA, 745 bp, Oryza sativa
  Intron number 1 from transcript LOC_Os10g27174.1 (locus LO C_Os10g27174) derived from phytozome v7.0 (chr-ID Chr10; p os 14252825 to 14253569 reverse strand)
gccgtccgccgtcgctagcagccggagaagagaaggtgcgtcgtcgtgcttcctccccccttccctctttgcttccttcgcgatgtattcaccgtgatccttgggacgcgcgcggcggcgctgtgcgggggtaacggcatgctagatcgttgcgtcagcggcgtcgcgatgatccatccgcgtcgccgcgctgtgcgggggtaacggcatgctagatcgttgcgtcagcggcgtcgcgatgatccatccgcgttgggtagcaaagccggtagatagatggattggtcttgtggtcgtggttcggtttattgttttgttaatcgattcgtcggatttgtttctaggatgagtgaatcgttaatagatatatacgtcttcatgaaatttctgatccgttgtgactgaaatatttgcatcgattcttaaattatcttttgcttgggtagagtagtatgactatgaccgtgattatttggggtaagtagttgctgtgactgaaattaacaatagctgatatttaggaactgtttttgtttgaattccagatgttaacatttgttactgtaattttgagttgtagataaactgcctgaacatttttatcctttgaaagcaatattgaaatctgatctgatacataaattcacgaactgtaatattgaaatgactgcgattgaattacctgctgctggtttgtatagaacatcagttttgcctgactgtatatgcttcctgcttgtgcagc

SEQ ID NO: 1663 - DNA, 8797 bp, Oryza sativa
  Intron number 2 from transcript LOC_Os12g03899.4 (locus LO C_Os12g03899) derived from phytozome v7.0 (chr-ID Chr12; p os 1610017 to 1618813 reverse strand)
cttcctctttgtctggatcatcacgctctgcacaggtaaccaccacttcattcttctctcttccactcacccacatgcatcatcaatcgcgcgcatctgcacctgattcgcttccccctcctcttaattgatgtccacatttttatcgagttatatcatgagtttgtgtttaatttctcctatatatgttctccattgatcatgccaccttggagtgctatatagaagtatatacatactgatgcagccccttcaattaatcaaaatctttaaattaacaattactactaattttatgaattgctttgagattcgtgcacctcaaccaactattgaatttgggcatgacactaagggcttttttggagagattctgaatagcttctctcataatcagaagctctccaaacaatttagcttttcattgatattctaataagttgtagttgtataatcttaggcaataaaatagaagtcagaagctagaaaatctaacttttttatattctaaaaagactcttcaaatttaatctctggccagatctaggagcggagggagagaaggggagccgccgccgtcgccccgtccatgcggccgccgtcgcaccccctcctctggccagatctaggagtggggaaggagaggggggagccgccaccgcgtccgcgccgccgccgtcgctcccctcctccggttggattgggagggagggaggggaggggaggagagtgacgggccggtgagagagagagagagagagagttgagagggaaatgagtggtggccggtggggaggggtggaggagaagataaggaagacttaaagatatttttttgggtaggtatgatttttgcaggcggaccacataaggttccacctgcgaaaatcaatttttccaagcggaccacttaagaggtccgcctgcgaaaataaagttatttttcgcaggcagacctccacctggaggattttcgcaggcggatgacgaaaatccaccccgttttatattttcgtaggcggatcatatttggttccgagggtcatacccgctttgaaaaataaaaggccaatttcactaaaaatccttttttaagtagtggtggctattgattaattgtagcttaatcaaatacgtgaaatttctatatgttacactaaaccatgattgcaaaagatggctaaagaaatgttagtatacatgagaacattcttcaattgatcagcatacaaagtgatctactgctaactgacgaaaacgagacaacatctaattaagccactaattaaacattattacttttgaccaaggtaaaataatgagtatagtactggtttcgtttacacaaagatcgagggttgcactctacgcgtacctgtttgttaagtagttaatcatgagtgatggagaagccgggagttaatcatatttgccacacaaaatcaatatgcaattattgaattcgtacggacaagctgacgatgtagactgataaataaaatcctgtatgcatgcatgcatgcgccattttgtactccagtaatcttttgtttggcatgcatgtcagcatgtgtgcgtggttcaggcaatgtgatatatagtgaattgattggcaatgtgagagtgagttgattgaagtagcaacaacctgtcgggcctagcggccggccagcctgactgactgacgtaggagctgacgatgccattgcacattgttggtgctactgatgctcaattagattagatatcctcattaataataagctattagtagtgttttactgtttgatgataacttatttctagccgtactgggctaaaatgtatagtaatactgaaattaaggaactgctggattcaagcagcagctggttgactttggttaccagcacacaattaacctaaaatttaattaactgttggttctggccgattaattagttatcttacggttgcagcagcaatggtgttaccattaatttttttaatttctacgtaatctatcggtgggatgtacgatggattaataaacttcaactaccttttaaaaaaaaaacttcaactaaataattgttattactgtcatgtactctgacttatttttcgaggggacaggcagggagttcctacaatttaatccagtttataaggaaaaccggaccaaaaaattttacaacagcacggttaatttatgaaaaactggcgaaaaccccggcattgacatactgaacctaaaaactaagaacagcagtccgacaagggataaaactcctaaaatgaatccttcaagaaggatacgccgacagaacaacgacatcgtccgatcctaacgaatctaaggttttcatccggagaaatctcttgaagtggggtttgaaccagggctccaatagcaacgccttcaagaaggtaaacggcacccaagggtgtcgccgttgctagcatcggcaagttgagcaaggctttcgcctcggagtcccatccaaacatagcatccgcgacggaagccaccaaataccacctgcacaccgggtactgtttaagaagattgacagcaactgcagcaggtggcaattccaacttggattggtgcagctatacatgatgtaacatgggaaagtttattcgtcgctcgaggaaacactcctttaattttttatactatttgaaaaatcataaaaatattaataaaaagtatatcaataatacaatatattgataaataaaatacaagctcaaatttaactagaaatgaaaataataaattaactcagaataaaacatgtcattcatagttaaatttattttttaagttatatatattaaattgaatttacatatttgtcgagtgacacccccacatatttaatttattttattatcttttttattaaatttattaataattttttaagatgacataaaccgacatacacaagtaaagaaacatagcctccaacaacaaaagtccatcatataatcatatactatttggacaacggaaagcctgtttcgacttgtcttctcccctccggcttttctgttccatgcgttttctgctctgcaactgcaagcaagtccctctgctagctgcgagcctcacgtgcccattcactctctttatttattgctgattcccgatcgatcgatcgatcgatcgatcagcaggcaatagttaatcgatctcaacaactacccatcagttattcaatacaatacagccattcagacagaagcaaggtctatcgagtcagagagatcgacatctcggcgagcgagatcggtgaattgatgggtgatcatggacgccggcggcaggcggcggcgccgctgctggagaagaagggcagcaccggcaccggcgtggacgatgggtactgcattgaggggtgccccgggtgcgtcgtcgaccggcggaaggccgcgagctacggcatcccctacgggagcttcctctttgtctggattgtcacgctctgcacaggtaatagcctcccttcatttattctctcttccacccacacccacatgcatcatcaatcgcgctctcatcgatctgcagctgcagctgattccgttcctctctttctcatttgatctccatattttagcgagttttatcatgatgagtctgcttaattagtttctcctatatatatatatatatatatatatatatattctccattgatcatgcagccacattggagagctatatatatacatacagtcccttcaattaatcaaaatcatcaaattaataattactaattttatgatttgttttaagatttgtgcacctcatacaaccgttcaattttagcaatggcttattcgaggggtttctgaatagctgtagcttcttatgataatcagaagctcttcaagcgatttaacttttcgttcgtactctaataagttatagttgttgaattaacaaaataaaatagaagtagaaagctagaaaaccaattttttagctctaagaaataactaccaaggctgtgtgtttagttaccttcatacttttaacttttctatcaaatcaaatatttgaacacatgcatggagcattaaatatggaagaaaaaaaccaattgtacagtttgcatgtaaattgtgagacgaatattttgagcctaattacgccatgatttaacaatttgatgctatagtaaacatttgctaataatatattaattaggcttaatagatttgtctcgcagtttataggcggaatctgtaatttgttttgttattagtgtatacttaaaaaaattttggacggggaactaaacgcagcccaaattagctgattattactactccgtcccataatataacaactttttgttgtctagatttatagctaaaaatgcttatattttgggacggagggatacaattttaagcttttttttttacagtccatagattagatttctagaggttgaaacttgaaaccgccaatggcagggtgcgtgtgcatgtgtagcagacggtcgcacactcgcacatgacctgacctgctgagattaaattcgtgagcttaatggttcattcattgcttttgtactacctatattctcgtttcttgattagcacaagccaaccattgctccatgcatgattagcgcttactcagacttcacttcatccacgttaccttctgtaaatttgttttttactttattaacctggccgtatggtttttcataatgtctcccatattttgaaagaaaaacaagatagcggctcatacgatatttcaatttgtattatactcgtataagtagctaacggtaatagagacagtagcggtggagttcacgcggccgcccaacccgttcgggaagtgcctccgccgttggctgcatgtgtgcaacaataaaatgagttgtttaataaacttgctatattaagggaattgtatactagtttatataaccggctcatgatcgaattgagaacaaaagcatatccagtggagttaaaatttttaagtagaccatcaagttttaagtgaagtctacgtaagatgatatctctactacttaaaaagcgaaccggttcgtttgcactcttttcgtacgtccttacatgtgtgtataagcactatctctttaagaaaaacccactaacatgtgatttctcactgcccacaccctaaagcctgttcgcccataatttcaatcatgttctatgataaaggtgcacttttcgatcggttaaacaccatgacttttacaaaagtctcctatatagaaattccatgatatactttctataatctgttttatcactttttaacatctaattattggtttgtgcccttaaataattattttcacttttcgtggtataatgtgagtttatagcattgcatgctaattccaaatatgcatggagctatatgtgacgtggagctccaaccacccaagtcggatagagtttttgtcgctttgtccaactgttggtggctcatgtgaactttggcgtgtatcacgtactccctccgtattttaatgtatgacgtcattgactttttaaccaacgtttgatcactcgttttattcaaattttgtttgaaaatatgaaaatatttatgtcatgcttaaagaataattgttgatgaatcaagtcacaataaaataaataataattacgtatttttttaaataagacgaatgatcaaacgttcgataaaaagtcaacagtgttatacattaaaatatggagatggtacaatatacgaacccatatgtacatgcatgtgttaagttcgctttcatcaaatatttactattgctcgatctctgaatattctgagtcttgaaatccacagaaaatatttgaagatgattgtgacggtactgtttgtacatgtctgggagacgtaaggatctgaatgtgttcgtgaaaaagttgaaggaaaaaaattcaagtctaaaaaatatgttcaaaattcgaacatacaataggaacatacacagatttgagtatagtgtacatatataggcataagtagtacaaattgaaacacgaaaaatgccaagtccaaaaaaaatattaaatttgaatatttagaaagtttcagaacgagtatgaagttcggaatatgaaaaatgcacaaattccacatcaagccagtgtgaggttgcaaatcttttgttttcttctcatgctgatgtgctgatggaacataataaatgagttgcaaatctgttgttctcttgtgctgatgtgctagtaatcctaatactagtattaataaatgacttccacttccacccacctccatggagctaaacatattcttgtgtgtggcaatgcgcgccgtggaattttagcgacgaccacggcttcgttttggcttcctcttccacctcttcttgttgctggctttccttgttgggttggccattggccctctccttgtttgcctcctcctctcctctcaatctcaggccctccctccctcgccgccgagcttctcctcttttgccgattgatagccgagggtgagggtgagcctccctgtttgttctgggggggtcgcattgcccttgccgggcgggagaggaggggatggaagaggaggtgccgttgctcaagggggactaccaccaaggttgccccggctgtgcctacgatcgcaagaaggaggtctacaggggattgccttacaaggaattcctctatctctggatgatctgcctcaccgccggtatgtatggaacattccccccctttttgcaacctgtgacattcagggtgtgtttggatccttggctaaagattttctaaccagtcttggtttttggtacaagtaaaatatcctagctttcaggagcaagctagccttgatgggctagaaaaaccttgctcagcaggacagccgaattggctctctctctctctctctctctctctctctctctctctctctctcaacagcaacaagcgcatgcgtgaggggaaaaaaaaatctggcaactgtttctcattgtggggtaaaagcaaggaaaccaaatgtggtgcttgggcaagagcagcatagctgaaatgagctagtttgcacatttcagctatagctcaacctagctgaacatccaaacgtaccctcattatgcagaaagttcttgtttttttttttaactcatggttttctaggatttttctttttctagtgtagtacgaatgagttgactgaatatcgccaacaaagagaatcttggtaccacgtaggaacatgacagcatgtcaacattggggatcttggtacctgtaggaacatgtcttctttcttgcaaatgctacatgttactgcaatgtccatgtgcagttccatatgggtttggtcggtgttcagtcatgtcaatgattcctgttcctgtggggaaatcgctgattctctataatagtagattaacaggaccaagttagttaagccaattgcctcaacaagatttctataatagggggatgttgacatgttgttgctgtttttactacgcacttctccatatttgctttcagtgctgcttacaaccgttaattacaatgtgctgtgatgctccgactcatactacacacgacgaccgtttacaccggtcattacgttgtccatggtgttacagttgcaaactagtaatgccacgtcctggttcatgtgatgtgggttagctggggggtctattatgttaactagaaaatttattgtttgagggagatcactgtgcgaacaatattagatacgcaattaattcctgttatgtcatagtgccagtcatccaaaccttattgggcacataattaattcctgtaatctttcattgcaccaatagcaacttcattgataggatctccaatgatgggactgtaggtgatgctgattcagaccttgtagatctttaggttcttcgttgtgtttgtgatcttttttacctacctcggttgctgaaattttcacaacactacatggcatctatgtcaacagtcagcagaagcatacactgaaatgtcctactccgtgttagatacatagcattcagtctgcaatgcaatattgatatgcgaaaatgccttttaactgattttccttaatgatgtaatgttttttaacagatttttttatactgctccaaatcgtgataaaggtcatttatgtaaactgtaaacttggaactgatgcatgacttgtttcccacgtgtcctatataagcatatgtaattgtgcatatttttaggggtgaagttccatgtgctgttctggtgttctgcatgagctccttcatcatggttgcattgaacagtagtctttctcttttacaatagtggaacatgaaattaatttgtctacttgaacactgtgtcctatctgatgttgaggatactgagtgctatcttgtttccttgagagtattgcttaaaaaaatgtgagtggaacagtcaaaatctgagaagcatctagcacttcaaattttcttcatttcaagtgcaactagctctatatctagccataataccttcttttattatccctgttctcaccagcatcatgtagttgtttttagagaagttctcaagtagtcccctgatatcatcatctaagtaataatataataaatattgttatcaccatttgtatctacaaaagttttaaatgtatttatcgtaaccacatatcccatctattcttttttttacataaattttcagtgcatactcaagatttctaattctgtccctgtccttttcagctttaccaatatcatcattgttccccttcttgtac

SEQ ID NO: 1664 - DNA, 3376 bp, Oryza sativa
  Intron number 1 from transcript LOC_Os01g41220.2 (locus LO C_Os01g41220) derived from phytozome v7.0 (chr-ID Chr1; po s 23332498 to 23335873)
ccagcctcgagtgccccgccaaagccgactcttagtacaaaggtaaaggtactagcaatctaccactttgcttccttttttatttcaattttttttgtcgctgtctcatggcttggcttggtaggcgatgtaatcttaggacacgatcactatgttattgttttgtttagtataatagctttgaattgtttcatgttctttgttgttcgggagaatttgtttaaaagacaaatgggattgatgataatctctccacttaattgaagaatatgaagtgctgattccaattacttgaagagtgaagttttaatattgtcttgcctggaaatgaatagttccaagacctctgttgtttttatgctgtaatggtccctaccgtttggacttaggagaacttaaagttataacggaatacaaacagaatattactactccagtacgaggttactcgtttgaaatacaatataggctctctttattacaatttcagctgccaaacttgattgtaaattagttccagtttctgcaaatcatctttatggagcttgtagtttatagtccaactgaatctttcaacactgataattgaaaccattgtgacgcagtgttgtacatcaactgtcagctgcataattatgatatagaatctgtctgatatgcagactctgtgtattcataatttcacatcactgagggatttccaagtgattgttatcctcaaaatgtccctcgatgattgtggatagattttgtgcagtactaactttgataagtagatgaatatacttgattggcatgccaagtatgaaaatattcaaggtggggccttggggtacatttacccacaaattggatactgaatttgacctccagttttcaatgtaccttatgagaaaaggcggtataaatatagttccagaggcacacttatattatactggtgtagctgcctttagaccctccagaactggtgttggataggtgtggtattccatagcttgtttgttcgccttgtagctttttctgttgtttagagttggacctgtgtagtttgagttctgctactggaggttgaaaacctatgtctggccgggttgtgccctttttcctttctgaactgccctgtaagctggtctcaccccagcgaaaccttaatagctttctataaaaagctgggcctctggcctattctctaaaaataacacttatattatcggaaacagaaaaacttagtgctttcaagaccttgaaattgtacaagctatatcaccaaaaggaccaagaacaggttcaaaatgctatggagataaaggcttgtgttttgtcctgagtagattcgttccatcctacttgaagtcagtggcggacacacccattgggcagggtgggtcggccggcctagctacagtccgtgtcgccccacaccccaaaaccttattttagtcctatttctaacacattagtcattagtctactattgaataataggaaaaaaacacttatgaaaattcgtgtataagtagtaccattttgaccatacataaaattcgattttctttctatttctttagcgtataatacagtctacagtaaatagttaaattggtaaatatataaaaaaatccattttactcacttgaactattttagcgaagcacttaaacccctaaataatttttcatctcgttttataccccccgagctattgaaagtggttccccttattgtctaacaacatttctcttttttttttatctctctacatataagttatatacgtttgttcgactaccaatcttcgttgttaactttctcgatgttcgtgccgtgcgctgttgcgccaatgccgtgaaccagcgactatggtttgtatgtgttgtaccatcacctaattagggctagctctgccgccccatctgtattttaaacttgcgtccgccactgcttgaagtcagaaaacattgtacagtgagctgattgacgttcaaaaccctttcctctggtcttctgtgggctttctactctgacaacagcttggtctggtggacatatcgtggagtagtgacactgacgagcatgctgatattgcaactgatgacagcatgtagtttgcatatgaagtaaggtcagtgttctttagtttatgaattgattagtgactgacagacacgattgttatttgggtagtagaggatgattgctctagcaggtgcatcttggaaataaaagtggcaagtgcagtagagtagtgtggtgatgccttgaaggggcttgctttggatttcaactagataaagagtaagtttgtgtgctacagagtagctgttgttggtatgcctgggagtctcaggagtcagatcaagatgatgtagatgaatcactattattggggaagttcatgttaggtgatgggcaaggatcactatgtgtgagatttaattgctgacgatcaactttgattgctatagaacgagcatgcctggtggccacaggtcctgtggacatcaaactcgttcactagttccacttatcatccttctactactaccgctttatttgacttagtatgaattttagtgaaaagaaacaacagtctacaacaatagtatataatttctaggtttggggttagaccaaatcagatttggtttgcagggtgctgattatgtatgttctttttgacttgtttgaattgcttgctttaacagtgtatttcagtagagttcatgtgatttccttgttatcataaggatatagatcaatgctattgtattgtttttttcttggataaagtagtgtcacaattttgtgtagctcctattgatgtccgattatctgctttcgtgcgtaagcaacgtatgcaacatgtcttctcttttttccaagttaacattcaattaacctactttgcaatagaggtaacatgttctaactttgacaggacgttgtgtggatggtattaaacttacttttcaataggggaaacctgttttaactttgacaggatattgtgtggatgttatttaagagaaaaacccacaaggtcacaacgaaagatacatttgggtttcacccttttgaagtcaaggaagctcacgctgtgtctatactatacatacacactgaaagaaacattggctatggaccagggctcagtgatgtgaagcaattgtgggagcacacgagtcaaacagtgatagccatatgaattgaaggatacgttccaatggatcaatttcttggaaatctgtcgaaacaagctgattaattaccaatttagctgacagcaacttgaggtgtgcttctgttaaatggattaacgaagaatctcatcgttttttttccctttttcaggtcctggtgtctattccttgat

SEQ ID NO: 1665 - DNA, 1237 bp, Oryza sativa
  Intron number 1 from transcript LOC_Os07g41720.2 (locus LO C_Os07g41720) derived from phytozome v7.0 (chr-ID Chr7; po s 24998889 to 25000125 reverse strand)
gaagagaggagctcgaagcgggacaggagagagaggtacatctctatgcgcgccgctgcgctactccctcctcggagaaatccccaaattgtgttcttgcatgcgtcgtcctagtagcagagagctgtcccttccattttcctttcatggagtggattcttggttcttgattacgacatgctgtgtttggtccagttcttatcccctgcgattttttcccatttcttttctctcccttgttccacctcggaaatttgggttctttttttcttcttcttttgattcttggttggtttgtgttgcataatttcagttctttgttaggcttgcttcggagttgtagttagacatcgcaagatgcatcctttcgaggaagtcaatgcatcccctgttgttagctgaccactgtatatcgaatgcactgtgagttgtgttttaggccgtggagtgggtggaaatttgacttccccattgcaggatttggtaacttgaagctaaattccgtgtgaatttgtgacggtatcaagcgattgtgtctctgataagattctgaatgtgtgaacttgctgcgatatgttctgatttactagtggtttagcttttcaatcgttattctgattaagacaagggacttcttctgtgcatatggattggcaatttggactcgagaacaatccactaaaagttgtgtaggttatctctttatgatctgcatgtaataaatgtaaacctgagactgatgtaggctacctcttattcgagaaaaagaaaaagaggctgatgtaagctacctaatgtgcattttgtgcttattcctcttgatcaggttgtttctatataagaattttctgtctgtctacttagggtaggatgctgtgtgttatttgtagtggtactctttttaggttgatttatttgtttttttattcagttatttcctactcttgcaacaagcacttaacaacctactctgcctactctgttcctactgaacagtaccactattaagtattaccttattatgatattaaggtaatatcataatttatttgcttttatggttcagaatctcatgattcagttatttcctactgtctctattcagtattacaacatctattgtcgttttttttagataattcaacacctgaaagtaactatgcataatcatattccagttaatgagtagaaacctttaataggcatcttttgatagaaaggattagagctaatcctt

SEQ ID NO: 1666 - DNA, 1488 bp, Oryza sativa
  Intron number 2 from transcript LOC_Os07g33330.1 (locus LO C_Os07g33330) derived from phytozome v7.0 (chr-ID Chr7; po s 19920965 to 19922452)
ggtacccagcagacatattcaacaagtaggcacttagttaacttccagtaaagtattaattcttgttgtattgcttgacccttgcttatatagaatcttgcaggattactgattattagaacctctatgggtcaacattttgaataccaaatctaactcacttcatatgctaactgtgccatttgcacttgctggatgggagctgttaccacttcttttttctagtcaatttactaaaggatagctgtcattgcttcgttgctgtaaacagacacttcatcctgctgtttcctttataagattggggtaaatacaaataaacacaaccaagtaatggaaaactaaacaaaattcatgtttctcaaagcaggacgccatgccaccttatagggtctggaattgtcttcagctgagatacatgtcacaatccatggcctcagttaggtcagtgtttaatttttgcgagaatttggttctgaagtaaggagcaaatatgctaccttcctgttctccctttctgccactacattgagataactacattctgcgaagttctctatcatattccagtacttccaattttagctttaattatctatttaggtttctctatctagccttcccacagtcttaatgtacctttctgcttcaacctatcattccttttatttgcaccaacctataagcaatatcacattgtcttctccaaattattttatattgcagattccttttgctcctctattttccatttccccattcatatgttatctgtaatactaaaaactttctaggttttattcaaataatgcagggcagcaagtgatatgtgataactatcttcttgaacatatttatatacatgggcaagatttaggtgtggtcacaaataagagaaatatttgtgctttataaaagcaattctcagtttactactgatgaatgattggcatactgcatttggaacttatgaatgccattaagtttctatttttgtatatatatgccgtataggttaattgcagttcataggtattattgcacatttactgcaaagtacatggggtggtcttgagctccatccatcaactcaaattcataactgacctgccatactaacatccatgctcctgtatccagtttattcttgtattgcagctaagctgatgcaatcagtgagtaaatcacgtctgtgaagcaaaggactgcttgtgttccttcccgaccctcccctaacagtgtttgctcttttttgtttgctgattgattcatcgtagttagacagcaatattcacatgcactttaccctctaggttattaaggaatagtctgtctacagttttgtttgctttggtctgactagcaaacatgatcactaacattggtttggggttttgaatattatttagtatgatctttcggaacttatggtgcttttgttttgtcattgcaggttaccagagctcccaaggaaacagtttggagaat

SEQ ID NO: 1667 - DNA, 3663 bp, Oryza sativa
  Intron number 1 from transcript LOC_Os02g19804.1 (locus LO C_Os02g19804) derived from phytozome v7.0 (chr-ID Chr2; po s 11579542 to 11583204)
gcaagcactatttctgcgagcactgtgcattaaaggtatgcggcagtttattctgttttcattatatgcttatatttatgtttatgtttcagtctgttctgcattcactatttatcgataatcatgaatgccaactgacgaatatctcttgtagaggatcaaatgtaaccatttacttggctgtgttgatagttcagacttcagacacataatctaggaatgcttgcagaaacaagtgttagtctagagtctagactctagagtaaattagacaaaacggttagtttaatgaacgtagctcgagataaatctaggttttcttggctagcggtgcttataccataagattttggccatatggtttcacaagagcattgtgcattgtcagtgtcatgatggaggttagtgctgaaggttttggtgctttggtcccacaaagcagtggctcgaccagaataccagatagctcgacaacatctcatgcaggtggtggggactaatggagagagatgagaggtttggttatggtagttttctgaacctaactataaaaacctatgtataagtgttactgcaaacaaacaaaaatttatagttagaacttagaactgtagaagagaataaatgtgagtgggataagagaaggttttaccgctagaagcaagggcatagttttttttggagcagaaggagatttttcttgtattacatttgatgatagttaccggtctttggaagctactatgaaagtgtgtggtataacataaaattcttctttgacaaaattaaacccacttatgaggcaacttctgacatggattttttttatgaagaatatcaaatatgtatataaaaatcacgataaagtttagttactaacactaagtaattgatttatatcatgaaacaacgaaataccatgcaatcttgggtgttgttactttcgtggaacaaacactgaagataaatactacttcctccgtttcacaatgtaagactttctagcattgcccacattcatttagatgttaatgaatctagatatatgtatgtgtttagattcattaacatctatatgtatatggacaatgttagaaagtcttacattgtgaaacggagggagtaatgcaataccattttgtttctcattttgtggggaatagttctgaaaacttaggtggctcttcatttcttgtccaatgtatatgtatggtgttgattataaagaaagggtcccacttagcctcgtgttggcaagtttacagtttgtgacaactgatgcctcataaaaccagtggttaagtactagagaccacattttaacttgctattggaggatatgccactatttactcttatggctctatgtaacccacccacaactcatgatgcatcgattagtatagacatgagttttttgggggcttggtacagtaggtcttttttgtacatagactgccaatttgtgatgagtaccactacacaaagtaacctaacctttcatatactgtgagttggagaatttgtcttggatgtgaatattgggttagctgtagttctgttggctatgtggtacaatttataggcttgtttagttttgtacctaggttcttattatgaggttattctagatgcattctttgaaacaatagttttgtaagaatagcttcttcaggttatatctggtcatatttcccgtttagagatggcatgtgccacttgcttggggcaagggagatgactcgagaactgagtcagcacttgtgtgttaaaacagctgccatgccgaatggaaatcatgtctgggtgttattttacctatttgttcaagtgaattcagtgtcaaaactagacaatctgaatagttgaagggggtttacatgtgtaatgtatatcattgttggattctattccttctgtgatttactgctgctaggccttgtacctgtctcatcatcttgctgtgagcaagggtcaaactacagccatgaggcaaacaattagctatttccttgaacaagtccagctgcatcaatctttccaacctctagtcaactcttcactattgccagttattgctccagaagggacccattttcaggtcttggcttatcatcttatcaataatggcaagagaaagcatcagggaatgtctagcagctcttaaagccgaaaagaagcttaacttcttccataaaaggctagcaagggaaatgtctcctattgctcttggatcttatacatgttctacacgcacaggtcatgacacagaaagaatgaacgaatgtgcaggtttctgttagtggctagtaaagaaaggcagtgatgtatattcttatgttgatgaatctttctttaaagaattcactcctcatacatggtgcattgacttaggtggcaccgtgcacgttaagaatacttcatgcagatggcattatgtgatgactgtaagaggagtgtagcaaaatcttagcgtcgctaacagagcagagactcaagtcaagacagtccttcaacttgcatttaggagtcgactttagtcttttttcttggtgatgttctattcattcccattgttgaaataaacaagttatggccatccggagaaagactgggaacaaataaaacattgtctcctaatgcaagtggtgaagcaaaaactgccttaatttcaatctctgttccattggcgaccctaagatgtcactccccttttatggccctcacataacataatccatgtaaagaatttgtaatatccacagtggctcctgagtcaaattcaccatgaattaggggttaatttagtaaagagattcatcaacatatgaatttatttcattacccttcttagctagcttctgtttggaacctgcataacccttctgtatgtgtccttcctgctcgtagaacttgcacaacaaagttctaggagcagcatgatttagaggcattaaaattacttgtctctggcttaaggttgaaatgagggcttcttcttagctttagagctgctagactccttgatgctttctcttgccattgctgacaagatgagctttttccttctgtatctcaactttttgtgtatcttcttcgactgaactagtgaatgactaatgagctgctatggaccatttttctttctgaatgttgtgatcttatataaatgacatggactaagagataaaaaatggccatccatatcctttttaattaagtacttcctttttttaagccttgaaatgccaatggatccttctagtttattttatttgatgtgagttgtatgcagagtggaataacgctgaaaatttagatctttgtactgcttaacttggattagaacgtgacagtgaaaattgaatcaaccatgttaaaatacttttttttctagaacctgactttttcaattctttggtgcacattgctgtttatttagtattggattcatgaatttgattatgttgatcatttcttagtgtgtcagattgattattgtgttatgtgcaagttccgttgtgtcatttgagatgttgaaatacggttcagttgctcatgtttcatgcctcttatggcaaagaagattctgatgatttgtgtatgttttttgtgttattgttttcagcatcactcgaagaataagaagtgctttgtctgcaa

SEQ ID NO: 1668 - DNA, 3181 bp, Oryza sativa
  Intron number 1 from transcript LOC_Os01g62380.2 (locus LO C_Os01g62380) derived from phytozome v7.0 (chr-ID Chr1; po s 36098782 to 36101962 reverse strand)
tcaacggcaagggctgtcaattggtggtgtatacggttggtgctcctaaatctgcatctcttactactacctctggtatgagatccggatgttacccattgctcgcttcattttgctcaatttttgttcttctgttactattttccccattttagaatgtgtactacgggaatgtgatgggtagagaattttataggggcaaaagcagtagcaatttgtctagtttctttattagttttaacgaaataatatcatgtgtagagagacctatgaaacctacttgttccaaaacgaacagcagcatgttcatagttgttctaatcaggtcagtttgtgtttgaactgaagtccaattggggctagcattactggggaattggtgtgaggaactgaggattactggggaatcgatttgtgtgtcttttgtattaaggtaaggtgcagaagaatttgaagacatgcatttgcctggtattttgtttatcaaggacctgaagtcttggagtcagggttctggagattgatagataggtggtaagcgtgaggaatgagctggccagcttggaggtggcctggttgtctacccctgtttttgattctcactcctctttcctgctaatgacgcggactctagttgcgcttgctgttactattccctgaagacaaattgaacacatgtccaccctttagctgattggtcaggattttccaccgttaaatttctgttgaggacataaaccaaccatttagggtggcatatgctcaattatccctttttttatctaaccatatagggtggcctaccacgtactccttgctgatcatttggctagtttcgtagcgtgtgaactgaaatctgataagttggtttgcagttaaattaaatagcttatgccccagctccaaaagcttcctatatgaactttagcagccctaagatctgaagagaagaagtttagcagcattgtataccaggttgcgaatttactgataggtaggtgttctgattcttgtgactacctatcaggtattgctcatttcatgcaagttaggtagttgtatattgttgtgtttggtagagatttgagggaatttaaaccatcccaataaagagtttgaaattctaggtgctattgtcatgcattgctagtctaacgtctaaacatatccaaatagtctgtcagttatccaaacatgtcgaccaaaaacatgagttgttgtaacttgtatatgcctctggtagctaccgtttatatgtgcggctattcctaacattctgtggtgtttcatgttcataatggctggtgggtttttggggagggaccactgtgcatgaaacttttgtatgtagtttcactagagtccatgaaagtggacctattgaggttgcccatctttattcgattagtttctggacccgtttggtcatgtgccagctcatgcgtactttacatgagccatgggacccatcaagttcttttctgaataatatccatgagatgagccatggttgaaatgtcaaactttctaaataatgacgtgcacattttctgctttctttgtaaactagcgtcttggaaattcagcattaatactggatgcgatgtgtttgtcatagacttgtaactattcattaaacttgtaactacttcagtaaaagtgtatcctctgtaccactgaagagtgaagaaatgaatgcagaatagaaaaccctgcctatctgaaatatactgttcagattgcggagaatatttatactaaaaaaagttcaatatttatcatatgtctcgagtgtcttcatgtcatgaaaacaaatgaggtgatatttatgaaagatcaaagtaatgagtcgtttggaacacctaggttcttgggcaagataagatttagcaataatgcatataggtatgttggattagtggcaaattactggtttagtttattgttgcggacttgtccatctatagcctacagtgaaatcaagaggcatttgtatctatgttttcaatttcacattctgaagtcttgtcagaaaaataccggcatatgctgtagaaaacagtgtaacaccaatatcttgttctttgttgtgcgctgcagcatgcacttgtcacctattgtgctacagtttttttttttttggggggggggggatgggtacagtcttgagactgaatttcagcaataatgaataaatggaaggtgcccatctattttaatattttttaccttttgatttttgttctcatgctccttgtctgaagcttcatcttttctgtaagatcatttaacctatctctgtaacttaaatcctagagtaggaatatgcaatgttcttttctgtaagttcttgtaacctattcctgcaaatgagcttaatggagttctgaacttcttatacatactccatcaaaggattgtgcatctaaaattcctgattacctgtacttttatcaacaaaaagaaaaaaaaaggaagaagatatgcatagttattatgaggttctttcaatctgcaaattttgatcaataatacaagggtagctgacataagtgttcttagtggatatagtagcctcctccccctctctttttacatgccctaaatgtcgaaatgaagatcaggtgactgtagtgtaacatgctatctagccattaattccaatcttcttaggtcaagaatgtgctgattcagtagtctagaactctatgttcatagagaaaactgaaagttgcttctgttttcttgttggattagcagttacagtttttgtgagatttgttgtactgtgaatttgattgacttgaaaagatgtgaaagtagatgtcttagacatgccacatgttaaaattcttaggtaaagcaaaagcatggagcaacttcagatgatccaaattggtaggacatgtttgatgtcagaggctcttcattgatacaacagtggaatttagttcgtggtcacatggttgcaggcatattattgtactgtctatttttgtatgatggttacaaagtgaaaatgtacaagtagaatggccttgccatgctgcagcaagatctgtacatgaggtgacctgcttccggtgatctttatattaggggttattttttgtgggagggttcaaagaactgatatttctgcttgatttattttttcctatttctttcttagcccttgtta

SEQ ID NO: 1669 - DNA, 876 bp, Oryza sativa
  Intron number 1 from transcript LOC_Os10g04520.1 (locus LO C_Os10g04520) derived from phytozome v7.0 (chr-ID Chr10; p os 2146207 to 2147082)
gcaggaacaaaattcaggagaattccatcaaggaggttagtagcccatttcctcctctcaaacgttttcgcgcaattgttgatgctgctgggaacaacaaggccaggtaccttgagctgcataaaactttgagaattttagaagcagctgttgatcacatggcagaatttgtggtgattttgggtggatgcgatcgcatgtcgcggaggccatatgatgcatacctgtacacagataacttcatgtttggccgtcatactgaaaagcagaggctcctgaatttcctgttggaatacaactcacaaggtctgcctcctgttcttccaatcattggtagccttgcagtagggaagaaaactctggttgcacatgtctgcgccgatgagagggttcaatctcagttctcttcaattttgcatttgaatgaagatgatcttttgagattagcacacagtgatactctcttatcagggaagatgttggtagttgttgaatttgtttcagatttgaatgagaagaattgggaggaattctatacatctctgacacaaatgaatcaaggaagcaaggtgatcaccataagcaggtttagaaaatcagagaaacttggtactgtgaagccaattgcacttgacatccattcatacgaagaattgagctacctcttcaagacgctcgcatttgggagtgtgaaccctaaggaccatccacgattactgcaaatagccgaagaatttgccatgcaattgcagttgaaaagttcacttgtcgcagcgaattttcttgcagatgtattgagaaggaatttggatgtcaacttctggctttgcatgctgaacaggtgcataacagtggctgaaaagaacttctccttgt

SEQ ID NO: 1670 - DNA, 3455 bp, Oryza sativa
  Intron number 2 from transcript LOC_Os05g39540.2 (locus LO C_Os05g39540) derived from phytozome v7.0 (chr-ID Chr5; po s 23143381 to 23146835)
cattgttcaggtatgtgttttcctttcactaccacacgacactaattcagtgtcggttccaaaagggccaacagtgctagatttggatctggcaccgtggctctatgttctcggcactgaaaagggctcatctgtgacgaacgagtaaaaaaaggctgagctctcgaaaaaaaaaacaggctgagccggatttgagttagaggattatagaaactataaactctgtaaattacatgcagtctttatgtgcttcatgtgggagtgtgggactactcacaaaacggaaatgcttcaagacaaaagaatatctaccatgacaaattaaaagacaaaagacatatctgaatcacaaatctcatggaatcacgtatctaccattcacatcacataacgtgtataccttcaaatgaaaaggatctaagtttcaaacaaaaaaggaaagagagaatctactctataccactgagtttattcaagtttaatgattttccatcgatattatctttttctacaatataccgacgactttatcaattgttctacaatgtgtcattgggctgggccttcttttcaaaaatacccaaaatacccttagaaatatacaagattaacaattgatttatctcattagaagtttcaaaaaaaatgaaaatttttaaatggcatccttacacaacatggaagtttgtatacaagtttcaagtttttttctggtatatttagtttttagaaaaaatatttttatgtggtatgtgaaagagaatttgcttatataagacataatagaataaaaatatcttatgtagtgtatgaaagatgatttatattaaaaacaatagtaaaaaagtatttttatatagcatataacaaataagttatatattttttaaaaaatagaaatgtaaaaaacttaaaacttctatacaaatttccatgttgtataagaaggccacatgaaagttttcatttttttttgaaacttcaaattagataaatcaattgttaacctcatatatccataggggtattttaggtatttttgaaaagaatacttagcccaatggcgtattgtagaacaattaataaagtcgtcggtatattatagaaaacgacaatgttgatggcaaattgttgaacttgagcaagctcagtggtataaaatagattctctcaaaaagaaacaacaagaaaaaaagaattgaatcacatcataaatccgatatggtgaacttattctcatacttttttcttctcgtcgtcgatggggtcagcagcagtgatgggaaaatgggacatgaatacaaccaggtacatgggttatcgatggtaagacttgatggcatcatgatgggatctggatggatccaacctcgccaccgctaactcgatcggtaaggtgacgacaaatctaacgtcaccaagctcaaccgatggcccccaagctccaagtggcatgatccgacaacccccgagctctagggagctcgatctagtggccgatgtgctagggaggggtagagagtcgtcaccgcactggggagaggtggatcctgcggtgccacttgccggtgtgggtcaagtgacagggatcgagggaagggagagtggacatagagaggcagggctgctggggagagacgaagagacgaagggaggttgggagaggggaagcatatgccctctaggatcagtcggtcgtgtaatgggacttaaccactcggttgatcggctcagttttttgtggttccctaaaaccagcacacatagtagttttggggtgtcggttttctaaaatgctactattgataattattattgatatcgattatttattagtatctttttatatggaaccaacactaataattgttatcagtgctcttcttttttacctgtacagagtgcatgtgtggccgggtttttgtccaatggtgccatactaggtgccatccatttaaaattctatggtagtgtttccaacaacacgaaatgtgagaaatctgcaaaaatattattgttgtagtgactagtgagtaagggcgtacaaacgtgagtatcccattcacttcataatgtttgtatgctcatcctcaatggtagtcggaatcgagattgctaaggggcgatcgatcgcccctagcgatcgcgatcagattcggatcccccctctccctccacctggttttcttttttttttggcaccgcattactttactattttaataaatttatgcacctaaagtttgtacacctcaaatttacacatctaaagtttagagagacctaaagtttataaatcaaatgtttatatatccgattcaaatttgaatttaaattcaaatattttttatatatagtatttctatacatctaaagtttatacacctaaagtttgacccaaagattataagtcaaaagtttatatacccgatttaaatttctatttgaattatattcgattcaaatttgaatttgaattcaaatattttttatatatagtatttctatacatctaaagtttatagacctaaagtttatagacccaaagtttataagtcaaaagtttacatccccgattcaaatttgaaattgaattatatccgatacaaatttgaatttgaattcaaatattttttatatatagtatttctatacatccaaagtttatacacccaaagtttataagtcaaaagtttacatacccgattcaaatttgaatttgaattcaaatattaatttatagacccaaagtttataagtcaaaagtttatatacccgtttcaaatttaaatttgaatttaaatattttttatatatagtatttctatacataaatttttctaactttgtttttttatttttttttaaaatttatggtgtagtaggaagagaagaaggggagggggaagggaggtgaggagcgaaactcctaatgggcgattgatcgctaggggacgccaggggagatcggatctggtctccccctctcctccacgtggtttccttttttggcaccgcattactttcctattttagtaaatttatgcacctaaagtttgtacacctcgagtttacacatctaaaatttagagacccaaagtttataagtcaaaagtttatatatcctattcaaaattttttatatatagtatttctatacatctaaagtttatatacctaaagtttatagacccaaagtttataaatcaaaagtttacatacccgattcaaatttaaatttgaattatatttattcaaatttaaatttgaatttaaatatttttttatacggaaatgctaaacaccggtatcccgtttgggcacggttgggatgggacagattttctaggaatcacagaaatcatcacgagcttatccgagtcccactctcaacagagacacaacgtttcttgtgcttatccaagtcccccactcacagttctctcaccgtgggc

SEQ ID NO: 1671 - DNA, 2110 bp, Oryza sativa
  Intron number 1 from transcript LOC_Os12g08140.1 (locus LO C_Os12g08140) derived from phytozome v7.0 (chr-ID Chr12; p os 4164380 to 4166489)
gcaagtgttcctgtttggaatattggtaactctccctggctgttcttaggtgcaattcccaggtactaaattgacataatagtttctcaggattgaatcacttcacgtaaaaagtctactttgcttttgccaaacaagttgcctatcattgtgtacactacccaaccaggacctttatcatcagcgtcatcttgtcaatattttatcacccatggcacaaggtaacttcttctgggttgtctaattcaataagtagagtaatttttcctgattgatgggttctgttgcttctctgtttggttatttgtgggctctggcttgttggtaagtgtgttggatttggagaactccttttctcttaatatgctaacccaagttttcagcttagttacattacatttatctttcccccaaaaaaaacaagacacatgtttgtataagattaaccatttatttatttttattttttcactggcatttcgattgaattcagcatagttcgtaacgatgatcttaattgttgtcagttccctatttctacgttttgctcgcaagtttgtatcaagctccatcattgttctaatctattatattattaaaggaatagaaaaaggagcctccacgttcgctctcatggtctagaaattctcacattaatcggagaaaaagaaaaagttaagttcatatagaaatacaatttagaaatagctgaaattcggaataaaaaaaaggaatattagaagaggagactagagtccatatagaaatacaatttagaaatagttgaaattcggaattaaaaaataaggaatattaggagaggagactagagtccatatagaaatacaattaggaaataactgaaattcggaattgaaaacaaagaatattagaagtagagtatagagtccatatagaaatacaattagaaaataatagaaattcggaattaaaaataaggaatattagaagtagagtatagagtctatgtagaaatacaattaagaaaaaaaatagaaattcggaattaaaaaataaggaatattagaagtagagtatagagtctatatagaaatacaattaagaaaaaaaaatagaaattcggaattaaaaaataaggaatattagaagtagagtatagagtccatataggaatttaaaactaactaaaattcggaataaacataataaaattaaaagtagagtttagagtccgtgtaaaaatacaatttacaaatatcgagattaagaaaaacatgggaagaagagttaaaagtaaatataggaatgcaatttagaagtaactgaaattcgaaattaaaaattaaagaatattgaaagatgagtttagagtccacgtagaaatacaattaaaaataataaaaattcagaaataaaaataaataatattggaagagcatagagtctatatagaaatataatttacagaaaattcggaactaaaaaaagaaatattaaaagacgaatctagagtccatataggaatatatataatttacaaatttaaaatttgataataaaaataattaataactaacacgtatataaaatacaatatgaatattacccattagtagtttcgtaaagttattgcaaaatttaaaattatgttgtcattttaatatatttgaataatatattgagaaaacatatatgctgttatatgagagaaaatataataatgctagccgtgcaagctgtgcgggccaccatgctagttttgctttattttataagaagccagaatcctggaatcatgaaaatggcttttggaaggaaaagatgcactccgacgaaaatgtgctgcaactgccgttactcaagtgtttgaagttgcaggtcagattctaggatatgtgtggctgtgggcttggatacagtgctacactgcaataaaattcttgccgatgaggatgagagttaaccggataatacagaagcatggtgataattacaaggtataagaaaatattcgaactgcatgaagtagcatcatagattgacaagttaaattctgattctgaacatgcaaactagtaagaaatatcatattatttcttattcgcaggttcagactacgttgaacagc

SEQ ID NO: 1672 - DNA, 972 bp, Oryza sativa
  Intron number 5 from transcript LOC_Os08g27070.1 (locus LO C_Os08g27070) derived from phytozome v7.0 (chr-ID Chr8; po s 16536048 to 16537019 reverse strand)
aaggtttgtcttcctttattgtgtccacagattctcattaatatccacttgtttctattagctatatgatagcataatatgattctgtgaaaatataaattaaggaagcattatttttgcagtttggtaagattagtatggtttagtttgaactgcctgaccagatgagtgatatgactcatgcacgtgacaaatgccattaattgaaaggccaattcttgaaaaatctgcaattgtgtgattcgtactcttaacagcagtgatcaaaatattgcacctttcatgcttggcacatataaatgcaactcaataggataaagctatttttttcatcatacaggactgtttcttgatattgtgattgtagaagtaaaagtgctatttaatggttctcctgcacattttggaatagtttggcccgaattatgttgttcatgctgtaactattatggtggtaattagtctgatatgtttcttacttgcattgattttgtgataggtatgatactaaccttaatcacatgcatcaaaagtttcttaaccattatacttacatactggttaggaaactttttgatgcatgtaaagttagtgtcactaggtgcagattaaggttagtgtcgcgtgtactcgtattcatcatattgtacttacgtctagagaactgaagcacattcccaagaaattgcaaatcagtttgtattcatcatattgtacataaatctagagatttgaagtacctccaagaaattgcagacttgaagtacatctaggcatcaattataagcaatttaaacaactatgttatgtcaattaagttgatataagagtgccagttatctttgtttttttatatatcttagtaccttttaattgtaatcttgcttgttaaaagtcctcatgccatcttttttgactttgttgctcccttgtttagaagaagtgtctaaacctcaagacgcagagaaggct

SEQ ID NO: 1673 - DNA, 824 bp, Oryza sativa
  Intron number 4 from transcript LOC_Os04g50740.1 (locus LO C_Os04g50740) derived from phytozome v7.0 (chr-ID Chr4; po s 29834084 to 29834907)
actatagaagaaaagctaaattccttacaggtagaaaatgtataacagcccatgttctatggaaaaatcctgctaatgccaccaattagtattatctgtgaatgctcactatcagagtctaatttcaatacaacattccaagaaaaagatgatctgtgaatgccaaaattatcctagatatttcctaaagagatatctgattattctgtatttttaaaaaaaaaatcttctctttttctttaagaattttgttttaacttttaaaagttgaattacgagccatgaacatagtgaggtgctgttcgtagaaatttagagcatggattaaataattaataaaatatccaggacacatgtgaatttctggtatgcctctggttataaataatttgtctttgcattaagaagttgaattttcttatatttaactagctcaatgtcttgttgatggtaaccaaatgatttgttttatatgatttgggattggtgtccagtgtggctgagttcatttccttgctgaatctgtaattctagattttctttttttgtttccagagaataggatcaataagataactttctttaacttcatatatctgtagtctgtatacagtaagtccgtaactgtgcatacactccatattactttcatttgaagggggccacaacgacacattcttttcatggttatagtaaaatatgatgtcatgtcggataatatatcctttgttgattattcgttatagtggagttctatgcaatgataattgtatctggatcacaatacaggatcgcaccgtggtgccttttttaagcaaagacag

SEQ ID NO: 1674 - DNA, 1277 bp, Oryza sativa
  Intron number 3 from transcript LOC_Os11g05420.1 (locus LO C_Os11g05420) derived from phytozome v7.0 (chr-ID Chr11; p os 2434375 to 2435651)
ttctggaggaaataaaggatcaagaccttcacaatgtaagtattcatgattagttcgttaagtttgctttgtcattttttttcttctgattttagtggctagttcagtgtcacacgttattcatattgacagaaacgatgacattagattcttctgtttctacgatatactccctctgtcccaaaataatctatgaacttattaaaggaataaaaaaaagtagcctccacattcgctctcacggcttagaaattcccacattaatcggagaaaaagaaaaacatagtccatatagaaatacaatttataaatagttaaaattcagaattaaaaaataatgaatattggaagaggagactagagtccatatagaaatacaattaagaaacaatagaaattcgaaattaaaaataaggaatattaggagtagagtatagagtacatatagaaatataattaagaaataatagaaattcagaataaaaaataaggaatattagaagtagagtaaagaatccatataaaaatataattaagaaataatagatattcagaattaaaaataaggaattttagaagtagagtatagagtcaatataagaatttaaaactaactaaaattcggaataaacataataaaattaaaagtagagtttagagttcgtataaaaatacaattaacaaataactaaaattcgaaatttaaaaaaacatgggaagaagagtctaaagtcaatataagaatacaatttagaagtaactaaaattcgaaattaaaaattgaagaatagtgaaagatgagtttagagtcgtccacatagaaatacaattagaaataataaaaattcataattgaaaataaataatatcggaagaagagcctggagtccatataggaatataatttacaaataactaaaatttgatattaaaaataattaataattaacacgtatataaaatacaatatgaatattatacattagtagtttcgtaaagggagtacaaaatttaaaattatgttgttattttattaatatatttgaataaataattgagaaaacatatatgttattatatgacaggaaatataatgatgctagccgcgtaatctgtgcgagccaccatactagtttaatctaaaataagatggtgacgtacgcattctaatgaagttggtttgaaaatcaaattaattattggtatatggtatattgtacatttttgtgcttttgtgcaaaggaggacaacaatatttttgaacgttttggagtcat

SEQ ID NO: 1675 - DNA, 760 bp, Oryza sativa
  Intron number 4 from transcript LOC_Os03g37140.1 (locus LO C_Os03g37140) derived from phytozome v7.0 (chr-ID Chr3; po s 20586299 to 20587058 reverse strand)
aagaggtgtgtatatgttaccaaactattgacattcataaatttggttaatcctgccatattttttgttgagtcgataaaattatagcaaaaaatatagatttaagagagatgaccgtatttaggaattagaatatccatccctaccactttgaagtatgacctgacaagagggctcaacttgtagcctcacaaagcatcacgcagcatgtttcaccaatggaagcaaaacatgagttgcatacgttgccacttactgtccaagcgactgactatctcctgccaaggtgctaccactggctagattgccccgtgacatgcaagccattttctagggtcatgactgtaactgttattgctcttgccactgcaagcctgctttgaagaaagacttttggagctttgttcttttctgcttccatttgtgtaaagacatgaggctgcaggtggggccctcttgttatgttatcactgctagcgatggagattgtaaagtctaaaatttgtagttttgcggtagagaagtactctagttttgcaatatagtttctctaaatctagttttgccataattatatgtgattttgtgaaatttactcttttatttcccactttgatgttctcgcatgttgtattggtcaatattctgcattttatgatctgtgcattccttaaagatttccttcctaacaaaataaatatgtgcaccatgttatgatctatcttctgttattacagttatccctttggaaataagattg

SEQ ID NO: 1676 - DNA, 3312 bp, Oryza sativa
  Intron number 3 from transcript LOC_Os08g01274.1 (locus LO C_Os08g01274) derived from phytozome v7.0 (chr-ID Chr8; po s 177672 to 180983)
ttatttaaaggtatgtgattgtgggttttgttttgtgcttatggcatgcatgatgtttccttagttttccgcagcaacgcgagggttcatctagtgtattgaaacaaataaagacataataataaagtgaaaaggcaaatggaaagatgaggaaataaaggaagtaccaacctagaggagatggacatggagccggtgttgtctcctgtgtcgtttcttcttcttctctccaagctgaggtcttccatgagcctctggcatggatcgaaatcggaatccgggagaggaatggacttttggaagcgggcgtggaagacggggcgattctgtgggtgggcgcagtgggtgaggatcctccagtggaggaggacgtcgtccaccctgtcaacgccgaggtcgaagagataccttttggggaggcgcgacaggtggtggacgaaggcggaggcgtcgtcggggagggggacctcctccttctccagctccaggattcgctccttcagcttcctcttcatctcctcggggtccttctctttattcaccatgtctgcctctgggtgtggccgtggcggcgacgagctctccccccaatcctccgcctccatttccatctccccctctgcgcccctgcgtgctcgcgcccgcgggggcctcgtatttatagccgccgtgcgtggcggtggtgcaggctccggccggcgaccaccgattggagtttggagaagacgacgacgaccactgggcttgaaatactaacggatttaaatttcctttttgaattcaattttctgtgggttttgtttctactagtagtatttccttttcagaatattccgatctgccgtggccgtgtgaacaatggggacacgtagcggtccagccaatggggacacgacgcgtggcatctcttatccggagcggaaagggatcggatctgcgtagagggatggacggtgcggatggtaactgcggacggctgggattttcccccacaccgcgggtggatgcggatgcggtggggcccaccgggttgggacctggatgacgcaagctgcgactttgagggtttggttgggggtggggcccacagaaaggcgtgactctgaccgcagtttcttcctcttctatattaaaaataattataaagacaaaaaaaaaactccacaaacaaggtgactcactcgtgacgtacgcttcttatcactatactttgtattaaaaatatatgataaaaatgtaacctaagagtttattttctctcatatatatatatactgcctctcgtagtttctctcatatatactggctctcgtagtttgttaccctctcctagattgatttttttacggaggaaatagtaattaatattttatgttttattgaaaataaaaaaatgatgtatttaaatattatcaacataattacatatttagatcttggagctctggattatagggcctgttcattttgatgtcattttcaatcttgttaaagttgtaaaaaaaagtggctatatttagtttgctgtcaaattttgataactatataagaaatcctgtcaaaattttggtaactatataaagttttttttgacattaaagtgaacaggcccatagatgtatgaatttacgaagctaagttaggagctttatcaaacacgtacgatgtaaagaacgatggagtattaattattagtaacttgcttacagtagattcctagaccgaagagcacgcagtggtgaaaaccccaagttcacttaacaatttaacaactcgataaacttgagacagtttagttaattaattagcgacctagcagctactagtatggttgggacagagatttcaacgtacggagaaaactaggaaccattattaatttgatgactgcatttacaatgcgttacagaacttaatttaattaagggaatatatgacctcttctaagataataaatctagacaaagaatagtaaataaatacatgccggtctatagctttagagttgtttgtattgttgtgggaggttcggattttaggagaaaatacagccatcagaagctcccaaacatgtccaatgtttatatatatacacacacatgtatacttaacgtatttttttgtgaagtatcgcagtggttggatttggggtcttaattatcattctccgtatatataatgtcatgacatatcttaatttttattctgtgacatacaacctccaatccaaaatacatcaacttttatgtataaacctaaacaaatactactatttaccatagacttatagttaaaaattatctggtaaaaactagtggaggtggaggagcactggatcaagcactcctgtcggaaaaaccaatgcaataagttcaattaccaagcataggtacccaattgcagttctacctcgtgctattatatatggatgcccactaagcaaagtcaatttgtcgtgcatattgtgatattcagattaattattagaccaattgaggtgctgccggccgcttaattaattcatctcacgcaacacaaagataccgttgaaactcaagatttaaagctaaggctgcaggaattaataaaagccatgtttatcttatactcctatgtatgaactcccatgtcgatctccctagaactttacaatctgtatgcacactaaatccaccataatttacagttactatctctgtttttttaatatatatgatgcattgacttttataattcgtaggacgtactattcgtgttttctggaaatatgtatatgaatagataggcatataaggctcacttaaaaagtacttttgatgatagatctcgtgatattcttttactttacttataactaagtaattaaataaatgctgatcaaagtttgagggaaaaaacatcctgatcaacggtgccatgtaaaaagaaaagaggagtgacaagttggtatattcataaggtcaattgcttatttgaccctgttttgacatgtaactaccaatttaacattactttttgaagtttacttatttgaccctccttttcaaaaacgaagcacctattccgtttgggtgagttaacggtgttaatttaggggtaaatagtcaattttgcccttgcttatttgaccctgttatatcttacttgtttgaccctattatatgtcataccgtgtatatattcaaatattttaacatatttgtaataattttggctcaagtttgatagatttgtcacaaatttgacaaatttgaatcattttgtatttgggatgcaggcgacagatccagcgacggctcgaggcgcgggcag

SEQ ID NO: 1677 - DNA, 3227 bp, Oryza sativa
  Intron number 1 from transcript LOC_Os05g32670.1 (locus LO C_Os05g32670) derived from phytozome v7.0 (chr-ID Chr5; po s 19062454 to 19065680)
tggggtgttccaaagagcaagcgccgaagcaagaggtgagtgcccgttgaccatatgccattccgtacaacttccatcagattagttcagtttcaccattgcaagatagttccgacaatttccatgctagaatgcaaatctgttataatacacttcagatagcaagagcatttctgtcctcagcgtggggggtacaagttagtaatgtgtttagatgaagattatgtttgcagtttgaggttatcttgttacattatcattaaatctatatctttagtgtccttttatttgtaaatgggcagtatggccatctagttctgtgtgatcttcggagtgtgattaggggatttacctgattcatctgtatcagtatgtcggtgtgaactttttcatctagttttccctccaaaaccaatgaattctgccaatactccattcaatggtctccatggtattttgggctatttggtttgcgctgaaccctaccgttgctaaaatttggccatgagtttgggactcaataattgtggaaaattaattaggctgcaagagtaaattgctgtgctggaaaaaaaatgtaaccaaatgaatgcagcatcctgttaacatgatcaaatattggcaaacattgttacctaattaatcttatttatcttgtctttgtggacataattcgaattctattgctacttttctcaagtacgctggggtgtaaatgattttttttgggaccattgtttctcttgatgctaggtaccattatcatccagggtctagcggccctaagcctaaccccatttttggatagacctcagctgcacaataacttgcttttgctttagttgttgcttcgtggaaaatgtttaaaccagttatttcattcagaccagctgggtttataagttggttcggcctatcaagattttcgaggtggtactaaattgattaactgctgttctgctctatcgctaccacctacatgctcatgcactagctccctattgggccactaacaggccacaagtgctagctagctagctccgtgttcctggatctgctctgcttgatctctgatgtgccagcagccccttcctgattcggggcatcacatgctaccatcctcaacaagctgtatgtcctcgagaaactaacttacctatttctgagaaatgactaggatttccccttcttagcacacatttgtttctctagtgccctacatacatgccatgccgtgtgcccactttgggaccacacgcgccttgcactatatgcccgagcccttggtccacaacgagagtctgttgtaactgcgagggttggctcttgcaccactgtaagtacagggttgagtgattgactccgtttcaggcctaacccaattttggattagagctcacctgcgcaattacttcctttggcttttttcctaatttcacagaataaagactaaagctgtattgttctgttcatacctgccaggtttacaagttcgtttggccctatctaaatttccgaggtggtactaaattgattcactgctgctaccctgctctatctctactgctgccgcaagctcatgcactagcttctgattgggccactaccagctcagtagtgctagctagctccttgctcctgatctgctattcttgatctctgagatgagccaccagtccacttggccttttgggggtattaaacaccagcatgggaacatgccggcatctagcccctaaccgtcattgggagaagcacttgctaggccaaaattacttatgtatatcttaaggcactaatgtgtcataccttgtttatagacacaccttatagcacgtttataccatttctaagaaaatcagaaaaccaaaatcttgaaatgaattttgacaatggagggtttggaagtactgtgtttgtggtactgatgcgatgaggcgatactgtctatcgttgttttatttcagtttggcatgacttgaaaaatgctgcactgctgctgagattaattgtgcttcacgcacaattttttttataaaccgccttggtttagactttagagtactgttgatagcttgagctttgtagtttctggaatcggattaaaaaaggatcaccaatttacattagtatcacttctggatggttgaagttcataatgaatgctactactctatccttactgtcactaattctgtttctctaggacaccaagtgtcctggtattggtagtagcttttcgattataccagtagcatgtatgtgctaccagttcaattttgttctctagcatatatctaagactaaaattgcctggtacagcttatagggcaattatgacatgtaaatatgtgatctctggctctctgcttagacttgttagtagcatgctcttgcagtatttttgtagtatctataactttgcctcgtagcaccgttgtacacgaaaaacgttttcgctaagttattatttacctttattgattgattgttaccaaattttttgaggtcgggttctcgtaactctacttatagcaaaagagttgtaaaatttattttcttaaaagtccttccacttcattatcttgtaatctttctgatgacctcatatcacacacacaatttttgcaacagcaaaatgcattctgctatgtcaactcacgttgacagcctgcttcagttaagaacgtgcaggctagctgttcagtttggttatgcaattgtatttctactttctgagtcttaagttggttggatttgacttgaagatcgttgctacattaggatttgcatagtactggattttttagaaaaggaatacatggtactgcattgattggcaatttttttgtatagatggaatcatggaacatagaagggcacatctctagataaatcagattaactggtggtactcttgtgcataatttctgaacggagatctggatccaacatgaatcccatctagtttttcttttaattatgaaactaactgtttattatagttaaactttatcatacacagttgatttttaaatccttttaaaaatagcagaagtttgggtttggattcaaccatcgctagttcattgctagcttgtctgttaatcttaccctaaatactaagcattcatttactgatttttttttcaccggaagactaaccaaagggcgtgctttgtgtttgaactaccatggttgcaggagcacactgggcttgccagccg

SEQ ID NO: 1678 - DNA, 3004 bp, Oryza sativa
  Intron number 4 from transcript LOC_Os03g24520.1 (locus LO C_Os03g24520) derived from phytozome v7.0 (chr-ID Chr3; po s 13975275 to 13978278)
cataaaatacccaacacttacaaagtaagggtttaaagtttccattcagttgggacattattctgtcttgcaattttactaacattatcgtgcctgcctttattttacatgatatgtggttaatcctatataaatgtctaaggtatgatattaaatgaacaagtgcttgaactgttgatttttctttcgtttgctacgaactctctggttttaaatgacaatgaaacataaaaatggcttattatttaatggcagtaatcatgaaaaacagaattctaacatcatgaaagtgatttcctatgtttgtgcctgctactaaaaaaccactgttgcaccttatgcattgttaatttgttatataatatttatgttactagacatgtctttgtttcttcaatagtattattatattggtaggctaatgtttcttcaccagaattataagtctgtcaccacttaacgtttcaaagaagctttgcacgctcacatccttccgatttttttatttataagaactaatccttcacaaattaaataagtagtaattatctgtagggatttaccaaagtagtaaggatgctattgtcatcagcgtccaggtgtggacgctgttagaatacacgtccagctcgggacgcacttcctaacagcgtccacagtctggtgcgacccaatgtgccttaccacgccggccactgcaagtgcttgttgacatctcctgctagcgagccttcgtgttgtcctaagcaacgttagctcgatcactttgttggcgattgagcatgtttaattacttaattatatgctatcactgcctttgaagtgcccacgcatgcgttagctttttctttatctggtccggctgcctctaaaacagatatatagcttgttgttggatcaatcaatttgtagttatatataggtatgtcgattcattttaatagcgctgcacatcgtatcaacgtaatatggttctagataaattatactcatatatttcaataatctagccaactgtgtcaattacaaagacaggacaaacaatctggatagatacaatgcgttcttgcatcaaccaggcaaacaaaacgattcaaaccaagtatatatccggacactagataagttcttatacatacgaagaaacatccacaatctaaaaaagctcacttaaatatataagctagttgcactgtgcttcttgaaacttttcttggcactcaactacttgtgttgaacttcccgaaaacgtaaatcaaacgaaaatgttagttttaccaagatgaagtaaggcagctagctgattctcacagagttactgtttgttttgttgagtcactagcttggcctccgctatcttctgtgtgggcactcctatctccatgctctatactgcaatcctgagtatacccaatagtcaaatacttcattgtattgataattttggagaacttgacgtttaaatgcaaaaaactgagggcaaaaagaagttgaagaaataggtagactaaaaacatttctcgtattctgaaatctttatactttgcgtgctgaccatgaggcatccatataacaaatcactgagataattagtagtcatgcacctctggtagtttgtattttcataaacgctttcccgtgctagacatttcacaaaagttagtaacattactattagattcatcttccatgttgtacatatgaaaaggaagtatatagcataagagtcgagtataattataaaactgaatatatcatcagttccatttatgcatggaagtagtatcgactgtatggactgctgttgtaggactagcacatatataaggactttgaaagacactaggaaccagatccaatcaaacattttagtaatgtgatggtcaggttaatatatatactcaatacaaaaggcatgaattaatgaaccttcgagaacaccttaggtctgaatccctcatgttcctctgcagctagaaatgggatgtgtttcatgtaataatcctgatatcaaaattcagtatgatagagcttatttctgtgctctacagaaattagtgaccagcatattggagatcagtccatcaacaaacgaatatcagaaggcaggaaaaatgcatgatgtcacctgcatcttggcaaagagtagtatgaacaggatgtcaggattaacttcaataagtgagattaaggtgcacttggaaaggattttatgccttttcagatctcaacagaaccatggcaccacaaacaacaatagtaaatctatcaggatgaaacaatcttattgctgaaacaatcgaccacacaaaaaacctgactagggtccgcatagaggatgtcgctgtcgagcggtcactggtggcggcggcctccggcgcaaggaggcaaatgacagcggtacgccgcctgcggcgacgcacagcagctatctggggtggaagcggacggcggaggcgatgagagcaggttccgccactggattggaggagggcagcggcagcggacaagaggcgccgcgccaccgctgagagggtcgagacgagacggattctcttctcgatttattttcgatttattttcccctttttgattttcttcaaatgataataaccgaatgttgaacgaggctgacgggatgctggacgtcgttcaatacagcgtccaggtctggacattgttacgaagagcgtccattcctggacgctatagcgcttagcgtccatcctacaattaaaatttccctctatcatttactagatatttaattaataggttgttaattattatatataaaaaaatgggcacatccttaccacgcgcacagagtatgtagtataacagatcaacagtacagaattacctgaagtagaaagaattaataagaattacctggattagaaagaattaataatcataataatcattttattaatttgcatgaatttgactttgtcgcccactttcagatacatattggattccagtagcttcgaactgtttt

SEQ ID NO: 1679 - DNA, 2674 bp, Oryza sativa
  Intron number 1 from transcript LOC_Os09g17970.1 (locus LO C_Os09g17970) derived from phytozome v7.0 (chr-ID Chr9; po s 10994434 to 10997107 reverse strand)
gtggcaggtgtgttcacggtagctcaggtcgtggtggagggcacatggtggtgcatcagcccgggtaattctaggggctatggcagccacttggtagctgtggaacgataaccttcagatgtggggtagatggtggcttgcttgtgagatgatggtggcttgttacgggggagagaaaatccactcttctatcccatcttatccttctccaacccaatgacacagatgaagccgagtgcatcgaattttgagctcctacctgttggccgatcggtgatgaggcactggtgtagtggttgcatgttgaagtgttcggatagtggtggctgctaatgacatgcatgctttacaggggagggtaggaagattacggacgaaagcccagcctgttcggtgccggcaacaacagtgttctaggtgttgcaactcccctgtgggtgttttcatggtgtatttccttctctccgttgtggaatacgtctgatgaaaaccacgtcccgatctcataggacgggcgatgacggcgttctcagcatcgtaaccttactagaggcatcgtttggaggtttgtttactactaagcccttctccatagaatttgtcctcttgcgatggtgcctagtcactgcaagttgaccatgttggtggactggtgagggagatggttccatattatctcatccttttgctcacactataagaaaccagaattttcttggtggccggttgattttttggcggtcaatgttgaccaagcaggtaactatgagctgagaatggctacaacttgcagtatgcaagtgtcaaggggtacacagtggctgaaatgactcccaagataaagctatgaaatcatacctgctataggggtacttaattgggtcatagatatagtatgtggtattatacatccccccatagaataactattctacaccccctgcacatgggccaaaacccaccttccaacttagtcaaaggccattcaaagcccccacccgccggtcaaatccatgtcaaacccgtctgctaccttcccccacacccacctttttcaagttctcgtctcgctagaacgacgtggtaacacaacggtctatatgtagtaacataattgctttctgcagtaacagcgttaaaaaatagtcatgatggagctagttttgttaagcacttttttacgaacgccatggtgcaaacagattggaaaacaagatatgatgtgagagatattgctccctaaagattgagatttaaaatgttttagctctacacgagcattactactataataccaatgttactattgcatgttctccgttactgtaattttcatcatgatgttaccgccaaaagttgcatgccacgtatcttgttacagcatttctgtgataatgttactacggaattatagtaataaggtgtgattcctacattaacatcctacaattacataactgatttattctcacaaaaatttgaacagatatacagagtgagcaaacaatggcctctaattacatagtgtcatagggtgaattggtcggagagcttgctatgaaccatgagatcatgggttcaagagtctttaatttaccaatttatttttaatttctctagtttaagctggttttcttgagagaaaaaaatcgaaggaggaagggaggatagaacaaagaaatagggagggagaggagggggccagtgaaagaaatccagggagaaacggaggagcgcttatacgagaaaaaagaaaaataggggaggaagagagggagaggagggcgcccatacagggtaggggctgttaaaaaagcttggagctcgcaagcctagcatgctcgagctcgaatagctcggcatagcttgattaacataattagatgcaatgcatataggatgacattcttgatatgtcactatatacttgttatcgtacttgacctgctcaagtctcaagacctcatcaatgctgctcgtaatagtactactactcctagtagatgtagtagctagcttttgttaatttcaacgttccaaagtaatgaattcatgagaaaagctgcagaggcttcattcaagacaagaagcacctattaattttgactaccgatagtttgcattgatatctcttatacaagagcaaattctttggagttccaccaagtcaagctgtcaagctcgagtaggctcaaagctcgatcgagcttgaactcgagctcactcccaagctcgatcattaaccaagctcggctcgagtttggctcgagtttataactagctcaagcctacatacccaaactcgcgcgagctcggctcgttgacagtcgaggagggagatctggtggagagggagcaaaaaagagagaaaaaagctatcccaagattcaaattgagtatatacccaatttaaatgagtatgaactttttaaatgtttaggtatgaacattaacatctttactaactagttcaaactgaatttgaacatattttttttgttagattttgattctaggtatatagcatccaaccatataattagttagttatgtaataatgaactgtgcaacaaaattgaatttgagttttgtttgttgtgaggtataggtacgaatcaaatctaatcaaacattaccctgaaacttatttttgtccatgccagttgacgctatc

SEQ ID NO: 1680 - DNA, 6527 bp, Oryza sativa
  Intron number 1 from transcript LOC_Os12g15222.1 (locus LO C_Os12g15222) derived from phytozome v7.0 (chr-ID Chr12; p os 8670060 to 8676586 reverse strand)
tcgacctccttccaccaagcactaccggctgagaggtaacctccactccctactcttcgattattcaagcaatttttccagtgaaatttctcaaatcgctgtgtacaaattgtgtaataaggcaagatcaaatttctcctgctctccaccccatctgatctgaagcaactagttagatcccctagtttttttttggtttgaggtttgctgcagctccagatttagggttgtatttctatgactctattgccagatcacctagttttgtggtttgaatttttcagaagctccagatgtgagacttagggacctagagttatatttctgcaattttattcctttccaatttgaccgaattttttatttataataattaataatatttaaattaaataattagtaattctgtgggaggattaaccaaaatacgaagaacgctattctaaacagcgtccacatatggacgctcctataaacagcgtccgcagatggacgctaatccaaacaccgtccagaccggtgcagccacttcaaacatatcgaaccgagcgacagaaaaaagggagaaaaattacggcggcgctagggtagggcgccgccgccgcccacattgatcctggaggccgtcgccgctgccgccgacgccgtccagatcgaccccgggaggtcatcgcctccttccaacctgacacaggtagaccatctccgccgtttgcctcaacatcgagaggctgtagcagacgcccacccccgggaggccctcacgaccgcccgcatcgattctggaggacgctgccattggcggcttccaatttgggaggccgaaggttgctgtcttccccggaggctgctgctgctatctgcctcgactcctgtctcgttgttgtcgtcttccttcttccttagagattgcagccatcgtggacctccacggccagaacttcacccagaactcctaatcaggtgattttgataggcataactgactcccaacaattgattaattttgtttttgcatataacacattttggaatgcaatatatggatgaataattacatcacgtggagaatggaatcaaataggatagtttcatcctgaattcttgcgaactactgaactgctaattacttttttaaagtactgtagcatcgaaatactgatttaggttcttggttactaacattgtctgtagcttgaaaatggctgacgatggtcggttcagtgatttactatggatgcctcatggccaacacaaagtatctaaaatttcagaaaatgtgagttgtttatttattattttggtttcttgccattttgtttggtgctcatatcttcatctaggttgcccatgagtaattgtttttctctttgatatagcctagtggttcaatgaatatacggcaccatcgcattggaattccttaccacccattatgtcggtcagctctagaaaattttggtttctatcaaatttcaaagatgaagaccattaaaattgacaaatatttaatatcagcattggtcgaacgttggcggcctgagacaaatagctttcacctaccgataggggagatgacaattactctgcaaaatattagttgcctatggggtttgtcgattcagggaaaaccaattgtgggccagtctgatggaaattggggtgatatgattgagaggtatcttgggattccaccagaacatcaagaaatgaagaaaaaaaagaggaaaaaagaagatgatacatttgcactgacctattcacgatactccataaatctgagtaaattgcgtgatcactttcatgtcatgcccaataacccaacacaacgggagattgattggcatagtcgagcaattatcttagaaattcttggctccattatttttactgacgcatctggagatagtgttccggctatgtacctccaatttatggataatttagcagtgcaaactgaatacaattggggagcagctgcacttgctatgttgtataggcaattgagcattggtgctgagaaagcaagatctgaaatttttggtcctctagtactattacagttgtggtcatggtcacgcttgctattaggtcggccaaaaaatataattgcaaagacggatgaagtgggggagcaagaagaagaacaaccagatgattgccctatatttggagccaagtggtgtagtttacataaattccctaccccacataactgtggtaagaactagttcatctttaacagaacaatttaaatccatgatccaacagtacgtattgatcacaacaataaatctatgatccagcacactataggctgccgatggttccattaccctgcgttccgctcgacattgcgcctacaaaaaaaaaatcagagaattatatgacatagaaattaaatcaccattttataagttactcaaattggtttctacctaattcactatggtcgctatctcttgtggaacggcgtgcctggtgtctaagtctccttccttgcatttcatccatgtacattggaatcctgttatgctgacgacggccaagatttatcagtctacgatcaggaacaattattggaccagtaaaaggtggccattcagtttggtttccataaggatgaaattgccccacccaggtgttcgcaagtgattgagaagagtagaacggaacgatcaattcattttcactaagatttctgtgcttgcaaaccgccaatacatgagcacatggaacaccggttagatttggcttcaaacaatcacaggatggtgggatgttgggttgcaaaactaccttgtacttgaagtctctgcgtgtgtaaaacacatggtttccttgttgcattgggactaattcgttgtcaaccttcacctcgtatattccaacttcttctccatatgagattacactcatacgtctagccttgtctcctcgcttaaccaataacttttcaacccgttgagaccaaagcttaccactgtgcactaagttgagagcgatccgtcttcgttcaacaaaccattctaagcactttgaaaatgtttcctccacaatggctgccactggtaaccttcgagaaaacttaaaaacgttgttcaaggactcggatccattgcttgtcatgattccccaacgatatcccccatccttacattgaaataccttctcaggcttttcttgctcatctttatcttcttgcaaatacttcccaactttttcaagatatgttattgcctcaggacaaatatttgcaatcgatgacattccttcttcaaattttcggggtttctttttcttcactgcccacttaaatgtcttgagcaccatgtcattacgacaagctttccatagattctcagctacatgctgtgagcaaagacggtgcacgcattcaccggcaccctcattccatccaatgtgaggttgcttaaacaaccatttgatggctttatgtcggtcagatataacacacataaactttccatatcctattacctccttccgtagccatctcataaaccacccccagtttgtactatcttccttctctacaatagcaaatgcaagaggtagtagctgattgttagcatcatatccacaagcaatcaacaatctacccttgtatctccctgacaaaaagcatgcatcaacacttattactggccgtaagtatggaatggcattaatgcatggtccaaatgcccaagccacacttttaaatgatcgctgcccttcctgagtcgttggattcgacaaaagaacatactttgtaccagggtttttagattttatagcctctaagaaagggataagcagaccatatgaaccttcccagctaccaaaaagttgtgctattgctttctctctaccacaccataacttactgtaagatggcttcacatttctatatctctgctggactagtgatctcacattttttatacttaattccaagtcatcccttaatgcatcacgtatcacattagcaatcatagcagacgataactgagcatgatcaaatctatcagccggtgctctacaagtgtgagcatacggacatttccttatcatccaacatgagcctattcctatcggtgttgcatacagcctccacatgcaactagtatccgtgcactgagctataagcttagactgactacttgtgctatatttaatttctgaatttttattgatatgaaactcacctatggcaatctgtagatgctcttttgaatcaaaagtctttgcttctgctagtggattgtcaaattgattcttgcatccaaagaaattctcatctgctgttgtcttccttagtacagatatatcactgaatgcttttatagcatcttgtccagatgcacgcatcaaaggaaaggcattgacagaatgagtaacacgtggttctgaaatatcatcatctgaactattgttaagggcatcatcagaatcatgctcgttaccactatcttgtccattctctgcaagatctgtctcctcacctacatatgtgtcttcagcaatattggcatcacctatagttgtcgttgtttcgtattccatgttaccttggttggtttgtggagacaacggcaatgctgttgaatgcaggtcatgggttaaagtggatacgacatgtcctgcagaatgaatggtatctggctccaaagaaacacctgagccatccctttccgaatgacccggctccaaagaaacacctgagccatcccttaccgaatgcctgcttgattcaaccaagggcatactattaacttgacttaatcttgcttccgcagatgtgcaattgacataaagctcaacaacttgcccacacgtcttctcgaatatcatctttcatcccctgtcttcataaataggaatgagttgaaaatattgtggtccaggatttccgatatcaaaccgagcttggatactcattgcacaatgatcctcagtgtacccaagggcttgaaaaatttcatttctgacttcttcaaaggttgtagcctcaagtgccggaaaagttatttttggaggaatgttatattccacacccttatctccatgttgtattctaccatcgatatatactagaacaataattatttttctctcagccatctgtgcaaaacaaactcaataatttaacaaatcaagttaaataattagtagttagataataatctgtacatatatctcctaatttaatttaacaaagcaagttatataactactagttaaataataatctattcatatatccttcagatttttttaaaaaaatgttgatttgcttattaaaaatatcaacgaatagcttataatttaagaacatgcactaccgatccaactacacaaacatgtcaatatatataaagtacgtatgaacacaatgtatacagcaggcagcagctgatcaatgctaattagctaaacgtatgcatgggcacctgttgcctagctcccacagaaagacgtacatatgcagatcaatgtgaaagacataatgcatgcatgtcttgcagttcacctattgccggccggcgagcagccaacgaacttgccgctgaagacgccgtggctggattgatggcgctgagtaatgaacaaatccaaggcgccggcgtcgacaacgacagtacggcgtggtttgcagggtgaagcgtacggatcgaaggcgaacaggcgcatacgacgatgccggcgatccctaaccctagctaggtcgaacaacttttgtttcgatacttctcttagcgtatcggtagcgtcttgagggtctggctgcaccaggaagatggacgctgtttgaaagagcttccagatctggacgctgtttgtaagagcatccatgtctccatcgtattttggttaatcttctcaaagaattactaattatttaatttaaatattattaattattataaataaaaaattcggccaatttgatgtcgttattcaattaaaaattaggtatgaagtcaaaaggcatggatttacatgtgggttttgtgttttgtcgtgatttgttacctatatttaaatgtggtttagcatgagcaacatatatttaaatgtaatttggcatgagcatggaataactagctagatatgagttgcatagttctcatgaagcctgaatgtgtgagtaaatggtattagtatgatcactttagtttgtgacataattgactgtacagaatcaaagtttacttgagagacctaacaaactaattttcaatgtctaaatcaaaatttatctgtagagcatatctttaatgcatattctcttttttttaataaaccagtgtgatatgtcaataaaactagtggttgcagctgaacatttaagccaagtttattgccaaatcatgtactgatagaacactgctacctttccaagtgagtcaatatagttgtgcttcaaaatcttatagtaccatataatatttctttcattaacattttattgagccctagaactaattctaggaatgaattttaatagggaacactaactt

SEQ ID NO: 1681 - DNA, 5025 bp, Oryza sativa
  Intron number 1 from transcript LOC_Os11g25454.1 (locus LO C_Os11g25454) derived from phytozome v7.0 (chr-ID Chr11; p os 14047129 to 14052153 reverse strand)
tcggctgtgtgaaaagggatatttacctgtccaaggtaattaacactatattattctataaatttgattaaacttaaataagttgtttacaatatgaaatggaaggagtaataattatgtctcttgttgtttacattttaaaagcattacttttttttattttcatgcactgacaatatattatgtaaagatgcactgatagataggagtaatacgctattttgcatcatgccgcactatcaatataaagttatgaacgaactattctaaatgtagtgctcttttgtctggggttcacatcccctgcctttgggcataacaacaaaggccctgtttagtatcaacgcagaaactttttaccctatcacatcaaatatttaacacatgcatgaagtattaaatatagaaaaaaactaattacacaaattgtgtgtaaattgcgagacaaatattttaagtttaattgcgtcatgatttgacaatgtggtgttacagtaatcatttgctaatgacagattaattagacataataaattcgtctcgcagtttacagataaaatctgcaatttattttgttattagactacgtttaatactttaattgtgtattcatgtatatgcgatgtgacacaccaaaactttccacccctataataaacagtgccaaagtttaccgttcgtcaatcacaagcgtccattaattccacacctacggtgaatataaaaattcagggttgatagagtgcagatggtcattggtcaatacatgataatgtaagttagcagtgaagaatacaaacttggtttcttctttctcttttttcccacgtgtggtccataatatgatggaatacatgactaaaacaacccactaattaatttacaattaggaaacaactgatttacaaagaagacatgaaaactgatgcctgcggctatggttttcctcaatataaattggttattcagagcttctaattagaattatttttccattattttgaaatggcccggcgaaaatgtgttcgtcagagaactagtttcagcagactaattagaataatcagggcctattgaatcgtagaaataaaaaaaatagacgaataagcaaaacataagattctgatatgaatataaatataaaataaatgattgcaaaatataggaaaaatacaaaatatcgtttaattgaaccgcagaaaaaaatacaagaatttaagtaaagataaatactcaaagaaaaatttccataaggttctagcccatgttaaatcttctatctatctatctatctatctatctatctatctatctatctatctatctatctattatatactaaaagttaaataaacttcctaaaaatactcccaaaccaccacgtggcactgtacaacgctaatacgccgccacgtggcactctattaaattagagatattataaaaaaaagtaaaatatttaaccattggttttgatttaatctgatggatccattattttcaaccgttagatatagcttaaaaaaccaacaatatttatatttaaaaaaccacagctcccgtacatcgatacatgtacgtgcatatacgtacatattttgtacgtgggccccatgcccctcttttttttcgttttcactaacataaaaaaacaaaattcataatttccagcccatatagttcttaggagtacataggagtatgtacttctcacgcagtgccccacgtccatccttttgttttatttttccttttttcactcacacgagataaaaaccatattaatagtctttcgtttttcctttttttactcacatgagataaaaaccacattaatagttccagctcatagttgcacaaatataagtttttttcagttgtattgtactaaactcacgtcatcgaaatatccataatctaaataaaatgaataatatacattatataattatataattgtatatcacttaataacatgttttgttgaattcgatttgtattttcaaaaacaaaacaactccagttgtgagtaatattcaaaaaaatactcactccttactatgaaaaaaactgttatatcaaaataatattactaaatttgtcatgaatgtattttcatgtattataatttttttatatatattattagaaattaacggtcaagtatgttcttttgatatcgtgtccatgtcttctatgtcctacttaggcttcgtcattaagtgagcttatccaggcacacgaagtgatacagattattaccatacgattaattgagtattaaatattacaaaactaaaaatgaatttattttttaaaaaacaacttttatatatataaaggatttgaataacatgcaccttgtaatgcagcatttagccgctcgagaaatgtgctcgctacaaataagggagtatctaatcctatatacacgttagaacgcgctcttaaatttattacttcgataataaaacacatattatgtagtttagaatatacttggtcaatcctagcctaaaatatcaattgtatgtcctgactgatccctatgtttgtaagttttatatataagccactatccactaatcgccaagtcatatttcatattacttatgaggtatctatctaataagcacgtgtgttatcaagcacaaatataaagggcaatactaagtgcataacggtcaacaaatgatactccctccatcccataatataagacatggacgcatttcaagattcaaactttaaaacatttgaccaacacttagtataatataaaataaattttattagttaaaaattatatcattagattgagatttaaatttacattcatatggttataattttgttgctacaaatcttatagtatatgagaaattataagttaaaaattagttttggagactgtgccaactttgaccacaccttatattatgggatagagggagtagttaaatagaggacgcaaccaatccaccgcaaataatagttgactataaatagattgcggctatgagtaatagtgttcctacactcatataaacgcttataagatgtcacatgaccctctaataagagagaatataagaaataaaataataaaaggcaaaacatctatccatcgatttacactcaaaatcggtgatccattattttcaacaaataaattagatctatgacagtagttcctctatcctaaaggctgtctaatcttcccttacatacatacacaactcctatgtacatgcgtatgcaacgtatataaaaagaaaaaaaaggagtgtggatatgatatgtcccatttggtagttttctttttcttaccagctataaggtttttcccaaattgagcatacgcgtagcgaccactccaagcgaggtggtaaaagaagccacgccatggcgccgcctcacgccacccgttgctcaccctcttgccatcaatttttttgaagtattcttttgtaccaatgatgtaaaaggctcacatgagctcttataaatgcatgcgtacgcacactatgaatacacatacgtacaccctgtctctatgatagataaaattcattaaaagaaaatgaaaaaacaaacatacgagagaatactattcggaaaaaaacatacacttaactacattatatccccgttttaaacgtcattgttattcaaattgtgttaacaattagcacaaatagttttgacaaattccatcgaatattaatcaccgtgaacaaagcatacgtgaattaaatgtgtaaacaagaaaaaaaaatcaaaacctatattaactcgtatgttagcaaaggatcacaatttgagaaaaaaaaattttacgtggtcgtcaccattgaagctattagttttttttaagtagagtggaatgatcaaccatgaaaacttttaaaagagaaaattatttctgtactatcgattaacacttgaaacaaattatatctactctatacaacaagtcaacccaagatataagaaaaactattttcatcacctccatctttattcactcatatcctaaagggcaacaagcatgaatcttaattggccacgttgaaataacaatgacaggagtatgcattgttaagttgaggtggtccgagtaaaaggttataattgttgacaatagagctcaattgacctacatacaaatacaatcctttataaaattatacttcacacttttcgtgatgagcacgactatatcaatacgggacccataagtcaaggcatccaaggaaaaagccttagtggctacaattggcttcacccagctattagaggggcattcatatacgattttatcctattaattggtagaagcagaatttttaaatatttatatatagatttggatatctatgagacatgggtatgaagtagagctgaagttttttggtattaatgacgcatttggttttttataggtacagatgtaataatatctattaaaaagacatccaaattttctgacaatatcgtttagtgtatcaactgttagcatctattgtctactctctccattcgaaaaaactcacttcttccatattcaaacccacaagtgggttcccacattcaaacccaaaagttggtgttgtagtgaatatggtgagatagggcttcttttaatattatttttataaacagtaaataaattgcccgtgcacatgcgcaggctttcttcctagtttcttttaaaacttgcatgaagtgaggcattctatagaaatttcacacatttccatagaaatttcactatgtaaaagaacaaattaaactatagctagttatcatatatttatatttatatttgttatttgtgtacctgcatgtttacatagtgatctatctgatattattttattttgtcaattttttttattttttataattatctaagtgaggtacaagaaatgagaggatatcctcttgatgaatgaaaccacttttcattcaatactgactacataatgcaatcgtatatgttgttcagagtcaaatctggac

SEQ ID NO: 1682 - DNA, 5194 bp, Oryza sativa
  Intron number 3 from transcript LOC_Os04g24410.1 (locus LO C_Os04g24410) derived from phytozome v7.0 (chr-ID Chr4; po s 13982526 to 13987719 reverse strand)
gcgggaaggaaaaaggaggcagttcaactatatcggtatctttacttactgggttaattggattcatgccactgcaaatatgtcaattcaaaaaaatgtcactactattcagtatatcggctacgtggcactgaaaattgtggaaattggatccatgccactccatcacgttttccgtcaaaaatctttattagcccccagctgcacgtgggccccacctcccttccctctcttctctttcctcttcctctctctccaccaccgtagatgcggcaggaggtgtcgtctccgtcgtctccatcattgtcttagagaggtcgggccaggctgcgcctgcgtcgtcgttgttgtcgagcacctcgtctcggagccggtgagccacgcggtctctgtcaccgttcaagggaggaggaggtggtggtggaggaggcatcaccgacgactgagtacccatccttgccaccgttgccgaggacctccatgatgcgcggctaaggcagcggcagctagaggggtgcgctatcagcaaggaccctctcctcaattaatccatcgctagtacgctgctctgatggctcgcttcgccgtcgtcgccatcatcgtcaccctcctcgccgtcacggccgctgtgcaggccccgggagtggcccccatcccggcacccaagatggccccgctgcctgctcccccgacgaggtccccggccaccgcttcctccatcccggcaaaggacaagagtccatggtgcaacagtcacaacaatggcagagcaagcaacagtagtcgcggcacgagcaatttcggtggcggtggcaaaagctcatcgtgatagtggcgaggtctcagtccatcgtcatttttggcttgatgggacaagcagcactgcatcagtcggcatggtggacaagcagcagtcacaataacgaccggggacctcgtcggcatggtgggctaaactaagccctttggtttgagaaaaaccgatccttgtttcaccgaggaaaagagagaaattctgtataaattgacaatgctgacttgaattgactaattcagttccgcctattccacattaatgggagtacatttatgtttctgcttcacgaatataatattttttgggcatttctaataatagcaagccttattcctattttagcattttggatttcagcacttttaagctccggttcgtgaaggaccagagaagctttctagttatgaatcgggtatagaacccatgggggggggcttggttacaattctgaatacgctattacatgtttgcgctagtttttgttgtttttgatgtggaaacggtctttctctacccttgggcaatgagtttcgacgtattgggtatatccgtttttatcgaagctttcatttttgtgcttatcctagttgttggtttagtttatgcatggcgaaaaggagccttggaatggtcttaactgaatattcagacaaaaaaaaaagaaggattgcttctcttccagggaagtttcattttcccagaatgtatcctaatttttggcctaattctgatgatcgatttaatctctgatcaaaaagatagaccttggttctatttcatctcttcaacaagtttagtaataagcataacggccctattgttccgatggagagaagaacctataattagcttttcgggaaatttccaaacgaacaatttcaacgaaatctttcaatttcttattttattatgttcaactttatgtattcctctatcagtagagtacattgaatgtacagaaatggcagcagtctcctccgactccgcccactgatgccctagacaccaatgctccctccgcccttgccttgtctgcggtcacccccaccgcctctgcagtctgcaccgaccggcgctcccaccggcgcccccgcgagctcctctgcattcaccaccaccggtgctcccatcgcggggatgaaggaagagatggggaagaaagaagaggaataatggaggaagatagaactgacatgtgggtcccacgtccaggagggtgacggaaaacgtgatggagtggcacggttcaaaattttcaaatttctagtggcgataagggatcgcccaggatcgggtggaaggtcggagaagccagtcttcaggtccatatttttggaaaaactgtgatgtctggagttggtaatgatataggtcctagaaatttggctggctacgttacttataaccgcagaacgagcaatgaatccccaacgacaaacgaacgtgcaacaattcctgcacccgcaactccatcctgcaagttcagtgctccatcagtgttcagtttcatccatcccaaagcaggtcgagcccacttctgaaccacagccgatggcctgaacgacaccttctgcagactctactggtggtattccccgaggcgacctatatccccaccaatgtgatctccattacagatggacaaatctgtttggaaacagagctcttttatcgcggaattagacctgctattaacgttggattatccgtcagtcgcgtcgggtctgccgcttagttgaaagctatgaaacaagtctgcggtagttcaaaactgggtacctcaaagtttatagttctaagctgaagaaatagcctgagtcaatttatcttctttacaacctccaaacaaacagaaagactaacgccgaaagatatgttttgaagagagctccatcgggttgaagccgaattgcagagaatcaagatcttctacctttgcggagggacttgaattattacttctatttacttgatttgctggggaagaaaatcattaaaataccactaagtaaggccgggcaagtgcaagtcccgataacgggaagaaatgcctaccaagtgaaagaaagagatcgcaatggtctaagatatagtcagtgaacaataactcagggtagccgatatactgaatagtagtggtattttttctaattgtcatatttgcagtggcatagatccaattaacccttacttctttcgttgatgctacagttattcccatccattcttttagttgccaactagacattgttatcttttttaaatgaattatttatgagattttgtcatcttgtaatacatatgtaatgtcttctggtagtgtaagttggaaaaattagtggcatatatgagaatggacattcattagtggcaaaaccaaactttcccctaatatgtccgaagtctaaaagggatcaaatttatttgatggtttgtttcagatctcaagtgcttttgtacactgcttgatctatatttgctgtgtactgcattaatgtcctatgatattagggagtgatttctttagtgcttttgcaacagtactgacttggacaccgggtgttgcaacagaaaacaaattgaatttatagcttatttaatcaattaataagcatttatttagttctagtaatttttcttattgaacgagtaggtgatttttaaaatttgggggagccaatagtgaaatggaggacatgttgaaaagtggtgtaaatagtataaattgtgggcccccagatgtcagtagtaggggtggtgtggggatggacactgcgactactaacatcattattttagaaagattgttaaaaatataactaaaaatatatgtgctcagactgttgccaaataaccagccttttacacatgctcaggttttggcataaggacatgcacacatcctttggtcaaattatacttatcctgagtttctgaatacacaagaacttattcttgaataggacttcctttttttttttttaaatatccttgctgatattatcatcctagcattggaagttgtcatgaccaggctgcacatatgagctttttctctgactgctctcaagttcagctcctgctattcacagcaatcaaccaacaaattaaatagcaagtcttacaaaaaactcccaccaaaacaaccaagctggtctcttataaactgaaggaaaatcaagaaaataagcaccactcttgattccaggaagccaaaaaccagaaatttcctcaagaataagcaccactcttgattccaggaaggtgacttgctgatgtcctccaaaacaaccaagctagtcttttatagggcttgtttggtacagtccaactcctacatttatctccatgagttgggtctggagtggagttgtggagctacctaaacccagctccacaactgtagtttattttgtgagagagctccacccagctccactcccatttttagtggagttaaaactatttggctgagctccagctctaggaggggtggagctggagctggagttgtgccaaacaggcccatagtctgcatggtctttttggcagctgctaaaaggtgttctgtgttatgttagttccaaaccatggtgtttaaatgaaaagtccactaaacctggttcttgttattgcattagcccctaaagatggtgcttctgctttttgaaatttcaacatgtcaaattgtacctaagcaaagggatttcattgaacttgatattgatttgcctacaaataatatgatttttacgatataaggttgtcgtcgaaaagaaacaacgggataggttctagcatcatcatatcattcagactgccacactatatttgggttagtgatgataatatcctattgatcggcttttgcatttttctagcgtcactgattgcctagaaggccacgtcttccctgctctagtgcttaggctgaaacctttattctatggcagcacttgtgtcatttggactactagcgatccatctaggcttgagcaattgaaggaaattgctgttggtgcattgtttgtaatgtctaagtcaagagtttactattgatctcaatatgtgccatccaagcttgatgttgcagatttcatcaccaaagcttgggcttgagaacatctcttcaattactctaactcaatgccttaggtcttcctatctccaaactcacatgcatgtaggcccatagtaataagctccagacttcttcaaaaagggaaactctgtaaagaaccaaccttttctgaatgttatgtttttgcattcatgtattcacctagatcaagtaacccttggattcatatatttgatatttattttatgttattatttctttcaggaagacttctgcgtggtgcacaacccgaattg

SEQ ID NO: 1683 - DNA, 719 bp, Oryza sativa
  Intron number 1 from transcript LOC_Os03g24170.1 (locus LO C_Os03g24170) derived from phytozome v7.0 (chr-ID Chr3; po s 13718812 to 13719530)
ctcaacctccagctcggcatcaggtgcgtgcgtctgtcccgtctcttactcttcttctccttcttcttgttctttttatttttgtccgttctttcgatccgggtgctccatccaaattttccctacatggatttcctctcctttttcaatgtatttatgctgattgcgcattttgaatttcgtatgatgtaatgccatcgccaattaatctaccgtgcagataaatttgcaaaaaaaaaaaaggttagaaggtgatgtttattacatgattttaattagattattctggtctcatggtaagcaaaacttttcaatggctagctacaaatgccgaatgattttacctccccctcctgacggggatgtggcaattttacaagaagtcattgtttgcacgtagaggaagcgacgcgttgaaaaattcaacaaaaaattctatgcctaacatgtgcatttgtttattgactcgaagctgaaatggtggcaaattgtgattaattggaattttacgacaagaagaggggattctttttattgaaaaatttaatatgaagtcaagcataataacagcagggcatactgtgggccaaaagcatacttgcatattttcatttaagcagatattatatcttcttacactagaatagtaaaatgcatgtatttgcaacatttcagaatgaatttgtctatgctctaataactttgtctgggcaatagac

SEQ ID NO: 1684 - DNA, 8028 bp, Oryza sativa
  Intron number 1 from transcript LOC_Os10g16974.1 (locus LO C_Os10g16974) derived from phytozome v7.0 (chr-ID Chr10; p os 8424158 to 8432185)
ggatcaccgacacggaaatcaaggcccttatcctggttcgtgattcatgctctgatttagtagatagacactcactcgttcattgcatattaactaagtagctataattttttaagaaaaataataaaatatattagtatataatatattactttacaaacatataaattaaattaaatttgatttttataaataacatatagattataagatccacgttaaatgagtctacatccactcaattattagaatctgtcccctgaacttttttactgttgtctgtctacgtcatgtccaaaacactagtaatgtttgtttctcctttgttgagaatctgtttttcccacgtcgatgtgctttctgttcggaatttggtttgggaatttggggatatgcgtcgttttgcgcaccagaagaccagaacacgtacttgtcgtcatcaccactcatttgggtaacagattatcaagtagactggttgtcgggcttccaatagtaaaatctaattcgagagccctcctgttttagcgctatcattcgacgctggcagagccgtctgatcgctcgcgtcattatcgagtccatctgcgtaggcctcgcagtctactggtaattcttacgatcacagataaaatccgcaagcgcacgggtatacagatgtagcacttcccctacggagtattccaaagggtatcgaatccaaggaaacatgtgtggtcagttcttcctccggttcatccaagaacaccaagcaaaggatagggcgggatagcgaggattcactggtgagaaatagtgtctaggaaagtttaagtttaatcctaacgtaatacttcaggcactggtaacccgctattcccagatgttgctctactacgtacccggacagggaagacttaagtgatctcgagggctgtcaccacctctacacctacctcaaacgtactgtgggatacacagtaattactggataacaattacctaaacaccacgtctaagcaattaatatctactttagtatttataactcaccaaagcaatctctatatttcagttgattatagtgaacgataatcccgtatgctatttaggaactaaccaagagataattctcacaagataaatctaaattactcaggaagaatattatattgaaatcagagtaatgaacaaaataaaagaaatgagagaagattaccgacaactccagaattcttccgacttcttctactctactctcttcctattctagtatacaatatagtacaatagagcctcttataatttagctcaatcttggaagtgtgtgtaagagtgaaggagtgaaactccttatatagaggtaggtatgactgttacacgatgcgaattgtcggaaatgccccgcaaccgccatcaggagatgatcaggaccatccacgccaaaccccagcctgaacggctgagattttggttcggccgaaccaaggggttcggccgaacgtgggctaggcccacctggcctggccttcggcccatctcctccgctggtcctcctttatccatttctcggagttttgagctgagtctttgatattttgatgatcacaacccatccttgtatgaatacacgtttctcctcactttagtctgattttactcccaacttcggggttcaacacctgcatacaaatgaacaccaacactagtggaatatgtgagattaaacacctatcgctatattgaatgtgttattatctggactttatgcagaggttggcggtatagaatcagcatttaacagccgccaacatagtcgtaggcatggctttctggataaggatcgagatgaaaccactccaaccacacgtcacacgcaaatcctgctttagagagtcacagagagagaggttacagtttctcccccatgtccttttcctcttcaaacaatgttttctctcaaattacctatccgatcaacaatccgattacaccattgtgttcgttacaattaaatcatcacaacaagctctgacatgattatattacgatgaaaaaatatttatatttataaattacttttattatatatgtaagttacttttatcatacatataagttgcttttagatttgactaaattacttttatatttgacatataaaagtaaatttaataaagtctgaaagtagtttacatatattataaaattaacttaaaacaaaacggaagtaactttgtcacgacattagaagtaaattcgttgtagggataaaaatataactttatctaaaattaaatttaattagcacaaatcaacacacgtaagtttaacaatttttaaaagtaacttcaatgttaattggaagtaacttttgcatggttcaagttgaaaggagatactagatggagtacaaactagctaccactagctgtgtagtcacgtccaatgaaaaaatgcattaattaaagttactttctttttgttatagttacttctataatatatttaaattacttttaggctttattgaatttacttttatatgtctaagaagtaatttagtgaaatctaaaaataatttagatatattataaaagtaatttattatttttcatcaaaatataatcatgtgagatcttgttataaagatttaattgttacaaacacaacgatataatcggatcgtagatcagataactagtttaagagaaaattgtatttgaaatataggtggacaatgtctctcatatatggagtggtagctggtttagacaaatcagctaccacttgctgtgtagtcacgttcccaatcgtaaaatcctccttttccgtgggaataggataatgcaccacctaaattattttaatgctaccttactctaaacttcggatatccgcacggtcttcaaagcagtgacaaatctagaatttttattttggtgtgcccacacaatcctcaaaagccaaatcagagtcactcatatacacaaatacagtaaaagttctttttttaaaggaacacaacaagggagggccccattgctaaaagattattattaaaaaagaaagaaggttacaaagcaaattacaacaaaaggatccaatctctgactacatgttgatcactcactttcaacctaaacagcaaaaggaggaagtctcctttaagaagttgcctccaagaaaaaaacaaaggtaatctgttctcaaaaatgaaaccattcctttctttccaaatattccaagcccctaaaaggaacttttctataaagcattgcccattgtaaacatgtttagccttcatgatcatattgctcaaactgagagaactatcccacaagatgcctaaataagtgcaacaagtcaccgagaaagggcacttaaagaaaagatgcattaaagtgtcagtacatctctaccgacaaagaacacaaaacaaatcataatctggtggagcacagtgtttgtgatccagcataaattagtgttcaatctatccatgaaaacaagccagctaaatactttaaccttggagaaaaccttactcttccaaagccacacaaagtgctgagggggctgcaagtgcctaaaattcagagcataaaacttctgggaagtatatttcaaaccaccccaaatataggaccaaatatatggctatctcactctcctgagaaagatcaatagtgctaataaaatctgaaagagcctgaaactcagtataagcttggtgagacaaaggcagctgaaaattgtctgacatttgagctgacagatagccatgcacaaatgatattttgttggcagcaaatgaataaagtctaggcattgagaaactgagagggggattatcagaccaaatatcctcccaaaaagaacatgttaaaccattccccacattgcatctagcaatccctctatagaaatccatcagcttataaatatctctacaccaaaaagaccctttagagatgacaaatgaggggccacttgatcataataagaggaccagataagatcaacccatggcacattccttctattatagaatttgtccaaaaatttcaccaaaagagcttgattccgaatagaaaggttgataacaccaagccccccttttactttaggtttacaaactttgtcccaagctgctaaattttctgcttgaattcacatatgaacatctccaaagacaatgtttccttgcactatcaatattatcaattactgtcttaggcaacattatagtgcacatgtaattggttggcaaggaggagaaaactgaattaactagagtaagcctattaccatataacaagaaatctgagtttgcagacaatctcctttcaattccttcaactagaggagcaaaatcaaccactctaggcttagttgttcccaaaggcagaccaagataagtaaaggggagtgaaccaattttgcaaccagaaaccctagcaagcatctcatcttttccatcactcaagtttttagggattaaacatgatttttgatagttaacctttaatctagtaccttgagcaaaagattgaagcagaacttttagagtaaaaagctccttcccacaatccttaacatataaaagagtatcatctgcatattggaccactgggaagttattgtcctgactatagggcaatggcttggataacaaatacaaatggtgtgctatgtttattaaagattgcagaagatcagctcccacaacaaacaacggcggtgaaaggggtcttacaccccccctccccccccccccgcctacaatgaaaattctttctaggaactccattcagaagaactgaagagaagcagaagaaaagatcttctgaatccagtttaaccattttctaaaaaccccatagctttcatcaccaacaaaatagcttcatgttcaatagtatcaaaggctttctcaaagtccaactttaaaagaacgatttcccttcttgagtggtgacattgatgaagaaactcaaaattccaagcaaggcaatcctgaatagttctcccttttataaaactatattgatttggatgtattactgataggattaccatctgcaatctgccagccaacaacttcgtcaaaatcttcagagaaatccccataagagaaataggcctatagtgatttatagtctcaggacacaattttttaggcaccaaagtgatgaaagagtgattcaaaggattcaagtctagagagcctcaatgaaaatcagcgcataatttataataatcttgacatataatgggccagcatttcttaataaaaaggccattaaaaccatccgaatcaggagctctatcaatagggagattcttaataagcttatcaacctcattcttagaaaagggggcatccaggatttccaaaccgtcttgtgaagggattaaagaagggagatcaaaaggcatacattcaaaacaagaaattcccatcctcatcttaaaagcattccaagcagtatgggctttagcctcatgatcagagagggttgacccatccacatcaaccaaaatagctatagaattcttcctgtatgattcagttgccattgcatggaaaaaatttgtgttttcccctccaaatttagcccatctaatagtacaccttttcttccagtatgtttgcttatatttctaagtatgtaagcaacttagatctgacaaaaactctgaaattccattccaacacagtgagatctctatattcctcaatgatatcaaaaaaaaaaagatcacaacattacattttgtgatgagtttctgaagcttacatagattcctactccattttataagcccctttcttaaagctttgagtttagatgaaatatttctagcagcatccaaaaaactgccatgattagcccaaatagattggactaaatcaaaaaacctttcatgctcaacctataaattctcaaacctgaacacatttgatctaggaataacaactgcacaatacaggcggtatgatcagaagttgacctagctaaaggcttgaataaagtattaggaaaagaggaagaccaactagtagaagtgaaaaaccagtccaattgctcaagttgagggtgattttgcatgttactccaggtaaaggccatgcccttaatagggacttccactaaacccaaattactgatgacctcattaaaaagaaaaatatcattcatatccgctcctggcttatttctatttagaactgaacgatagaagttaaaatcaccaagcaacagccaaaaatcaccaacaggaatttggagactataaagccaagccaaaaaaattagacctttcaacaccagtacagggctcataaatagtaaccattgtccaagataaactagaatcattagaagtaaaagtgagctggacaacaaaactttcaattgtgatattcataacagagaagacataactattccagcaaaccaaaatacccccaaatgcacccctagaaggggaaaaaagcaaatttgtcaaaacgcttaggggtgaacttcctaatgaaggaatgatcaaaattacttctcttagtttcatgtaaacaaaaaaaaatgcacatccgctttcctctatcttattcctaatagccaaccacccatcatcagaatttatgcctcttacattctaacacagaacattccagtcctaaaagcaccattcattttaaacagtgatagtagtgtagatcatatcttacataacacaaacaaagaaatgaaacaatgttaatgaaacacttttttaagcttagaaatgcttgcacgcaccatcattaatgattcattgtaacttattgatttcacatttcacaaatatgcatcatccaaacaaagtaaaattgtaaaagctagaaaattagctgtgctacgagcctactaacttgcctgattaccccctatactggttaggataatggttataatagccgtaaccagcaaatcgagactaaagatctcgatctttagtaccggttgaaataacaagtactaaagatgcataccaagtcaaaaaactatatgtgggatgtgggactcaaacttacgatctctcaccccaatcctcacgtgcgttaccatcccacctagtacacacatctgacttagataaatatgctttctttttaatctaatcgtaaagacatctttagtaaaaatatcattagtccaagttagtattaccaacagagaataaagatcctccagcattatttttggttggtgataccaaccggtactaaagaagtatttttagtaccgattagtaacattaaccatgagtaaaactgtttctagggagttagacttttagaatcggtactaaagaatcttataccagttcttaatccaaccaagatattttttattttggataccacaataaaaagatcagttatatagtaaatgttggtgctacttgactggttggcggtgacaactaccgtcggccatagcgtgcctgcgtgtcgtgggctgcaccactacgctggactccatctcactgcccgttgtgcagcgctcgccgcttcgcatgtgccacaagacgagagatgagatacagagaaaaccctatacacgcacgtgcacgcccgatagattcgtgtgctggtggagtccagacaatgcagcggggccttgcactctatttcggcatttatttatttattgtgaccaggcaccaaccgatcatttaggcctattgctgcatactgctttttaaaattattttgcaaattttgggtatgctgccagtccataccgggaaggcaggaacccgtccgcccctctttgaagtactactaatacatgttacattatcatttttaataatatgtttataaaaatattgaaaacattgccacatgaatgtgtttatattataaatatattattatataccatttttcatatattaaattttagttatttttatatagacccatcctatgatgtcatatgtctttctgctgactatgcagaatctattcgtggcgggcacagacacaacatcaac

SEQ ID NO: 1685 - DNA, 3113 bp, Oryza sativa
  Intron number 3 from transcript LOC_Os03g29570.1 (locus LO C_Os03g29570) derived from phytozome v7.0 (chr-ID Chr3; po s 16857349 to 16860461 reverse strand)
gctcgctgtcaacagtaagctaccatctcaactagtaccaatttcatcataacctctgatgtaatgatctggggatcctgttctaacttctaactgttgtacttctatatggtaggagaaagtatatatgttagtctctcaagaatatgggtcattgcttctttcattcagatctaaataaataaatatgaaaaccatgtaaagaaaagtaaacatgatgtcatataatagggcacaaacatgcaaaattaaattagagttacacaaagagaacacacgagaacaacaaaaccagattgtgaatagtgcaatcatattcatacttattgaatttgttgtttctgtgtgcccttctgtagctctaatttggccttgtatgactgtgcaatgataagtgatccaacaatctattttgctgaatgtttttaatgtttttaactatttaaattgaatgcaagaaaagatggcacgttttagagggcttaaagtccacttcttttatctagtaagagagagagtatataaagctctgaagaatatgtccttgtttctttcatagtttcattccaatctaaataattgtgaaaacaatctaaaaaatgcataatattaaataaacatgaagaattaaattcaagctacagaaggagaacagacaaacaacaaattaaataagactacgaaaggtgccgtgacattcggaattgaatttgttgttcttgtgtgcccttctatggctcgaatctgaccgtgcatgtaggtgaaacaacaagattgatgcattttattaaatacttttaactagcatggtggcccgcgcagattgcgtgcctaacatcattatattttccctcataaaatagcatatatgttttctcattatattattaaaatatattacaatgacaacataattttaaattttgcaataactttacgaaactactaatgtgtaatattcatattgtattttatatacgtgttagttattaatttttttaatatcaaattttagttatttgtaaattatatatattcctatatggactctagacttgtcttttaatatttttttaattctgattttttattatttctaattgtatttctatgtagactctaaactcatctttcaatattctttaatttttaatttcaaatttcagttacttctaaattgtatttctatattgactttaaacttttcttcccatgtttttcttaatttcgaattttagttactttttcttcgattaatgtgagaacttctaggtcatgagagcgaacgtggaggctccttttattccgaattttagttagttttaaattcctatatggattatggactctatactctatttctaatattccttatttttagattccgaatttcttttttttcttaattgtatttctatatggactctatactctacttctcatattccttatttttaattctgaatttctattatttcctaattgtatttctatatggactctagtctcctcttctaatattccttatttttaattccgaatttcagttatttcctaattgtatttctatatggactctaatctactcttctaatattccttattttttaattccgaattttaacaatttctgaattgtatttctatatggactctagtctcctcttctaatattccttattttgtaattccaaatttcagctatttctaaattgtatttctatatggactctgttttttctttttctctgattaatgtgagaatttctagatcatgagagcgaaagtggaggttcctttttattccaaattatagttagttttaaatttctatatggactctatactctacttctaatattccttattttttaattctgaatttctatttttttcttaaatgtatttctatatggactctatactctacttctaatattccttatttttaattccgaatttctattatttcctaattgtatttctatatggactctatactctacttctaatattccttaatttaattccgaatttcagttatttcctaattgtatttctatatggactctagtctcctcttctaatattccttattttttaattccgaatttcaactatttctaaattgtatttctatatggactctagtctcctattctaatattccttatttttaattccgaatttcagctatttttaaattgtatttctatatggattctgctttttctttttctccgattaatgtgagaatttctaggccatgagagcgtacgtggaggctcctttttctattcctttaataatataatagattattttagctatttaaatcgaatggaagaaaggctggcagtatggcacgtatcattgagagctttatcacttcctatacgtagcaggaacttgctagtctctgattgtgaagcaacatgcagtcaagttgtcatgtgtagttcacttttctggactgttcttatttgacatttttagtcggtgatttgagatattttacgatattatcttgaggtacctaaatttttcactacaaaattttatattttaagataattactagtatatagagatattaaattttacattagaaaatatggtagtatcttatcaaagaacagtaaaatcagtcgtgacttgacgcactagaaatataagggcaagtgcaatgttagttgccgacttcagcaatattgtgggccaaggggtcagatggtattaaaccatcgcacccttcacattgtttatgcgtgttggagaggaataaggtgggcccagctaaaaaaaaatcaccgatagtaaaattcccatgactgctgcgtgactccttcccgcgagttctgtcagaaacactgtacaaataatattgtttatctcttgttcatcggtagtagctgtatgaccagattttaactttttgccactctcacaatgcttcctaccgggtaggaagagagcatgtattgcttattaccggctaaaaagccaacaatgtggatgccctaattgcactgctgttttaacatgtactctctgaattctgatgtcctctatctgcagccgtagacttcttcaaccaagtgaactttctgtac

SEQ ID NO: 1686 - DNA, 3755 bp, Oryza sativa
  Intron number 1 from transcript LOC_Os09g16380.1 (locus LO C_Os09g16380) derived from phytozome v7.0 (chr-ID Chr9; po s 10016759 to 10020513 reverse strand)
ttcaaggaacgtttggatcggtaaggccaaattaatcgattagtaccaccaaccgcggtactataaagattataaagtcacgaacgtttttttaaccgggactacaaatgaatttttatatgttctactttttaatcgggactataaataaattttttatgtcctggcttcaatttaaatcgaaattaatgtgatttttacattacccataaagatcacttctctggtagcaatcatttttatacgggtgatcagtcagaggagtgctcacgcgtgtagccgagctctatcgtgcgcggtttctctgctattttttgcgattacgtacacgacgttgaacacaccccacacacaccaacacgtaccgtttccccgtaaattatatgcgctcaaggactatatgtagttttgaaaatttaaatttggtggtatatttttgaaattgtgttgcaggttgcaccgtacttgtacttttaggaattaaacagtaccaaaagtgatgatccgatccatagcacggaatttttttaaaataaacttatgagtgtatcttgtaaggtaattcaatgattaattttcatgtagtcagttcatatgcttctatatttatttggtcatctccacaggtgcagtatattttggatagaaaaaaagttaaagtaaattccactttatgccaccttgtattaccgtttgttttgctttggatctgttattactttggattagtcccaactattttatccatctacattcgatttattgtgtgtcaaataaatggtctacattccccaaaaaaaaaaaaagaaatagtctacatacagttgtggaagtttattgacaagtaaaaaccaacgtattggagattgttcatatgcttgagaagagagtcgggatggtccaatgtgaaccaaaggcaacaatatccggtccaaagtgaaaacattgatgaaaggcaatctaaagcaaaacatcggtaataagaggtgacccaaagtgaaatttactttataaaaacatatccttttgtgttcctatatttttttaaaatcgataattaagaccaagatgatccatgttaaattaattttgaaacttttatttccaatcctcaattggaaaatgtttccttttgtttttttagataatggaatataacatcccggcctttcttcaaaaagagctacagccaattattacgaagtagcaccctagaaaagagtgtagttcagataaaaagaacacacaaaacaaaaacaaaggaacccaagccaaaataaggagaacacatttattgaagtctacttgtgaacctccacctatgattggcaaatagttgaataaccatcgactccaacttgcggcacgcaacttttaggaactccccatcatcctcacatctttgtagctgtgcccaaaaccggagccaatgcgttgccctgaaattacttgcatataggaaatagatggtgatttgtcaaaaaccatatcatttctactcaaccatagaaccaaacaaatggcagaagctccaacaagtatcagtttactctttttcttgtcaacccctaaaagccacccataaaaaatatgagatatactagttggaaggttaaaacaaaaaaaaaactgaactgctcttcatatgaactttgcataatgacaatccataaacagatgttgaatagactcatttttcatacaaaagcaacaccttaagctaccattccaattccgtcttgccaaattatccttggttaacacaaccctcttaagcaagtaccacataaagatcttaatcttaagcgtcatcttaagtttccaaatatagttattcttctcaacataaccattgttaattaaagctagatacattgaccttactgagaacctaccattctgatgataatttcatctaaaacagtcagaagaaaaattcaattgaatatgtacaatagaagcacacaattcatgccagtatataagattcttaccaactaaagctcttctaaaagaaacattaagcggaacagatcccataatagtggcaatagaggatgatttccttcggactatagcatataaagatggatatttatccttcaaagctaagttacctagccatttatcttaccaaaatcttatttgttccccatcattcacgatacaagaacccatatctaaaaaaatacttttgactttcataagccatgaccaaaaataggaatcaccttgtttcttgtcaacttagattatagacttattataaagatacttcctcttcaataagtcctgccaaacccctccctcatttatttgcttatacaaccacttactcaaaagtcatttattttgtaattccaaggcctccttgatccttaggttggcaaataatatcccatctagtgagtctgtactttttcttatgatcatccccttgccgaaagaagcatgatctataataatcaattttttggataacccctttcggtatctcaaagaaagatatcataaacatagctaaactcgaaagtacagaattaatcaagatcaaccttcccccgacagataaatgtttaactttccaactactaatctttttctcaattctttcttcaattactttccaatctttattagaaagtttcctaaaatgcattagaattcctaaatacttaaaaggaaaagaacctaacttacaaccaaagatattggaatattgatcataatactcctttgcctgaccaaaataaaataattcacttttgtgaaaatttatttttaagccagatagcttttcaaaaacagataaaatcaatttcaaattctttgcctgttgcaaattatgttccaaaaagataatggtatcatctgcatattgcaatatagacaaaccatcatccactaggtgaggaataatcccttttaagagacccacctctttagctctcttaattaacagagcaagcatatcagctactatgtcaaaaaggattggtgataaaggatacccttgcctaagacctttatatgtttgaaaattgttaccaatttgataatttacttttataccaacatgaccaccttaaataaaagaagctatccactcacaacatttaggcgagaagcccttcatcctcaacatcctcaacatctgttgtacaaaggaccattttactttatcataagctttttcaaaatcaatcttaaatattacaccgcttttatctttatgatgtaattcatgcatagtctcatgtaaaataaccattccttccataatattcctacctagaataaaagccgtttgagtgggactaataactttttgagcaacccccattattctattcgttgcaacgttggtaaaaatcttaaaactaacatttagtaaacatatgggtctatactgctgaatcttaatggcatcaacacacttaggtaacaaaattattgtgccaaaattaagagaaaacaaaggtagagcacccttatggaaataattagaaagctccaacaggtcatttttaataacatttcaaaaaacttggtaaaactccgccaggaaaccatccggacatggtgctttattatgctccatatggaaaatagcatccttaatctccttttcagagaaaggttgcgttaaagcttcattctccaactgagaaaggtttcttatcaattctccttttcagagaaatgttttcttttgtgcagggttggaatcaagcttccgactattgaagtgcggt

SEQ ID NO: 1687 - DNA, 833 bp, Oryza sativa
  Intron number 3 from transcript LOC_Os01g39260.1 (locus LO C_Os01g39260) derived from phytozome v7.0 (chr-ID Chr1; po s 22082740 to 22083572)
ggaggatagcaccttgctgaaaacattgcagagaggtactaataccgaccaacactttatctgtttcaggactattctgctgatttttgtgtgggttatgctactagtgtttattttccttatttgaagactggagaatgcttcattagcttgccaaacacttccaatgtagatctgttgtcatgttagtcttacatttggtgtcatgattgttcagtttgtcattaagccacacaaggaaattacaatataacagcagtaaacaattcttcatatgctagcacatatatgttaccttcaaaacttcatctcctactgtagttcagcttactgtaatttgtaattcttcaagcctgtggactgtggttaccgtagttcaagtcttacaaggaaattactacacatttcagcagttaacaaaatcatggataatcatcttaatatggcatagaaattttgccatgaaaaaaaatcatcctctattagtctattgtagttccaattatattttttgtagttcttcatggcctgttggttatcatgatgtttggttattgatttttacaactgtgggatgggtcataatcttgacccacctattcctatcttacaagggtagtcctatttgattttgtcttctcaagataggttgagagaaactaatttgttgtatagtactgtccttgtctgttgttgactaaactacaactttgaagccttcttacagttccttcaattaataatggtgattctttgattaacttggtctaaaattacatccttgcttcatccttacaggaattgctgcttcagcaagggaggaagaaaacctt

SEQ ID NO: 1688 - DNA, 1440 bp, Oryza sativa
  Intron number 1 from transcript LOC_Os03g10870.1 (locus LO C_Os03g10870) derived from phytozome v7.0 (chr-ID Chr3; po s 5585312 to 5586751)
tccaccaacgacttcccttccgtcacatcgttctggtgcgtgccgcgcgtgccccccctctcccctcccccgtctctgtttctctttccgctttatccgctccacgtcagtattgaggtttcctcttttaggatttgaggttttgaattgttgctttagaaaggggggatatagttgtatgtggtggtgtgtgaagaccacacgttttttgccttattgatgatatctgaatgaacagagacaaatatttctgaaactggatattgtagattattagctcagcgatgagatactaaatggcttggctgactgtggtgccctgtgcaaacctgtgctatataatcgtccaattttctttctgttgtatggagtagttcactagtttatgcttgtttgcttaactccaatgtaaagatggtcattatctttagagtgcaaacttttgaacttgaatatatatgcatcatttgccgatgatgaagcatatacgtgatgctaaaaaaatgtgctatattatcaccaagtcagccgccatcaattgtttgaaggtttgttaatacataagcacgggctcttatcatcacaaatttgtttttagctaattagatgtgcaaccatactatcccatttcaaatactcccttcctttgtataccacatttatattttgtactttctgaaatttggataggggtacaatagctcataccattatcagaaagaatgacacatatatcccaagaacaatatcgttttcatccatagttctgagctcttctttagcaagttgcaacacaaaaattcaatttggcaaacacttggggacaagcagcctcacttagcatcttcctcggtagaataaaaatagtattgttgtgctgcattacctcatatattcagagatatcccgcttcaaatttggtggccatctttattatgtgctagtattgtgtgtgtctactattagtactggttttgagcctacatgtaaacctgtcatcaattcaagagacacacgcatatgctaataaacaacaaggacagagacaagatgctgattcgaagagactgttgatgagtaggaacagtgtattctgtgcaactatagtaattaaaagagccatatatattgtgttcagtatgactattaattaaagcctattaatggctgcgtagggtatacttactttctgatattccctaatttaatacctaaaccttcttcttgttatgtaggtttatccactcatattactcctatgttaattatatgaccatgtttgcccttgtttctttgggtggtgggggcatatgctctttacaaatgtttggtctttcttttagtcaacctcagttctattatactcagtttaattgcatgaataacagactaatgaattaccgttttggccagctttcttgttgcggcagccattttgca

SEQ ID NO: 1689 - DNA, 3548 bp, Oryza sativa
  Intron number 1 from transcript LOC_Os05g04380.2 (locus LO C_Os05g04380) derived from phytozome v7.0 (chr-ID Chr5; po s 2010279 to 2013826)
aggttggcggcggcggtggtggtgatggtggtggtggcggcggcggcgatgtcggtggaggcggagctgagcgtggattactacaagaagagttgtcccggagtggagaacgtggtgaggtaccatgtcgccaaggcgctcaaggcgaatcgcaaggaaggcgccgccctcgtccgcctcatcttccacgactgcttcgtcagggtaattatctcaatcagataattaactttcttgcatatcaattattgtagcggctcatgattgatccatccatatatatcaatctacatttgcagtacgtactagctaaggtttactagctagcttaactgttagttagttgtgtgtgtacatagtacaacttggctttgcagagtttagttgtgttacagttggtttcattcttcagaatcactcatcaggtgatcgatccatcgaggaaacttatcacattctagctaggttagttgattaattaataaggaaaacaactttactcttgatggaaataacagcaacatttacacaaactaactaagcaactactcaatcagcatcttatcttacaccaacgtcgtcgtcgccgcataagcgtgtatgagaaatgatcaaatcttaagctaatatacataacacagcttcttagttaagtctctgaaccccacttggttggttgttgtcaagatcaacacagatagttatcagcaagttagcagccacacgccactgcatttgacacactgtcatcactccatccagagacagtttcttcttctttctcttcctttctttccatgcacaaaagaaaagaaaagttcaatggagacctagctaagctaagctaagctagtttcgtgagctacttgacttctactagttcactactaatccaacatggcaagagagagaaactaaaggtagattagagagagaaagatagatagatagagagagagagagagattggtagccagcaattcagcatctgcaacatgcatgctggaatcgaatgtgatactttccttgtgtccatcatttggactgtcaatgcatgctacacctttttttttcccttctggctgcttagctaaacacataattaagctgcattagcttagcttaattagctctagggtcccagaaacactatgcccttgtcgtcagtttattccctctcctttcttttctctgcatgggtgccagccagatgcagctgctgctgatgttgctgtgattggcaagcaacatgtaactacctattcaattggttcatgcatcatcagtacgttttgcatacacacaaataattaattaattagactctcatgtatatcatattagtagtagtagtagttaaacatgattttattggtgttcgatttctaggtaagctcaattagtgggatatgattatgtttggattgtgcttggggccagagcttctttgcttcctatggggcaaattgttttcttgtgctgattgtctaggagagagagagagagagagagagagagagaggaaaaggacacatatgggagagaaaaggggacactgtgttgagaaagagaaagcatacctatatctctccagagtcatgaccaataattggtaccactagctcctcagtcatgaatagaaaagagagtaaaagtaattaattgaacttttttttacttacccttttgattaacaagtaattagtgcatgttctgacagagtttcagcactctcatccaagcaagcatcctagcttacttggctctaaaagttcttggagttgcatttgttctgattaaattacatattttgattggtttgtgcgagccaatttgtgttcatgttattagactaaaaatatagagtgaaactattttatttagacatgcaagaatacaacataggtcattagtggctacggaattgaatgagcacattatagacgaaatggtcggtagcatcggtagtctttctttttgttctcctctttttaagaaaataataaaagaagatgatgtacatatatacaagttgcagcatgcatggacttttcgttgtgtggtttaagcatcagcagcaatagaactgttcaagtaattaagaaccaataatgcatttgccctctcaccgacactacatatgcaattatatgtgcatatcgttttccaacaactcagctgacgatgatcaatcgatcgatctatcacacatttttctcaaggggctctaatataattaaaggtttatttgccatagcttcagctccatcttttaaaagttggagctcaacgaaacagtttcagctccatctaaaataagagtagatctggttgaagcattctcacaaaataaattagagaggtggagctagatttagactgttccacaactccactccaaatccaactcttaaaactaaatttaagagttggagctctatcaaacagatcctaactgtgcttaagtacagataggatgacttgccaagcacacatatagttaacagtattagtattaactactagtgttttggacggtggaacaagagtaggaggtatgagatcgatgatgtgtggaattaattgaacgattccgtggagatgtttggtccaaaggacggtatgattcggcctagtagtgttaggctcattggttgagagaataaagaaggatgaaacaactatagaataagtagcattttaatacaaaacaaatttaatataatgatatttttaattatggatttaataaaactaattcggtgttttatatgttgctaagtttttaacaagcttggtcaaacttgatatagtttgacataggtcaaaaaaaacgtcttataatatggtgtggaagattgttaattgactaactacctaaattggggtatatagagaacttcaacatatgcagagtgtttaaggcattattagttgactacattgcgcgtgcttaattttttatcaattgtattgtctaatcatgtgataattaccgttagctaacataattatgacatacatttaaatcttaccccgatattcactaatcccaaaacatctaattgttaccagtcaaatttatggatcattcctgcttatcctactatggttctacttgtacaatgcagaaattctgaaatatttctgcctaaaaaaattcaaaattcgaacaaattttagtataacgatttgacctttttttaccacgcaaacaattttaagtttggtcaagtttatgaaaactttttgtatttgaattgtttggcgccattgattaattacaatgtaaaaaatgcacgacaaatttgaattctcaattggttgctgattatagtaattttttttttaaaaaaacgcgcgaatgttaatgatcgatttgaattggaatgggtggtgcaggggtgcgacgcgtcggtgctgctggacccgacggcggagaacccgcacacggagaagacggcgccgatcaacatcggcctcgccgcgttcgagctcatcgacgagatcaaggcggcggtggaggagcggtgcccgggcgtggtctc

SEQ ID NO: 1690 - DNA, 1891 bp, Oryza sativa
  Intron number 1 from transcript LOC_Os07g10390.1 (locus LO C_Os07g10390) derived from phytozome v7.0 (chr-ID Chr7; po s 5572238 to 5574128 reverse strand)
gtctgctgtttgtttcggagaactgtttgcatttggtaagtttctaggactcgtgaaagtgaaatccacaagcaaaacatgcacatattcttttttagggatcaagaataattacattattgcttgcatttcatgctctgaattattaggactcataaaccatgagattgctaaaatctgggatcgaatcccattataatgagttctccaaatagatagtcaggaacatagaaatcatggctgttgattgttatcttataattttctttatgcactcggtgaaaccgtattctctcttctggcatcaaaatttcacacttctcttttttgctgctatttctttagtatccgtttctcttttgccactatcgttggtcaacatccgttgaccatcacatttgccaataaaaaactgttgtacccttgcgaaactaacaaaatataagaaattcaaactatctaggaaaatacaatttacctttttagtttttaaaggttgtacaaataattatggtaggaaaattttcagttagtttaaaaggttcccacgtgtatcttaaaaatggaatttttaaaggaaatatttttgcatatccacatacaaatcaaacagcatagctaccaatattcatgtaaacaaccatgcacataattccttagtatagattattctgtgaaacatttgagaaccaaatcattcccatgctacatttttaaagattaatattagtgataatataattcccaattttatgtttttctaaaaaagtgtattaagtggccataatttagttttcttgataactttatggtataggttaaaatgtcaagtgctgcattattttggaacatgtacaggggtataatggccttttaggggctaacttaacagtcaatggatgttgactagacggtaatgatgaaacaaaaatttgctctgacagaatagtggcaaaagagagaagtgcagattttcgatggcggaagagagaacacagttgcaatgagtgacaaaaagaaaaaaaatcccttgttttattatacatagaactaatttgattcgtgacatcgaaatggtactcacagattttccatccatggtttctctcatatcattgtatttgagattttctttttgctagcatataatttttgaaaactactccctctgtcccataataagttcatttttggtttcttctattttccccaaaacaagttcatttttgaagaatcattgcagagtttgtggaagtaaggaatgattatttgggagaagataaagtgaggaatagttgcattgcgatatgataaagtagggatattctagttgtatatgtgtgggatgggtgaaaaatgaacttatttagggacggaaggagtaactaggtaatgtcatgtaccttgtagttttctctaatggggcattttaccagaggggtggcaatgtagcagagagtgtgtcaccatgtcaagtaaaaaaccctcccattctgtattctattttccccatggccaaagggactttagtccttttcttgttcgtctgaaacatgaaatctcttaatcgtagtcatcctgttttagcctttccctgttaagtttatgtgcttatatttcaagtagatttcttttgttccagtcccttctgttgatctgccataagtatggtgcaattactaggataatttattctaaaataccaagatgataataaaatcatgaccttgtgggtattgttgaaacttgaaagcaatgcttatattattctctcactattggtatgcatgtatgtgttctcacatagtcacatgtttatctcctaaaagtggcttgcatgtgcatttcattgtactgtcagtttaaatcaagtttatcttttcaggttgaa

SEQ ID NO: 1691 - DNA, 315 bp, Oryza sativa
  Intron number 9 from transcript LOC_Os10g25130.1 (locus LO C_Os10g25130) derived from phytozome v7.0 (chr-ID Chr10; p os 12900532 to 12900846)
tggtagttatcaatccaggaaatccaactgggcaggtttgcattcattgctttcttgtctaatttggagagcatcttggattgttgcaatttctgttcacaccatattctgcatgtatctacctaaggcatatatatttgcaattcttgtatctttttatgtgattttccattgttagggaacatatgtatttttgtttgtctgcaatgtgcatgaagcatttgcagctggtgcaggtacccaacaaaagaactgtaatcatgttttaattcatttgcaggttcttgctgaggaaaaccaacgggacatagtgaa

SEQ ID NO: 1692 - DNA, 5682 bp, Oryza sativa
  Intron number 3 from transcript LOC_Os12g27370.1 (locus LO C_Os12g27370) derived from phytozome v7.0 (chr-ID Chr12; p os 16091133 to 16096814)
tttgttgttggttcatcgtgcatctttcatcgaaggtatttacttccttgctatttttttgtttattttgctcatttctttgttgtgctatacttattttcacccattgcgtgtcatgcgagtgatcgcttcgcattatatgtgtctgatgatgctttattatcttgcttatttgctcctatcaatttctgcatatgtgtgagctaaagcgattccatgctttatatggccttcttttttacatcaatatatttttgtgctctatgatagcttcgttgctactgtgtttttttttgtgtgtagctgattgtttcctttataaatgcactgtctttttttatgcttttcagtggccttgtgattgtagagattagacctattaatttttataacggtctatttgttcacttccgcttgtcatttcattgctcactgtccatgccttctatctaaactatcttttttcgttgatattttctttctatggtatgtatacccaaaatattcgctacagatgtcagaggaggctctcagtagggttcgtgctagccgagaaagacgagctgcgaatattttgacccgtcagcttgtaatgcatatacaacattcagtactaggaccgattcagcctaggcaagtagacgagcgcaaaagaaaatgttcacttatggatttcacacctcagttggctaagctgaataggcaaaggcgttgtttgctacgctcaaagatggagcctgtacctcctgtgcacgctgaaaatggtacccaattaatcttttcacgtattgattgtgtttcatgacgcacaatttttcataagatgttactgtcaaatctgttcattgcagctgccggtgtaaaaaccaatggtagttcatcacgcacgaataaggagtacatccagtcattaaagggttcgcgacctatgctaaatacaaaacatactgctatttattataaaaccagcttttaacagtcctaagtattttgctacagcctcatacccagggagatcgtactatggtccaccaacatatgagtgtccgtactgtggcgctgtcttctggtaccaggagagagtgaaaagcacctctgctgtttcacagcgaagaatagtttataacctctgctgcaagggcggtaaaatacaattgcctaagctgcgctcgcctcctgaaccacttgcgacattattaaactttaatggtgatgcacgatccaagagattcttaaggcaaatacaatcatacaattcgatgttcgctttcacttcactgggtgcaaccattgatagattgattaatactggcaatgcaccttatgtgttcaagattaatggtgttgtgcaccacagaattggcagtcttttgccatcaagtgggtcacctccaaaatttgctcaactatacatctatgatccacaaaatgagacacaaaatcgattaaatatttttggaaatgacagtgatgatgcagataaaccagaccctgaaattgttagtgcattgtcatccatgcttgataggcacaatagtcttgtccagacattcagatacgctagagagcgactttctcagcatggtgaccaaaagataactcttcgccttctaggctgcaatgctaaagatgacgtgcaatataatttaccgacgagtggtgaaattgctgccataatagtaggcgatttctgtgcaaaagagtacaagtttgatcttcttgtgtatgataatgatcgtggtttacatcaagtttcttcattgcatccatcatatatggctttgcaatatcctttattatttccatatggtgaacgtggatttcatctaggcattcattacaacaattatgatgggattggaagaaagtatgttacaatgcttgaattctttagatacgaaatgcactatagactaaatgaaccaaatcctttcacatgctatggccgactaagcgatcagagtgttgttgatgcctattcttcgatagaagctaatagattacaatttataattgatcatcaaaacgagttgcgtgctgaatctttagatggaatcgtagatgcaatcgataaaggtgtcactgatggcgattcagttggtaagcgcgttatacttcctgccagcttcactggaggaaggcgatatatggtaatgaactaccaagatgcaatggcaatatgccgtgtctatggctcgcctgatctatttgtcacatacacaagcaattctaagtggcaagaaatttatgatgcaatacgatttgagcctggacaacagccatcagatagacctgatatgatagttagggtgtttaacatgaaggtcagtgactttataactgacattagagaaggaaggactttcggtaaagttcttgcaggtattgttgactcctatttttgcatgcagttctatttaaatatgattctcattacttctcttaaactattccagtgctgtacaatgttgaattccaaaagcgtgggctgccacacatacactgtttggtctggcttgcagcgcccactgctgaaatatcgacatccatcatcgatggattcatttgtgctgaaatacctgactacgacactgatcggttaggatatgaattagttagtgaatttatgatgcatggcccctgtggaaatgcaaacaaaaattgcccttgcatgaaagataataaatgctcgaaaaattatcctaaggattttcaagatcaaacaataattgatgaatctggttttacgatatatagacgatgaaacgatggccgacatattatcaaaaatggaattccattggataacagatctgttgttccatataacatgaaattgcttaaaacatacgaggcacatataaatgttgagtggtgtaacaaatcaaacttgataaaatacctatttaaatacatcataaaaggacaagatcgtgctaggatatatttcgagacaactgctaaaacaggaaatgtgtcgccaaatcatgacttagctccacgcaatgaaatattggaatatatggatgctagattcctctccacatgtgaagcactacatcgatcatttgaatttgacatacattacagaatacctcctgtcgaacggttagttgtccatttgcctgaaaaaaactatgttagatacgaaaaaggctctgatttacgagcagtgcttaatagtcctgctgcgaagcgttcaatgctaactgaatggtttgaagctaataaaaaacatctgaaagcacgttcgctgacatactgtgaatttccaagagaatggtcatgggagccttcatctagaacatggcgtgaacgaacacctgctcctaaaattggtagaatttattatgtgcatccaactgctggtgaactctattacctacgaatgttactaatgatagttagaggtgcacaaagttatgctgatgtgcgcacacataatgacattgtttatgccacatatagagaggcatgcgaggcaagaggacttcttgaaggagatagtgaatggtaccttcttttcgatgaagcaattctatttgcgtcttcgcatcaacttagacaactttttgttactgttgttctttattgctctgttactaatgtgcgttcattgtttgataaatattggctctacatgacagacgatattcataataaagtaaaaaagacattggataatccacgctgcattgtcccacaggaacacttactcaacctactcttatccgagcttgctgtcgtgtttgggaacagtggtggttgcataaaagattttaacttgccacagccatctccacttcacacagctatattggaaatagactaatcgatgaagagcttacattcactcatcttttgatgtctttgcatgcaaattctttaatagcacagttaaatgctgaccagaaacaaatttttgatacgataatttctcgagtagttgcagatcagcctgggttttttttttgtgtctggccatggtagaattggtaagacctttctttggaatgctattattgcaaagctcagatcagaaaataaaattgtgctcgctgttgcttcatcaggagtagcatctttgttattaccaagaggtagaacggctcactctcgattcaaaataccaatcgacattgatgaaaacagtatttgcaatgtaaaacgaggaactatgctatctgaacttttgctagagactgcactaattaggagatgaggctccaatgacacataggcgttgttttgaggcactagatcgtacattacgtgatatcctttctgagacaagtcctcccaactctattataccttttggaggaaaacctgttgttctaggtggtgatttcagacaaatattacctgttgttcctaaaggttcacgtcatgctgttattaatgcatcaatcacaaactctgacctatggaaaaatgtttcgattttaactctgaacataaatatgagattacttaatccagatctgccagtacacaaaagaaatgaattgcgtgattttagtgaatggattttagccgttggtaatggtactgtgcctatgattgcaaaagaaggtgaagcttatccttcgtggttaactattcctgatgatttgctttttaaaactgatcatgacaagatagatgctattgttagagaaatatatcctaatttccttgcatcatacaaaaatcctgaatatctagcttctcgagccattctatgtcctaacaatgcaacggttgatgaaataaatgactatgttattagcttgctaccagcagatggaagaacttatttaagctgcgataccatatcaaagtgctctgaacaaattccagactttgacctgctgtacccccccgaattcctcaactcaataaatgctgctaattttcctacacataaacttgtgctgaaagagggagttgtcatcatgctgttgcgaaaccccaaccaatcaataggtctctgcaatggaacaaggctgttaatttctactttaggcgagagaattttgcagtgcatagtattgattggattgaacattggtgaaactgtttatatacccagaatcacactcagtacaacaaaacttaaatggccttttacattacagagaagacaattccctgttcgagtttgctattcaatgactattaataaaagccaaggccaaacactttagcaagttggtgtataccttagaaaaccagtttttacacatggtcaactctacgttgctatatcaagagcaaccagccgatcagggctgaagatattgattgagaatgatgatggatcatgtgggaatgaaacaagaaatgttgtttacactgagatactacctgctacgttcacagcggtgctgctctcaacattgctgcatactgtgtttcattttatttcctacgaaagctactataataatgcaaatatactcttgttgcaggctccgccgcttgatacgtagtgttttttgtcaacaagaacccccctgatgcttttgtacatacatttctaaataaatggatggacataggcactattgtatagtatatatttcctgcaatataaggctcttataatcttaagtaatgttctttctatcatcatttttcatcgctatatcattactccattttatatactgaaatgtttatgttctttgcagagtacaa

SEQ ID NO: 1693 - DNA, 4323 bp, Oryza sativa
  Intron number 15 from transcript LOC_Os08g22864.1 (locus L OC_Os08g22864) derived from phytozome v7.0 (chr-ID Chr8; p os 13744870 to 13749192 reverse strand)
tgttcaacaggctatatctagtaagttatctgttgtctacctacatatggtctaatgcaattaaacattttatatattgttttattggtcactggaaaattttcttgttccatactcaaaagaagtttcttttgtttagatattaattgatattgtagttaatattgtcttgtaagcatgttgcctgctctgataagccatggagcaattatgtcatgtaaggaagcagaactccaaaatcagtcatggagcatgtaacattattaaaactgtatcttttatagttatgttatttcacatatgagtgatgtacaccgataggaatcttagtgactaggagggttgcttgtatgggctaccttgacaaccttgttatgtagtatttgagtacacacatgacaaaagtcattaaataatgaatcatcctctaggtgcacttgggtgtggaaccctaagagggtcactaagagaattgctctaatctgtgatgattattttttctggtaaaataaccaggaatatactaaggaattccacccctgatccaccccctcttttttctcctagtaccatgcctgtgcattgcaacaggcccatataaggatgggttgcatggcccatagactgggatggatctaacgggttttttttttaatcaatccatccttttggtttctttttaaccaaccgtttgatttttctgattctatcgaggatggggtggttatgcatgcaacttgagagggagggaggaggacgattgcgcttttatagtagtagagatatcctttatgttgaaaacgattttgtttgaggtgatacgaggttctggtcagctgcctcagcgttttgctgatcactcaaaattgaaagagaacgaaatactcaagaaaccaaaattatcattttattctctaatgttcttcagtaaaaaaatgccttattatttttttcaaaattggatgtatgaatattcattttaactaaaattcaaattagaaattgtttttaggttgtgattttaaatcctagatttcaaaattaattcttctcaatttcaaacaagattatatatgattttaagaattttagtttatcatgatatcaagttcgggaatgtatttttatcatgataaatgaattcccaattcatggtttaagaattgaggaacaatgaattcatatttcttgattagaatgaacaaagtccaaattctgaatatgaatttgaattcatgatttaagaattttgacttgagaatttaaatttggatcatcaaaatttttgaaatttgaataaaaacactttttattttttaatctttaatctgtattcataattgtattggcgtaaacttcaattctttatttgcagttcatagttatacttcaaagttctgaaagatcaaattatgctgtcccaaattgcgagtttttatttctggtttatgaaatttcgaactgttatttaactactttgtggttttcagagtgcaacagacattttggtcctatttcagtaaccaccttactggtaatttttgcattgtttagattgttctataattactctagtttcgtttagagcaaccaaaatgtttccatcatctaaggggagtattagattactggtaatgttataatgtgtttgcagcatttgaattgatgggaatattgaatgcatgggaaatgtgacgtacaaaccaaactcacccctgttgtgttccctatatgcatctttgaaccagtgcacttaaacatactttgttttgtgttccaatagtgtgtttacctgtaacagaggctgcattatttcttattattcaggaaaatttgtttagtagcattcgagataaacatatttagattgttaacacttaatctgcactatagctctgcaagtctcgggtgcgcttgtttttctaactgttgtgttgctgtgtgtgggggttttgtaaagatttcctaccctattcttcttttcacataatgatatgcagctctcctgtgtgttcgagaaaagaaaaactgtaagacagtaaagaatgaagagtcttgtttgttgtaaaatagcattgccgttgcattttccataatacttttgtgcatgcctaattgctccatggacattatggtctaatttgtattgctatcctaccaaattctgataatggtacgatagcgaccctaccaatactataattttctaaactcctgccacagcaattgttgaaaggattcaaatcccttcagttgctctagcgatacttgcttcctcaatattcagacacctaagacttctcatctgctctggcgatagttgcttcttctatcgctactcgctctctagcttcccctacttcaatgcaccacatatgagcctcccgatgcagcatatatttcctttaacaattgttctttctctttgctcaagctaattaccttctctttgccccagcatccaaacgagggatagatttccccatcctatgctgtattctgacaatagcatgaacctgcaaaaaataggcgtatgccttcttttacatttttgttatttatttgacccgaactccattgttaattctgaatttttgaaacgaccaatccttagtaacaaatctgaatctcagaattctcaattcaatctgtgcacactatccaggatatctataagagaagatatagacttacaattttaatatatatatatatatatatatatatatatatatatatatatatatatatatatatatatatatacgtatatatgtatatgtatatgtacgtatatatgtatatgtatatgtacgtatatatatatcctgtgtggggatcacggtaggtttcagaaatatttgaaaagcacacctgaatgaagtgaatcgaactggtgtcccttctgtacaattcgctggtgtctcgagcgaagggcataacggcagaagggtgagcccttagtgggtggtggtggttgtcttttttttttttttttggggggggggggttgtatgtcggtagcccagggaagggtaggcgacgatgctgttcagggcattaggtaacaacggcggcggcgatgccatgtgcaccattcagcagggacgatggcaaggatggggcggagttctagggtcaatcgacggcggtggttatggggagggtagcatggggatgagtcaacgatggcagcagcgatgcaatgggtgagggagcctggtgggtggtcaaggggaagtgtggagagcggttgccggacgagggggcgacgggatcctggtaggcttagatgcttgtgtgggcggctgggcgcgcgtgcagggggggggggggttgggttggatgattgcgtgtttcctccaaagaatcctaaaactaatcctatgcattgattagagtcgatctgacggatataaaagacctatgtacttttctgggtggaggtaggaaagatcaagtggctgcaccacagtatagattttggtaatacatactcccttcgtcccagaatataagaagttttagggttggacacggttattaagaaaataggttgaagtgagtggtggagagttgtgattggatgagtagtggaggtaggtgggaaaagtgaatggtggagggttgtgattggttgggaagggaatgttggtgaagaagttgttatattttgggacaaattctgatgactaaaagttgttatattttgggacggagggagtatcatctatctcacatttgcataaatttggcatcaaccatacccatcttttcaattcaatcttggtactgccaaaacttgtaagggatcaaaccaaacgcgttacatttgccatcttctccaagatggttcttgccatcgttaaactgctcggatgattgtccttgaagaatccctgcatacagagctttctgagaaagatgtgattgttgctcctcaatgtgggacaagctacgcaagcataggcagtatatcgagttgattcaaagggatcggggtttaagatgtacgctgagagctggtcacagaaggatgaggaaaggaagagacagaggagcgatgtttgggatctttttttcagtaaaatgtcttctggtgccagtctgccagagattggacaaggaacaacagtgcgatttggcatataccgaatcattactatatttttttgcagcagattaaatgcaatgttgtccacctaaatatgcttcttagggatgctactgaattattcttcccttgtttgttacggtccttacattttgagcaagtgatatttcatcctttggcaggtccagccgcatttagaccgcgtgtcc

SEQ ID NO: 1694 - DNA, 5435 bp, Oryza sativa
  Intron number 2 from transcript LOC_Os03g56020.1 (locus LO C_Os03g56020) derived from phytozome v7.0 (chr-ID Chr3; po s 31883099 to 31888533)
acttgctggtgagtgctacttatgtggatttaattatttttataatatattttagtagatcaatagtctcttatatctttaaatttttacttgatttgctaccatttgtttatagtgtttcagatttacttcaaatatatatgccccatgtttttagttgttgattgttgattgagtaactaatgactaatggatgtgtcttaccatgacatagttgacttttattttatgttgtatataatttggattgtctttgtggtttgctttactgggcaccacaactctttcgatatttgcctttcatacaaattgatattataaattcagattaaaaaaatgatttaaccatttattcagttatcctcttcccactcattttaagttattactccattacaaaataaatgtttataggagacaatgttcacaaactctcaaaagttttacattgaggaaagttttactgtacaatcgatttttgtttcccctattacatatcccttaaggtctatttataggtttataggcaggtttacaacctagggtttagtgtgctaataatttttatatataattgtttctctgatagggacatatatataactagcatcttttggctcattaggctggttcatcgtcattattcggccaccaccatgccgcctacagggccttcctcttcttttttttttggctttcgtcttacattgttaggctttcacaacctggtgctttgctcccttgtttcgcctagctccgcgtcgcctagacttcataccgcgccgcttcgacaagctcacttgttattatttcacctagcctcgtgtcatctggccttcgccttgcgctgcttcgccaggctcattagttgcttcggcatgccagtcaaaggccctcatagcatgcctccaacaatctttaaatatcaaaaatatttgattgaacaaaaggattttaatttgtcattctgttatataatatcatttatgaaggacactatttgatacatataggaagttgtctgtaaatgggttgacacttaccgctacagttgggtccaaagtttaagtagatgcacacaacaagcctaataaaacaatataactaacataccattattggattcatggtttgaatgtgtaacataaactaatgatattattgtcgcgtacaaccacacaaacttgtccggattcatggtttgaatgtgtaacataaactaatgatatttttatcgcgtacaaccacacaaacttgtccgtattcattcagttgtgttgtttcttagtataatggtactccttttgtcctggtgtactttactcttactttcattgcaaggattatttatatatttcctttatatgatgattttgtcgatagtttcattgctaagattttatatatatatatatatatatatatatatatatatatatatatatatatatatttcctttatatgataattgtcggtgatatgggcccgggggtatcaggtttagagggaggaggctgccccccgatgccacgtggccctccccggagaggagtcagacccgaggtggcgtggcggccactccttcccaaagactagtcggaggaggctgccccccgatgcacgtggccctcccccgagggggggagtcaggctcgaggtagggcggcggctactccttcccagagactggatggaggaggctgtcccccgatgccacgtggccctcccccgagggggagagtcaggcccgaggtagggtggcggccactccttcccagagactgtatggaggaggctgccccccgatgccacgtggccctcccccgaggggagtcaggcccgaggtggggcggcggccactccctggccgagactagagggagaaggctgctccaggcgtcacgtggccctccccctgagaggggatcgggcccgaggtcgggcggcggccgccccctctcgtgactaggggtcgggctcccccgaccccctctctaggtcaccatgtacggtgggttaagtgtccgcctccaggtggccacctacccgcatttatggctgcccgagtagtcgcgtcacgccgcatttaatgcggtgtgcaatgcactcaaccggtctgtgaccggtcgaatgaccgatgggactagggtagtgcgcctgtgcgctgctcgtgtgtcaggcaacgtgcagcctgacatgtcccatcaaataatgatggtgagaggttctcatcctcttatcctagccggagtcggtcctcccgctctggtcaaagcaaggctcccgtttcccggtataataggagcccagaagtcctcacctattaaatggtgactgacgggggcaccccccgtgtcaggcggcaatatttgacaggcctcatcatcaagatgacgtgcgcttgcttcccaggtcaaagagacaagacatgcatttaatgcaaagattgtaatccttctccactaagttatgtttttgggcccatgtgataaccccttaagatataaaaggaggtccagacctagtaggagaggggagggttggagcccctgatgatcaacaccttctaccccaacaaggagatcttgtaatttctcacaagatcagctaagcacaggagtagggtattacgcttctcagcttgatttctttcttgtagtgtgagttttcaataatactttagtttatagtgttactctcggtctcacaaaataaacctagtgaacatatattagtacaaaaaaatctgaataaaaggctgtctagatttgtcacacataaaaaagacaaaccatatccaggttcatagcgtcacgaacctggacacgcatatgtccatatgtcttggacacgcatatgtccatatgtccagtttcgggtttttttagtcatatgtccaagttcatagctaggattggggttttcttttgagtcatatgtccaggttcgtagctaggattggggtttttttggagtgtcctggttcgtagttaggattgggggtttttcttttttattacggtggggtagtatatataagcatcctcccaagaatgtgggaaatgctagaatgacttacattgtgaaatggtgggagtatggttgaaaatgtcatcaacctgaacagccccataaactttttttaatctagttaccactcatgatactaattatattcatagtttttgtctaatccgtttttaagtatggagtagctatattttagaatgagtgagtatataagtctaagagcaacttagttaaaatgtaatgattgtttggttttctttgaaagatgacttgttttggtatggaaagaatattacttattgcatcggagcatttgtttatttaatcagtcttcaatgtgtttggtgtgcacaaggttgtgtgcggtaagattttctactacaatatttcttttagaaaaaagacagaaagaaaagattgttagaataggtgtcgaatatactagttctatttggttacagttggacttaaagatgcaataggtgttagggggtggggttagagtcgaactctataacccggcatctctcttaaataaagaggttgcaccacaatgtaatcatggcgattacaatgtaacgtagatacgcagggagatgatggcggcgaggccatagactcgtagcggctaggagctattttggttggggaggagtgcccataatcaaagcctatgggatgtaggctttgactaaacctcgttaacaaatatagtgtgttcatgtgtcgtcatctagcatgtattgggtgatcaatgattgaatcgatcgagaaggttagtcatcgttccgttatatggactaaggccctgtttaggtggtgtttgggtggtttagtccctctcaccaaaagacttatattttgatgagaggggctagaggtgtgtttagttcgcgccaaaattaaaagtttagttgaaattggaatgatatgatagaaaagttggaggtttttgtgtgtaggaaagttttgatgtgatggaaaagttgaaagtttgaaaaaaaaatttgcaactaaacacggactaaactttagtccctctcccacccaaacaccaccttagatcccaacttttttctttaaactttcaacttttccatcacattgaactttcctacacacacaaatggtgtgtttagttcacaccaaaattaaaagtttggttaaaattaaaacaatgtgatggaaaagttgaaagtttgtgtgtgtagaaaagttttgatgtgttagaaaagttgaaattttgaagaaaaaaattggaactaaactctactcccactagaaggagtagaagccgtagcagcaacaactaggctagtgctttaggcatggcaaggcccacagaagctatggtgagtgagctgacccctcgtgtcattccttgtccctcttccgcctattactactagctcttcgtcctcatcaatgcgtgcttgcatggccatgtccatggaacacgagacgccagaaagaaagatggagtcgaatgctctcatctcatctctctcgcaaagtcgtctactcgatccttttcacatgctcttattataccctaaaattgatgtcgatatcgatgtggtgagatgatggatggatggagaagacgggcgagtacgtgatggatgggcgatgcgccatggaatcgccgatttcggggcgccgaacattttccgtccggccaccgatccatccatcgattgatttgaatccgcggtttggttttgctgctgctccgcctgtctttgctttgctttcgcttggacaggagctggaagcctggaactgctgttgctgttgcttggttttgttggttgcttgccgtctccatgcattactccgttttgatgccggggtagatgaggaggagtagatatattgatggggtcaactgtgactttttacaatggtggtcagcaactgcaattgaggtcttgaatgctgccatattgggaggagtactgagagatttggcctgagaccaaagggcctgttttagttcccagaacaaaaatgtttgcacacatacattgagtattagatatatgaaaaaaactaattatacagaatacgtgtaaattgcaagacaaatcttttaagactaattgcgccgtgatttggtaatgtgttcatacagtaaatatttgctaatgacgaattaattaggcttaataaattcgtctcgcaatttcctggcagaacctgtaatttgttttgttattagagtacgtttaatacttcaaatgtgtgtacgtatatccgatgtgacaaccaaacctaaaaattttccccaactaaacaaggccttagtttgcgagacgaaaagttttaacgtgtcacatcggatatgaattaacctaattttctcctactggggcatccatcgaagcggcagcgtcggtcctgg

SEQ ID NO: 1695 - DNA, 5567 bp, Oryza sativa
  Intron number 5 from transcript LOC_Os09g19229.1 (locus LO C_Os09g19229) derived from phytozome v7.0 (chr-ID Chr9; po s 11485324 to 11490890 reverse strand)
aataacttcacacttctcacagcactcgagaatttgtaagtctttatgaaattcctttaccttttgttacttattatatctggaatttccatatgacatcaatcatgacaaactcaaacttcagaacatatccatagcttattctctctctctctctctctctcacacacacacacacgcacgcgcacgcgcgcacacacgcgcgcgccacacgacttcaactttacattagtataggcttattgtgcaagtttcatggagttgaagcttattaaggtagtccaatatgtagattaagtaagaccataaaagctaataactatactacaatatgaaaccttcaccaagcataagatttaatttctttaaagggcatatcaaacaaaactaaactgatactagctttggtttaaattacttcttgctctagttttatcctaaatcaaacatgtgtatattttaccatcaatttcaaaatattcatatagtttaacataataagatttatatttttagattcaccttgtgaaaaatactttcttaatatatactccctttgtgccaaaataattcaacgtaggatgggatgtgacatatcccctatgtccagattcattgggctaggatgggtcatatcccatgctaggttgagttattttgggatggagggagtacttcataagttgttaaactatacgaattactagaaattaattgtgaaagatatacatgttttatttaccacaaagataaaatgataaataatttgaaacggaaagtatatcttagtccgagatggctcccatgcatgtgttgcagtacggttgatagcttagataaattaggccaaatgatcacatgtttttattaagcatacaacctttaaattaactagggaggaagcccgcatagatgcgctggcaacctatttataaaacattgttaaaagaaatcatacttcaccatgttaattataagaaccgcttatttattaattataagaaccatagattaccttataattatataaaacataaatatctagaccataaattttgatataccaaatgacaatagtatctttcatattcaaacagaaataactttgtcccgaatataggtaaactcgtctgtcaccattatttattatcgttgtattattagttatgtgccttttaatagatggaattacatccatacaagaaaacaaacttaatatgtcattaatacaacaaaaagatcatctctacttcatacgaaattgttcatgtctcactggtgtttaaatatatgtataaatattttgaagtattgctcctaccaattcatggaataaaaccattaaaactagatataaatgccccactaatggttgaagccaactgtagccaccaagactttcttctctgatgcgagcacaattttaacgcttaattcattatcaactaaagaattgcatcagtaagtaggctagttaaacattattgtgaatagtagcctctcactggggtcacctttactcagtaaaatagccccaccatccgtacagtagcagagcatgatatgttatgcatgcttggcgcccttcaggaaatggcacatatagataagatgaaagtgatattctttttttagttttgagttcatttatagaatctagttggttaattggtccactaaattttagctgtacagatacaattttctcttctgaaaataagcagagttgatatttttttattattattgatctgattcagctatgcatgttcatggggtaatatatgatggatcaatatatgttatcaagtttgtttgtgctgattattaagactattataataacatgaagattgatagaatgtggttccatgtaatagttttttattcaaaagatagttaacatatttataaattttctacagaaaaaagtgggttgtaaatgaatataatatccactatcagtaattaaaaagaatggagtaattgtgaagattatttgggtaataaagacataaaaatggctagaatattgttccatgttaactttttaatccgaattgatatatatacgtcgcgaatttcactttgggccatattttattacgaatgttttattttggatggggtgcatatcgacgatctcgggtctatcggattgtaatgatcaattaactgtcacagttatatgtaagacaatatttttaatatatgatgtagatggatagaagagttgaggtggcccaaagtatcacagtggtaaaaaaaaaaaacctggtgcaaagtaaaaatattggttaaagggtggtaaaaagcgaaatatcagtaataaaaaggtgccttaaagtgaaatttactttttagtatcgagattcgtgctatatgtggtagaatgtggagagattcttagcttagctattgctactactccaccctctactactaccagcacacgatgagtagaaatgtcagatgctaggcattcacgcgactggcaaagtgcagagagagagaggggtcataattagtagaatcttcaatgtttttacattgtaattacactatactaatatttacatttatagctatagcgtaactgcactataattagggcgtattttatattacactggagtgtaatttttaattattattttttccaaaatttaattactgtttttttatttttagccaagttaattttctttaagtttacaacgtcatattaataaattatgttgcattttgtttggtcgtaaccttagtgatctcctaattatactatgaaatctgattgtttcagcattagttttatgtcagaagaaatatacggtctcttttttttattaaaatatagttaacataggatatgatgtaatattttttattgtattataaataccctagctagaaaaacaactggagagaaaggagccacagcagagggatagactgatcatgtacaaactttctaattcttgtacatttctaatttaaggattaggaagacgtggtcaatagtttttttttacgtacatacacattttttttcaaataatagtctcctgtacatgcatatatacatacatatattttctccggatgaatagtatgtatttatttttctctcttgcaaatacgcatgagattaggagagagggattaattactttaatctgatatgatctaatctaatctagtggttgaaaataatagttcacctgtacatgtgtaaatcaattgttatatatttatttttctcttttgcaaatacgcatgatattaggagagctattaactactttaatctgatctaatctaatataatctaatggttgaaaataatagttcacatgtacatgcgtaaatcaatggttcgatatttagcttttatttatttcagaatatattggattttattgatcttaagttattagtttatttctaaattaaactatgaccatttaactcaccatgtttatgttaaatttctagctatacaatagggtgagcatgctttcaaggaagagtttagatgagttaggttgttacacatacacccaatacgcctaagcgaaagtagattaagttgggttttttcacattcaaccagcacgtttaggcgttaggttagaggggcggactgtaggagggccggctagccacctgcttggccgagcctggtgacggccgaccctcctgatccttctccctggtggcgtgctgcggcttctcccccagcacagtagctatcctggccctcctcctagtcgatcaatgagaatagagagagaaccagagaaacgaacatgagaaagggagagggtggatcgaagattctatgatccttgtattcgagggacaggggcacaatggtcttttcagcttgctaatctgtgcagagaacaattaatgaatgaaattaaaattgacttaatccctcaaaattgggaaattagaggtgacaacaaaacgggtggtgttttattagttgcaatgtataaggcgttttaaaaaaaaagttctaaaaaaaaggcggctatgatacggaggatgtatcacaatgctactatgatactttgaaatatactttttctctcggaaatatatagatattatatactccttccatctcaaaatatgaaggattttgggtagatgacgcgtccctgtccaaattcatagcactaagatacgtcatatccattcaaaatcccttatattttgagacggtgaggagtatatactcatcctaaagacatatatactattttaaaggaaatcccatatcacggtactgtatcaccgtaccaatatactcaaccgaagcatgctcgaaagcagagcatgaacctgaccatgcagatgatagtcattgtgaaatgtctctactgaagttgtttgcataaggaagaggatgaagcaaagctacacatgagaagaaatcatgtgtagtattaatataccattgactcacaattgatctggtcatcgacctcttgttgttatcaccagcagtaggcaaggtaaagaaggatgatatggtgtcgaaaggagaggtgaagaaagtgaaaggaggaggtacgtagatttagaattgaggatttgtgtgtagagccgagtactgggtagacatgagaatagtatttcttgggcttctttggagagtctaagaatctaagaaggtactagttggtagccagcttctgaaaatctgaaaaatagtatttctcaatttctacttcatccgttttatattataagtcgtttgattttttttctagtcaaatttcttcaagtttaactaaatttataaaaaaatatagtagtattttcaacactaaacaaacatattatcaaactatattcaacgttagatttaatgaaactaattgcatattttagatgttgttaatttttctctaaatttcatcaaactaaaccaagtttgattaggaaaaaagtcaaacggcttataatatgaaacagagaattagcttttagtttattttttgaattctacgattacagattctcaaaatctggacgaaaagttagactggttaggggagctggaggagaagggatcaagaacaataacaaaagttgtgtttgatgccatgttgccagctttagggttgaacgttccaaattgatgaagcaattaaaattggcttagcagcttggaagtgggtgacttacacccatagacaagattgaccatcggcacccttcctcaaccagtcggtgtggttcctgctaactaattttcaaggaagagaagaaagcttgaacttttagataatttgttgtattaatatttggttttcccacttcgattgtgcaactatttaagaatttgccttacaacaatataagttggtggatgttactaaaacatatttaagttggtagataactgattctctaccaagtttcccctgcttttttattctttaaatgtatagatttttttttcttgtagctagattgtcaacaaatcaaaacattacttaatctctcaatttcatgttaatttcacagaaatttgacaggcaaccaactgg

SEQ ID NO: 1696 - DNA, 1893 bp, Oryza sativa
  Intron number 4 from transcript LOC_Os02g37040.1 (locus LO C_Os02g37040) derived from phytozome v7.0 (chr-ID Chr2; po s 22365244 to 22367136 reverse strand)
cacacatccaaggttgcctacaccgaccgcctcaggtaatcaacgcacaatctttcatgaggggagatcccgctcttttctcccacaagagttgaatggagattaatattttcgtgacacgtttttcaaactgctaaatggtgtgttctgtgtgaaaactttctatatgaaagttgctttaaaatatcatattaatttattttttaaatttgaaataattaaaactcaaaatcaattatatgttaatatcatctcgttttacgtaaaaaaaacttaatattcatcttcagaagaaaagaataccacctcagtctcaaaccgtagaatgtataatcgccacgtggttctcttttctcctaataatatacaaagttcagttagatatatgatctcctcgactatagaaaattagcttcagatcatacactcgtggttgtcatcaggcatcatccgttagtagttaactcgttgctgtcctagctttgttgattgattaatatatagctggaagaaacatgttttggttgggatgcaaaatgcattatattgctaagtagacatggatgaatgttatttcttcagagtttacgtgacacgatgtgctctgctgatagtacaatactgctgctgtcaaccggtgcatataggagatcagggttcagatttcaggattggattcttgtggctgctgattttgccaaaacatttgcttgctatttaaattctatcaatcgatcgtatcgtttgaaaatacatggcagaactgagctttcaaaacactccgttttttcagctctagccacatagcctttccatggttagtatcaactggtgccaataggatgtgaactggtagagcttgctagctagtagtatgtacttctacctaggcatgagggttaatctagctatcgatcacaagtctataatctattattagcacggtacttaattggcttcaccggttaggtcactgtcaaggctgagatggacacgagctatagagaagaagctgaggacgacaactcagttcgccctcttgctaacacagcacgcaagagcaaatcatgcatggtactagatgaaatgaatgagtggtcaaagtgagtgagacatcgaattgattagaacacccaattagtatgtgagacacccaattaattagagataacattcaccaaattgggcggccggctgatggacgaagcagatcacaagtagagtgacgagccgtgaattcagtagtctagaggtggattttttgtcgtttatttccgtcacctaaaagtaaaaatatataaaaaaaatacaagatgtattagtatgatatattcacttaataagcatgtaaaccaaatttcatatatgcaaataaaaagaataaatttgacattgtgcccgcgagcatatgtggggtggtgacacagggatgtgttgtgtacacaacacaaattgcattaactgaggctcgagatgcatatctgaaacagtcagattggtgcaccggccggcctatacgtgcattgctagagaagttcagatccttaaagaattcgcttcattttgatcacaaaagatgcccaatcattcacatccatctttttttgtataatggataaaatccggccaccatcgaagaagagagagacacttatcaaaagaacgattctattgttaaatctccatctgaaaatcacttattcacatccatctggcatctgcgttttgctaacacgaacacaactgaaaatcatctgatgatctctgtcgtatatatatgtacacacgtgtcaatttttttttacttgctacctagcttgttagatacttggatccgtacatacgttgctgactgggtttttgccatgcaggtgcctggacagggcggccatc

SEQ ID NO: 1697 - DNA, 1022 bp, Oryza sativa
  Intron number 2 from transcript LOC_Os03g15430.1 (locus LO C_Os03g15430) derived from phytozome v7.0 (chr-ID Chr3; po s 8438157 to 8439178 reverse strand)
accgattaagcaccatcagtagcattttgcttcaggtactccttatcttcttgtctgatctccttgttaggcacaattaattttgttcatagtcgtttatcatgacttattattcgtcatgcgcataatccagtgtacagttatctttcaattaatccagttctatattctgcttctttgaagatgtaaagcatactataacatatttgctgtcagagcttcagttgaacattgacctgcactttataccgctgattactgtgcacagaattaatgctcctctgccttgattattgaacgtcctctttggttagctggtagaacaatatctattggtccataataaatattactctcgtgtgatactgggcatgtagtactacaaatacatcatgcttcaatatcatactgatgatacttgaagcagaaatgtacgataagcttgaacatagcactaaaccatcttactcaatggagaacagctcttgctaactagacttgaccatcaattataatttactaataattgcatttatatgtaacaataatgatgtagtgtgctatactgatgtcaatgcaccttcagactcgcttaatgtacactcaatagcaggacagatgaaggtggctatacattcagcacttaaaccataactggcctgtgtcaacctacaatggtagttaaatttactaaactataactctatttatctttggcagctattacgaatcaaattatgtcttatctgtgccttataatttccgtaacccactttgtctctagcacttatatagatttctaatggtgtcataacagtactagaggagatttttttttttatgttgggctatctgtgcataacacattgtctatgttggattatctgtgcataatacattgtcaaaattcttgtaccatttatatgccacgcatctctgctaattctgcttacaatgctgggcctgaattttatcctaaaaggtactgtagggacgcaggaattatctcttccttggcatag

SEQ ID NO: 1698 - DNA, 10012 bp, Oryza sativa
  Intron number 1 from transcript LOC_Os10g31040.1 (locus LO C_Os10g31040) derived from phytozome v7.0 (chr-ID Chr10; p os 16154382 to 16164393)
agctgacgatcgaggagaagaggacggcgaacgttgtaagtttctcttgaaatttgctctgaatcatatgttgatgtgtttattcttgtgaaatatgtgtacatgtgcaactatgctagcttacatatgcgatatatattgcaatgtgtggttgtggatatctgtttaattgatcgagttcttttgcatactttaagaaaggtatatccagaagtatcatattttttagaattagtttatactagtatctttggacaccttaacgtacgcgttcatatacaagcacagcaaaattgctccaattaatcaatctttttgatgagatgcatcatgcatgtgcggacaattcaggcaaatactcgtgagaggcgatgagatattattgatgtactattgttagttagatcgtttagactagttttttatggccaatctcgagtcaaataaatcatagggatacgtggcatttttcgcatgcatgtgtgtacttgatactagctaatctagcttctacataatcgacccctatgaaaacttaggttcacgtttctaacaaaaattgataaaacggtgaaaaattgaggttttgatcaggatgagaatcaaatttgaaatggtaaattcgagtgaaatttagtgaaaaccttcgtacagctggggtgagatttggcagtccattggtaaggtaaacctgagatcgattaactatatgtcgcagatacatgtactgacttatgtatagttgactaactaatcaatcagaattatggttggtagacagtgactcagtgagctggactgagagcgccgagagagaaggagaatcgtgcatgccatgcatgttatctgccgtacaatttgattttagattttttttaatacgttttgtgaagagggaattactacacaatctctctctctctctctctctatgatatggtttggcatgcatgttaattagctgatgggtttttaccaataaaaacatcacaccataaatttaggtttaagaatatatagatccatccatattaagcctatttggaaaatcatattaacctttgatcgtgcaagcaagccatgcgcatgtagggttaaagcacttggagaggaatattggcttcaagaaacacgccagctaggtagccgtgagtgatcatagtatttcagtaatatttatttgctaaagttactaaagctctttccttttgttttgtatctaaggagtagttgattgttcaagtgtagttttctctcttcttcccgggctgtaacttatgcgtgttgggtgatctttcactcgtcttcttttttatttatcctacaatgcattgatacgcaacccccttgcgtatttttcaaaaaattctatgtaagtcattgtttaatttctaaaaatatattggttttaaggtgtaagtttgaagcaaggttgtattaaatacaagatttgaaataaaatgactaatttaacaagaaaatatataatatctagtgatgattccctacatgtcttcaagtaaaagaaatgtttccataaaaatttgacaaagcccaaaccatttatataagggagtgctatgtttctatttaataagtccattttactctatcaaaatatttcatcggtgcattaacttttaaacttttttccttggctcattttacccatgaactactttagtatacaacctaccatacccctaattatacttatctgttttgtttatttttatatattttaagagctatatattgttgcacaacctattttacaatatatttttaaaatcttacacggcaatttggatgtagttccaaatctcaatgcttaaattaatcttaatcttaggtggttccaacatatgcaagagcaatgactaaaagtttcaaaaggaagttgagatgtacgtaaggtgtaatgtgatccatcgtttaacaaaattttgacttaatatatatgaagaaagataacattatggtataaaatgagctattttcaacaattagtgggataaagtgagccaaaagatattttagaatgatgtgcacttacaaaaagtgtaagggactaaaattgacttacttttttttccttataacgagccataattctcaaggcacacactggaatcaaaagattgaaaaatctagctacggcaaatctacagtaaagatgattatttgaaccccccacataatatctggttggtaggaattaaaaccatgtccattaattagcgacagaaacagaaggtggcaagccagctgtcggcctaacgacctgtccggctgcttaccatgaaaatcactacagtaaaacttgacatgagaaaaatgttacaaggtcgatcaatcaattactcgtatgtagcatacatgtttaccataagactcggtcaaatacttctggaacttcgaccattaaatatgttcataaagtctaatagtaataaaacttttatgatagtatgatagttatttttctaaggtaactgtacgtatactgattttttttatataaattaagcatacacacaagaagttatccatcgtgaaaatctcgaaatttaaaaggtttaactaaatcttatcctaaatatcaaatatttataacaggagagtgtgtgtgtctatatatatatatatatatatatatatatatatatatatatatatatatatatatatatatatatatatatatatatatatatatatatataacgggcaccttcaagtttcaaaagaagtacgaaaaaaatcgagtacctttagatgtacatatcatatactcctccgtttgacttttttaaatatgtttgaccgttcatcttattaaaaaaatttaagtaattattgattcttttttatcatttgattcattgttaaatgtacttatacgcatacatacaattttacatatttcataaaattttttgaataagacgaacggttaaacatgtgctaaaaagccaatgatgtcaaatatttagaaactgaggtagttctactactacatagtacagtacaggagaggagagaacctcccatataatagtatatgtatattgccgacttcattggaaaaagggtaactacattgaccggccccccaatctcctctgccgcttttgccggcctacgttacgggccaagtacatccggacgagcaagctagctagagatcaagccatttgcccgttggttgctaaaacgatcgacgtcctcccctttgatggcgagctcgcagccgaaaaaggcagccacacaccaccacacacacgcacgtacgcacacactctctctctcgatcgttcgttcggcagcaaccaccggcgcgcgcgccacccgtacgcgtacgcctcgcctcgccgactccatcgccgtgcgcaagtttacgacggcgacgcgcgcaagcagctgcggccagcagtcgccatcgcgcgcgagattatttaggtgtcgtcacacgcgagagaggatcggagtaggagcagcgagcgtcgcgtcgcgtcgagatcgcgcctttatttgccgccgcgcgcgcgctggcttaattagctgattgcagtcgtcttccggtccttttctacgactccaaccatttcaaaatataaggatttatacgttaggtcgagtttagttctaaatttttttttaaactttcagcttttccatcacatcaaaattttcctacacacatcaactttcaactttttcgtcacattcaaagataatttcaaccaaacttctaattttgacgtgaaaaaacacacctttagttttaaatatatgttggattaagaaatatttttttattagtttagttgttatttttcaatttaaacgaattgtttagattttcttaagaaatcataagatcgaatcagctaggagcggagcgtctgttgtaaatcgtttgatccagttttgccggtcagaacccaacacaccccacctttccatagaaatctctaaaccttgtgattagttaaagttaaatgtgctcttaacatgtgtttaagatattattgtttcatatttaaaagtttatcttttttttctcctacatttattcagcctagaacaggctagtttttctttgctataacaagtggtccaagataattataaccatctcaaataactgaagctcatgacaacgatgtgaacaaacattttaggctctgaaggttcaatttttctatttagtaaggacaactaattaagttattgcatcaggacgtgattctctatttcttacttagaacatcgccagctctgatcagtacaacaaaaacctcatgtaaagatatttttgtagatgtattttacaaattgccccttaaatcaggagtccttatattatagctataaaacttgaaccacagaaatccttataatttataacagagggagtatagttttcacagctgaagaagaaacaaatcacctcggctggcttaatcagtcggttgagctctcaccggccagcgaagctcaccgggaagctagctttggatgcagtcgtttgacgactgacttggtcgtagcacacaaccgctggttagggagccgtacgtagctacgactgagcttgacgacgatgtgtgcccccgtgaggaggcagcgacgccgacgcgacggccgggcgcacaccggcgaccacgcgccggcggagtggactgtaagtacggtcagtttcgtggccggtctggtcgttgtgcacgtgacatctattgcccccgtctcaaaataagtgcggccataagtttccgcgctcaactttgatcgtccgttctacttgaattttttttataattagtatttttattgttatgagatgataaaacgtgaatagtactttgctcgtgacttatgtttttaattttttttaaaaaaattaaataagatgaacaatcaaagttggacacggaaaatcatggctgcacttattttgggacagagggagtatttgttaatatatgaaatgattaattttaattttgaatcccactatagggctatgtagtgttagtagaaaataatataaataatcgaagtgatcacatatctatttatactacaacctcattacatggtagtagaaacgtggagcagtattattataagaaaaatatgtggagaggcataatcattatttagtagtgactttttttttcttttcgatggaatatgagcgatgtcattgccagcgcaatgaatgacctcggattgatctagccatgataaacataaaagataaatttgtccctcgtcattgtataaataaattggattgatctagccatgaaaaacataaaagataaatttgtccctcgtcattgtataaataaattactaacttattcttaataatgaacggttaatattatttttattgtagtataatactacttagtaaagagagcattggaatcgttcattagttttattagtggtcttttttttaaaaaaaataaaacatagatagaaactcacatgaccgcgacaactagaagctaggtactatgggtatcgagcgatctctctcatctcattacaaattgggcagtcgaccgacggagacttgaacaacttgatccggggcttacatgcatgcatgcacatccatatctagattttgaaggatttaattttcttgtgattcgtgagttgtgattacttttctcatagtccatacaaggacaaaatgtgatcagtgcatgaagcaatatacttggacatttttcagagtttactagaacctataggaaaaataactacggcgggtattaatacggatgaactaattaaagattttcatttgcattatttcccctgtacaaccatctaacatcttccattaagaaagatacatttggttcacatatttaacattaatattatgtaccaatttgtgtgactgttcaatctctgtttccttcgaccaacttgctgttggatctcccaaaaagaacaaaaaaaaaaaagaggaaaaacagcatgatcaccagcttgaaaaacaaccggatctgaaagacacacgcatgctcttttttctcaagcaaaaaaggatcacaccaccatgttttttttttttacatgttatcctttgctatagctattggcgatcgacctgttggccatatctttttcttctaccctgtttgccatgttcatcctttgcaatgctattgcttggagcacttgagcaacagacaactgtacaagctcatccatctccctttcttttgcgggttcgttctgcagctaagccttgttcgtgatgattggtaggacgtacactttgattcaccaacgaaatactgccaaacaaccttcaacttttcctttttgccgtatatgattgcacggatcgatcaccatatggtagtggtttgccatagcaaataacctgttcagatcttttgatgccggtcctaacatgcatgataccattagcaagctgtgtgtgtacatgtgtatcgtacccaccgcacttagccatatgtctgaaatttcagtttttttttctaactagattgctttgaagttatcattttccccataatcatatttaataatcacataatacctaggtagttttactctttttttttgccaaaaatgttcaatttttgcacttgctggccttactgaaatttgtctatattccaatttcagatttccctttgttgtttatggttgaaatttgattgcaaatgaaattttcaaccagatgaatattttcactgaaaatgtgcatactttttaccaaagctgtcattttccacgtttttgcttaaatttgatactcattatttgtctatgacaagaccattctaattaaaaatgcaacttcaatgaaggtagatggctagtaatcattgaatccgtaaaaccttttgaacacttttgcaaggttgactctacaaagaaattatgcagtacacatcaaaattacttggtaccacagaagcaccatatatgcaaaagggtgtaaagccaacagatatttatgtgtccaatttaagaagccaacacatgacagtggtgaatttgtactttcaaatgcctacttgtagcgctgtagtcaaagctataagtaattaacctgtaaatataataggccctaagagtcaaaacaacaaaattagttcataaatgcaagacccataccttaaaggaaccctatttagtaaaaattagaaaaagaactttttttcaccaaactttatatagtcattttgataaataattaaatatcgtagatatattttgatgtataattattaaaatacaaaaaaatataggaaacaatttttctgaaaataatttatgaaccaattgccattttttttaaaaaaaaattgagaccaaacaaactacaacgcagttcttgaccaaattgtcagtgagtgagaataacgccactgcagtttgtctctgcacattcacttcagccaaagtcacctctcgctctgatctaaccaggtcaacccacttctcaccgtggtgatgcactagccgtgaccacttcttatattccatctcaaaaggagaaaaaaaaaagaaaaggtgaccacttcttattcacatgtgtgttttgggccaccaaaacaatgagaattacacagagtacaaaactcacctcacactgtcacacatccatggtccatattgatgtaaaattctgtacctatttctgaatttctggtcccatagtcaggggttttcacactgaaccaacctagtattagtaccacattgagtcagtagtactcctagttgagaacttgagatgaagaagtatatgagtatactagctacggttttttcttttttgggttcatggtgattgatgactttgctggggtcaggttaaaaaaaaagttttctgctcctcttatgtggcacttgcggtcctagaatacgtgcaattaatctttcttttaacaatgacattttcttgcgtactaagttctttgctatacctaagttctcactgaaatagcagaactgtgttaagagttagtaaattaatgttcctataaaaagattaacaagaagactagcaatctgaattaagttctgagacaagttgtcttttcagtattaacacgaaaccgcgtgtctgtagtcgatcaaagtttctcaaaagttaaaatggatcaatacatttagctagttaggtcaagagtaccttcatactttccttttcttttttctttttatgagtgccaatgtattaaatcgtagttcgcagtcacgttccaatcgaggtcaaaagttactaggaaaaaaattactatatctgctccaaactaattacaaaagaaataaaaatattaattttcaaacatgggaaaaacaaaatatattcaagtttgacggatagcctcctgagccatgaaaccacacagcaagcatataaacaacttggaagaaaaaaaaacccattgtattcgagttagaaaatagtatctgttcaacttaaaaagcatagaataggcatataagcgacattgacatgggcaatggtgttgtcgtactgcacgtgtggggggaggaaatagcagtgatacaagtagaattcactaaataccaaaaggactagtaggagtaccacgtgaaaagtgtggtaagccactagttatgtatgttcagtttcatttcattcatttcatattataaaatgttttgattttttctctatttgaacttttattttaatagctcgggtggttattaagtttgactaagtttataaaaaaaacatattatcatttatataaaaaaatatattatgaaaatatatgtaatgttagatttaatactaatttaatattgtagaagtcgctaaatttttctataagcttagtaaaacttaaaaaattttaactacgaaaaaaatctaaacatcttataatataaaatggaggaagcacttaaaagaaaaaaaaacgacaaactagtttccagtattcatgtttttaaaataaaagaccagaactgtaggagtgataagtagcaccagacacttgctggcttctttccccccaatccgccacttgtactccaaaaggacttacaaaaaaatttaatactatattggtaatagaccgaggaattgaaagaataatcacgctatatatatatatatatatatatatatatatatatatatatatatatatatatattcactaagtataaaatatttcagagattcccttgtggaatttgttgtgcagaaccgaacagaacaatgatgccaacagtggcacagtgcaggccaccaaactgacaataagcccaaaccaaagcttcctcaatcctcactgcagctcaccccgacccgacccgacccgagccatgtatgctcgccacgccatgtgttccaggccacacgattcgggcagcaagagccgagcagacgagcgtttataaatacccatccttacatccaacctcgaggaggagatcacaaaccgcgcgccgccgccgacgccgacgacgacgaagacgacggcgagcgagagcgcgcgcgactcccactccgacgatcttgaacttgtgtgtacgctattatcgtccgtcgtcgtcgtcgccgtcgttgtattgtgttggcttttagctatcactccccttcgtcctcggcggccggccggacgtgctgctcgatcgatcgaacgccggcggcctccgccgccgccgccgtcgtgattgaggtgagcgactccatggataagaaccgacgggtgatcgatgctgactagctagctattcttagccatgtgtgagtgtgtgactgaccccgcaaacgctgcatgatgtgcaacgtactctgcatgccttccacggcggccaatcttgtgagaccgattcttgcacgattgttttctcagctcatctgatccatctcatcgaatcttctgcgcattgatcagttctgtgctacgctgctccagtttttgcaggatcagtactagggttcatcttggag

SEQ ID NO: 1699 - DNA, 3429 bp, Oryza sativa
  Intron number 1 from transcript LOC_Os03g41120.1 (locus LO C_Os03g41120) derived from phytozome v7.0 (chr-ID Chr3; po s 22856154 to 22859582 reverse strand)
cgacgcggtcctctacctcctggggagagagccaggtttggctccattgccctcctcccgaaccccgactgccccgcgcgttagcatttctccgtttcttggtttttgcgattggggcgctccctcctgttcttgaaattggggttcaccaattggctcgcgacgcgtctgggttatcttcttggcgttgtttgtacggctcaggatgaattggaatcgaataatgcgttgtgtgttgcagcattgtgggtttcggccgtttggggttctttctttggtcgatccgacctgacgcgtggggcagcagcaaatagcttgtcagttcttgattagtttcagtaaatataaagatgggtgatattcttgctttgttgcgttggattgagttttgtagtatgaacagaagaacatgcttacctttgtgctgttttgataggattgtggcatttcacttttgtttgttctttctttgggtccaattcatcatatcactagtatgttttggattcgccaagtagacatattcatgtgaattcttaattaagacaaagaagaagaaattttccctgattaacatttggtttatcctgcttcgtatgaataaattttcctacttggttggtcgtatggtagattgttccttcattccattgttctttctggattcaatttgttggtttgtttgcttgataagaattttaacacgtgtgaggagagacgggcatttatttccctgcttattgtgaacaaaagttgtcattgatcgggccattgcatatttgtactatctctttcttgtttcactgaatagttcggcccatatgaattctcgctaactctgaaacatgagacagaagtattacttgtctaccttatgattactcagtctgaaaaaagtatagcagaatctgtagaaatcaggttccattcttgcataattcatcttgttgttaggattaacttgcagcagcacatattgccatcgttcttaagacagtgataaaaaggacacagaaagtaaaaaaaaaaaaggtatggataaaacacacacatacaatggcgatgatgatgtcagcagagtcgcgaagaaggcaatttcagaacgaggctatgctcccataaaacatcatgcatttgaatcaacaaaattcagataacagacaacggtcagaacttagaaatagtgacaaataagtctttttttttatgaactgttgacttgctcggtatagaacaaaataggccatataatagaacaaagttattgaaaaagacaaaatttgcctttgtattggctacgatcgatctgttgccgaaatgtttgcaaaattctgtcttgttttttgacgcaaaaattctgacttagtcaattcttggccaaatcacgtcaaccattttcatcacaaaaggatggaatcataaggtttggtgaaattttgcaaagaaaactttgctggtttggatgaagacaatgtcacacaaattgctggtgttagccattagcaagcattctttcaaggagtgcaagtatcttatttgtcgctaaactttttggttagataatcgttcacatttgccgcatagctcccaattatttgttagtaggttatacaagtcttgtctctttgctagcttccaagaaagcattggctttgttcgcgtgggctccaatggcagggttgaatcctgaggatctcacggcaaatgacctcaatgctgctgtctatcgctacctccttgagtcaggtttgacctcctgagtttagttatctcatctcttgattgcatgagaatgagatttctcatttcctagtccctttttgggtcagttatggccattgtcttcattggcgattgaccaaatgatcagctgcacaaagttcttggttttgaaatggcagggcttagaacatatgaagaatagtcagcaaatagactgcccatgttatgtaggttgcttcctatttgtttcttgagttgatccatttcaatattagggcttgccaaatagatgggagcatgcagattggtaatcgacatatgaagaaaaaaattggtgtatagttgattggtttgaggtaaagtctgcagattattgattgacgtaccaagaaaattggtctgccttgtgcatacttgattggattctgcattaatcattcttgctcttttcccatattcatcttattcatagggagttctctgtatatcggcctgttagttctttataactgcaaagtagaaagcaaagcaattgttccatgtctatcatttgttattagtttgaataaagcaattaaaaagttttgcttaatctgcagaaagaggtataatgggtggatttttctcatatttatctccattattggttatgtcattctattaaatctgatttttttgtttgttttttggtcaaaatgtggtgtccttgagggttcatcaaatagttcaccaatgtggatttttattatgtctgaaccataaaacagaagccatgcttttctaatattggactgatcatgctcactttaaatccaaaaggatttcatggtttgtccaaaaggactggtttgttggctccaacagctcacttcccatttctttcaaaattcaccatcttcttatggtgtagtaaatagtaaggtatattaccaaatctgtaggacaggttcataactcttaaagcttaacattgatgcggggtttggcatgggatattctattcccctgtttatttaattttccattgttctgttcttttctttgtccattattaggatgttattagctatctccaaataaaatgggcacgtgcattcctgttaaatcataacctagaagataaaaagtgtcttgctttaggttggtttgcctggtggaagaagaattggataattaggtttcacctagcattatatttctttgtgcttcatgtgttattcggagttattgggtgattcatgacttcattagattttcagggttgactccaaatagttagttcagcatgagtcatgaaggtaacaccaatgatgcagcatatttgaggccagtattgtaacattgcggcgactgttgacagttgtttttgcctttgctaagttacatttttaaagtaatacaatgttcaattgggtcttgaaaacttgtgtggttgatcaaagccagtaaatagaattgtaaagtgtagcaattgctttgtcagtatgatcaaaacatttgcagaatttgtccattggcataaatttcgatagagtcttctctttagttcattaaatcatggtactgttttttgctgtttctcagcattttatttgtgttttcaacatacaatggttagaaaaatcctatcctcgaataaaatggcattcctttttaatgttctgcctgaaattgtaggatttgtttatacagcattcaacttctacc

SEQ ID NO: 1700 - DNA, 5624 bp, Oryza sativa
  Intron number 1 from transcript LOC_Os03g12804.1 (locus LO C_Os03g12804) derived from phytozome v7.0 (chr-ID Chr3; po s 6864471 to 6870094 reverse strand)
gccgacgagcgagggctctcgaccgaccagaacaggtgcgctaatattttctccgcgtggtttccgtgcctcgtatgccctaacggaaggaggaggttgccgcggttaataatgttgggttatttttttcccccgcgatttagcactcgtgaatcacgcgctactctgttttggagtgaattgtgaatagtatgcacaatcattttgcttagctgttgacgcgctcagcttgctgtgtgagaaaacactgatgcctcatttatctgcaccttatttttttatggccggtgtgtttgctgtttagattcataggatagccagccactggctcctttgaacttctgggaaaatgttttactcatacgcttttctattggcatacctatgtgatattattcagattgagctgtttagttttgaatttaatcacatacctagagttgtcctctcggcaggttagtacaacagcaatagttgggcacttgagatatatttgtgggtgggatatagaacttatgataatggaaagtaatatcatagcttcatgcgctgcagtttaattttagatatttgtaagcaacacaaaaatggtagacatctttaactcaaaggatgctagcttttaataactattctccttttactactatcggaggccgctaagtattaatgttagtgaatttaggcacgcatgtatgtgcgcacactgatatttttgtgtgtcattaatgactggtggatggggttacttgtgtattggcctttgacttgatggcgccaaatgctttagtagttaatatacatggtaatatatcatgcttgtatgttctataattgcagtttgtgtcctgaacccacatagtatcttctgtaatcctattgtttgactactgcaattgtatttctatgaaggatgcagttatatttttagagaaagggggtcaattcttttttttttagtgaaaacatataacagagtttatacagcaagggaaatagctgctcacaacgcaataaaaactttgtaaccatataagcactaagcacaacaggctatccagatttaaccatggttacatcaaaagacactgctctcagcaacaacgataaccccagcttgaattttcaattcacaattattctatgccacatcgacacaagagtctagcctacagtacttcagacagccatcaccggggtcttttccttcttgctcaacatagactttcttttgctgcgtttaactcaaatttttacataaccaaatctatcttcaactaccatcttattttgacaggcaacaaagcccaaaggacggatcctagaccaacaagcacctactgattttgcatgtcctactacaaaacatttttgtgtgaagtctttgatatttggagcatataccaagtaaagtttcaacaatccaaccagtcatatatctttgagatcctcaatgtgctcaaacagaacactggaacatattatttctgcaaatcacaaaaataaagcatgttttttatagcttaacctgttcgaaactgggtattctttgaaaatagggaaaacaccacatgggaaaatgaccataacaagataattctttttccttgctatgcccatgaaagaaatgtaaatgatcattgatttggtctaccatgcctcacaaggcctttttcattggaaaaagtaatatgaattattgatttggatccacatccttagtaattagtttaaatctgaactaaatcccaaaatgtcccaaagaaatagccctcagaaatttcaaatgcaccttaaaagagataatttatgtttgtcctttatctacataatttccagttaaaagcttgaattattttgatctttgttgttggtgtgttgtgaggtcatggatgtataatggcgagtacacaagacaaaggtaaaactaatggaggtacttgggagttgggaccatataaatttgtataagttacatatcgttgacaaatgtgctgcatgtaggctgttgctgtggaccacttttctgtagcaccagctttgtttcttgactttgtacttatctaattttctctattgagctaatgttacatacacctgttgaaacccacattgaaattccaattggttccacttaatcccagtcaactttgtatatagctggttgtttggttctttcttatattaccatgcttaagagttatacatgaacaaattatctgtgatcaattttccttaggtcagagttttcactaagaacaagtttgcattactaaaaatatccttttcacccatgaaatctctttttgataacgtgcctttcgttgattttgggatttaagaattttattgcagggattatactttatgcaatccttctggcgagcaatctgctcaacccagacttgacaatttagtgaactttgggcggttatgtttcccttcctgttcaggctaaaatttccaaccagtagtggtactttcttgtctgtaaatttgtatcaaactgttactgattttatttgccccacctcagagcatactggatggttccccagtcatacttaataatgtatctgtgacatcttctgcttcttttagatgtccattgtctaacattgatgtaaggacaccgacatccttggcaagagaaaaggaagtggcctatgagttctagccttgttatagtacctcgtttgactccatgggtgctgttcctatatctaaaaattgagatgcacgtggatataatctgtaagttagctgcataagctacgaatttgtatgtttaacaagttaaacattagtgctattgtttgttcactctccttgcatttggtgcctcatagctcatacatggctagaggactagaagtatgtggttgaacttgaaatggtcaagggatgactagttgagtgctatgaatctgataccgtgtcaaccagttgaattctctttgagatagaaggctctagaaagaaagtgaaactctgttaaatgtgcatgaactttgcattttatgcagtgaaggatctttccccttgttttagtgttatactagtgatatgcaacattctcttacgttgaagcacttcaagacaagagtctgttgcatataggctttttagactattattttaccacacttcaaggaaataaggcgtttgcatataatttaggctattataccacagaacacatcagcacatgcactagaaaccaacacactacattagattcattttttcatgaaaaatactaatgtcagacgttgcaatcactgtttttgcatgatcaaattttggaatctgctagggctcagcctataagcttgagctttgccctcaataagcttaagttatggtcaaatgtaatatctgttaggacttaggggttttactagcttataaagataagctagagctagagagtatgctatcaataatgctgtcgagttcttttatcttacaaattttttatttatacaacattatttatgtcttaattttcagagtctgtttattacctattggtcatttaggccagaccgtcagaatctatacaaagtggattataaaagaatcttaagcttggcaaaagttccaacaagccttcaatatactcgcttcgtatagtttgcaggctcttgtaccaagggcggcaaggaaaccttttttttttctttttactaaattacccataattatcatagtactattctagatattaagggtgaagtgctttgatatatgtgtgctccctacattcttttacaaaagcttttacaattttatatggaggagggagtagttgatgtagtgttcttactttgagctattggactccagtatctatcatgggctgtgtggttatggctgaaccaaccaccacgattattgctggaatttttagctgggctaggctgtaagcactccagtggggcatcaatcactgcaccagacttgataaaaattaatatgaaacttgagctgtaccagtttctgctagttggaaatactgcagagctagtctaggagtttctatttgttctttgtgcttgcctgttacctattcattttgaactaccttttttatcttttgcttggtactacccagcagaatgctgtgagttattcaaatttcatcaccctgttttccagggcaccaatgatgtgtactttgttgcaactttctagctcacagtagaatcaatcattttgcaaactgatcataatgatcattaacatgctttgtcctcctcagggaaacaatggtggcaccaaatctactgatgtattatcttgatggtttctcttagtagctagtatcctgttactggctgggccatcttactgcattcttatctaactctgagagtttgctattgttgtgctgcgttgttttgcattgtggaaatctagttctttacaggcatccttggtaatgctaataagattttcaattactagctaaattccattgctttgctacggataaaaggaaaaaatcataatattgcgttaaataaataaaagcatgtttgtgatgattatgttacccacctttttgctacaacgaatactcacctcaatttaattttatatgtggctaaatatatctagttgtgtataatattaagaagtttaagggataatgtgtaaaaactacagtaggagtaggtggggtggcagattcactgccaccaccactgtaatctttttaaaggagtatagatgacaccaaaatagatggtttcatactaactgaaatatacacaagctgaacaaacttttttcatcagctactaagatgacaaattgagacttacaaagggttatcttgaactctttcatattcatattcaaagtacctattccttgtcaagttgggtacaacttagttgaagcataatttgcctatagtgtgattcatgtgtgccatgagtgcagttttttttttcccatttaccatatgtaaatatgagaatatatccaagtcatatcatcaattaagtgtttgtcatgtttttactgtggccaatgtataagccgtactagaccaggtgttctatctctctgggagatttactgtgatcaattatatgaatgtggcaatttgccagccttttctgcagtagcagatgtgcagctttttcagtgtgcctggtagcaataatcagagtcactaactcctatggtgctagtagggggtcaaaagtactgaaagattgtattaatattgctgctagtgcttctgtgcttgccatttgcatgctgccgagtgacgacggctgttgaaagctgatattcggtgaaattttaaatgctttgccaattagtgtaaaactgttgttctctgtggtccatgtcttctacatgtccttagctgtttgcctaggtagctacagttatctgccgagtgactgagtccttgtagcacatcacaaaagagttccctgttgttgccttttatgcttgccatcacatttgaaactagttttggacacacagtttcgttgggcatacagttctgctgaggtgtttgtggggtcttctatgtaaatgtttgctgaaaccttgtaattgatcctttctttccaacttcttagggtttcaatctttgg

SEQ ID NO: 1701 - DNA, 3674 bp, Oryza sativa
  Intron number 1 from transcript LOC_Os04g02920.1 (locus LO C_Os04g02920) derived from phytozome v7.0 (chr-ID Chr4; po s 1156550 to 1160223)
tcgaatctctgccttctctcttccatctgcaggaggtatgtacgcatgcatccatcttcgtcagaatcgaaccaagcataacttaatttgaagttccaaaatggacaatttgatttagaattgcaaagtttttcagatttgattttatcttctgcgaggatgatgatggaattgattttattttaatctcaaccagcatgattgtgtgcatgcctatatggattctgcgggcttaatcttattttaatcatattaattacagtttttttatcagcgaaacactaaactgtacattatgaaaataatagttactattaaaatatttaaaagatatataggacagtatgttgaatattttgtctcgtgcatatataaaacaacaaatctaattttaatggttaaaatataattattattatcgtcaaacttcatgtgagattttatggatacgaattcaatgatataattggattattaaataagtgattgtgatgatcattagaggccgagagaaagaaaaaggagagaagagctgttgagctagtgggcttgggctgctttggttcgccgagctttgctagcgttaagtgcttgctggcagcaagcagcaggcctttggacattgtgcccacgttagggttgtatgataccattctttaactaaaacttgccatgttgtaggtagcaaaaaaattatgaaatttgatcaaaatttagttaaattagttcatgaaaagttggtaaaacgtagaaattttttgaaagaacccatttcaccctggttggtccgttgtcacaacccatggggaatgcccttcgaattgaaagaacacacatgttgctcttcatatttaattgattcaattcgatctaatcatacaaattacagaaacactggaaagcctttcaccaagagagcagctaagcatgtatatccgtatctattgtcactcaaacagttcaaggttattttagtgtgtacggctaggacttatcttaaaagtagtagaatttaatttgtagctcaatgattttgcattttagtttggataaatttgaaccaagtaacactggtcgaaggatcagatattcaaaggaaataagttatagaagggtaaaagactactatttcagatattcaaggctccaggccattggtgccggcgtaacatggtctgtgttggtctcagcctcgccgtggtcggccgccacaatatactgtatggccattgtttccgctactttgtttgcaccaccaactgaccaacataaatgcccaagacaactagacagcgagagttgccagaccaagtaggtcatttggtcttccgtttgcctaggaacaagggcatctatttaagccacaaatgaataatacatcctatattttctctgaaatatttgggtatgccggtgcatacccggcaccacccctaggtccacccctgatggtcccatctcgcgagcagcattagcagtagcgtggccgaatttaaaattttctatgtaaagtgaggacataaacgtaaacggttatatcagaggtgtggttcaaccaattggtttggatataattatttttggtggatgcactaaattacaagaaaaaaaaattgatacccacatgttattaatcttttacttatcgttgtatgtctacgtgctcccacatagtattggcccaatgtctgtttttttcctcgagttgggtacacaaggaaaagcattttccttgttaaaaaagagctaattgcaggttgggcaatgtatttttctagcaaagattcaatttgatcatcttttgtccaatatttttgcttaaaaccatatatatctttggataggggtgggcatttagtcagaccgaacaatttggtctcggccttcagtctttagtgaaatttcggtcatcagattcttgagacagattaatcctgaacaaaatcgaagatcgactactttggtcagtctggttcagccttggtcacaactgaactaagcgctttgtgttcacagccaaaataaaaatcactggtgaagaaacaattacaccatcgaactgactgcaaaatatgtaattacagacaaaaagatcacagaaaacaattacacatatacatgctgtattgctgtatagggctattgggctgcacagtgaaattcggccattttcagttaaccgagccatataaccagactaaatttggttagtacactttgatgactgaatttctcagtctcgttttttttccctcaatctgttcggctcggtctattttgtctacctctatatctttggcttggaggaaactatcggggtctagtggctagcagcatggttggtgagttagtcatcccaggttcggttcctcccttctacaaaatatttgggggatgtctctccctccaaatattgtttttttatatctttggctaggctatctcacactttttgctactgtctctccaatctcttctccacctccaattcctgacctccaccatggccatcgtcagctcaacccttgacctcaagctcatgatctagctctgtccacctagagctccaacgattactttctctagatgacaatagagagctgaagctcggtagcaggcctctctaatgcactcagatcctagcaactggcagggttggcaacggggtggatcagggctgggttggacaagattagccttagccttgactttctcccccaacctctggcctaaaggagaaaacagtgccaaataaagccccgcccctggtcttgctagggacctaacctcccatcaaggcctcattagttgctggcaggcaacaaagacacataaaggtggtgtggaggtgaggttggtgggcatgtggtgggtggtggtgggaggcatgtagtcaagggagccgagggaggcggcggagcagcagctgcacgtttcgtgcgatgaaaatgagggtggcgtcactcgggactgggagagggagttgttgtgcatggacatacacatcgatccttgagctagtaaggtatgtggggattagtttagatccattttatactccaagtatttgggccagcctgatattgtgggtttttctcttgtaacttgaggagatatcctcctccattgagattagtttcttggccctaggccctcatgatgtcggggcgccatgctgatggattcgcaggtgcagattttgctctcgtcccttagatgcgggtctctacacccattagggaaactgtcacccatagcagccagatttgagaaagacgaactcagcccttggttgtgcttatctgagagtccaccctctgctaagcttgatctatgcttgcatcacccaaaactagaagattgaacttgtgcaccctaccccaatgatagagctccatttcctacaaccgtgccatgctgcccaagctcgaggtccatcttggcctatgtcctcatggcccgtggattttacctctacatctgagtgccgatttgagtagtgggaacttaaggatatagtatatcgattcatgtctaactctacatttttttaaaaaaagaaagagttttgcttgccagtatgttttaacaatatgcacaataaaatagaataactcagattgttatgtaccaatttaggtgagcgtgcatttcagaagcttagcaagctctcg

SEQ ID NO: 1702 - DNA, 2068 bp, Oryza sativa
  Intron number 1 from transcript LOC_Os07g15959.2 (locus LO C_Os07g15959) derived from phytozome v7.0 (chr-ID Chr7; po s 9279513 to 9281580 reverse strand)
ggtcaccgtcgccgttgccgaatccaccccctccggtgagtaccaacccaattccatgcatcagtagcatccctggggcctctctaacctcatggacacacatgcatgatagttcttggagctgattgagccatcgccgttcacccggaggttcttgccgccgccgagccgttacacgagccaccgtcataaacctagctaccccagccatgtctaccatctcggtgagcacccttcagcctatagaacatacatgcatgcacccaattaaccaatacatgattgtagaagcacatgcatcaccacccgaaaacatcctcctttcggactcgccgccggcgttactccgatgtccactgaccgagaaaagtagaggaatggaatcgcaataacatgatcttcattttgtattttggttgcacccccaaacgagccatcgtttgtcgccggtgagctcgagatcgagctcagccatggctgttctgcctctgtgcgtgagaaaagaagtcagggaccttgtttcgagaatttaaacaactataaggtttaatgtgcaacttttcaactcactgacatatgaggctaggtctgcgggttgattcttagaaacctcagggatcattttgtatattgatctttcactgacagtggaccccttggaaacaaaaatctgaaattataaaagaaaagtacctaaaacttgtaaaatccatataaaattaaatatagctcattttaagatgatacaaatttctgtgaactcaccaaattgtgaactttagtgttatggaataaaaacttgcactcacagtacaaatttagcctctaaaatttatccaagttaaatcacacataaagcatgcacaaacttataaaatgcatacaaaattcatttgaactcattttggagcaaactcagtttctacagatcaaccaacttatgttctcctataaagcaaaatgaaatagtatacatactatacatcgaatgcctctaaaactattacctttaaaatgactagttttacataagctgaactttagaagtttatataaaattcatcttagatcctttttgagtaaacccaaattcagtagaatcatagggttgtgcacttcaatgttataaaataaaaagacatacttacagtataacgaaaacccctaagtatttaagtaaggaataagcaacatggagcataccttaaattgtaacatttgtagaaaattcatctatagtcaaaatgaagtgaaccaaattttctatagaactagcaagtaatatacttcaacctagtagagtgaattatagcaccctctttagagaccatagctctgaaccttaatttggtagaataggtactaaacacatagtagtggttaaaacaatacatatgaaaaagtatatatatatgcatggtagctccaaataaatccaaataaaacttgttgaaccagtgaaggcatagatccatccccttccaccaaaacttagtatccttaactcatataatactctctagattgatatgttaagtttctaacatagaacatcccctagcttataaaatgtgaagtaaagtaatctgaacactaaaattttataaactaagattatattagttaactaaaatactcattttatacaacactagcaagttagagcaagttctggacctaaatctccaaagccatgtacacatagggaatatatgcctagaacacgttaaaacttgtaaaatacataaataattcatattaactctaaaaattatgaaaccaaatgtgttagtcttagaaaacaaatatcttcaccccagcaaacataaacttaataagaatcaccttacaacagcatttcacaatagtacctaagtaaatcctacactataccgacgaaacttctaaaattcataactcccaaataaaatgagataaaatagaaattctttcacctaaattcattttataccagtacctattctctctgcacaaatcatgcattttagaacattttggatttttcgcatatttcggtgtttaattgcataacgtgtactttgtatag

SEQ ID NO: 1703 - DNA, 1598 bp, Oryza sativa
  Intron number 1 from transcript LOC_Os03g50510.1 (locus LO C_Os03g50510) derived from phytozome v7.0 (chr-ID Chr3; po s 28832719 to 28834316)
tcaacttgtggatcaagcgcgaggacctgcagcccgtaatcccccctatccgttccccgcccatttgggctaattcgtgtttctgatgcgcctttttttttgggggggggggggggggtttaggcgatcttatgctgaaacaatattacttttcagaaaatatggtggcttccttgtgggcttagctagcttctactcgtattcggaatgatttggcattgtcaatcgtcacaatcgtgtaattagatagaacattcgttcgataagtttaggggttttcgggggggtttttacctcggaatcggtgtgttgtgttgttttcagtgggcttgaataggatgtttggattctctggattctttgattgttggataagtattgggatattttctttagttgtccaccttcgcttggacacgttgctgtcaaactttctcggggtaatagaggtttaagggtgttttgcttttgctcgttcttctttgtgaatttttgttctcaaattggtttaattttaaatgtttttcatcaacttataaccaatactcctggttggacatttaatttacagggttcttatcgtgtcaatttttaagggattttgtatagttacatcctattgattgctgaaattttgagatgagtgcactttcagtgctggacagggtattgactcgtagggtgcttgtttgatgttcctgtatggaaaatactccctccgacgcagttgatttttttttatacatgtttaaccgttcgtcttattcaaaaacttttgtgaaatatgtaaaactatatgtatacataaaattatatttaacaatgaatcaaatgataggaaaagaattaataattacttaaattttttgaacatgacgaacggtcaaacatgtttaaaaaagtcaacggcgtcaaatatttagggacggggggagtacaatgttttgttcatctgcgctaatattaaactgaggaatgtagagtcatcaggtttaggcgcttgggttttgttggagtcttatcaaagttttgaacttattatgtttcatggatgggctacccgtttcaagccttcaaggaacgtgaaagtttgttcatactctgatatacctgaaggactttctaccgtcattatcattgtcattgactagcatgatgtattggtgttatgccttctgtttattttatttgctcctgctttatcagtataattggcagttctcctgcctgttcattcaaaataataagaaaatattgacatagcaatagcaccaaggggatatccttgattgcatatttaattatctctctatacacatgcactgtacatgtattgttcgttattgttattgtttttcataattgtctactgtttttttaatgttattgaatgctagtttcatgttgattgaaatttgagaagtacacgcaatttctactttagcattagtttctactttagcattagttttctgtagctttacatatattgctcttctgacttctgacagtacaattggcagttttactggccagatataattttggttacttgttgtgtaggtattctcattcaagttgagaggagcatacaatat

SEQ ID NO: 1704 - DNA, 5438 bp, Oryza sativa
  Intron number 2 from transcript LOC_Os10g08879.3 (locus LO C_Os10g08879) derived from phytozome v7.0 (chr-ID Chr10; p os 4817423 to 4822860)
cggaggcgtactcctccccctgcatctacacgcaggtaatttctttcaactgtagtttgagatagcttggggggcgaacatttgtttgattttagagtattcacagggattggctgatcagctgtagggttttattagtgacatatttgagaaatttgtgcagcttgggtaatatataggatacattccctgtaattactactaatttagtgtttgaattagacttataatatggattggccatcatggtcatgttgttattcaattttatttcttaagttcgggtatctgtaattctgcattgttagcttttggttggggcttatggttcatgtgatgttagatatttttttattttgtttttttaatcaccagctattggtttcaacaaaacaaaaaaagaaaggaactaagtagctctaggaaagaaaaagcttgtgcgcttggagtttcaagtgcttcgggtccaactgagctacttctctttggagtttggaatatggcttggtcatgttttacacaatgtattgtctatagcacttatgaataatctttcatgataagttttatatattcattttattgcttatgtcgtgtatagtttctttggattacattcatttctggtgtatcatggcttgtttgtattcgactgctaagttagtaatgcaactatgtcacggtctcgaactcgtaggagagattcggtcgagtagagaagggaagagattgagagagttggcttgaggaagaagaagaagaagaataacagaacagaattgaacaggagagagatggaattgaatttgagtatgtttgattacatgattcgatccccttcctctcaatcctgctggctaatatagcatcgcactacacagcctctctcactcactgacagtggcccagccaatcactactaggtccacacacttacagggaaacgggagttggctgcttctcccttctgggccgattcacaggctgggccgctggcttctgctttgaactccctgctacagatgttgccgctgtgacatcccctcctccttcagttgaagcttgtccccaagcttcagagtcaggaaaacgatgacgaagttcttgagcattttcccaagtgaccacatgcggatcatctacagaccaccgaaccagcaactgctccaccatcttggatcctttccgaatgaagcgacgatccagcacttgcgatggaacaactgacgtaccagcagtggactgaattctgggcaattgagaatacaccacctcacttggcaccaatgctttcttaagctgtgagacatggaccaccgggtgtataagactggtagctggtaaagccaatttgtaagccacttcaccaactcgagagagcacctgaaaaggaccataaaaacgaaaagccaacttgcgattagcacgagtgaccactgactgctgcacaaccggctgtaatttgagataaacccagtcgctgacaacaaatgttctttcagagcgatgttgatcagcctgaaatttcatacgagcttgagcacgcaacaaatgatcccgaatcaaactctgaatctgctccctttcatgtaaccagtcagctaactcagtcgactgacaagctgcatttgctgacaaaccaaaataccgtggcttatgtccatataatacttcaaatggagtggtccccaaggctgaatggaaggaagtattataccaatactccgctagagccagccatcgactccactgagaaggacaagcatgcacaaagcagcgaaggaaagtctcaagacattgattcacacgctccgtttgtccatcagtctgaggatgataagaagaactcaaccggagttgtgtaccagccaacttgaatagagtagcccacagggtgcttgtgaaaatcctatcacgatcagagatgagtgactaaggtaatccatgcaatttatgaataaactgcatataagcttcggccacatccatagctgtgaaagggtgagcaagaggaacaaaatggctatacttggaaaacttgtcgactaccaccaggatacaattaaaggtagctgactttggtaagccttcaataaaatccaaagaaacaacttgccaagcatggtcaggtacaggcagtggttgcaacattcccggatacttgacatgttctgatttggcttgttgacaaacagagcaagcagtaacaaactgcataactgtagtgcgcaattgaggccaagcaaacagttgtttcaccctttggtaagtgacatgaatgcctgaatgacccccaactggtgcagtatgcaagttagccaaaatcttttgttgaactaaggtattgttacctatccacatccttttgagcaggtgtataacggtagggacgcacattgactggagtagctcctggcatgggtggaattgtatgatcaaaaaccctggacggtggtaatccagaaggttcttcaaacacctgtccaaattctgctagcacttgttgaatttccacaggaatttgctccttgtttgaagattctgacagagtgcacaactgaatcaggtgagagatggcctgtctatccttcaactccaaaaactgttgagaagagagttgagaacactgttcagtttctgacaaaattccctgtaatgtaatggattcctttctccaggaaactgtcaagagcttgttaacccaatcgacctgcataggactatgagccatcaaccagtccatgcctaaaatcatgtcataacttcccagatttaacacctttaagtcagtataaaacacccatccttgggtcatccattcacaccttggtactgaagtaagacaagtaagtatggaaccgtttgctactttcacttgtactggtggttcaagagttacaactccttgcaaggtttgagcaatcttagagctaataaaacttgctgtactacctgaatccaccaatataagcacttctttaccctgaacatatcccaacattctcatacagcccactgtttcaaagccatttatagcctgaactgaaattgacatcaatccaggactgtccagaccatcactttcgtcagaaataccctgatcagagagcaaatcggattgcaaaactgtgagcaattcttgaactgcatgcagttgtatagtgtttgcacacttatggattggagaccacttctctgcacatatgtaacataacccctgagctctacgctgagccttcagtgtagaaattttatcattactggtaccagtcttggtattgtcaagaaacttacgatcctctgatcgattcaaaacaccagagccacttccaaggtttggaggtaagggtaatggtaatgctcctttgaatgcgacatttggccgaatctgcaaatttccaccatcacttttcttcagatttggaactgacactgtcattgtctcagaaatcacttcttcttgcaacattgctactgccaaagcattctccaaatctttaggacgttgcagcagcactgcattcctgatttcttgacgcagtccctcagtaaaacgatgtgttagatatcgcatattcaaaacaggatcatatgtcagcaattgattcattaattcatcaaatctctcataatattcccaaactgttcctgtctgcttaatactatccatctgtctaatgagagtttcatgttggtccctatcaaatttgtgtgacacagcaatacaaaaattctcccacacaggaaatctaacatgagccttagaagaccgtaaccaggaagctgccctatccaaaaaataaattgtggctattctaacccacaaccctggaaaagtattattcacatcaaaataatgttcacatctcattttccaatcctctgggtctgttccatcaaacttagggaaatctaacttgggaaccctgtgattatactgacgcccaaactgatccccatcaaattccccaccccccaactcaaattgatcaaaatttttcagagatgtggaaggagattcatacgcacccttgaccggagtcgggcctagggttgcgttcatccccagtacccttccccggtgttcatgagcttgcagtcggccactggccaatttgtttccgccttccgccgcggcagcttgagatgaagttggcggcgtaggcagcagtggcgccttcctttcctcgtccgtcaacggaactcgaggggaagacgtcgccggagaagcctgcttcattttgccgacgagatccagttgctgacgaaggtcgccgacttcctcacgcaactcctgaactgctgcttctacttgaggtctccaactgctcacttcgcgatctagcttgacgaccgctgcttgagtttcgccttgagcacgattcagcctcaccaaggactcctagatctccatcaacaccttgccgaaatcaatgttctgcttctccatcgcttcgacttgaagttgcaaacgggaagtatatcgtggcttctccaggatcgaaattgctctgataccaaattgtcacggtctcgaactcgtaggagagattcggtcgagtagagaagggaagagattgagagagttggcttgaggaagaagaagaagaagaacagaacagaattgaacaggagagagatggaattgaatttgagtatgtttgattacatgattcgatccccttcctctcaatcctgccggcttatatagcatcgcactacacagcctctctcactcactgacagtggcccagccaatcactactgggtccacacactcgcagggaaacgggagttgggctgcttctcccttctgggccgattcacaggctgggccgctggcttctgctttgaactccctgctacagatgttgccgccgtgacaaactacaggctatgacccatttgactaaggtggagtttattttccttttctttgagaggattggcagaaattttctcctttggttcaccgggtactaacggatggacactgctattgtttattctctttggttttatccttttgatcttatagcattagtagatttcagtttgtacgcagcaaacaccagtgaaggtgatttttgctactagcatagtagcaaatagttgaaagataaatgtatggatgtaatttatcacgtgcagcctttttgtaatcttcatagagctggtacataattttcaactcaagagtgatcctagtctggatatatcatttgtcctgtatgctgggtgggtgcggagttcttcgtggtttttgtttagagctcttgtagctgctaaattttgaattctgaaatgtgatgttgatgtatttagtgaatttggcatatcacaattgattctttgtctattttcggtgttatcttttattatctgattctaatgtttgctattccctttgttggaattttcaaagattgagacagaag

SEQ ID NO: 1705 - DNA, 3076 bp, Oryza sativa
  Intron number 4 from transcript LOC_Os08g21660.1 (locus LO C_Os08g21660) derived from phytozome v7.0 (chr-ID Chr8; po s 12906786 to 12909861 reverse strand)
ctgttgacatttctcctcttcttgaccatgtatgtgcctatgtcacaatacgtaatattcttctataggtgcaattcttttataatcacgttacatatggtcatgccttaagttacttggttttatgtcttgctaattggatgtgttcccaatatgttattgtttggatagaaatgcctatggcctccatttctttattttgctttgaagaaaacttctttatttgttgaagttggatattacttcattttttcgatgattttggctgtcacaatttttttcttagttttgagtcgttttctttctatgattagtttactataagacagtagagcaacaaatgatccattcacatacttattatctgcaattagtacttctacatgtatagataacaatgaatatacagcgggaagtgcaaagcacctatgtactgtccagcacatcttttgaccctggatttaccccaattctatataatttatttgagtaatgttggctgtcatggatttgtatttgtactaacactggaaaaatgtctaattggccacatctgtattgttcacctgtaatttattactgtaacgagtagtcagtcttgttctcactagtaatatgcccatgctaatgctacggaaccattatatttttgaaaaaaactatgaaaattgtcatgttagtgaaaacaatgttcatatgtccaattgagattttaattcgatttaagttgtatatgaaatatatttaacgcaaagagcagtaattatattgcctgaagataatgattcatgaccatcgataattatatagaatcgcgtcaatatacattatacgagggcaatatatatgcacaataaaaagaatggtgggaagttattccattaattcgttccaagtccaaaaataaagcatttgatacaatatagaatataacctacaactaattaactaatcctaactttgaatatttggtattgacttagaaattcttaggttctctatcaaggggtgcaagttggctggcccactaacccacttatagtaactgagtaacctggcgggttacccacttgtttgtactattagtgggtttgcgggccggcccacttgcacccttaatttctaataatacctattataggctggggaaatcctaataacacctttaagttggaggttgggatgcttgggtgtgaggaaggcaggtcacatgctgtcaggaatcaggaacttcagtccatgggaaccattagtgcgtccatcttaatggttcaccaaaaataagctttattagccatcacgaaggtgtaaaataaaatctttttacttcatctaccaaaagcagtggatggcagaaacatcaaccttcggtcagttcatgcatcttgaaaaatataaggcttgatgacattttatatgcacggataatttaacctgccattaatcattatcttggccctagcttatttgtattccacaaatttctgaagcagaagaagcatctctgcatatttatcctcatagttctgaatacacataggtaaaagagaaatgcattcttcagtcttggtgagacaaaatgaacagttaagaagattaggttcctttactatggacttaaccaaaacacaatttattactacacagctttagtaccgctaatatcatcaatccattttgtctattatctttgctgttacagcattgctgcaaattactcatcagttgtgacaagaaaagctgtattttctttgagtgatggcagtttaaatttataggaacatgagcatgccattctcaagtaagatatcatctacaatgtacaggagactggtcatatgcacattatctttttgtcagtagtacctttctggctttctcccaaaattcatggcagaaccagagtaggacaatgataattataaaaattataccttcattggattgacttatagcacatacaaatagaaaggttaggcactgcaatttagtagtatttaactgttgatctagaaagcaatggggaaacgatatagctagataagggtcagggttgccatggaggtgatgccatggtgcccaattctggatgtttcaacctttgaataggagaatctagttttcccaaataaatcttaaacctaataacaaactgcagccatgtcatatcggaccaacatcagtgagctcaataacaaaatgtggcgactcgtggatgccacagaggatcgttgccggcatggttttggacgatgggggagctatgccagtagtgatcttgaatgtcgggacctggcagcagccgcggcagagtgagagagtaagaggcggcactacggatcggggtcggcggtggttgttgaggcgtcgatgcagggttgacatctggtctccgatcggcggcaccccgcgtctgtgcaaccggattcggcgacggtgatgggatataggatattagggtttggcggagaaggcgtgatttgggggagaagtggggctgccggggctgggggggtgaagtgatagaggattatcgggtgcgggggaattgataggtgtggccatgtggtggtggggggcaccggtgcgggtgagtgaggggtacgatctaggctgttgaataatagtattgataaatattagctgttgcatttgtaagatgtaagaaatgtgagtctaaaaatgagggatgagtaaaatgagttgttgaattgtagggtaggctcgtatttcaactactaaccataagggcatcaccaatgtatatggcaaaagtgatccatatagatggggcccacataaagagactttaactatagcaaccttcacaatgtatatatatatagcaaatagtattaggaggagagaagaagtagagacaaataatatattttattctctatgggtagcccatatgcttatgggtagcttttgttatttctttgctatggactagttccacaatgttgctaggtagttgaatgaaatattatattgcttatggaccacttttggactacattgtggatgccctaagaaatcttgttgtgttaggtggttattggaggtggtcaag

SEQ ID NO: 1706 - DNA, 1034 bp, Oryza sativa
  Intron number 1 from transcript LOC_Os07g07270.1 (locus LO C_Os07g07270) derived from phytozome v7.0 (chr-ID Chr7; po s 3611833 to 3612866 reverse strand)
tggtaagcaaatcttctgcctcgatttggattcggtcgtgaggttggtgagttgcgttttatccattcgaatgtctagtttggatcggttagtgctgaattgcggatcgatgttggtagccaatgtgctatgtgtgattcagttgtgattgtcctgcaatggcgatttgagtattggcattatagttttcatgagattattgaggttcattcatgtgaataccatcatatcatatataatacttggcatttgcagctttacatttttagcagctcagaataccaatatatgtttctacaattatttgagttgggaggtgttagtgcccttgcaatagtttgttgtatgccatacagcttatatagtcacttttttagcggagttgatgcaaccatcagaactgcataatagaatttatagcccttgtgtttcagaagaaggaatcttaaaccttgtcttgaaactgtcaccttcttatgctttatattcattggttaggataagtttccttcttctattggactggccagtagccacccctaaaaatatttcatactgccaacatgcaatttgtgatttggttttgccgaattcatgcaaccactgtgttgtttgatttacctggctttcatgctttgggattgcttcattggaacattatgcattagctactgtcaagggattttggaatggttttaaacttttaatgcaatctgttgtcagcgattttttttgaactgttttgttagtttagatgcgtaccaatagcttattgttgtttcagattcgtacatttgaatctaactgaagtgacagataccattttactgaaatacggaaggtgagactcctattctgtactggtatgttagatataaatggcaaagacttctatctgacaatcgatatgcttaatgagtgtccattcttgtgttttgaaatatacagttaactatcttatcagtttctgataatcaattttattctcctttctttcaggggttacaaaaggttctttcggcgaaccgctcttg

SEQ ID NO: 1707 - DNA, 1359 bp, Oryza sativa
  Intron number 4 from transcript LOC_Os02g20930.1 (locus LO C_Os02g20930) derived from phytozome v7.0 (chr-ID Chr2; po s 12367449 to 12368807)
ttaaaagtaagctttcagtaaccatttgctcattgtttgtcaccttacaaatatttttctgaatatgtactctttttgaacattgaactactgacctagtttgccatgaattttccttttgggatgtacacctgttgagtattcaagtatatcttatcgttgctctaaaaagaatttgtagattgtgctcaaggcaacaacattagatgactttgttgattttctaccaccaatattttttttattccagattcatccctagtggcaatttattggaccttcatgtaaatttagaaaccaggagaaccagccaaccgatttatgtttatttagtcccagtttgtgtactatctgaacttttttcattcaatttatcacgacatatgtgttggacacaacacattattgttattttcttgttttagaaccagtgttttgaaacaagatagcttgtactatcaatatatgttcatgcgattagttacagacttacaaaactaggtctatcgctagttcagttatccacgaatgcattttgttaatatatattggccttagaatttggtacttgaaaaatagtagtgtttcttaggaatgacatatattccatgccatctaaatgtaatgtaaactgcatttatagaaatgcatttacagccatgccatctaaatttcaggattcttagtattttaagctatttatcaaaaaaaagtgatatcagtattttggattcattaattttgtacacatgattttggttttaaaatggatagttatcattgtcaatatacgttgaatgattattgatatatgctgaatgattatcgatatgcgctgaatgattatcaatatatgctaaatgattacaagaccaagagagtcaatctgtattgtgttggcatcccactattccatatccacatggtttctgagaaatttgaagatgaatgttcgatagcttggtgcacagacatttttgcttttggtgaactgtctgtaagactctttatctttctaaaagtagcatgtctattgagtttctgatgcctttaaaatcaataaccattctttttaccttgctcttggttgagacggggatagtatgacagagttagaatctgatttttcttgaaccggtgctttgttgatccctgctatggttttgttgacatgccctttccccatgattttgtcagagctcgtatgatattatatccttgcaggtgttgaatgactagttctatttaatagtaatggtctgacgtgtatgcaagttggcttcatgaaatacttctattggctgcttttattgatttgtaccttctttgggccaggttccttgcagcctttatttaagc

SEQ ID NO: 1708 - DNA, 6287 bp, Oryza sativa
  Intron number 1 from transcript LOC_Os05g10310.3 (locus LO C_Os05g10310) derived from phytozome v7.0 (chr-ID Chr5; po s 5626083 to 5632369 reverse strand)
tccaacctcccctactacgccaagcacggcttcgggtacgtatacgtatatagttatataatatacacgtatttctaccagtatatacacttcattttcatcggggctcccgctgaccttgctatatactccctccgtttcatgccgtttcatgttataagatattttgatttttggtcaaagtcaaactcccttaagtttgactaaattcatagacaaatatagtaatatttataataccaaattagttttattaaatcaataattgaatatattttcacaatgaatttgtcttgggtcgaaaatgttattatttatttctacaatcttagttaatcttagttaaacttgaagcagtttgactttcaccaaagttaaaatgtcttataacctaaaacagaggttatacaaacggcaatacggaagaagtatatatgataactggctgacaagataataacgaacggcaatacggaggaagtatatacgacaacgggctcacaagacaatactgctatatacgaacggcaacagagtccattaatactctctccatccaaatccaaaagtttaaaacctatttcttttttaccaagattaataagtaattaattcattcatcatgtgataaaatcaataaacatgtaactaataaatactaaaaatgactttttgggcttcgctcaaaaatttaatatagcacatagtgactataaatagtacttagatttttgaaaaaaaaaccaaagaatggaacttttggatggatggagtacttactaagacgcgatcaaaattgacatagattttaaaactaatctttgactttaaatttctcatatcctagtataatatttgtagcaacaaaattataatcatataaaataaatttaaatgacaatccaatgatattactttcatcaaatcaaatttagtttgtaatatactatttattcgtcaaatatttaaagagttgaaccttaaaatacatgtacgtcttacagagtcggacggagggagtatctacaaatctagttgatgtctgataattaattaaatgtcaaaattatgatgaactatgttgacttttgtcacgaagtttaaccattcatattgttaaaaaaatatataaatagtatttattttcttgtgatatgttttatcattaaggaagagacatgcatacacatggcacacgtactgtcacattaatagatacatagcacctagtttataaaaaaacattaatagatacataatagttacgtagcacctagtttataaaaaaacattaatagatacataagttatacatgtcattaataaactctctaaacaataaacgatagatacacaagttatacgttttattgaacggtggatgtgcataggtgttagtacaaaaatcatacgtgttactaaacggtgaatatgaagttatacatgttaggacttgtttagatcaatttgctgtggcaaattttttttggtaaaagtgttggtggcaaaagatttagtattgaagttttgctagttggtgtttaaatgtataataaagttttgctagttggtatttaaatgcatgataaagttttactattttactagtaaagagagagagcacggctcccaacgcatttttttggcaacattcacgtccagttagataacacattttgtcggatacatattgtccagcagtgtcattgtagcagtggttacgatatcatatccaaaatttagtacattgtacacaattatggagctatattgatatccaaaatttagtacattgtacacaattatggagctatatgtggaccaactgcatggttttgatgatgctatctctcgtggcccgatcttctggtggagggataaatctcgctttgatcgagtgcgacgtttgcgacgtgggtaccaaccagaacattcaagatgtcatgcaatcgctacaccacaaacccatgacacgtggttgttgatcactgcaatacaaacgagagaacacatgaagaacaagataagatgtaatctaaatatttcgaatagttaattatgcataaagaaatagttgtgattgaagtggtagatctaatcgacttggcaaatcaacacaccaactattagggactctgaatctatagttgctgactaatcaagcgaggactagagacaaggtgaatcgcacatggcaaaattcaactaaacaaaactcaattgtttagagggtgtacatagatatttatagaggaaatacaactagggttaagtgctaattcgtggaggtggagggagacaattccgagatatacctagtctattataaggtccaagacccaagtttggtttcagcaacaatactgttttattttgacgattcccattgactcgagatgaatttagatatgagaccggatacgtttgaaaggtagggagaaaatatttccattaagtccaaaaacaccccaatcggagttggcatgaaggcgctaggtccgtttaaagctagcgttgtctctggaggctgaactggattccgaaactcattggattttaatatattgtagatcctccattcaaccgatgtattatttggcaatgtttcatatttttcatgcttggttgtatgcatatacttgatggtcacatcagatcttcagtactatagtaatcgttaaatctgtcaaatttccagaacacttggaattttttggtggcaactcctataacttttatactaatttcgaatgtatatcaccactacataaatggacattcagattggcactataggtgtcaaaaatgatataaaatgatataactgacacctatatgatactaaaaggtgccggttattctaaagaaccgacacttattagaataaccacgtggctctttagattagaaccagcacctatatgatattataggcgccggttctaagctaaaagccggtatcgatggccgaaatcatcagtgcaattatcttggcgccggttgggaaaaccagaatttaaggggattttctaactagcaccaatccagctttctgtagtagttgtagtagtgcatgaacatttttattaactatttttacaaccccacgcagagcaacgccatacaacgcgacaagctttcgtgagtacgtggcagaggggagcgcaccggcgctgccagagacgaggtgactgtactaccggctgcttgagctcggcgtcaagccggtgttcctaacaggccgcaccgaagaccaaaggaccatcaccgtcacgaacctccaccgacagggattctccgggtgggagaaactgctgctcaagccagcggtgcacgccaccggtgagctccaagggtccgccgttgaatacaagtccggcgagcggcagaagctgcaggacgctggcttcatcatcgtcgggaacatcggtgaccagtggagtgacatcctcggcgcgccggagggcgcccgcaccttcaagctgcctgaccccttatactacattggataggttgccgcgctcgcgccggcggccattgctagttctaataagcttgcgcgccataaatctagtcacgttcacttcatgatgttgcttgtgatgaactgcttctaataatcgccatctactagctgttggtagatgatatttctaataaaacgtgtgttggagtatcatggttccagagcagtacaagaatttatctatgtgagcaaacttgttctgtttatctccgtttaatttatgaaggaattattaaattaatacaatttcttgcattggatatgcttgttccctaataataattagatttatttttattctttcgtccggtgttgttagctgttagcttactccctccatctcaaaaacccaacctccaattttttaactgagggagtacccctcctcccataaaaaccaacctaataccaaatgtgatatattttaatattatatgtatagatttgtagtactaagatatacaatataccacatcttgttctacatttgtttttttgaccgagggagtacgtgtgagccggggcattcgaccgcatgcggcgtcggttcgctcggtcgcatgccgtgccgcgtcgcgctcctccctcctcacagcgtcctcgcccggattcccgcgcaagttggtgaccggcccgtcctccctcggccccgccctggccgtactcgtgcgtgcgtcagctatcccctgcacagcgttggaccaccgtccaccaaatccgccgctgccacgtgccctatcactcagcttccccggcctcacccttgtcttcgctagagacaaacgctggagcgcgaggatgatgatttctaggggtgggcattcggtcttgacggagaatttggtccgaatttttcggttttaaaaaagttcagggtgtgtttagcaaaaatacttctaattggtcgtccgatccaaacataaaaatcggatggctcttgactgccttctctgacactcgtgaccacacatcagcacatgcgcggcatgccacctttgccagtgacttgctactgcatatctattgctactctctctctcttttctctctccactccatgcttgcatgtattcatttaataatattcaaaacgattgttctcctaaattactttttcaatctacaatccgatcacaccattgtattcgttgtgattaaatctttacaacaaaatgtcacatgattatattctaataaaaatagtcatatgtttcaatctgttaacattctttgtttcgtacgtaatagtgatatgtttcaatgtttgtcttcaacatgtttcacaaaatttccaaaaccaagtgcactactctctctccacctcatccatacatgcatgcatgcattttaacaagtttcaaaatgttttttctcctaaactaattatccaatctacgatccgatcacaccgttgtattctttgtaattaaatctttacaacaagatatcacatggttatattttgataaaagaaaaacatatgtttcaatccattaacattggttgtttcatatgtgatagcgatatgtttcaacgtgtatcttcattatgtttggtaaactttttaaatgtttcagttgctgatttttttgtttcacgctaaataacttgatgtttcacttgttagttaactgaaacatttgactgactgatttttttttgcatgctgcatacataggtggtgtgatgacacgcggtgtccgatatttggtggaatatcggacgtccgacgcggagtcttctccatgtgtttagttcttagggtgtgttttggataattggaaatggggagtgggattgggatcgagagatgaataaagggttaggattaaatagaagagggagaataaatgggtacgatttaaagatgggtgggaaattattttcctttcccatttgccaaatactatttttgggtgtaaagtttttaaagtatacggacatacattaaagtattaaatgtagactaataataaaacaaattatagattccgcctgtaaactgcgagacgaatttattaagcctaattaatccgtcattagcaaatgtttattgtagcatcacattatcaaatcatgacgtaattaggctcgaaagatttgtctcgcaatttacatgcaaactgtgtaattggttttttttcccacatttagtattttatacgtgtttctaaatatttgatgtgatatttttagctaaaattttttgagacctaaacaaggcctcagtctttctgagttgacgaccgaattgtcctcacaagtctgcaaagcgacagttcggttaactgaaagttcagtctcggtctgaccaagtattatgtgccgaaggcagccaacatcgattgggaaaaaaaaatcaagaaaatcaatcaaagactatcgttgcaaaagaaaagccccaataaggcaataactcactaatgaatagtagtactccctccgcgtattgtaatataggacgccgttgactctttaatagacgtttgacctttcgtcgtattaaaaaaaatttatgtaattatcatttattttagtgtgacttgttttttcattaaatgttctttaaatatgacataagtatttttatatttgcataaaaaattgaataagatgaatggtcaaacattgattaaaaagtcaacagcgttatacattaaaataaaatacggagggagtacatcatcaacccctccgatccccttcgttcatctcttgttgactgccgattgattgttccctcgatgcagtgtcgacgtcg

SEQ ID NO: 1709 - DNA, 9479 bp, Oryza sativa
  Intron number 4 from transcript LOC_Os07g09460.2 (locus LO C_Os07g09460) derived from phytozome v7.0 (chr-ID Chr7; po s 4987543 to 4997021)
gtgggtaacaagcccaagtgcccaactagtatgtactccctcctttttttacttatggtttaggacatttacagtttccaatgcacatgttttattgttgcttactacgattatatatccacaaaaataattaaaagcataacaacatgaaagtatttttccaagaaaatcaactaatgacattttcacatgtcaaatcttttttttttgcatatattagtgaattaacattttgagttttgattgcacacattctaaaacttcatttatttgacaacagagggagtgtcaacgattttataaggaaattagattgtgcctaagttgcaagaatattatgcaaagtaatgtcttttacctaaacttttcatagtccactagatagtgggagtagcttgtactaaatgaaatgatatactacctctgtcctcctgtccagattcgtagtactaggtaatatcacatctagtactaggtagctacattttgggacggaggaagtaagagagaaatacttgaaactttttaactaaaatatacttaaccaaagccggtggagtgtcggtggacagtggaggatcttccaaagctagaaaatggtgctggaaggtacatgatggttcacaaaattggagaaacgaacctctactagaagacgagagtaaacttcccctcagtaaagttgcaccctaacagaacaaggctgtaaacaactttaacagaaccttggtaacatgaaaaactttcagccttacaactaggaaccaaatttgagaatgaagcctgagcatatttttacactatttttctgattagccaatatgattttgacttgaccataatattgccaacttgttagcttttctatgctcaacatgattttggaaggcatacattttagatccaacaaggtggagatttacattcctattgtgggaactagaaagatgcttctccagtcttcacacccaaaagttccaatatgttagcttttgaggcaaatgattgtggggaatagatgtgcacacaaccaccatcaaagtctaccaaagagcaagtaaatggattgattttgattgtatgatcctcgtggatccatacataaaacacctggagagaatgcatgcaagtaaaatgctgattcacttgaaggcgtgagtaaaacttacctcacacaaaagctacctgcctacccccttctttttcttttagttgatccttgagtgtgcacacaagactagaaaatcattatatttttctagatatgactatttcgccttgaatatattgtttagtattgtgggtagcaagttggtgagagtgttataaagcaacttttatatttgtgggggactgtgggtagaatatgactacttattataggggtaaaaaaggaaactacacattgggaatgcatttcaagtatttgcaaacaacattttttttggcaaaactatcaattgaacaagaacggagggagtataaaccaacaataccaagttgttaaacaactttccatggaaacatgggaacactagaattgcgtgtacttacattttgccacgggtttggccaacttaaggcagacgttttgtttgccaccacacttttgacatgccacataaccttaccttatttccccacatgccatagacacattttctagccatgtcttacctaagttgtggccaactatattcaggcacacaatccatggcatgcacgctttagcttaaaaaattggcaacttagcatatgcaaccaaactgacctttacactaaagccatctaaaattatgaagtacattaataaggacagtaacacatctaaaaattgtagtgcttatcttggatcgtttaagagaacaatggaagacacaaaacatgagaactaacttgttttttttctttttttgcaatttctatctgattgatttgatcacaattgggtcagaaagtgaaattgacgcaaacatggctaacttgttagctgattatttgctcaacatgtttgtggaaggcatacatttgagagatattgagttgtgactaggttgagatttacaatgcaatagtgagaagtggtaagttgcttctctacactaaaaatctccaatgcttcagcttttgcacctaggattgtggctaacagatgtgcacacgatcactattaatgttcgtaaaagaggagagtagataattggattgatttggttgcatgccacaacgtgcctagatgatattgtttgccatgtagaaaagtgaaagccatagtgcacaatgccacacaccatctgatcgagaggcaacccgttgtggttggttggcttgctacattgatcatcttggcgccacgagcacacgcgcgtagttccatattgcttatggcattgacttggtcaaagttgggtcagaaagtgtaaatggcacaaatattaccaacttgttagataattctttgctcaacatgattctggatgacatacggtttagtgctatacaaatcacacaacactgctagcttaaacaaaagtgtttggtcagattcagaattgagaacaaaaactgcatgccatgccaccgcgtgcctagctggtatccttagctaggtaggaaagtgaaagctctagcacacaatgccacacaccagccgatcgagaggctaaccattgtggttggttggcttgttgcatcattcatcctggtattgtgagcacacacgtagtaccacactgctttagagctaaatacctattaagaacattatagaaatcaagtacacaaattctagtcacatattcttccacggttgtctgattgtccaatatggcattgacttggccatagttgaattagaaagtgtaaatggcacaaatattaccaacttgttagataattctttgctcaacatgattcaggaagacatacggtttggtgctacacgaatcacacaacacttctagctttaacaaaagtgtccagtcgggttcgggattgagaacaaaaccgcatgccatgccacaatgttcctaaccgatatcctttaccaggtaggagaatgaaagctatactgcacaatgtcacacaccagccaatcaaaaggcaaaccgttgtgactagctagctttgtcgttgctcgcacatttcgtgcactataccaccctattgtctgtggtttccatttctctaaaacagaaacccacacgaatcacacatcactctgtgagctttaacaaaagtgtttaggtgggttcaagatcaagaacaaaaaccgcatgcctagctggtatccttagccaagtaagaaagtgaaaactttagcacgcaatgccacacactagccgatcgagaggaaaaccattgtggctagctggcttgttgcattgttcatcctggcactgcaagctcatgcgatcacgcacatagtaccacattggttgagagctccatatgtattaagatcattatagaaatcaaatacataaattctactccttttgtcccaaaataagtccatactccatgtatagaagtggacttattttgggacagagagtagttatatgattcataaatggaaaatagagcatttaaagtcaggcttcctcagaatagttaggcttgaaagggagtatcaggcacgttgaacgattggctggtggatgcagctcgagaaatattctagtttgaggaattgttacggaagagggaacaatcggccatcgacggcgcaaaaggtagtgatgtcagtggcaacagggttgggatgcaattattcaagctttagaaagtgccacaatagggttagaaagtgtaagtggcataaaccttggtatcttagttgattctttgctcaacatggttttgggaaacataagttcaatgctagaaatttttgagaagcagaaatttgattcatgatgaaaagctccaatgcttcagcttttgtagcaagtgattgtggctagagaatgcttgtgagtactagatggttggtgaagcaaaatgtttgagaaacacaaacaatcctactttagaagacacaagtagaactttgtattgattgactgcttgatcatcgtggatgcagtagagaatgcttgtgagtactaggcagttggtgaatcaaaatatgctaaaaaactcaagtaaaacagatggcacagatcacaatcaaagtccaccgaagagaacttgtgtaagtgtattgattgactacatgatcatcatggacacaaattaaatgcccagagagaatgcttgtgaatactaggtggttgccgaagcaaaattcaagaaacaatcctaaaccagaagacgcgagtaaaacttccttgaacagtccaacaaaaccaaactgctaagttaggaacatttttatcttgcatgcttacactaaagccataaaaaagtatgagtcgattgacaagcattgcagcacatttgaatattgaagtgcttttcttagacccctcacaaaaatattagagcataccaaatttgaagacaagactacaattccgttggtagcattttgcactgtttgtgtgcttatccaacatagttttagttgacaacaaatttggagatgacacaaacattgccaacttgtttgttaatttgcttcttggcaagatttttgaggacacgtttcgaagctatcaaactatcaataagtataccactttgaaactggatagttgcttgtcgatgatataaatctcctgctttagattttgctacagtataatggacaattgaagaaacacaataatgatcaaagtacattgacggggagagcatataagtggatttattttgattgttgttgatgtatacatttaaatccaagagagaattcttgtgagttgttaggtgccagtaatagacattttaggaagaatcttccgctagaaggtgtgagtagaacatcccttggtaaatctacataccaaaaaaaaccaagatgccaacctactttgatagaaactttgtattgttgaaatattgcatgtttacactaaagccattcgaaagtttgaagcctgtcaactaaggttgcagctagtttaaaaattgttgtgtttctcctagaatcttcacaacaacaatggaggatgccaaatctgaggatgaaacctaagcaaaatctttgtcaaagatctagttttattgcagtgttgtcctaactaagtgtttgtccacttgggaagttaattctgctagcagcaccttgccctatttttatgattgtccaacatggttgacttgaccacattaacacaaatgttgccaacttgttagttgattcttgattctttgctcaacatgattctggaagacacatttcaaagctagcaaaccatcattaggtcaatattttcatggccactctaggaactattaagttgcttatctaaggtgaaaagcttagattcttcaagttttgtagtacacgactgttgggtataaaatgtgcgcacaatcacctgttaaggttcactgaagaggatgcattggttttgactctttgatcattgtggatttatccatatagtgtctagagagaatgcttgcgagtaatatgtgtctggtcaaaaaaaaaaggtgaaacaatcgtctgctagaagttgagagtaaaatttcctgagggtaaaaaagcggcaaactagcaaaaccaagctgccaaacaacttttcatggaccatcgactctacattttaaattgttagtgcttctcctagatccttcacaaaaacaatggagcatactctatatctaagaatggatcctcagtagattccttgtcaatatccagttttataacactgttagtgtggttgtccgatgtagttttgacttgaccacaatagggttagaaagtgtaaatgacacaaaccttgctagtatttatttattgactagaaaagtggttgtgtcttgtgatggggaaaactaacatattagatgattaaggttcaatatcgtgatatgaacattttaagaaaacatattcttcacgtaaacctgccatttgacttgtaaaacatcgtgctttgcaagagactataataatattacatggtgtccttaatgtttggaatagaaaggaaatctttcacgagttgatcctggaatgcacatagtagttggcatcatgccactatcacgttgaggtcgatctccacgatgtgtgctttggcgagcagagcagggacaacgtcggcacgatgcgctatgccaggccctcagtgatggtcatcttctcgaccccaacgacggaagagtatgcacacaacgtggactatgacttcgtcttggtcgagcacgaggtccatcgttgtacggccgttaagtcctagccgtacgcttcacgttggacctcgagtcaatgggaggttcactggcagcattcctcaaaatatttgggctttagatagacagggtaccaaacacgctggtagaaacggcgggtgacagtagcggaggaggtggcatcgaaatattggagctcgaggtattgttgttgaagacggaatggctggccggtgacgctacagagaggtggcatggtaaaattcaatcatgaggaagtgccacaatagggtcagaaagtttaattgacacaaacctcgtaaagtacacttctaagcatttgagtggcgatgttggatcctaagtcagtgggaggtacaccagatgcttcctaaaattactcgggtttgagagtgggagtaccgaacacgttggaataattggccggcggcggcaatggaggtggcattgaaatactcgagctcaagaggtggttgccgaagagggatagttggccaaggtgcgacaaaggtggggtggtaaaattcaaacttgaggaagtgccacaaaagggtcaaaaagtgtaaatgacacaaacctcattaacttgcttgattctttgctcaacatggttttgggaacattagttcaatgctagtaatccatgaggagcagaaagttgattcacgatgaaaagctcaagtgcttcagcttttgtggcaagcgattgtggctaggagatatgaataataaatatgcagcaacgaccattgaagtccaccgaagagtagagcatatgagtggattgattttgaccataaatattgaaagaattcttgtgtgttctaggttgttggtctataaattcgcaaataatcccttgttaaaacgtgtaagtgaaacaaccccatactataaagctacaagcctgcaaaaccaatccaccaaaaaacctttgacaacaacactggagcactgaaaactttgtgaaatttcatgaaaaccagccaagagtacgctcctaagcattcgagcgatgacattggatcccgagtcaatgggtggttcatcagtagccttcctcaaaatactcaggcttgagagagggagtactaagcgtgttggaacattgcctggtggaagcagcgcatgaggtggcatcgaaatattctagatagagggattgttgccgatcaggggatggttggccggtgacattgcaaagggtatagtggcgtagtggcaacagaggtgggatggaaaattgtaagcttgaggaagtgccactagggtcagaaagtgtaaatgacacaaaccttgttaacttagttgattatttgctcaatgtgtttttcaggaacataagttcaatgctagtatttggtgagaagcggaaagttgattcatgatgaaatggtccaatgcttgagcttttgtaacaagcaattgtgactagcagatatgataattaatactccatctgtcacataatataagggacttttcccatcaaatttgtcccaaaatataagggattttaggatcccaagacatactccacctaccaacttttatactagtttattcctccaccatctacttttatactaatttaatctcccatctactaacttttatactactttattcttgataggaaaaataaattatccaaatctatggatcatatgcacgatcaaggtacacaaaacctgtcgtttggtctattcctcctatgcttcgttgatgtagtagtggcctttttttttgctggaagtttggtacgatgtcatgcatatccacattttgcaacactgcttcttttctttagatgaatatatattgaaaggttaggcacaattagattgtttaacgccactgcagccagcaataatgataatatcaaaatgtgactagagagttaattaactaactgttttcagcttcctggtaggtatcatttagcttgcgcttcgttgcctctagtcgcaaatcagctatgttggtgttgtttctcttccctatacctaccttgcagccttgtaatattgttgcttgcctttccaacttctaaaaccaaatcacacgactattaaagcctttcgaagaatcacaacaaattagtgattagcacattaaatatgaagttacactcacatgattagggagtggcttcctgacaacaacaaaaggaggttgttctattatggttgtagcatgttgtgtttggtttcatgccagtacaatgtttatttttagtttcttcaccaagttgactgctcgatgtgtattcattatgtgtggatttattaggcttggttgttattacaccagacctagagaacttgatatgtgatcttggcccttgtgtttttcctacctgtagctttgtttgtcttaatgttggggcttgtcttgttggtaaaccttggatctaggggatagtatttacgttaggatatgttgttttgttccataggtttgcttgcctcatattggaggttcgtgttgtcctgataaatcttgtcacttgtacactatgttttcatcaacatttgttattggttgtgcaatctccattttgtacccataaccacaatcattttcagcgtagtgtattagaactattacatgatatgcaatcctattaatttcttgtgtggcaagtcatcctggggaagaaaaaaacattaccattgtctactcatgcattctcccaggatctgctcaacatagtttcgtgagtattttccttgcatttctgactacttgcactgattattgttacatgtccgaggattcaaagctatgcatgaattccaacttcttacatttcttgcttcctaggatgggatctccttaagcttgttgagcgtcacattgccagttcagtaatatttgcatttatttctgtaaaaaaaatattatgggaaatcttggtttaaaacttcagactccatttgaatactttgtatgtggcttgtttttgtttatgttcaattatctttagtatttttgtgaggtgccatataacgtctggtgggaaagatttcagataccctagatgttggatgtgtcgtgttgcctctgtggcttgacagcatgtagatgcatccgaatggatcaatttaacaatttctattcagttctacacactctttcct

SEQ ID NO: 1710 - DNA, 1504 bp, Oryza sativa
  Intron number 5 from transcript LOC_Os06g10440.1 (locus LO C_Os06g10440) derived from phytozome v7.0 (chr-ID Chr6; po s 5370039 to 5371542)
gctcttgttctctggtaccagcgctttatttgggggtaagtccttgcggtaactagtcactaaaaatgatgtgtctgatagaagtagtaaatcttgttaatttgtgagtacttgttatttttatgattttatcacttttttttgctagcttatgatgtttacactttacactgagaatcctgatttacatatctataactgaagcctgaagcgggaaaagtccctttccttcccttttgttcacgcgctggtttattttctttacgaaacctaactagctgtaagaatagtagaatagttctataaaaaggaggaacacttgaaataatggatctctccctttgtttgacctttgatatatggttgtggaacaacaaatattccaacactgaagaccttgttatgagggtcttttagatctaacccagtgaacattctggacattcatcctttcgcagatctagtagtgaagttatgactcactattagaggacgtgtcaggattgacaacgttgcaaaattacatattatactgcaatagaaaggagtttttcgaccagggtaggatcatgcgtcagttatcgctcactttaatccctatcaaagcaatagatgaagcttactaacttctacattttctatcaatgtaacaattaatagcatagcgaagttatccataatggcaaatactatttcctcttctctcaaaaacccttaaccatccagttctatctacctaaaagcattttaggcgaaccagatctaagccacaaatatgggatcatgctaactttgctgggttagagttaagaattaattctgggctggcaaagctgtttgaatccaaaagcatagatcctccaaaattttccacaatcaatttactcttctagaaatgtagccagaatgtcaggttatctgctacacagcacattagctaacattgattaggtttggactttggacatttggtatttgcagcaaagggaagagagaagctacaggttcaatgtaatataaatctagttatttttttccagagctatttatgtttgggcccggggtgtgtcagctctctgccattgtaattggggcacagtagctggttaacatacataaggatgggcattgctcatgtgagagggtagggagaggttaagtgtgatataatcctgtgcagatatttaccttttaccatatttgatagtaattttctgtgcattattgctactaaatggacaatggaaaatattcctgtagccattctagttctttctgtctgcatcttcagatgagctataattttgtgtcatctaagtttgctagactatatgatgaaaaatatgtcttccatcttttcttttgcatagatttatcaaacttaaggtgttctgagctcatgcagatttttacaccagcacaagtattcatgcagcacacaatgtacgtggaattatcactagtgcctatataatgtctaatgatctgttatttattgcagcat

SEQ ID NO: 1711 - DNA, 2858 bp, Oryza sativa
  Intron number 6 from transcript LOC_Os08g12680.1 (locus LO C_Os08g12680) derived from phytozome v7.0 (chr-ID Chr8; po s 7490377 to 7493234)
agctcccccaaacagtccagattcttactcagattgtgagaatctgtacttttagaatccataaaatggattagaagccagaagctaggaaactcaccttctccagattctcaccagcagattctcagaattttaagctctcccaaacaggggccgtattaacatattagatcataacagagaacaggtgacttgaaaataaaaatgcaataaaccagagaaattatcaaatccatttgtggacatttgcctgcataactaaaacaggaaagggtctaagaaagtaaactcgaattcattttcatgtatatgtcaatgcttagcaagtttacattgggcataaatttctgagagtaccaaaacacaactctgtgcatccaaattggtggttagcttcatggttgttaaggcattgctgtggtgtcgacaaagcggtaagcaggtgcaggggctaaggcgttggctctgctttttaggaaaaccagaggagcaaggaaaaaaggacttaagctcatcatggaaccctagttggcggtgtttctgtcccgcctcagatctgtgctaccatcctccactctgcctcacggtcaatgtcctccctgtcccgtcgttgagaaaattgatagaattccattcttcaaagtgggctttgataagatgatatccccttacattgcactctttaaaatgccagaaattatctcttctatatatttttttcatttaggagattttaagtctgctttagttcttttccatagcctggacatgtggcttagtcaggacctgactgagccgcacccatctgtctagagcacatgtccccgttcctcccacgcaggtggccgcaactgcaagactagcaagagttcttcctcccccgggacttttggctctctcctaacctcacgctgcagccgctgctacgtatctgatcttgcaccaccctgagctgttgctgtcgcattggatgctggatgggatgtagaccagtgccacgaactccagtggaatgggcatgagggcatggcggttgttgccgcgggtggttcggttgtcacttgcttgttgaagaagcctcaagtcatgccttcggagaaaaagggacatgcgagataaatgtgtcttctcaagtacccagaatttggaatagaaattaaaatagacttagccaaagatggcaaaatatacaagaggcaaggtagagtggcattttaaaccatgcactttgaggagtggcctttatgaatcctctcctggcatgggtggagagagaacctgtttggctggagttaagtgcaacgtactatagtgtggtggctggctggatgtaattctgtgccatatcttttctcatttttttttattgtgcaaggcatggctcgcgttatgctgtctgtaaggcagggtcagggtcgccttacaaccattgttagtgctgtcaataaactggcctcggcttcagctcaatacaaaacttagtgttctagggatcctagtgcatgcttcgtggaggcaggctctgagcccagatcaaggtttgagcaggctggtgcttatattaaggaagcttgataacaaatgcggatccaagttctttatctttagttattgtgacaaatcaagtataatcaacactagactcatcaagattttgagaccaaaagagaatggattcataccaaatgcctagatcatgtaaaacatgggcatcaggacatgtctagaacttgtaaattcacagcaactgagctctgatagacaaagctcacgattctgggcagctctagctaggatcatctggagctctagcctagtttgaatcaagctcagagtgggcggagttcaagcaggttgtaattaataagaattatctatttcttaaataattaatcaatatagtagtctagggattagtgaactggtatcctatctgttagtttagaaggctattggtttgttcaagatgttagagatatgatttttgttagttaggcaagtattctattcttgtaggtcaagtactgtacacatcagcagtacccatggctgccatatccgcataaaagtgctcacgtatgcaagtatcaatcaactagccttagggcctctgttccatatcaggaagaagcctagctggcgaccagatgagggtgtctttggacacctaccaatccaattcatataaacaaatcttggtaaatcttttcatggatttttctaaactggacttttaagaatgtctttgtaaaactgcatgtgccctacagaaactatcactaaacagcacttttaacccattctccattctatccaatggcttctccccatctagaatggggagaggataaatctgtagccacatggatggacattgcatatcagcatctgacctattactctctttaactgacatcgtgaatgtgacggcatgctggcgcatgagttgtgccctttgactacttcctattacaagaagggtagacactgtcgtatgtcacatgtgggtcctggccaaattaaattatacactttagtggtagttttgaagtgatggaatgccaaatactcagcaataattatatatatatatatatatatatatatatatatatatatatatatatatatatatatatatatatatatatatatatatatatatatatatatatttaggaaagtatttcagattttaatgctttatctgtcttgtactttcaataattgagtggagatgaaggaacatagttacttgtttgaacaaatatactgtgtttattaggcaaatacatctattggttccatgttaattgctaatatttgtaactgataccgatatatttgttctgcagtgc

SEQ ID NO: 1712 - DNA, 1826 bp, Oryza sativa
  Intron number 1 from transcript LOC_Os04g36810.1 (locus LO C_Os04g36810) derived from phytozome v7.0 (chr-ID Chr4; po s 22038862 to 22040687)
cttcctctccacgtccctggccggcttcttggacagtgaggctctttctctagcgggggctttggtttgttttgggtttgattttcgtttcccggatgatatgctggatgcggttcgtggattgcgtggttctttggatccggttgtgggggtaggttctttgcttgtggcttgcgtcgaccgatgtgagttagtcagtgaaacggatttctgctgatcttgatggtttcgtgagctgtctttggcccggaaattggctaactttgtttggtaggcacaattccttcttttggcctagaaggatgctcttttgctaggttatgcaggctaggatgtaactcactagagtaatttggacaaggatagtgatttagctatttacttgcaccaaattattactgcaaatgtgtcacatttgctttcggcgcattgaaaggtgggagagctttaggtaggttatgctggctggtaagtgttaacttccacaaagcacagacgttggtaccgattgatttgttatggaagttgcccctttagtgaggtcctacagtttatattttcgctatggtattggcaaatgtgcaacagcgcaaggccttcgtgtaaacttcattctaatcgaagcaaaaaatatggtcaattggacctgactagtgtagatttcaaataccagcttgaattattagcaccaataccacatcatctaaacggaaaaatgggttcaactggaacccccgtcaatcaacagaagtcaagccttgtcactcagtgtgattctgtaatctgtacaggaacttttgtgtgttcttttaatttctactccctccgttcaaaataagctaacctaggatatgatgggacattacctatctagattcgttgtactaggtaatgccctatcgtatcctaggttggtttattttgggacagagggaataggtgtatgtaattattctttgcttactacaggatgtactttgttagcggtgctttaaaagcttacgtacttcccttaacctgaatataaagtttatttttttgagttactagttagtagtagtttgttgcattagagttataaagtgtgttatttaagtttttcatctgatggtcactgaggactttaccttagtattatgagtttcgtatgtgaacagttgccctgatgtgactccttgacttcctttgatgcttattaaacaatttgcatgtttgattctcctattgtggcaatgagaagagtgattgtactattgagacgttgtcaagcttcagatactgttagtgttccatatatatttgggatttgccgatttgggtaggtgaaccatcactggagctgaacaatatgagtgatgtttgtgaagtgttccactgaacttttaaccttttttattggtttcctggcatcttgtagatctttgtgtactttcatgctatgctcatttgacactatttttaaccagttagtttggcaatgatatcacaccatgtaagaataggttacttttttgtagccttcgtcgttgattagcatgaataattatattagaaacatttgtttgattacttcccattgttctagataattagagtacttgggtgacacagtagtttgatctagaagactagaactattaaccaaatatatgaaaacattcacacttgcagaatatgagtagtgctgtgaatcatgtgactacttgtgtgtactggtttctttcgatactgaagttcacatagaagcatctcctgtttctttgataattgttgttttgttcacatatctcgtcttgttccagagaaacttattgtcctactacgag

SEQ ID NO: 1713 - DNA, 3247 bp, Oryza sativa
  Intron number 1 from transcript LOC_Os07g38860.1 (locus LO C_Os07g38860) derived from phytozome v7.0 (chr-ID Chr7; po s 23313906 to 23317152)
gtgctgagcagtctcgctacatctgtcttgaacgtgtaagttaaccgccgtcaattgaaagtttgaattattacataaaaacatttttttattatcggttgctatatatttgatgataaattatttttaaaaaaaaattgttaaaggtaaatacaatatagtcgtagtgtaatttatatataattactatgtaacatgtatgtaatttagaatcgttagatttgcttcacaattcgtgtgctgatatatacgtgaggggattcgatcccacaacctccgtttcacgaaaatatcatatctatctatctactatattattaaaacatatttgaaagtaggcaccacgttcgctgtgagggttagaaattcccacattaataggagaaaaagaaaagaagagtccatgtagaaatacaatttaaaaatagctaaaatctggaattaaaaataggcaatattgaaagaagagttcatataagaacccaatacaagattaatcaaaattcagaataaaaataaaataaaatctgaaactagaaaaaaaagagtccaagtagaaatacaatttaaaaataactgaaattcagaattaaaaataaagaatattaaaataagagtccatataagaatcaaatacgagattaattaaaattcagaataaaaataaaataaaatatgaaattataaaaaaaataaaagaaaagttaacgtagaaatacaatttaaaaataacaaaaattcgaaattaaaaataagcaatattgaaagaagagtccgtataagatattaatacgagattaataaaaaaaatcaaataaaatccaaaatcataaaaaaaaaataaaaaagtgagttcaagtaggaatatacaattttgaaacaattaaaattggaaataataaaaaaatattaaaagaataatctatatataacacaatacgagattaattaacattcaaaataaaaataaaataaattcagaaaatagaaaaagaaaataagagctcaactagaatacaatttataaataactaaaatttgtaataaaaaataataagtattgaaataagagacaatctagagcacatgacaaaattaattaaagttcgaaataacaaataaaataaatttgaaaaatagaaaaataattataagtgttcaaggatgaaaaatatccaatttctttaaaaaaaaggtccttatagaacacaacgatgacaagtgacaataaagaggggagaagtaataggcatgtaaaggagtagagtgctagtggttgatgggatatctaaaaactatacaaaatgatctcaaatagaatcccaatgacaattaagaggagtgaaaatgggcatgccgttaagcagcatgcatggccacgacgattgcgggacttatggagagtaaaaataaaccccaatgataatcattttctatttttaaaatctcaataacaataaggaggagaggcagcgggtgggctgtagaggagtatagcggcgaagccactaacgatttggcgagacttatagaaagtaaaaaaggaaatagacaataattatttttgatttttaaaatcacaatgacaataaagagaggtggcagtggactggccacagagtagtaaattggctatgtttgatgatacttctaaaaactatgaaaacgaaacccaacaagacaatgaactttaaaaactatagggcctaatttttaaagttctaaagaggacgaatagaagtagtggtagatcaagtaagtaaataaataggtgccaaaggagtaaggggtagcgactgtcgtggcttttaaaaactataaaattattagaatcacgggaatgataattttaaataaaatcatgtgtaaaaaatagataatattaaattgatgctagccacgtaattgtgcaggccgcccaactagttatcatagaatgtttgaaaggtgcgtacaagttatatacatgttacgatataattacacaataattatattatagttatatctgttaattttttaagagaaaatttatcgagaaatatataggtagttccaaaaacaatagtttaaaaaaattatagcacacactcggagaagggaaaactcttttaatctttcgggataatgtcccattatcccctcatatgttctgataccatctatatagttaattataaaaccctgtaaaataatttgataatgttcatacaatatgtatatactcttcctaaaaaatcaactttcaacccttacgtttgagaaataaaaaagacatatcaagcatatggacaatgccccggatcggggggagaaaatcgccccccccccccacgggcgcctcctccgcacacgccttctctccacgtgtccccccgcagctcccgccacgtgtcccatcacgcatgtcattgcaacaaaattagccacatattttagaaactctctattaagggaattcgtttcattttttgttccaccaaaaatgtttcactatgtatgtatagatctaatgttgcagtgaattaaaaattttttttgcaacaaatcacccacatattatggaaaccctctattaagggaattcgtttcattttttgttctaccaaaaatattttacctagtgtacttataatgtttcactatgtatggatcaaatgttgcagtgcactgaaacattctttcgctatttgctgaaatattatttttatataaggtgaaacaacgcccgatttaaacgattgaaacatttttgatctacttaggaaacaattctgatataattggtggaacagcgtgcaatatttaaaaatagttcaataataagcaaaaaacaattgttagaatatatccatgtgtggtcttgttttaaagatttaaatgcaacgaatttaatagtgcaatcggatcatgatttgaataaataatttaagagaaaaaatagtttaaagtggttttgcacgcatgcgtcatgctgacgtcggcacccgatttttccccctcccatcaggcgtccgatgctgagttgcgtcccgagcatatccaaaattttcttttctatttattaatgtgtagatcgatttttgaatttaatttgtggtatagtggtagatattgttgtactctctattatcaattcttgtagatctttcaccgtttccatgtccctcctagaagtacttttggtagttaatggtgcactcatttcataggtacgtgcctgggcttcacacggggaaggggctct

SEQ ID NO: 1714 - DNA, 7328 bp, Oryza sativa
  Intron number 1 from transcript LOC_Os10g30560.1 (locus LO C_Os10g30560) derived from phytozome v7.0 (chr-ID Chr10; p os 15823723 to 15831050 reverse strand)
cctgctcaccaagaacggccacttcaactgcaaaggtataaaaccaaataagttactccctccgcttctaaatattcgacgccgtttgattttttttaaacatgtttaaccattcgtcttacttaaaatttttttgaaaaatttgtaaaactatatatatatataaataaaagtatatttaacaataaatcaaatgatagaaaaagaattaataattacttaattttttttaataaaatgaataatcaaatatatttaaaaaagtcaacggtatcaaatatttagagatttttactctcacgcaacaatcttcacagtatatactaccgctgttctaaaataagtacaattgaaacactaacaaaaaaaaagtaccaaaaaatagaaagaaaagaaaaacaaaagagcttcgacgagacgacgactcaagcttgaaagcttgagctagaacagacatcacaaactgagaagttagaatggaaactgagaatagtcaaggacagctgacgggttatctacttaattataaaacaaataaatattatatgttgtaagcctaataaatactccatctatttataaccatttcaagttataaaatattttgactttagttaaagtcaaactgctttaagtttaattaagtttgtagaaaaaaatagcaacatttttaacccaagataaatttattatgaaaatataattcaaatattgatttgatgaaactaatttagtattataaatattactatatttttctataatcttagtcaaacctaaaacaatttgaccaaaatcaaaacgttttataacctgaaacggtgggagtaacttggacaagtatacggttgaagaaagtttttaaataacacattttaaaagtatggaacaagtaagatgtgaaaacaatttgatagataaactgaaaataacggagccaattaagttggctatggctttgtttgttagtattagttgggatccttttccttctgcatgaaaaataaggtactagctaattagctcatgattagtttgtattagcctaattgtttcgcttatttgtggaataagccaaacatcatatttgcaaacgaaaaataatttataaataaaacttttgtataagtgttctttgcgatctaaacgtaaaggctgaaaaataaactttaataaaaaacccgaaaatcagctctaaatttaaggttaaaaattcaaattttgtttcataaatataagcataagtgaaaagatgaggtctaacttaaaaaatagattttttttttcaaaatacaacgttccgaacgtttaactcaaactgaaggcagaagctagacagaaactgtgtagaaccacaaaagtcacttggttttcgaggctcgatctagaacgggaagtctcgaagcagagaagataaatcaaagcctgacgaaagcgtcaccccaatcaggcggagacaggcccatgtcacgccatgccaagccaatgccatttgccatcactgactcactgtagctagtcgtcgtccatatcgctctcgatcgcccacccgcccagccctgcaggatcggtgcgtgcgcacagctccagctctcgccgcgctctcgcgtccgttggacacacggccacgaggggcacgctccaccagaaattcggaacgagccaatggagggctcgcggcaggcggcgatggagaagcatattgtgtgttggcaaagtgcaggataggaacccatccctcttgcacttaaaatagagcgatcttttaacacatgattaattaagtattagctatttttttaaaaaaaattgattagtttaattttttaagcaacttttgtatagaaatttttttaaaaaacacaccgtttaatagtttaaaaaacgtgcgcacgaaaaacgagggagaggggtagcaaacagccatgtcggctcgtgtgtacttccttgtactgtatctctgaacggaatctatcgcggagagatgcggccacgcaggagacgacgtcgtcagtggtgtggtagagccaagggcagaagtggtatacacggtgggtggttactgtaaaacgctgtttaattttcagtccctactaaaacagagaagttcaatcgaacccacacactcgtcaacaagctttgattagacgtacgggtcaccggggtgatcacccggtcggggatgggttcaccggcaaggcatggtggctgcagggtgagctggggcggcgaacgaggcggccaagggaggaacacgacgagccaggaggtactggtaattatttgtctttcgagagtctggttataaaattacatgtcgatgattgggaccggtggaaaaacaaataatatggggttattttataaataatgaagtgaaaacatcccggcctaccatgtttaattcataaatattatagcacgtaatcataaccaaggatgagagatgcctttgtatcgaaaccatatttccatataactgtttttcccattttcatagatctatttcttcgtgtctttctctcttagccgctccgtcctcctcctccctcccttccccgattcttccacacgcatcaatcctcgatgctgatagtatcccccgtattctttccctcaccggcgatagtatggaagttgatgaggtcatggggtcatcggagtccgaaaagtcagcaagaagggatgcggttacagtggcaaggttgatgttatcgtagttgagaaggaagaagagggaggatgcggggctgagatgaggtctgggccgtgcatcggcgataaggcacaggttgttgttctcagcatgaggggtgctcacaaagtgattcatgcgggcttgaggttattatcgcatcgtgctccttgccggctcatcacgttgctcatttgcactgtgtgtatgtacgccatcctcggctgataccgtaggtaccatgtatatgccaagtatcacgacttgaggaaggaatgcacgtcgtcgtcgcctaggctgtgagccacctaccgttggctcctgctctcctctatgtgctccctccttccctactgttgatgtggctggcgaggcaaggagctagggagtacaaaagttcactcatgcgtggaagctcggtcggataggtaagaaaagaaagggggtcactaaagtattcggtcccctagtcatcctcattttaattaggttgttaaatacaatattaccctataaagtacttgcatataagatataattagagttttataaaaaaaaacaacataattttaatttctacaaagcggtaaaaaccaatacagcgcagatgctcatgttaaaaatttgtctttttgtgttagcgttcactcgtacgagccagtatcgaaacaagtgggatacaactagaagtaggtggaaccaaatcacaagccacataaaaccactctccgtagaaactttgcaaaacataacattggaaaaagaaaagccgaaatgattcactgtacatgcaaaaacaaaagtagaatcattgtcacgttcaaatcattctattttccatggggtggcagacatggaccgagggcccaaactagaatcattttattttaccgagcacataataacgtcaagaagtgacctaccggtcgttcaaatcattgtcacgttgcctcactccgctggacttttcttctgcatgaatataaacaaacgtctgtaggctgccgcagaaaaaataatagtactcttctctcctcttctcgtttaaagagagttccatggattgccctataataagccaaagtaaaagtcaaaaattaaattttcaaataattttagcatagtttcttttaagtattggctttttaatcgttaagaacacatatatatacatatatataaaatttttacatataaattagtttttattttttaataaactaaaatgacttattagaaaatgtgatgtgagcaaccgatcataccgaaagacttcagtgcctgacgagcgagaggctgattaatcaacggagaaacgaaaaagaatggtgactagcgttggcagtagctgccgcttgggctagactgctccagaacataccgaataactgtttagcctctcaggtctttagagttgtcacgagaagtcgtagcttacacttccattttatattataataagtcgtttgaatattttcaatcgaaattatttagatttaatcaagtttataaaagaataacaacatctaccaaaccaaattagtttcattaaatttaatattgaatatattttaataatatgtttgtattatattgaaaatgatagtatatttttattggtcaaacctaaagaagttttactagaaaaaaatcaaatgtcttataatattaaacggatggagtatgtatgtatatatgtacatgtttatcctttaggctttgtgtggaacatggaaagttcctttttatttttccgcttatacgagagatgcatgcccacacaggactagctactatactgtcccacgattgcaccattaaaaccctcacttagtctgtattcggtatgtggtattgggaactaatcccacccgcacgtaaaatagagcaactcattagcacataattaattaagtatcagttatttttaaatggattaaaatgatttttaaagaaactttcgtatagaaaacttttgtaaaaatatatcgtttagcagtttaaaaagcgtgagcacggaaaaacagggagacgagttgagaaagaaggggaagaagacaaccttagagcatgcatctccaatgtgaagataaaaccaattttaaagcggagaaaccaaatgatgcattttgcggtagttgatgcgtgattgttagataggaaaaaaaaggaacttcaaagtgaaatctaacttaggcgagtaaagaagtaaaaaaaatggtttgttgcattgtacataattggcatatgcatgaagctaggacggacacgattagcggattctttttacgtggaatccataaattgtttttcacgttggagcgatcgaaccgaattttgtatgacttgattgacttctgcctattgcactggtcgaaccaacgctggaggtgcggaggtgcccttaatagtttactactccacacgtgtatgttattatgtgtttcttagatgtttttaattactcgatgcattagaaaattgcaaaaatccggtaaaattcccatgatagtgggcttaattaagctcctagccaaaactacttactcaatccgtctcgaaataattgtaattctagattgtttagcatatattaaagtttgagaaaaaaaactataataccctttatgaaatgatgtataggtaaaagtgtgagggtagttgagggtaaaataaggagaattttgaatgagaagtgattaatgagatcattagtactttatcgtggcaactattttgggataaatttaaatcctaaaaatacaattattatgggatagaggtataatttatagttctgtgaaaaccaaactctctttctctcatattcaccaagattatccaatatccatcactgtcaatggcaagaacaacctaattaacaaacagattagctgccggccggcggctaaagcgaaaatatataacaaaacctattagggtaaattaaggttctcaatcgccgcctttgacacgatcacgaggtcatcagttggtgtgtccacatatagtgatgtcagatgtcactcgctggatcatataaattccgagagtggattaaattctcgaggggatatctccttgttatttacatatcatttaaatgagttatagaaaatttaaaaaataaatacatagattaatatgtgatagatcataaacatacaggttaaaattcaacttctacatgtttcaataaaaaaacaaattaacatatattcacaagcagatttatttttcattgtaacttatagaagttaaatttgatcttacatgtgtagtgatttatcacatattaatatatcttatttatttttttttagttttttcataaccatttagatgatataggagatgtctcctcgtatgtttagaatagttctgtataaattcttttttaacgaatagttccctataaattccactagcttggtagcggagtgaaccagtgatagagcagacgaaagaatcataggattggttggttgattagctgctagcgctactagcttggcgatcggcaatgggggaagaggttgctgccaccgccgccgccgccgccggcggcaagccgcacgcggtggtggtgacgtacccgctgcagggccacgtgaacccggcggtgcacctggcgctgcagctggcggcgcgggggttcgccgtcacgttcgtcagcacggagtccgtccacgagcagacggcgcgcgcgctcggcgtcgccgatccgtccggctacgacgtcttcgccgcggcgcgcgccgccgccgcgaaagggggcggcggcggcgagacggtggcggccgccatggacgtgcggtacgaggtggtgagcgacggcctccccgtggggttcgaccggtcgctgaaccacgacgacttcatggggtcgctgctccacgcgttcggcgcgcacgtcgaggcgctgctccgccgcgtcgtcgtcgacgcggcggcgacgttcctcgtcgctgacaccttcttcgtctggccggcgacgctctccaagaagctcgggatcccctacgtctccttctggaccgagccggcgctcatcttcaacctctactaccacatcaacctcctcaccgagcacggtcacttccgttgcaacggtacacgaacacgagcacttggcacttacacaagccatcttaggtcttgccaaaagagcttacgatatagttgcagtttcgtgcagaatctctagctttctcaaatagtttagattttaattcaaattctcagaattcataattttaaaatcttaaaattaaactataaatcagaagtaaaaaaattcaatattattaattcttgaaagttcaaaaaatattaattctcagagtctgactaccaaacagttgtgattctcatcattttaatcttctcagtcacatttctcattttcgtgaattggtcggtgcatgtaattcaactgtttcacatttttcgtgatgcgaaacgaagatccttgcaagtacttccttcgttttaggttataagactttcttatgacttgaaacggaggtagcaagtaattttattttacgagttgttttaatttgttggggggaatgtgtggtggtgggtgcatgcagagccgaggaaggacacgatcacgtacgtgccgggg

SEQ ID NO: 1715 - DNA, 3168 bp, Oryza sativa
  Intron number 1 from transcript LOC_Os11g03760.1 (locus LO C_Os11g03760) derived from phytozome v7.0 (chr-ID Chr11; p os 1473177 to 1476344 reverse strand)
ctctctttcgtcgactctctccgttgagctctctggtaagggctaggttgggcatctccttccttttctcacctcctccagttttcttctcctctcttcctttgatttcagccgatttgtttggattagaccgtgtccccttcataaatatgctagatctactaaaagctgatatctttcttagttgatttcgatggaatgaaatgtctagtggcttgcttttttgttctaagatggccaatgatgactaatgttgctgatttgtgatgcttatgaatagatttttcctacacttattcctatttcctgttgatttgtgttatgccattgtatctttgcctacaaatagaagttactgataaggcaagaaatagtgcgttcttttaaattgatactgacagatacacacttgattaatagtgcttatttgtgatgcataagaacagatatgcctgcacttgaccttattcgataaggtcaggccaccaaacatgccctttctaagtttctgtctttctgtgatctttctcagtattttatacttcagatgatcttagcagaactgaggccacctctacacttgaattgagcagaatttataagagtacatgaacagatttttctacacttgttcttttttcttgctgttaggctgggaaagatggccaatgatgatatatgctgctgtttgtgatgcatgtgaataaatttttgctctacacttgttctcattttcttgtggttttttttcctacatttggtcttattttccttttccttataccttttcttttgctacatttgatagatactggtaagaacagataccaatgatagtagctaattcacattcttcatatatctgaggccattgttctgcatttatttacctgctggaaatgaggctcaatgatgtcaaatttctgcacatttgctacattttcgagttattgatgtcaggcaaatactatcaagttccttgttcatgttttgatatcaacagatgtactcatttttttttggtaaccacacttgattttgacatgatcaagtttttatatgaaaccgatacactctgcacttgctcttttggtaaagataatactactattaagtgttgatgttcttgcgacctgatctctgcaactctgatcctgtactgtttcaaaggtacaggttatcctgtttacttttactatgtttcaggaaaatgtgataatggaaaaacttgtgagatcaagtgtagatatactaaggttgatgagtttgaagcaatctgtacaaaagcttgcaggcagaacatagctgaaacagatggtttagttttgtatgcggttacagatttgtttatcaaattggttacttgtaaaaaacttgccatgagcacgtatatttgtatgtttgttttgaattgtcaaatgtaccagtgtcgtcaataaaattatgtagttgatttttgctagaataatcactcttgcgtgttcatccaggccatttcgttacatttgttaaaaaaaaaattatcatcagtgctgctcattggttttaaaaaatgacatcagtaaaacatacatgcacagtacatcgattctctaagacaaaaatgagcttaggaatattagtaggtgtgcacacacccagagtaacataatttaatctataacctctacgacggattaaacttatcacacataaatagattagggacttggaaaaaatcttgtttcacaaactttatgggggtaacctcaccacccacaagaataggtattttacacacaatatgtatctatccaaccaaacaacatctcctgcatgctaccattccatccgccccttgctgcaaccaaccaaacaacatctcatcatatccaggttcatctcatccaagcaaccaaatgcctgcatgtgtatcccctaaaccaggctcagcttagcctggatgagggagatgagccaggctagagggatacgagcaaccaaacacacccttagatttcttgaaagatttggtcagcaaaatttagtactaacttagattggatacttgtattatcgatctgtagttatagtttacatgagatgcacatcacatcagaaatgttttcatgacaccttccgttccaactgcctgtatgtttcacatttgctctcgagaaactagtccctttgtatcactgctattagttatgttgttcttttctgtatggttcactatggctgtgtggatgttgttcttttctgtacatataaatgtcaacttgtagactctgttcagaatcaatcatctcaattttcaacctatgatgtatgttggtattgaaaaaggattggtgtgagtgagtggatgacaggcatggctcaaaatgtgtctttgaagggtgttaaaatgcccatagattctgctgattggaatgactacaacactagagttgtctgtgagatttttggctatcttgcagcaacttgaaagtatcaatcttttggagtaccaattttgaattacttttagaaccttacatacttaccatgttgaaattattaaggaaaaggaacgattaataatcaccatgttaaaattattagatgtgtcttgtttagtccatattttcaggttgttatcctgtagaatagagtgctcattttagccttagttcgtgcagatgattgtagatgatcaaagctttaatatgcatcttgatgcataaggttttattttatatgtgcaacaacctagagaaactcaaatctgtctggtatgccatcttgttcttgtctttgattctgttctttgagttcatttcaaattatgtatcgcattacagaaaattttatcttatatttttctaatcattctataaaaactaatagttcttctctgagaatgattcacatgaaatttgtgatgtccatgtcacatgcagtccattaaggcccttggcatggcacatgcgacgacaaccacaaccttagttttgtttgtcatatcatctctgttactgtttggtgcaccttttttttcaaaccttgtaattttggattatcattaacagcaacagtgtattttaatttttctttgtcagttgaactcttagatcttactgtgtattaccatgccattttctacctgtattttacagtatgtgtttcaaatgcaggcactgcact

SEQ ID NO: 1716 - DNA, 4262 bp, Oryza sativa
  Intron number 1 from transcript LOC_Os06g36180.1 (locus LO C_Os06g36180) derived from phytozome v7.0 (chr-ID Chr6; po s 21184410 to 21188671)
ggacgtcgacgacgacggcaagcagcggcgaaccggtacggatcaaacccgaccccgacccctcgtgattcccccgtctcgttaaccctcctcttctcctccctccgccatggatgatgatgtggctgtgctgttgtgtttccgtgcggtgcgtgcgtgtccttgtggtggattggattttttgcggtttttgcttcctatttttgggcgcatatatgcccgctttatcaatctcgcttagagtcgagtggatcatcctactcatcaaaagggaggtctagaaacacggtgcacgcgagatttctggtagggaaaactccacgaaaagttggttcaaattcgagacaaagtagttcgaattcaaaaaaaaaaaaccgaaacgtttcaagggatcggaaggcgtgaacaaccatggtcctagctggacccttgtcatctcctcggtttctgttccaatctagcgagcggcgcggcgccgcctcggatggatttttggttggtgctgactgcttgacttctgcgttttcttcctcccttttcccggaaactcccatggattttggttggttggtggcgctctggtgcggtaggcttcgtccatagccaacaccgccaattaagccgccatgaatggacatcgttgtgcgtatgtatcgtggtaaaaaaaaatcgaactacagtgttctctgtgaagtgaaaccctggagaatttttactgcgttcaagataaacggtgtgcgcttttttttttgtgtttgtgtttccctttttgggttccccaacggagcgcatgcaagcgtccggcgacgtgtacgctgggtttttttttccagcacttcgtctagatctgtctgttcctagagtccaaaattaattaattaattaattaagtatgtagaggttcaaaattaattaattagttagtggaagcacgggaggtatggtggtggagtcgtggacacttcacacattaggattaaaatccgtgcatgaattttagtgagatcaactatatatcgcttcacccatcaagactaaaatcccgtgttaaggcttgtttagttcataccaaaattgaaagtttggttgaaattgaaacgatgtgacagaaaaattagaagtttgcgtgtgtaggaaagttttgatatgatgaaaaagttagaagtttgaagaattattttggaattaaacacggcctaaaattttaatgagatcagggatatatcgctagtttattagttttcatcttttagggcatatattagggaacatatttataaaaatgtgtgggttttcgagtctatttgaattgtttccctaccaattttttgtagtgccaaaatctaggcaagttttggcactaccaaatatttggtaaggtaagattgttttttatcatatttggtttgctacaacatagagtcaaaatgtgaaattgtagtaaagaatgttcataatgccaaatctatattaggtaggagtaccaataaatgggcttcaattcaaatcaaacacaagtactatttaaattaccaaaatattggtagggcagtttttggtagcaatccaaattagcccttcatcttttagtgtttcatgtgtatgtgtatgtgctatctaatcgaaaaaaaaaattagttaatcaagaattaactaatttttatatcacgtgaataatttggcttgcgccgttccgcgtcgtgcgcgctgtcggatgctggatgcaagaggccagagccaaccatccacagcacctagcacagcagggggtcgcgcgctggtcaacagccgcgtacccccacggtcaacgcgcatcagccactcgatctgaggcatgcacggtctagatgatgccacgttcgcaataaaagctccccctgatcaacaagtgacgtgctgtttcacggagtgtgacgtggcacgggcagtatagtacgtgtacgtgtgaacacacgcgcatgcgacagcgcatttccacgcgtgcaattctgactcgcaaaaagcgtatagtagtactagctgcttttttgcaatttgtattccttgaacggcacaacgtgtttggtggaaaattcataaaagtcaccgtactttttgacgaaaaacggatatatgcttggttgagcggtccactttaagctaccaatatcgattatcttatcgttagtcagcttcagtgagatcatatctaaagtaactggtgctgaactcgtcaaggaatcattccggcggcctgaaagcccctctttggatggctctgcgcctctgcctggccgcttccgatcggccggaatctatgtcctcgtaccttttacgcagcaccaactgatgattgcgtgctttcaacatattttggtttggaacgcagtgatctcgtattttattcgaaatgcgtaaaagctttgttgattctacggaaacgctctttggtttgtagaaaaaaaacccttcatatatcttttcctttgaaattcctttgtaatgacaatcttgtaaatagtttggaatttttttcataagataatatcatccgacgtgactagggattttaagtttttgtttgcgaccacttatcttatttaaaaaatttgtgcaaatagaaaaaacgaaaagctgtgcttaaagtactttggataataaagtaaataataaaaagaaataataattccaaatttttttaaataagatgagtggtcaaatagtgcaaataaaaactcagaatagggacggagggagtagtttctaaggcctggtggtcggcatgaaccaatctttttttttttctagctgtacctaaacacctgttttaaagttttctttctcgtagaatcatactgtatgtagaattgaagaaactatgccatcctattcatgtgcttttacatactcttccctattcttatgttttgagttttcttccttctagagggcccttgtttctctgtaatgtgaagttctttagtgccaactgccaagaccttaatcacggactaagggtctgtttagcggagtttaaaattctgatcaacaaccagctggtagccaacttctaagaatctggaaaaattagattctataactacagcttctcagaatttataccaaaaactgatctatttaggggagattctgattctggaaaaagctgcaggagctaaaatctcccttaaacgggctctaagtggatccactatatatatagtggacttttgtcttatctcagttctttcaacggagtactaggcacagcccatattgtgaaggagaagaaaatggccagaccttttgactgcgaggcatgggctggatagtctttgggatgaggtgaccgatgcgagggtaatagatgcgccgtagacctgctgtttctgaccttttggcgcacagctctacgcacgacaactctactccgtgtaggatagtgtaggctagtgtagcggtactgagtattccgtattcgtgctgtacaaccgtggtgtgctccctgcgtacggtggtttggggattttttttcacaaaatatgtggattttttaaaaataaagctatctaaatcttgcggagttattgtaatggtattttttgggataatttttcatgacaggtattgtgcattgatatagttagtgggcctttttgaatggttaaagtgaaaatatttttcactgaacgctttctaaacgtcaatgcatttatgaatagagtagagagtactatggagtctgaccttctcagatgggagactctctagctaccgggatgatactagacctttgtgttcatcaagagatcacatgttcacatgtgtaggccctttatatatgttgagttgttgacttgtgttcttcagagggtgacagtctccatggctcaatgatttgtttggaattgtctattctgtttcagttggcatgggacatgggtcttgtactctgtcccaaagtgtgcatgtgtcctcatccgattaatcaaggcactgtgttaatcattctttagaaactcattaactgtatgcatacatagactgattgaggggctacagatcataaaccatggatgcatgtgggtattaatcattttttaccctcggtttggtgcatgctgtcactaagtggagtgaacttgttcacagttgagattatgagtaaatatcaaggagacaagaactgaaattcgaaaggaattaaagtcataaatgaaatgattgaattttcagaatgttgaaggactgaaaacttgtgcaattcgttgagcaggtaacgt

SEQ ID NO: 1717 - DNA, 1520 bp, Oryza sativa
  Intron number 3 from transcript LOC_Os03g46190.2 (locus LO C_Os03g46190) derived from phytozome v7.0 (chr-ID Chr3; po s 26114306 to 26115825 reverse strand)
tacaccagaacggcaggatcatgtaagcggtctatcttatttttatttgaaaagaagatcctgagttctttggagttctgtaatgttggacataatggtttcctactccatgttctagtactgctgccttcgtgtatcatgaatggtttactaatccctatggagtatggattgaccaatcatagataatttgtgatctaatctgaattgcactgtagctagtgattagtcagctctgcatataactgatcctcacaaagaacatgcatgatgtttgtgactgtcaaggctatcatgctaattctgtgaactgaagtatttttagttgcctatgcaaccttttggatctttacagtagaacttttgtcccgtgtctcagtaaacgcaaggtgtgtaatttgcattgtcagtaacggtagttgctgcctgctgctatattaattatagagccctggcaatgttatttgatttcggaattattggcatttgtgtacataagttcatgtttttttgccatctattgtttcaaggactgctcaagagttttgaagtgtgtgctattgccttaaattatttacccattctgactgcctgctgcagctgtctgggtgaaattgttaagctatagttttaataggtaactttttaaaccttttatatataaagaatcagagtgaaattgtttgcaatggggcttccccaagcatttcagtttgtttggttcttgctagtgaggaggtctttggagtttgactggggccaaggggctatcgctgattttgcatcccggctaagtggtcttgtgagtcaggacatcgcaagggccttgttggggcgcctttgctcgttttattttgttgtgttctgtattttgtgttttgtgtcatttgttttgttcctttgttttctcttttctttgtaactgtgtcaaaatggtatgcagctgtcacgtgtattcgagaaaaataaataaataaataaataaataatgagatactcccttcatctatttttgatagtcatatttccaaatctgaaaaatttatttttgataggcatatttcaatccaacaacttatcatcttaatgtctttctttgatttaatgcgtgactctccattcttccacacaagattggctacatgggtatagagaaatgtaaatattaatgaatcgcttgtttacgaggaatgactagtagcatgtttaaatagatgataagtagaatcacttatacttggtctgtgtgccaagatgaaatatgactatcaaaagtagatggagggagtattatttattgttccattgcctgatggtggcaactgggattgcaattattcatcagattatatttggcaatgtatttgcctgcattttgtcatggacctgaactctgccgattcaaaaaaggacctgaactttgcctgtttgtagttgggggcttgaatacttttgtatgatctcaatgacattgcttcctcacttttacagataagtttcacgctgagcgatagaagtgg

SEQ ID NO: 1718 - DNA, 1852 bp, Oryza sativa
  Intron number 2 from transcript LOC_Os12g22489.1 (locus LO C_Os12g22489) derived from phytozome v7.0 (chr-ID Chr12; p os 12690152 to 12692003 reverse strand)
tctaccatctcggtgagcacccttcagcctatagaacatacatgcatgcacccaattaaccaatacatgattgtagaagcacatgcatcaccacccgaaaacatcctcctttcggactcgccgccggcgttactccgatgtccactgaccgagaaaagtagaggaatggaatcgcaataacatgatcttcattttgtattttggttgcacccccaaacgagccatcgtttgtcgccggtgagctcgagatcgaactcagccatggctgttctgcctctgtgcgtgagaaaagaagtcagggaccttgtttcgagaatttaaacagctataaggtttaatgtgcaacttttcaactcactgacatatgaggctaggtctgtgggttgattcttagaaacctcagggatctttttgtatattgatctttcactgacagtggaccccttggaaacaaaaatctgaaattataaaaggaaagtacctaaaacttgtaaaatccatataaaattaaatatagctcattttaagatgatacaaatttctgtcaactcaccaaattgtgaactttagtgttatggaataaaaacttgcactcacagtacaaatttagcctctaaaatttatccaagttaaatcacacataaagcatgcacaaatttataaaatgcatacaaaattcatttcaactcattttggagcaaactcagtttctacagatccaccaacttatgttctcctataaagcaaaatgaaatagtatacatactatacatcgaatgcctctaaaactattacctttaaaatgactagttttacataagctgaactttagaagtttatataaaattcatcttagatcctttttgagtaaacccaaattcagtagaatcatagggttgtgcacttcaatgttataaaataaaaagacatacttacagtataatgaaaacccctaagtatttaagtaaggaataagcaacatggagcataccttaaattgtaacatttgtagaaaattcatctatagtctaaatgaagtgaaccaaattttctatagaaccagcaagtaatatacttcaacctagtagagtgaattatagcaccctcttacagaccatggctctgaaccttaatttggtagaataggtactaaacacatagtaatggttaaacaatacatatgaaaaagtatatatatgcttggtagctccaaataaatccaaataaaacttgttgaaccagtgaaggcatagatccatccccttccaccaaaacttagtatccttaacttatataataatctccagattgatatgttaagtttctaacatagaacatcccctagcttataaaatgtgaagtaaagtaatttgaacactaaaattttataaactaagattagattagttaactaaaatactcattttatacaacactagcaagttagagcaagttctggacctaaatctccatagccatgtacacatagggaatatatgcctagaacacgttaaaacttgtaaaatacataaataattcatattaactctaaaaattatgaaaccaaatgtgttagtcttagaaaacaaatatcttcaccccagcaaacataaacttaataagaatcaccttacaacagcatttcacaatagtaactaagtaaatcctacactataccgacgaaacttctaaaattcataactcccaaataaaatgagataaaatagaaattctttcacctaaattaattttagaccagtacctattcactgtgcacaaatcatccattttagagcattttggatttttcgcatatttcggtgtttaattgcataacgtgtactttgtatag

SEQ ID NO: 1719 - DNA, 1546 bp, Oryza sativa
  Intron number 3 from transcript LOC_Os05g30800.1 (locus LO C_Os05g30800) derived from phytozome v7.0 (chr-ID Chr5; po s 17810728 to 17812273)
gctggctttcaggagttgacatcaatactcaacaggtttggtgcatatttcagacattttttcttcagtatgaaaggaatcctgtaacttggtttaacaagagatgattcctgtatttgtcattacattttttattctttttaatgaaatatggacatagtaactaatttttcaaatgaatggggtaccatattcttgatttctattagtattgccatatgtttgtgtgttccctggcttttaccatattccatgctagtgtcacggtgtcatgggcctaataggttcactggctgactggccttcttattgtagttggataaagtctgttaggatagagtagtccagttggataaagtctgttaggatgggattaggttagagagttcatctatataagtagggaccctatagcccaggtcaggttaggcattagatcaagattattttagggcccatagtcctgtctcgttggcacggcgtcgattcgactccgtcgcgccatttggtttcagggccatttcctgttacttcccgaccattataatcaaatatatcccctttgtctccaaacgtccttgcacgtgacacctagtgttaggcagattagctaaccattaaggctgtgttttagaggagaggaaaagagaaggagaagatactcaaaacgaggtgagccattagtgcatgattaattgagtgttcattatttcaaactagaaaatggattaatatgattttttgaaagcaactttcttatagaaaatgttgcaaaaaacacaacatttagtagatcaggaagcgtgcgcgcggaaaacgaggacttcctctcctttctgtcattcaaacgaacgctccagcctttgttcagttaaccatgtcaggctgttactggctgcttttggcaatggcttttcctgactggagcttctgggttgaattcaactatatcaccctgatgcatattttgggttatagcttatttgtacacctgatgcagggaataggtttggaaaacagatcccagaataatgcgtgacaatatatgtgataaatcttaatcattgaggctattacttactaccatcctgaatagagctgtgataaaatgtttggggggggggggggatgtaggagaaaagatgagatcatagatgaagatgataatacctttgggagaaggccatttcattgttcttattccttctacttaatgattattcaccaccctttatataaggctgtcacctgaaacctagaagctaactctatatgtatatctaataaactagagaagggtcaatttgatatcagcattggtagctggtaattccctgcagtcagctaccatgatcatctagctgaccttaacttctattgcaaaaatttcgcatatgtttgttgttttttcacaaagtgtcaagtgctactttcccaagttaacgtttttataaaaaggggcttagtgcaagttatatttacgtctaacatcttcaaaattgaacatgcagagttttgaagctttaaaccccagggcagttgccgt

SEQ ID NO: 1720 - DNA, 2069 bp, Oryza sativa
  Intron number 4 from transcript LOC_Os08g20440.1 (locus LO C_Os08g20440) derived from phytozome v7.0 (chr-ID Chr8; po s 12274131 to 12276199)
aaggctcaggtatcagaatttctttctctgaattctattttatcaatttctcctaactttattagtgttctctgaacttagtggtcttgcccttgtatatgctatttacctctgacgtggtttcttcgttttggctggctgagtgtttcgttcggcccgtgctgctactgggctgcttctttctggacagagttgtgtatgcttttgcttaatcagttaacatagttggataataacgtaagtgatgtctatggaaatttctgaacagcatggatgtattacaagttatcagtttttgaatccaactctgagtatgggacggcttcagtttttcctgctgtgtggccttcttttaggatggatttatatattcctcccaaattctgaattggatcaataaatggcatgtatagtccagagagatataacccttctttttttatttgatggaagatataacctttcttcattgcacaagtttcgacaaacaaaatcttgattcttaaactccgtagtttcaacctgtcagaaggtgactaccttgtcagtgccttttatgtacatcaagtttttaagggattttaacatcccagaaatttaatccttgattaatagttacaagaaaatagtgtggatattatgttttttcgccattggagacattagctgtaattttgaatctaaacttaaacaaatagttaacctgaaataaagatctaactataaatgtagatatgaagctacaataaaagtttatgaaagtatgaagctttaaaataaatagctaacaattatataaccatatttttgcaaaccaatagggctatttgaaaacagatcagcacatagaatttttgtgggatataatagagcatggtagtgatcagacaaaagccttagtactccgtagtcagtactcagtactagtctacaaccgaaacaggtatcatagtccacaagtattttagaaatggaaacaagcagaaaaaaattcgacagaacaagtaggtttgaaggactgcatgactttcatttattcatgaaatggaaacgaaaacagcaagccttgagcattttttggtgcaagagatcgatgatgctccaataatccatatattccgtccttatcaaaaacattttcctgccaataggacatgatgcaaaaggtttgctaagatggcagttaagatggggtaggagttactacttggtgattttttaaattgtagtaggctcttgatgattcttccaattttaaggaatgaaattaaagggtgaaattttagagtaactttgtggtgcggcatttatacctgcactttaattcaaatattgagattagaagtcatggaaagggatacgagatattgaattaagacggatacaatgagggaattccatggaaaatttaaatgaactttcaacataaaatgtgaactgtactttttattatggtgtttggtctggaacttgattttgggatttgggtttatttttgtattttgtaacttggattagagggaggtaatatttaaattaatttagaagggatttgaatatttgggtttttgaaacatggattggactcgagtttatggagtttgcttttttggagggatgaactgcataacatgagattatttgacacagcttatgagatgacagtggaaaagcaaaaaaaaagtaattaatcttttactaaacaagagttttaacgcctcgtaaaatcaggggcgttactagccagcaatatgtcatgacgtccattactccctaccaatatgatcaatatagtcgttcgactaaaattagagttagcacaattctagcctatccttttatcagtacaaacgtcaattttggaagtcgaattgttaaaattggctagattcattggcaactattaatttgtatatacttatgactaacaaaataaatttcttacaaaatatagacttatcacttcctttttcatctccatagaggtctatataaaggttcttgtaccatcccttgacaaaatacagagaacacatttttgtttaggtgatagtgaagggtaagcagcc

SEQ ID NO: 1721 - DNA, 1846 bp, Oryza sativa
  Intron number 1 from transcript LOC_Os06g40020.1 (locus LO C_Os06g40020) derived from phytozome v7.0 (chr-ID Chr6; po s 23805173 to 23807018)
tcgtgctagcgcccacgagggagctcgccgcgcaggtgacgagctcgatttcctcgctctcttcatttcgattttgcgcgatccgacattgccctgagtgttgtctcaacaagccgccgctgcgaagttggggcgcgcggtcgcgccatgtgggacgcgcgtctgtctcgtccctgttccggtgcgcgcgttcgcgttcgtgttcgcgtttgagtagaatatgcatcaccatgtcgatgttggcacctgttcgctcctgtgttgtcttgtctgtggttgccgctcggtttgtgtcggcgtcgcgtcgcgtgagattatgcaggcgcggggcgagcgcatatgtcaggcaagtggctctgtttggttcatgtctcgccgtgggcgtcccgtggaagctcaagctctggaaccatgcccttacgtgtagcggcctgcgcgggtgcgcccagctcggcgttgcatgctttgcgagttggcgccctcgtttacagggtgtttggcctctattccttattgctcaaactgtatcgcgaccgatgtcctgtagactatgttgactctgttgcttatgactttcactgtgcatgctcgatttgttcaattgcttttatttcacaaatatgttctgaatcctgatcttcctaatattgtattgttaacaccgcattactatactaatgtgcatttttttcctgattgtagagtagcaagttgtctgttaggtcaaatttaagatctccaattgccaatttcagtattctttgagtgcggttacagtcatttgataatgtgattttcattgacactgttaaccaaaatttctctttgttctgctatgaagaacttgataatgtaagtacctttttagttttgttggaattttaggatgcattttgtgctggtagctagttttggaaattattttcattgttttgtgcattgtgttttaccttttctgattttgtgagttggtgagttggtaatatgcggatgagaagtatatatgcgatgcatcttggtggtacttggtagaatcactatccatttaatgcaaatatttgagtttccaatcctgtaaactaaggggctgtttgggatgggaggaacttattttagtctctctcacaaaagcataagtccctatgggagggactaaaattcttgtgagagggactaaaataagtccctcccatccaaacaccacctaagtactcattcctcgatcactttctgggcctgtttcattgtgaatcaatttgtgagtgtaacaaatattcttttgcacttctctgattttcacatatgacttctgcttgcactatttcagccagattctgagggattgctgctatttgattatgctgatcattttttctttatggtttctacgtgctgaatttctttagattatgcacctatttatctgagctagttctgttccctcagttgatcctgtatgcatttgttgtttcagctagtgttatttggtgcattagtatgcatattttaatgcatggtactgtgcatagacactagaataaggagctattctgcaacagcattagttcatgtgtggaatttaatatggcgtaggataactacttaagtaatttcattggtcactcttttggaaaatgttacgtgagcgcaatttaactcatttttggcttattgcatggatatgtcctaaaaatgtgattggcagtctgctgtttgatgtatatgttttcctttacttgtatgttttcttttgattttatccttggaaggcatgtttattctgattcatgtatacttttgtttcctgtggttaacttgtctgcttgtatcttgatattttagatta

SEQ ID NO: 1722 - DNA, 5364 bp, Oryza sativa
  Intron number 1 from transcript LOC_Os09g34214.1 (locus LO C_Os09g34214) derived from phytozome v7.0 (chr-ID Chr9; po s 20196960 to 20202323)
tgctcgtcaattccttctacgagctcgaacccgaggtgagcttagtgataatgaaattgcagttacatcgtctcgtctacggctaatcataaaccataatacgtactgtacgtattagcaactaaaaatactcctttgttttaattttttttagttaatctttttaagattgtagaaaaatatagcaatatttttacataaaacaaatatattattaaaatataaatatattctatgttttataaactaatctgattttatagtaattttttttctataattatgattaaacctgaaaagttaagtaaaaagatcaatgcgatttttaataggaaatagagggagtacttaaaaggaaaggatgaaaaaaatattaaaatcaaatctaaaattaaattttaacgtttcgattttggttgggccaccatatatcatctctggtttgctaggttagcatccggtacgacctgctgtacgccaacagccccgtcgtttggtttatctgcgaaataagtggaacgacatacttgtaaacgaaaagtaatttatttatgaataaaaattatatatatatatatatatatatatatatatatatatatatatatatatatatatataaataagtaacagatatttcttggtttcaactttgcgacatcaaaagagaaagactagaaagggaatatatagaactagaacctttttaaagcgtatcagccgacttttatatatatatatatatatatatatatatatatatatatatatatatatatatatatatatatatatatatatatatatatatatatatatatatatatatatatatatatatatatagcgatataaaagcaatagcggaaaaataaactttaatgagaaaaccttaaaatcggttttaaatttaaggttgaaaatttaaaatttagctgataagtataagcgaaaagataaggccgtaagctgtaatgaatacttctacttgtgtccttttctagaacttaaattactggggattcagattcgcaaagaccaaaaatagtccaaatagttcgtcctgccgggcgttatcaacctgccgtgtgcaatcgcactcgcagggcagatcttttgattgcagaagattcgtctacagtgataagagtccatgagtaattttaaattcgaattatttatgatatttgttcccatttccaagcgaacaagtctttgaaactgatgcttatcttcaggcaatcaagctggtcctgctcaaatattatatcatattcgtaagatcaataatacacgttattttatctcgggacgatgtagacatgtcggtcgtttaatatattgtttgtatggtcccgttcttttctccaaaaagaatgttacgaagattaagattttcgtggtatgttttttaaactgctaaacgatgtgtttagtgtgaaaactttctatatgaaagttgctctaaaatatgatattaatctatttttaagtttctaattattaaaactcaatcaatcatacgttaataccacatcattttacgtaaaaaacttaatctccacctatgtatgtcgtagtcataggctcgtagtcgcgctagcgcaggtgacactaacagcagctaccgagtgttccatcacccttattcgattctggagctattgagataccctatttggtatccagtctttttctaaatgatttttattattcaaaaaactcaattttactcaaccgaattatatcgttggatcacttaatcctctacactatctttttctcattttactcgtaaataattggaaatagttcactttgtctttttaataacatttcacttttgcccactttatgcaagttgtattttaagattaaaaaaattttagagccataaattacacaatttttaaagttcaaaaatatttttagtttttttcatgaccgtttgcttgagcattaaaaccttgagtttacaatagtcttatgtgcctgcaactatataaataactgtgataaaagaattaaaaaaatgttgagatttaagtagtaattcatatatatcatcctaccaaactttttaatgtaaaatacaaactatagaggaatgccattacaaagtaaagtgaaccatttctaaaaaattaaggtgtgaaataaagagaaaatatagtttatgaggttaagtgatctgttgaaattgtaaagtaaagtgttcatcacgaaattttaaagtaaactaggaaggtagcccgcgcatacatgcgggcatgttgtttaatcttgtttgaaattttattacgaatgtttatgtgtggatgatatttttgaaatatattttactctattttaaatgtatgttcgttgacaactgttgggcgtattacttgaacttgtatatcctcaaatttattagaaaaaatatgtcacaataatgaagttagttcatatctatttatattatgtgtgattctatttttaaaatttttggagtttccaaactttatataacattttttattttgtatgcaatagatgacattaagtaatattttaattttgttatatattaatgaaatatattttctattaaaaatatagctaatggtactacttcatctaatcaaagatagacttatattacttatattccctccgtcacataaatagaaggagttaaattttatctcgaaacaatagaagaatttatacatatccgagacaacgtgattttttaaatactaccacgataatctccaaagtatcatatcatattttgacaaatatctatagtgtagtgcatgttagttcagtgtctgcattgttttcaacacctattgtttctaatcaaatgagacacctttagtaatttggagaatacacgtgtacatttaagttagcgttgtatatttgtcaaggtttattcacacctaaaatatgatgtgaaattattattgtaacattaattattacatgtcggctccatatttgagatgtatttatggctatagatattagtagtttatttatttaaaggaatacagccagatcacaaattggatgtataattttaaaataatttaaaagatagaacttttaaaagaattgattgaatattttatatttacatttgcataaatttgaagattattatatttttatccttaaattgtagaaaattagtttttaaggactgccgactttttttggctttaccataagtaattcttgtagcaaacgatatgtaagcattattctttttttcaaccatatgtatgtatggagtacttttttcggtcgaggtatatagaagaaatgtattattttaaataataaatctaatctaatggtgtaaaataaaacaaccaaattgtgttgttttcattttacaaatgtagatttaaattagcgttgtatatttgttaagtgatatttgacaccctaaaatatgatgtgaaataaaaaaaaatcatagcattaattattatatatatcagcctcgtatgttaagatagaacgaataaagatcattgatgggatatttcatatttataatataaatttagtttaacaacgtatatttacgtaaatttgtagagtagtatatttatctttaaatagcaggtaatactatttcaaaaagaccatcgatcttttttgaatgatacactttttttttgttttattgtttctatagtaaaggattttgaaaatactatttcaaaagaccaccatgcctagatttttctttgttcccatggacagtagttaagctttatttctttttccaagtcgtatctatgtatggaatacgtatgtttttcttttcttttttagccttatatagttttcccgtatacacagagtaataagatattagtttttaaaataaaatacatctaatctaatggtgtaaaatattgggttcaccaatttaagtaaagatcgacggttatatttgcttaatttatagagtaataaattttatctttaaatagtagaaaactctattttaaagataatagattttttttgatagtaagattatagattttttaatagtactacatacatatgtctttttttctttattgtttttatagtaagtgtgcgtagtttttttttttccgataaacagtagtagtagatcgaaacactagtagtaggtaagattcattgtttttttatgcttacgtatgaacgtacctatggagcacttgcgtttttgttttgtttttctggtgaacagtaaggcattagtttctttttaaataaaatacacctaatctaatctaatgttccgataataaattatcgggtccaccgatttaagtgaaaatcgacggtgagatttgacattgccgtgtggaggtctaggagcttctgtaaaagtgccacgtggtggcttgagagcgtttatagaaaaattaatggacttttattatataatagatagatagatatattgtgatactcgatatttaatttaatggatatttattatttgctagccagaaattaaggagaccaatgtgagcaaggtgagaggatgtgaaattatttacgaccacatgatagtatatgttattaatttttgctatttgtaggaatttttgtcaaacgatgtatttcttatataccaaaacacattgctaatatagataaatagaatatgttgtaaaaaattagaagatggatggaatgaagaaaagagaggacgcgtgggaggaacgtatgtacatatatgtgtacgtactgtatgtgaggaggagaggaggcccatgaggagagcgggagaggatttgtgggagatgggattttggtttattttgtttaatatatatctaatggtataaaataatgggcccgctatattaagtggcgccccttaggaattctgtaagcttaatttgcgcgcagcgtttggatcaagggctagatgttttacttttttcctgaaatttcttgaatttctctaatttattagagcgccaagtggtggcttgggagcgtttgtagaaagtttaatggatttttagtatataatagatttcgggtgagtaaagtggattttatttaggctgtgtttagttcacaccaaaattgctagttttgttaaaattgaaacattgcgacggaaaagttggaagtttgtgtgtgtaggaaagtttgatgtaatgaaaaagttggaagtttgaagaattattttataactataaacacggcgttagttaaaaatgacgtacaaacgtcaggctaatgacggcgtaagttaaaaatgacttaaacacggcgcgcagctttctcgagtgttcatgacgaaataaatggaccttctgtacggatgcacaggaggcggcgtac

SEQ ID NO: 1723 - DNA, 906 bp, Oryza sativa
  Intron number 11 from transcript LOC_Os02g55530.1 (locus L OC_Os02g55530) derived from phytozome v7.0 (chr-ID Chr2; p os 33998441 to 33999346)
atcttttggcggctgtgagaatagtaggaaggtgcgcttctttgcttattagtaattgttagactgaccatgtggatccatctctgcattctattttcttaaatcttaagaattgctccttagtgttagagatatatggtacttcctccgtttcacaatgtaagtcattttagcatttcccacattcatattagtgttaatgaatctagatagatatatatgtctagattcattaacattaatatgaatgtggagaatgctagaatgacttacattgtgaaacggagggagtagttaataggaatattaggataggatttatttgtttagagtccgtccttatctctatccatgtaactctatatctaccggcccttgaggctcaatacaattgaccacatacgtgtcaacatatatataccggcccttgaggctcaatacaattggccacatactatagcagtactgttgcactgaattaagagtcttataaaaggacatgtacacctcctaagttcgcaagcttttcagcaacacaaaatcagagttttagcttgactagtgtgtgtagttcagaagtgatcctaccaacaatacgcagtacacctctcttcctatgctattcaacactgagataacaattgaacatggttagtattataatggcccttagcttccacttttgatgattttacttactttacatgacagttaattgaattttgacaccgtgaaacaaattcattcgcaatttggccactccatatgcttttatgcacatcttgtacatatgctgttaaccccaaatggatctttaatagtgaaatttcaagaacaaactcctgtagaatattcgttttccttaatttgaaaatatctattgcagttatctggcagaggcaccat

SEQ ID NO: 1724 - DNA, 2035 bp, Oryza sativa
  Intron number 2 from transcript LOC_Os05g07120.1 (locus LO C_Os05g07120) derived from phytozome v7.0 (chr-ID Chr5; po s 3757095 to 3759129)
ctaagcaggtctgaaaaaaccctctcctaatcatgttgtttcagagttctgagcagatagcctaatgacatgagaaagtcatttttggctcttaaagggacctctactcttttttttatctcatccaaatagttataaattattttaaacgttccatcttttcgtttatacttatacttatcagccaaaatttaaattttcaatcttaaatttagagttgattttggagttttttcattgaagtttttttttcagcttttacttttaggtcgataagaacacgtatataaaagttcattcacaaattattttttatttacaaatatgttgtttggcttattctttcaatcagacttgctgtaggtgcagaatagttggattaacaaattaatgcaatttgtacacctagggaacaaaacttctaaaaaagaatgatgagttcagtctctgaaaccattataactgtcgttcatactccctcccttttatgttgatttttttcactagtaatctttttaaagttcggtcatgcttatagaaaaagagtatagcaatatgacacaaaacaaatatattatcaaaataaattaaatgttagttttaataaaactaatttggtattgtagatgctgttaaatttttctataaatttaattaaattaaggaaaatttgactagaaaaaaaatcaaaattgacttatagtataaaacgaaggtttatttaattaagtatattttcttggcatatttcagaccgataatgatgcccgttgggcgatcgggcgggggaggagaaattgggcgctccaccgccccatgcacgcgcgctcccctcccctagcccaccacgtgtccacacacacaactctattgcaacaaattacccatatactttggaaactctctattaagagaatttggtttattttttgttccacaaaaaatgtttcatctagtgtactcacaatgtttcactatgtatagatctaatgttgcagtgaacgaaatattccattgcaacaaaaacacatatattttggaaacccctattaagggaatttggtttactttttgttccaccaaaaaatgtttcacctagtatactcacaatgtttcactatgtatagatctaatgttgcagtgaactgaaacattctttcgctatttgctgaaacattgtttttatataaggtgaaacaatacccaatttaaacgagtgaaacattttcaatctacttagtgagacaattccgatatacctgctggaacatcgtgcaacattttaaaaaaattcaataataagctaaatttttttcgtcagaatatagatccatgtggtcttgttttgaagatttaattgcaatgaatttaatggtgcaattggatcatgatttggataagtaatttaagagaaaaatcagtttaaagtagttttgtacgtaaatcgggtactgatgtcagcatgacgtcagcgcccgatttttctccaaatcgtcgggcgcccgagccgtaggcagcccactgtagccacaaagttaaaactagggcccctttgattcttagtaatgaaaaaacagatgaatacgaaaaacacaggattctgacaggaatacaattgtaaaacagaggattacaaaacacaggaattgccgtttgattggaccacaggaaaaacgcaggaatcagatgagagagatagactcagaggaaatgttccaagaggttagacctctggctaactttcctccaaaatgtgcataggattacccattccataggaattttaaaggatcggataggattcaatcctttgtttcaaaggccttcataggattttttttccgtaggattcaaaattcctacatttttcctacaaatcaaaggggccctaagtgatcagcaacatgtcgtggttcttagaactatggtttggtttttcttaagataatagggaaaatataattggtttaaatttattttccaggaaaaaaactaaaatgttaatactatatctactgtatcatttcgtttacag

SEQ ID NO: 1725 - DNA, 1483 bp, Oryza sativa
  Intron number 1 from transcript LOC_Os11g18880.1 (locus LO C_Os11g18880) derived from phytozome v7.0 (chr-ID Chr11; p os 10740409 to 10741891 reverse strand)
agcgccctcctcggcccggatcggcccttccccaggtgagtcttgactcttgacagtctgactgacttgactgactggttagctagctagccctaatcattccccctcaaatcttgattcctcggggagtgggacgaatcttgctgggcgatggattggccttgctggtctcaggaaactacgtagtttactgctagtgaatccctccgttccgtgcctgtgtgggcaaggccaatcgatccatggaatttcagctagcctatgattgtgtttgtgattgttcgtggtcattccaagcggttctttgctggtatggcaactattctgtgtgcttgtttgttgctggtatggagtagtctagaacttccgtcaattcctaggctgtttgacctgcagctatatctccttggaaaatctgagtaaatttcataaaactacggatactttgaccaaattatcgcaaaactatagatttaaggtcatatatatcatagaactacatatttagcaacacatttatcacaaaactacaggtttaagactaagtataacaaaactacatttttaatgataaaattatcacaaaactatagattttgggtctaaatcctttgcactaatgttatgcttgagttataaatgtccaagttttgtgattaaattgatattaaacctgtaattttgtgataactttgttactgaatctgtagttttgcgatattttaccttaaatttgtagttttgtgataaaattagtattaaatctgtagttttctgataatttaaccgaagtatctgtagtttttgtagttttgtgaaatttactttcatattcggtctaagaggtaatgaaaaggacctgtgatgttttttgtggtccttgtatttggacatgcttacggtagatagctatgcagatttgccgggctaacatgtcaaattggtattagtattttcaatccgttacttatcagtatgtgctccccacaaccaaagaaaaaaaaaagaaagttatcattatgtgcctgcgtggtgtttggtcaacaggattcagagttttttttttgaaccatacattttcactgtttttgccattcaattgaaattacagtacgcctactgttagatgaattgcttgggtaattgaatgcatttatgattctgtttttttggggtgtaaactcatgtaatctatgaatcagttcttaaaatcaaagatcttattgtgtctttcacttggtggtgattagaaagtgaacaccttacttttagaaggctagtataagtttgctgtcagcatattttctttcattacttgggtatacatgactttaacttgtaataacacaatgcatattatgattttgattaataaggaagatactaaaagaaaggaagaaatgcataatggatacgttgtattttcacacttgattctttgtattttccatgtaatgatgcaccatttctttgtctaacttag

SEQ ID NO: 1726 - DNA, 3386 bp, Oryza sativa
  Intron number 4 from transcript LOC_Os01g10040.2 (locus LO C_Os01g10040) derived from phytozome v7.0 (chr-ID Chr1; po s 5239564 to 5242949)
tccatcttccttcaccacttggtcaccagcttcaggtatggatcaccacatctcaatcttggccattcttagtgcagccattgattccaactccttagctttgtttcatgatcacttggcaacaatagcttttttttctttctagataatggaatacaaactacaacttttgcataattttccatgatcgctcggcaccgatagcatttttttctagataaaagaataaaaatcacgacctctacatcatataatgaatggaataaaaatcacggcctttgcatcatataatgcacgcaaccgggcaccaatggcatgcatctcatgtagtcatgtccctatcatttggccatgccctcttcgcatgcacattcatgttcctagtaataactaatctctgtagaacaatagaagagcggaacagtagatgaattatgcgttgattgacagaataattgtgggggggtatatagatcgggtacgtacatgaggatttgaagatcaagccgaatctttccagagataaaaaaaaaagaaaaaaattatgtcagataataactggtcctaatacgtcactagggatagcatcacgaggctttctcccatgcttatacctcctctgttatcatcttccttgagggagtgatcttactgtgcttaaggaggtatctaaagcggtggtgaagccagcgacatcgtcgagcccggataactaatagtgttttgtagtgatcaatccatttttacacgcgtcaacggtgattggtagtggagacgccgacagcgaagcctagacggtcgttcgacctggagccgtctccacctctgatcgaaagatatagtatggtattttcgcctctcacactgggagatacaactttcggcctacaaaatcaacttctggttttaaatctaagatatagattatttctagattcaagcttagaaattgttttttttaagagacagagatagtaccaaattctatttctataattttcttaaatacagtaaattatttcttctcgcgaggaggattacactgcgtaggaacactaggtcatttttcatgtgaaagaaaaaaatggaagctacgaggaagacaaataatttcggcgcgcggggcgaaaaagaagaagatcaaggaagatacccaaggtgggaggtcggtccagcctctattgcgaatagagcggggtgttgttccgcgcgtggggccacacgtgcgcgcacatgcggcgcatatccatcccttcccccccacacccacatgtgtgcatgcatgcggactacgccgctgtacgcgtgcgtggcttacggcgcccgctgctacagctacagcgcccgcacgtgtcagctaccacgccacgccctgcatgcccaccgccgctgcacctccccttgagacgtggtcgctgggcggtggtgggtctcacatgtcagtacgtctttcgtcaaaaaaaaaattcaactttaatttgtttttttcatggtctcacaaccatgtagcttaccaatgcaaacagactaatctaaaaaaaaaaaaataagcttagctataatgcacgcttcgattaagcaatgttacgatgcgtgtgcttagctcaggatagtgcctatattgacacgaaaatatactacatccatataaaaaaatataagcattttttactataaatttatatatttattcatatttatagctaaaaatacttatattttgggtcggagcgagtatcatattttgattaccagtcgtccatcagctatggagtctgtatagggctacgtcctacgttcgggaggtagaaaatatggtgatttattttatttttttgcggggaaatatggtgatttattaatatatgattaattaagtattagttaaaaacttaaagaataggttaatataaatttaaaaataatttttatataaaaaatcgtattgtttagtagtttagaaaatgtgccggatcgggttgagttgggaaaggaggcgggaagaagcgtggtgtagtaattggcgaagggggtaagaagggggagaccggagacatgggtgtgatggttaggcagccggaatgggctctctatcgactcgaacagttggatgagatgagacgagatgggtgacatgcgtgcgtgcatgcatactttgtgccttgtccggtccgtgactgaactgaatcccaggaacgcgaatataatactgtagcacgcacgcacgcacgcacgcatccagctgatctagccggccgagatgtgccactttgaccggtcgtcagacacgctgcatcaatgtaggagcacgtgccagggtatggtcgctgcatgcctgcctgcaaacaatactatactcctcccataaacaaatcaaactccaacaagagaatccgacttgctagaaaaacatcatatcactttaaacaatggagattggagagtccatcagtccaatgtgtttttctgtcttctttgaccatcttccaattccccattatgcttgtgctgacctctatctaattgatcctaagagaagcgttttgcaacatcttgtaaaaaagcaaatcacataatattactcgtgctttatgtagctaagctacattggatcaggatcctctgcagtcaaagtcacgtgactttgtcactgacattgtgggtccgataatcattgggtccacatgtcttacaaagacaatccggctacatcatcatgccagtttccgtaataaattgaccagtaatttagtactatggactttagaacctggcacatgcatagcacagattcatgcatgcgtgcactgcatctgcacgcatttgcattggttgcacaagcagctagctggcctacatataacatattactgtgttatgcgagcaactggccactgtccacatgaagccagtaaatcaactatcaacattgatagtagtaaagctcttgttcagagttgcaggcatataggtgctccctgcatggtttgctcaaacttaagatagatgatactacattctaaaaatgcaagtatttctggtatgtatctggacaagatggttaggactctagctataacatagaaaatgcttatattagaatacacttcattcgtctcaaaatataaggtattttgatcggatatcgatcccatccggttaaataccttaagtagggagtggcagtggcatcaccatcgatcatgtgttattgataaatgattatgattatgagatctcttatctacaatctctttctgaataatcgacctgctgatccatccattgcatgcatggttgttgcctgacaaggacattgaaatggactgctaattgctgccatggatgcaggtgggtggcggaggaggaccacatcgtcaacttcc

SEQ ID NO: 1727 - DNA, 1324 bp, Oryza sativa
  Intron number 1 from transcript LOC_Os03g17740.1 (locus LO C_Os03g17740) derived from phytozome v7.0 (chr-ID Chr3; po s 9871854 to 9873177)
atcgccagcggagtgagttgttgctctgcctacctctccctatctatccccttttttggtagatctggtgccgctgctgttggatctgagggggaatccggccatggctggatgatgatggggggctcagttctcgtgagatctagcagctgagaaggctaacaaacaggaggatctgtttattgtgccttatgggaatccctttattacgttagtggcttgcttcagatgatctgaagtgctgatggttccttttctactactccttatgttggaaatttgggttatgattttttttgggaccaattcattagtatttactaaattcctgacacaaatgcacccaccaatttgagaaaattgctcttttgacacatggttagattttttttcctcaccagtttgtaggggtagctgatacagctcttttcagtatccttcttgttttattggccggagcccagagcaacatccaaataattgtttgcttggtgataacccacaggccagagtcattgagggagataggttcctctgtaggtagacttgttctactgtaaaacttcaccggtgaagttgtggacgtccaagccattttttttgctctgtagtaccaaccttattggttgagttacaatgcgttgggatttgggagatatattgtgatattccagtgtaggtgatggaaatagccatcggtttcgattgccatgaaattgatacgtggaatctcgttagattgacacatgaagaattgtgttcttcaaagtgttcttgaaccttgtgacgttaattgtggtgctcttacattgagttccatgcaataggtattatgctgccagctgattagaaacaattgttgtgcttctaggcactctaataatcttaaaatcaggtaatctaagaaaataggagaatcctatatcattaattgaatgagaacaaaaaatatcacttattgtgatgggcctacatcatgaagtcatcatagattaattagagttgtcatagatgtataacaaatggcgcaagtatacaacacaatttttataacacatattatgagttgtatagcgaatacaagtttagctgcgcagttgtatggtgcctactgcttttaaattaaatacagcatccaaggctagcaaatttgtgggttggctagcagcattgcaccccatagaattgtgggaagctctgtgtaccttcttgtttaattatctgcttaagggtatacattgcttctgtcatcaactaattaatatggatcatgcaaactgaacttacagggagagcctagctttcatctgtttggattcatcat

SEQ ID NO: 1728 - DNA, 2507 bp, Oryza sativa
  Intron number 1 from transcript LOC_Os08g38092.1 (locus LO C_Os08g38092) derived from phytozome v7.0 (chr-ID Chr8; po s 24128931 to 24131437 reverse strand)
gggtaagtgttcgtcagttcgtgtgattatttgttttggtagtttaactttcactgcttaggggagtaaacgttgctgctttggtggatgatgaattgatgattgatggctttgcttgaatagccgggccttggtttgatccgggtcaattgttttgccttccgttggtgtcttgatgaacttgctgccttgctggaggggaccagtatatattcatcgtttaattggctagctcgattttcatctctgtctatttgtttgagaccagtttatattcgtcgttaatgaagtcctgtgatcttttgaatatgtcttgttctaatgcttagaatgtcctgaatttagctgtagtacacagagcactgttcatagtattgcagttttggctttcaactagatttctacaatttggaatctggtagcacttcctccgtcaattgattgtcctgtcgagtatgcgttgtcaaggattgatttccacctgatcattgggattgagcattgattagtggttggcatctgttctatttgatctgaaatttcagtgggctcagttcatagagtttatattgatcagtgtattgtgttcacatgtactcaaattctttggatttgtaaactactcgctcttttggttttgctatttcgtgacacatgattaaacagctaaattagtcttacagagttacagttattgagggctgtacaaacagtttcctcgttgacattggggctaccctcctgtacccaaaaagaaaaaaagaactggtcgattgcgcatgaacctggtaataactagttgtaggtcctcattacacactgtgataggtacatcagaggaattttcatactggaaagtgggttgggatgagagcaagtgtgcccaaaaaaagacgtcagaacaatgaagtcactagtgggcttgtctacaaagggggagtattagagttatttttttttagaaaatggaaatgggttacatctccggcctctgcccgtaggcacatagccaaaaagttcagaaatgaacagaaaagagcttaaaaaaggcaagatggtacaaacccccaacttctaccgataatatgatctactaaaataatattttttaaaatcacgtagattctatcacgaaattctgtaggtactacgccatccaaactggagtaaaagttccttagctaccaattccaaacgtgtagcaccattgcgtatagtatcatgtttgttcctgtgaaagcatcatacatcaagagtgaagccaattgaaacacatgaagataacctgcatgatgttaggcatttttttatagttaaaaactatatcattacggcaacgccaaattgaccaacatagagcactagctccaaataaaatcatttttttgtgggtctaggcactccccttagccagttaccaaaaatatcttttgcattgtggggaggggggatattgaaggcaaagaagacacatcgccaagcaaaacgtgcaacatggcaatcaaagaaaagatgttggatggtctcttgtgtattacaaaaacaacatagcttgtttcccctccattttctctttatgaggttatctttcgtcaagattactttttttttttgaagaaaccacataaatactttgatttttagtgatacctttacctcccataagatcctcttatggattcttacattgaaattgatgatcgcgttatacatggatttgacattttgtattagagtcataatagtggttttccatcccctcctttttttcccccatttttccttttgttgttttttccccagctcgaccgatttttgtatctacaaccttcgatcttgatacaatgataagcaatacgcgtattcgcaaaaaaaaaaaaaagcttgaaaaatgcacaggtatagctttttcctgatctcacattcatcaagaaggccatgttttccctgatcccacagacccacactcggcaggagagccaagtacttagctttccaggttgcctacctcaattaattggcgtctggattcttcatgtaaagcaaatggtccaatggagctggtgcgcttcctgcaatagccatcgtgtttgagatgtttttgtccgattattgatcacaaaaatcattccatgtttcattttcaatgatgttcagaactaactgttgctgataaacaacgcaaaagattcttagtcaattttgttgtatcctgtcctgtagactttcattttctggactttgtgacgtttttttttataacagagacatctttgtcaatgtggaggatttcaattatgctagataggctattcgcattcaccttggtgcatctatttttaactgttttaaggataaattcctcatatcctactaaaattttacccgttaccttatttgccacttcatcgtagcaaatgaggaattggtgtgaattaatggttgtatttatgtacttagctcctcattttcctgcatttggaataatttcctcaatctttgcaggt

SEQ ID NO: 1729 - DNA, 9151 bp, Oryza sativa
  Intron number 1 from transcript LOC_Os11g20330.1 (locus LO C_Os11g20330) derived from phytozome v7.0 (chr-ID Chr11; p os 11745826 to 11754976 reverse strand)
tcctcctctggtcttcctccagcagcagtgcaaaggtaattacacatcccacctcttctcttctacacttcttttcttggtgattgattggattttgaggcctgatttgtgcgcgcagccaaggtctgcatggtggggttctaaatggggttgggaagggcgtggagacgaacaccgccaaggtggaggaggcagtcggcgacgacctccaagggctcctcctaaaggaataaaacgctagctatgaacttgtagcttgaacaaacaaaatgtatatgaatcaaaaggtcacaaacaaggtatctaagcaatatataaggtcaccaaatatatctactaagcatacaagtagatcgggtaaaatcaagctcaagcacaatatgagagaaggcaaaaatggacaaaccaagagaggagacgcgtgatttgtttcctaaagtttggatccacggatcctacgtctccgtcgaggggccacaaaggccgggtctatttcaaccctttcctcttgaggttgcacaaatacactcctcggtttcactcttgttttctttccttgcggagacgaaattgaagccttcacaaactttccgtggcacgccacaaccttgggtgctcatcgacgatgcctagccgtctaggagaccttagtccccaagagtaacaaacacaatcgaagatttgcttgctatgaacttgagtgctcaaagtatgaagtgaatctcagtagctctcaactttttaatctctcaatccaactctttccccttctcaaatcccactcacaaacaggcaccataatggtaggaaaatggggaagaatatctgatattttttttagaattgctgaaaggcacagagtaaaatgaccataactttttactcaggagtccgtttttgatgatctaggactctatggaaagctcactcagaggattaccgaactgttgacaggaaacatggcggcctagaacatctgcttaactctagtgcaggtccaaggctagcctcgagtgtgttaagggcgtgccaactggtttgattcaaccaacaagaaaaacaacaaacagagtaagtcaacagatagccgatcagccgataggccgatgacgtatcgttggcgatcctagccgatatagttagaccaaatcggctatggattgatatataaattaagcacaaaccctaaatatgcctcatcggccgtgatatcatctatttggtttatcaaatctattttagacaatactatagaaataaccgatggaacaatattcagagcaagatagataaataaagataataatactctagtacaaacttatataaacaaatcaatctatagaaatatatcaaatactgataagttaccaagtttgataacccgactgatactgatctagacttgatatatttatatagggtgatctatctatataagtggcaaatatacataaatccagtaaagaagcatgtatattaggtaagatcggctaaaactttgatactatccttaattatgattaattccaagttagtttttagggttcaagacatgactagggatgatgtatcgcaaattatgtaaagaaacttaaaagtataaacaatcaagtaattaaccattttttaggatggtacatgccttagctaatataatctagcaaaacaatttagctgatatcggcgagaaccctaaagggagaactggccaatagggctaaatcgagatactaagactagattaactaagacatataatagcagatggtcatgataaaagggctaaacatctaaagggacataatagccccgatagtacaagtcatcgaatcaagttacctcttgtcgagagaactcgccgaagagaagaacaaaagggtggtgatgcgccgaagttgtattggattttgtcgtccttttttttacaactagtaattgtgcacgtgcaatgcacgtagtttaacagcatttgtcgcaataaatatatcaacacttcaaattttaagaataatatcagcaataatgatatggcctatttttataggtccctgttacacacttgccatgaaaatagtgcaacgttagagaaaattgcttgacgaacacttgaaaagctggaataaaaaagatttgtctttcagtgggattgaaggtaactccactgtcgaacaaaaagaaaagaaaagcataagcataagctatctaaaagtaaaaggctgaaaaataaacttcgatgaaaaacccccaaaatctacttcaaatttaaggttgaaaattcaaattttggctaataagcataagcctaagcaaaaagacctttgaacaatcacgcaccttttgcgccactggacatgttatatatacataacaaaaccttatttatgataaactagttcaagtatgaactaaattaatatttcaacttcagtagacagtgagttaccttagaacatatgcttgtcttgagggctattataacataataagtaccgtaagtatgaactaaattattttttcaactttagtagacagtgagttaccttaggatatatgcttgtcttgagggctattatagctgaataagtacaatgaactgcaaaaatactaaaagttttctcaaaaccaacaactgcaaccattgcaccatgtagcccattctctaaagaaaggagagatagcagtgaataactaacctacaactacaatggccataaaacatcatcaagtacaaactttaccgagatgtagaaatggtataataattcaacttgtctccccaggcactctgacatattgtctaaattgtgcatgttgctccatagatagcagagggaggcccatatcttctcccataattcctgaaagtgcatacctaaagacatttgtttctttaatgctgaagcacatgtattcataggaagaagtcacaacaattgagatatcagcttcattaacaaaattttttgatacaacaattgtccaaattgagatacaaagaagtacttgcaatacacaacatcaggtcaggaggcccttatcctaattggcttcctcgtaattcctgaagcccttttgtggatgccatggtatattcaaatttaaagcacccatggaacttgctgcatatttcacccaagaatccgcatggccacatcaagccccaattgcattttcagatacaaaatacctgtcagtccataggggcagaactataaaggaaaagataatttgtaaatttgcaaagtagaacgtgatgccatgaagattccatcaaccatgtaattaacatacttataggaaatcaacctccaacatgtatacatgaaatgaaacttgtatcctgctgcatctccttcagtggagctgacaccaccgaccagtggagcaagagaggatggatctaaaaactatatattgtttccattagcagactaacaaacaaaagcttatctccaatcaaataataaattgtagaatatattccttactttcaatagtaagagaaaaaacagaaatgcactgacactgcttttgtgatttgccacctaaacactgcttattcaatatttagaaccaaactgacatatcaaaggtctctaccggttcagaactgcatatcaaaatgatatatccacccagtacatgatcaaaattgaagcaggtgagccacaaatggggtctggatagagctcagagatggtagttcgtcccgggttgccatcaccagtttggcctccatctccgattctctgatccatccctgcctcagttgtttgggcatgagacaagcacagtctgccccagggaggctggaggcatgggcggggtggaaatgatctcgaagactgcgagatggagtggagagccggtcgtgggttaggagggttttgtccatcagggacagcacgacacgcgtgggcacggctggagggcaaccccaagcaaagtgtgatggaggcggagcagccacgcctgcgggagagcggaccattcccaacaaagaagcatctaacatcaatttagatcacaaacataaatcaattatctatatataagatttgcaaaccataaattcacaattaattcaatacgtatattttctaagacacagcaacataagtcatccatgaatcacatatttgcttgctgaactaaatgaagaaatagtacatgaacaagatcaagggaaaaggcctactcgcacttactcctcggtggtggccggttcagcctgatcaggtgcctccttccccgctgcttcttcttctcctcctgcttgcgctgcttcttctactgcttctgcacccatgggaatggcggttgtcttggaggtcgggtgtcggcggagtgggcgcaagtgttggatagtataggaggagagaggatactgcgaatattggacacattatattgagcctcgggggccggtatatataggagtacatggggaggagataaggaaggattacagatatggaagtagtccacataaatcaatcctatcctaatatgactctaactaccatatactctaacagcaagcaccggcagccaaggggacgcgcaagcggggccgctggagtcgcgcggtagtcggtgacctagggtgcacgtctagcggtggtctagtcacggccatgaaaggagaggggtggagggcagcggcttgatgtccgcaggcatcggtagcaacttggggtggacaataacgatgatggtggcagtgggtgcactgatcttggtgacggcgagtgagtggctggcaacagtgccaatctaagcgagggcgaacaacgcccccactctctcgtcgcccacgggagcacagtcggggtcaggtgggaaggaggaagtgatgttgaggccgtgcttgcgggagcagggactggtcttcgctcacggcggatctccgtcgcgccgcctcaaaccccaccgtcaggcagatctccggcgaggctgtgtgcagttgtggtgaaggagatgaccagcaagtcaagtggaggaagagattgagcgattttgtggatggcgaatcatgtctaggctgagcgattttgtggagggagagctaaggagaggaggacgctatcggcggcatgatgaccgatgaggggaaaactacgatgcggtgacgaaaggagtggggtgaggaatttgctacgctaggttagcgcgtggaggaatttatggtggtggggacgaggatttggtgcattcgcatgtgggcctagtttcctctaatgatttcaccataggattggataggcacaactcctcctttttatattagtatagatgatctggggtttatatttatacctcaagtacaaacttagtccattataaacatgactcaaactttcctaaagataaaatacaaacaagaccatacggaggtctcttaccatatctctaacaaaaaccaacataaatatcctaattaatagatataattgccttaatcgagctctatgtctaattggcaatggcggttatctcaatctaggctcataccgagccgaagccatatcatataggccacttgccatatcggctaaatcaagcttcattccagctgacacgatgtccagccgatgcgcagtccgacttcaaatctaactcgatcttgcatcaaatccgcttcgatctgcttcctttttctctgagtttggtgtaaaattccattgttagcaccaacttaaccaaaaacaaagtctaaaactactcaaaggataggttaaagcttgggtttctcctatggtagcactatgataggtcactctgagcaccgagacatacgcaaacatatcgacgttgcatccctcttaatagtacagcattcctatactcaaatgtaaataggaagagaattataccaataggaatgccttctttccatcttttctttgtcttaaggaatgccaacgtcgaaaccgtttcaccatatattcttgaaatgattgatgtggttacttgtagcttcaaatggctccgcatggtccatcatgacaaagtcgtcactcgtccttcaccattggatttggttcttcagcaccaagccccttgcttgcccttcaccaccacatggtccatcgcggcctagcattgcttgcccttcactgtcttgccatagtagccactttgtattccacatctacaatatattcattctgccatccttgatatctttaggtgtaataatatcacttgagcatcaacacctttgcaatccttgggacctatttctctcattcaacacaataaaattattagcctcaataatctggttgtcaacctttacttgttgaccaaccaatcgcatgtataaaaagatatgaataaatgataagtattaatcaacagtacaagtgtcatatactcaaatatatgcttaaatgttaagatcccaattaaatgaaagtgaacaacttgcatcaattacatgcataaataaggtataggatttgctccccctaaatgcatgcatacaaaatatttgtgtgaagcaagagtatgcataaaatgaatgaaacattaggaacttatcctatacaagaatagaaggcatttatcaaatataggcattaaaataaatgtataccttcatcatcttcatgttcttaatgtaaagagactaaacaaaagaaaaggctcaaacaaaacattagtctcacatgtatattgttattcacgtggaaatattatatatgaacatgtcaatatgtacatggtgagaaatagtgatatatatagattgatctccatgcattttatcattgtgatttaggtccaccatcaatgaatgtttctatctcaactaatatgaagttcaggaatcacctctcacacactacactttcatatccacatgagactaggcaaagaaatggttataaaaacattagtctcacataattggatttataattaattaccaaaaccaaattaatggtacttgaactttcatgatcgacatagcaaagagtataaaagtggcatttcaaattttataaacatagcgaggaaggagaggaaaagaaggaacaatgattatataacttgtccatgtgttgattgtaaaaatgaaaagatgtttaccagaagagtagatatacactctcatttgatatatcgaggattcatgaagggctatacatgttggacaaagcatggagaaaatgaatcaatcgatattatagatgaagggagtggtagataaaattaggaagaaaatgaagttgacatgtttgtttcttatccgttgggcagtgaaatggttgatgtcaatcacaatcttctgcaagcaatgttgcatgatgttgaggagacaacttacaatgcaagattgcaagcaatgttgcatgatgttgaggagacaacttacaatgcaagataccatgagttcaccaggttggttagtgattcagagacacctctatacgatggatgcaaggcaaaacatacaaagttagttgctaccctagatctaatgaagctaaaagcatgtcgtggatggacaaacaagagttttacagaactgttggatatattgaaggatctgcttctagaagagagaacacacagcccaaagcgacacatgaagcaaacattttttgtgtggggttagtggttcgtagaattcatgattgtccaaatgactgcatattgtactaaaaggaatacaccgacttagagtcttgtcctgtgtgtaaggcttcttgatacaaaccaaagagaaattgtgacgaaggttgtgtagtacttgcctatcatcttaggagaatctttgccaatccctaggcaacagagttattacgttggcatgtgttaacaacggaattttgcatcagattcgaagaaggaagaagatcgaagcagatttagtgtggaatctagttgaatttggagtcggactgcgtatcggctggataccatatcagctggaaataaagtgtgagttgatcaaggttgatggagccgatggccgatacagccgatatggtatgacttgggctcgcatgggcctgtattgggataatcgtcattgccaattagagatagagctcaggtaaggcaattgtatctattaaatagtttggttacgtcggtttgtgttagatttggcaagagaccgtcatatatggtcttgtttgtatcttatatttagaaaggtttgagtcgtgtccataatggactaagtctgtattcggggtataaatatgaatcccttagcattgtaatacgagggacaatccaatacaacttcggcgcatcgcgaccctttcgtttttacttttcgacgagttcgcttcgcaagaggtaactcatctcgatggcctatgctattggggctattatgtcgttttagatatcttagtccttgtatcatgaccatcgatatcatatgtctatgttaatctagttttaacaaatcgatttagctctatcggctgcttctcgctttagggtttctgccgttatcggctaaatcgtcttgctagattagattagcttagacatataccaccttgaaaatcaatcaacggcttgattgtctagacattgtgtttcttttcatacttagtgttgcattagtacattcgacctactaagtcgtgttgatctctaccctgcttcttgatttctaacagggataacatcagggtttcagccgctcttacctaatatacatgcttctttatctgtttcatgtatatttgccatctatatagacagatcactttatagtaatatatcaagtagaggtcatatcggctgggctatcaacattgactattgacctctatttggtatattactatagattgatttgcctatatagatctgtactagagtattagccagtatattatctttcttacactaaatattgttacatcggctattttaataatattatcttaagcttctttatcaatcttgatagacaatgttacaaccaatgaggcatatttagggtttaatattctttaatatatccagtctatagccgatttggtctaactccatcggtagagaccaccaacgatacgctatcggccgatcggctatcggctgactaactctgcttttctctttcttgctgattgcaggatcaaatcagttggcacgcccttgatacacttga

SEQ ID NO: 1730 - DNA, 1130 bp, Oryza sativa
  Intron number 1 from transcript LOC_Os10g34960.1 (locus LO C_Os10g34960) derived from phytozome v7.0 (chr-ID Chr10; p os 18587267 to 18588396 reverse strand)
acggcatcgaggaggagtcgacgttgtacctttgcgtacgtctcgaaagttgtatctgtagctgcagatatctcaagtcatggatacaaaattaaaggcaccagatagctcacccatcaatcacgcagtaattgcaatggtaaagtaaggtattctttataaaacatgtacatctcagcaatagactagattaacagtaaaccacctgatcaatagtatgtctacatgggtatctatagctctctaatccattgcctcgtttttctctatagactatcttcagtttagtagatagctttactctctctctttatttaatctcttctaagtagaaaaatataccgacatgaatctctcatagagagccatagataactattgtgggtgctcttagttagcgcttaatttctttcattgttcgagtcgatcaattaattagttgctcgttatttctggtattatggttccggccgtgtcctgatcttgtactggccttgaattctggtgatgttttgcttgtttagtagtagtagtactctgcagaaattcttccaaagaacagtgtgtaatcagagtgttctatgtcttaccacttaccatatgttgtttaaatgtttattagtcgatgccaataataatcatctagataatcgaagacgatgtatcgtggcgaagggcaggaacccaagacctcgcggggttgcaacctttgggagagtgatttttctggagctttcttttgccgacattggctctatttgatcatgtcctatacatattttttctgaggcccaaccattagctctactctatcaatatggctgtgttctactggtggggaaatgtcttttactcccggttggtaaccaaccagtactaagaatccaagactaaagatcgctatctttagtcccggttcaaatacctgggattaaagatcctcggttagtaacaccaaccgggagtaaagaggaaaatctttggtcccggttggtgaggctagcgccacgtctctggttcctatcctttttttttttcattattctttgcatattgatttcacaccaatctcaccaaaatcataaaatcatcacacatttcaaatctcctctctccaggcgcaacgacca

SEQ ID NO: 1731 - DNA, 9317 bp, Oryza sativa
  Intron number 1 from transcript LOC_Os11g07200.2 (locus LO C_Os11g07200) derived from phytozome v7.0 (chr-ID Chr11; p os 3603034 to 3612350)
gtgcttgcaaatattttgcaaatttctgctgacctgtaagcacacatctcatcgactccctaatttcttttggttctgttcaggctttgccaattccatacctcccgttcatatgaaatgcaccttgatcccaaaagaataattcaccagccgtttataagaaaaacctattatccttttaaagtaataaaaaaaaggagcccccacgttctctctcatgacttagaaattctgatattaatcggagaaaaagaaaattagaatccataagaaataaaatttaaaaataataaaaatttagaattaaaaatagggaatataagaagaggagactagagcccatacaagtatacaatttagaactaattgaaactcgaaattaaaaaataagaaaagtaaaacctagaagtcagagtccctatagaaatataatttaaaaataactaaaattggaattagaaaatacgaaatatcagaacaagatttcatagctcatacagaataatttagaaaaaaagacttaaattcaagattaaaaaataaagaatattaaaagatgagtttagagtccatatataaatacaattagaaacaacagaaattcagaattaaaaaatagaaatattgaaagaagagtccagagtccatataggaatctagaacaatttgaaagtcaaattgagaaaaaaaataaaaatagagcttagagtccatagagaaatacaatttagaaataactaaaattcaaaattaaaaaaaataatattgggagaagaatctagaatccatataagaatataatttagactctaagaatataatttattttataattttaaaaataaggaatagtggaaaaaacttagagtccatataggaatacaatgataacagaaatttggaactgaagaataagaatattgaaagaagaatatagagttcatataggaatttagatcagttgaaagtcagaattaaaaaatttgaaaaattaaaggtagaatttagagtctatataaaaatacaatttataagtaactaaaattcaaaatttaaaaactaactaagattgggagaagagtttagagtacatatagaaatacaatttagaaataagtaaattcgaaattagaaaataattaataactatcaatacaatacaaaattcaaaattgtgttgttatttgtaatatattttgataataaaatatgctatattatatgagaaaaaataacgatgttacatgctagttctttagaatggctactgtagaggcgtatggataacagtaaataaccaaattaaagaatacatcagtattttcttaacaatgtacagatataaaagaaaaagagaggaccctcagtaaattttcctccctccacattctagcaaaaactcaggaaacaaaaaaaaacagaaagaaaaccactccgatctctcgtttcgcgaagggacgaggcaaatgcgtcgtcattagcattgatgtcaagcatcatccacacacactggtgaagcaatcaagaagcgagacatgcagcctccgtacgagctcaaccttgtatatggctcgagctcgcgccgccgcagcgagttcgtccagtacgccggccgccgccgctagaccttgagcagttcagctccggtgatccggcccggctgcggcgcctcccaagctcgagacgttgaagccagcgtcgatgctggatcccacacccggccgcgccgcctctcccaagctccgatccgatattcagacgtcgatcggtgttcggagaccgcgccgcggccgtgggagattccatttccattggagggcgtgtcacgtgtgagagatagggggagatccgggttaaggttaagatgagatacactacataatttttttcccaaatgatcaaaatctacttttacatgcaattgagccacagtcagatcaaaagtgtctgcgaaaatcgctacttttttatatggatggcgcacccgtacacgaaaatctaattttcgcttgcggatgcttatatcatcctcactcaaaaataaaaatcctaaaaaaaatcaaaaccgtagctaggtgcggtccgccgccgccaccagatccacgcacgggtggcctcgccgccatcgccctcgccttctctgccaagtgggggaggaatgttcccctgcgcgtcgatggtgggggcggccgcgcgaccgccgccggtcgtgctcctcccgctactgtcgctgcccgttgcacgaggtcgctgctgcctgccaccgctcaagcccacccaccgccactggctagctagtcagctgtcagcacggctctcaggagggaagtcgagtgagagagagagagagagaggagagaaggtgagaaatgagatagagaggagtaatatgatgaagagaggggatgaatgaataatgataacttgaaaagaaaatttagtgctaagagggaaagaggatgtaagttagacttttagatggaccttgaagagcctcgcccgcgaaaatacatttgccgcataggaaaataggcttattttcgcatacagctccataagagattcgtttgtgaaaatagatttttttgcatgcaggcctttaaaagagtcgtatacgaaaatggaagtctatttttacagacgctaccagctatggtccccctaaaacctatatgggttctcgtacataaaaatcgttttatttagtagtgttaaataaatataatcacttacacttatagttttatatgttttatttttccgatatttatattcttgtgttttgattctagtgaacaggttagaaacgcatcgaaacaaatgatcgaatcatatacttttccacgaaaatcttataaaataaacaaccgtataaagtttttaaagaaaaataagcacaaggttatacctcatgttttctctttccaattactccaaattccctttgtttatactatgggtcaatcctacgatagtttttaatattcttcaacgtagaaattcaatattaatgcatgggcatgacatttaatttttacgttttatgtgtttttccaattccgtcggtggatttggatatcatctacttcctctgtttcacaatgtaagtcattctaacatttctcatattcatatatatgtctagattcattaacattaatatgaatgtaggaaatgtgttagaatgactgatttattaacatcaatataaatgtggaaaatgttagaatgacttacattgtgaaacagagggagtagcttcatatagcaagtcactataccacggattctttttctttgttatatatagaaaacgcacaatgtaatcacaagcaccacactcatatccttgcatcttttaacacatgcttcaaaaggcaggagtctaagcataattaacacacgatatttcacttcacgtcatgtagcctccttaccaagtcacatataaagcacttcgtgaccgtgggatggatgacattcttttgacttaatctctctaggacttataacacatttggtattacaaataatatcaaatggaaaaaaaatcatcaactacaccccgtcgagctgtacaacttaaatatagagaattatcatggttagggataagtcataacttttatcctatgactcacgggatatacggatatggcacaccttcgtatgtacgacaatattccgtatataaaaaggaaatcgacaagagactatggaaataatcgcgcgggtaggcacataacagagtcctgctcggagaggtttaggattttaccatatagtgcaaggtctgaggtctccgagttctacttggagatcaaggtgatccattgtataaatacataccccctaaggggtccaaggtatcgaatcatatcactagccaacccgtcaccacataagcaatctgtaggacttgaagcctactcgcttagagatctcatcgagactatctcgtaaaggatctcgtcggtaatctcgggatcagttgttcttcattgtactctgcggttttctatattaatctcatataaactggattaggttgttacgttacgagtggactgaactagtataacccttgttttcttgtttgcttgatatcatatcgtgtagatcctcgtaccaacttatcccaatacccacattatccggtctacgggtattgtcacaccccaatccggcaccgccgtacaacggcacctgataggagcgtgtcgtaggaaaaacggcgtgaaccgcttcctacgaaaccgcgatctcagtaccagtcccaggacatagcgctggtacccacggtgacaaatacgaatcattgcaatccttaaaataattagaggacttatttaccttaacttaggttgccgctcgggacagcccgagattacaaccgacgacacggacgaggcaacaccaacaacggcagcagcagcggaaacaacggactaacccccaacaccacaggcaacggctgggaactaggacgaaaccctaatcttcacttcacttcaacttcatcttcagagctggcagaactatatttatatagagagcaagggtgagtacttacgtactcagcaagccaggggaacttaggtggttaatgcaagtttcaaagaataggctgttatttttcaatcggttttgttttcaaggttttcaacaatctaagtgtgtgctttccacaaccagagcgagacaagtctcagctcagtcggggtgagaagtaacaaatttatttatcaagatttgcacaactcccagagttggcctcaaagctggttttcccaaaccaaaccatttttccaaacttcccaataatagtggtccccaaacgaccaatcacttccagggacttccggtcccgctgtcccccggacagctaattgcttcccaagcattaggtttcccaaaccttaacaccttttcataaaacagggtaaaacaaaaactacgctaaggaatcacctcacatccacccatgcccgtgggcacggctgttcgaacagtttaataacctctgcagagggggtacactttacccacacgacgttactagccttggtcacctagcccatgcagaacagccacgtctggtgactttggggctttcacgacaaggcatttcgaaagccgacacagggttaccatatgccaacgagaggggacccagaccaacaacaagttaggtcctagaccatactgcgccaggaagcccgggggttctccccgacaccaccccattgaatccacatgtctcttggcatcaaggctcccttgattagctatttactcagccagaggtgtcccattccacccgtgtggtcgcactattgtatgctcggatgtaattccaaaggaatcggtccttagatgcgaccgcacaagtattccgcctaggaatggccttgtgtcgcgagttttatttttaaaactcattttctttcataaggcaccgacccaggcgtcgggttttccaaagcttttgtaaaccaagttttacccaagaagttacttagattttaagtttgaaggcgaccgtcgatactcgcacagagtgcacaaatatcgaggcgcaactagatggttacaagggaacatgatataacaattaacaatggaaggatcagatgcaacaagttgggtaggcccaccggtctgccttgcagacggggcaaacagattaagtgcaatcctatcaatgcataatattttgcaagcaaattaattaagttcaaatataggctcaatatgttcaaaggtggcttgccttgcttagggtcttcacgaagcttcacaaatcttcgagaattccacttgaagaaaaatatccggtaaccgcaactaggcgcaaacaatcaaaaacctaaacaaagaccaaataaaatatcctatttaggctaattaatagtgccattagatagatcacaatttaatggaattattggaagtggaacggggtaaatcggagttacggatcaagagatatgaattttggaggtttaattggaatttatggacaaaggaaatgatttattggaatttatagaaataatattctcaagaatattattgacagtcactgacgtgcgggaccaagggaaattatttagggaattttggaatggagaattggtttatggaggcaaaggaaaaaggattcaataaatcccttggaaaagaaaaggaaagagggatgggatttatacttcctccttggaaaagaaaaggaaagagggatgggatttatacttcctcggggtggctagggcgcggcccgaggggtttacaaggcttagccggccaatgggctgagcgcggccacggggaggcggcccaacaaagggggcgcgggggggggggggggtgagagaggcggcccggtggacgcggtccaccgcgcggggcccacgtggcggtggttgggttcacggtggggagggcgcacgcgggttgcggcgctagggtttcgggtgcgtgtggcttaggagcggtgcactgggtggacaaacggcggcgggcccacgcgcagccccatggcgcaccgtggtccgcgcgcttggaggggaaagcggggctggccggtttgactcggtctagccaagttggcaccgacgtggcgcctacgtggcagccacgcgggccggtgggaggaggaagaaaggggaggccgagacggacggcggacagcggccgagttcaccggagccttgcgggacggatttggtcttcggggagcacaccggagtgacgagggattcgagagggagcgatccaacggctcggattcgccggagagaggccggcgacgatgaatcgcggcggcgcacgccggcagcgagaaaagggggaaaatccaccagagcaatgggagttcgattcggcggggtgggagcatctccgatgttcaaggggtgcattcccggcgtcggatggggtagagaagtaccgaggagggccggcgacgagcggcggcctccgggatcagacggcaatggcggtggggccatgccgggcggcggcagggcttggggcagcatccacgcgcgttcgggagggctatcgagccgctacgcaagctggagtggaagaggaaaagcggggagggagaacgggggctaccgcgtcgggagatcgctgggaagagcgtccgacagcgcggcgggaccgcctcggcctcgagccggggaaggagatggagagaaggcgatcggagtccctttcggctccgcgcgcacgccgacttcccggcacgtgcaacggcgaggaaggtggtggcggcaaggcggcaagaacagaggaagagcggggagcggcttggcttttataggcggagaagaggcggtttaggagggggaaccgacttagatggtcaagggagctcggctatcgcgtatggtcaaggtgggggcggcgaacttggcagtcacgggcggtagagggggggtcgatggtgccggtcggggaaaaagcaaaaggggagggaggaaagggggctctgcccatgccattctgggagaaaggaggagggagagagagctttgcctccgggagttggacgcacgtggcttggagcggccgggcacacgtcgcagggggtgcggggccgagcggcgcaggcggcgcaggcgcggcaaggctgacggtggcggtgactggtcggtcggccatgcacgagcgcacgcgaaggcggtggcggttcgaatcggcaaggcgctggcgcggcgaggagcgagagcgagcgagagagagagagagagagaaagaacgagagagcgatctcttggctcggctcggcgcgtgcaacacacgtgcgaggctgagggaggggataggcaggggggaaatgggccgagaagaaacggcccacaagccagagggaggcaaactagactttttcaaagagattgaattggagagaatttggagtttaggtttgaattcaaagatgatatttaggaacatagggtggagtcaaggaatggattcaaaacgggaattgaatatttttgtagtcggagcgaatattcggtaaggattcaaaggagactccgtatccttggggttgggacaatggtatgggatagatttcaaaggtagttagagaggtcaatagatagatagatagctgggtagacaggtcgataggtagactgataggtagaaggatagatggatagataggttagataagtagatagatcgatcgataggcagggagggattcaaggtagggatttgatatttttggaaacgggaacaggtatttggcgagggttcaaaggaggcgattaacctttggaataattgaactcggaattagaatcttgaggtggaggattttgatggcgatgagaggaaacaacaggatttgaattgagatccaaggcacgacttagactcacactcaaagaacaaaaattttcgcaattaggattttcagtaaattagcttttaacgtctcgcgaaaagcggggcgttacaggtatcccccgtggataagaatgtcttcatccaagattatttagaaaactcaaattctcatattcttttaaaaaatagacaaaaaatattgggcccctaaacaatctcaaatgaaaagttttcacctataaagttgtagaacctgtctagagaaaatacttaggccatattaaaagaaatattgtaagggtctcaaaaaaacttttggtttatcacaatcggacttaaaatgactttctatacatttttaaagtttggactttataaggaactggatattagaacttgcaacaaacttttgtgcacctaaacgatcttaaaaataaaatgtttcgactatagagttgtagacatcatcgagctctataattttgatataaaacttgtctccatcccaagtcatttgtaaaaactaaaaaaaatcattttaaaaaatagatccaagagcttgtaacgaatatttggaccccctaaacaatctcaaatgcaacaatccagcaatttactctgtttctaagccacagtcgcaccgactctgcatcattaatttcaggcacccgaaataatccactccatatcagcaccctgcttccagtccgtttaagaaatgtggtgtaggatttggtatgaccactatccatccaaatccactccgttttacttccggttcatgatcatgtactagaattaaaggctatgcaactctgagcagcaaatatttactagttacaactaaatagttacacggtagaaattttcacttcgtttgaactaatatagttgttgtatgaataggtaacaaatcaagcaattcttgagagggaaaaggt

SEQ ID NO: 1732 - DNA, 3222 bp, Oryza sativa
  Intron number 3 from transcript LOC_Os01g42650.1 (locus LO C_Os01g42650) derived from phytozome v7.0 (chr-ID Chr1; po s 24254902 to 24258123)
gatcctcccgtaggcccatttggtaccaaggtgaggcgttcgctggtcgtagttgtaggatattttctattgattctgttgatctgaaattctgaatctgcgatcgtcaccatacgtggtggttctattccttagctttaggtttattagagctgaatttaatgaaactatgaattgcgaatgctttgctagattaccttcgacttgattcgcgttgtgctgggagggagaaactgcattttttgccagtagtcatgctatattgcctggttctatacactaatgcgtttcgggaattgttttcgtgtgctattcttcaatgcaccattgttgtaaaacttgttcactctatgacgggcaatgtgtttgatctccatgttcattgcctttgcctgtctactaaagcatcaatagttgttccacattattgagcaaatgattgttactagttaatatattggtgcaaactattcttcccccgttggcagtttgcgatgttatgactaatgctacttatgataagttcttgtcatatattgtagggatgctttctttaaacttctatgagtagttggtgcaggatacacaataatgtttacacagtgtgtgctatcttatttgatcagaaacgcagcgctcctttcatataaactaatatggctgacccaatcctattgattaatatgcatattggtggggtgccttttcttcattgaaactgttttttggatatgccattaagttacattcttttgactagctggaacacctaaataaacattagttgctgagaaatatcaagtttaatatgcattttttttgtgttgaaacaattgtcgaagtcgaaattagagactgaatggtgaacattatcttgggaatgttgcattaatctgtttttctatagctatctagcaaaccggtacctgtaactgggaactgtttataagtattgtttggcggtgagagtatgttaacttcattttgttgttgcatttgtgatatggtagtggactacaaacttactgtggttaaatgcttgagctatgcaatgcaaggacttttagtcctgatacttagattttttgttaagttggcaatctatgtctcagattgaataggaactatgaaaacctgtttttgaagcaggggtatttggtgacctgttgtagaatgtctttgtacatcacctaactgcaaatcacctgattgattattctgttctaagagtggtgagatcgttttttttttaaatttggactatcccaaaaacattagtgttcgtgccaaatttagtaggttattacggtaaccgctaggtggtgaactgtgcccttgtgttcctgcaaaggtgtttcgcttacctcttgatgtcagcagggatatttggtgacctgttgtagaatgtctttgtacatcacctaactgcaaatcatctgattgactattctgttctaagagtggtgagatcttttttttaaatttttttttactatcccaagaacattagtgttcgtgccaaatttattagggtaaccactaggtggtgaactgtgcccttctgttcctgcaaaggtgtttcgcttacctcttgatgtataccagaaaaaaataacgacacactaatgtgtgaagtggctcaacaagaaccagcatacatccgctgctgtgccctcaccacacccacctgttctttggatgattttcctcttcctgtagccaagtcttttaacattagtactatgtatgttttttttcttgaattctgatttctgaatgcctattattatcacagcatgttttttttctctaattctgatttctcaatgcctagtattatcacagcagaccacacaagcttggtcaatttatagacagtgatgtgatcattaaatatcaagttgcgtttttaatccgaaatctgtatttcatctgtaaagaggtcatcaaatatttgtaaatgagcatatttatacaccttcatgtatttgtacaataaacaaatgtctgtttgagggactcgtccagtttcccctagtttgctcccttctgtgttacactcccttatatccttgtgacacatcgtactgttacttatttgaatttacctgtcattcattttccccattgctgtttgcttttcctgttggaaacaggtttctatgttacttgtccacaattcttattttgaactgaacccattttaccccctgttggctttccgcggagtcaaaatctaactactcaactcttagaactttgttttatgcccttcagctagcaataccagtccaccgcttcaatcaatccagcccagtttatatcctatcagttactcaatctcttctgtgtacaaagtagtagccacctgcatcatgcccaatcctgatcacctgccacgctccacatcccaaatgtaggagtcaggaggcaagccatgatgacagagactctggtttagcagcgtgcaatggaagtgcaactgaaaattattttttttttcaattctaagacgtagaatatggtagtgagaaaattattgccgatgagaacctggatttctttttgttgagatacagatgcagaggagacaggagagtaatgaagaacattagaggcgggaccttgatttattcttattgacggtttctttcttgcctgtacatcaagccttaagtcctttccttaatttccttgacgctgtgtgtgaacatggtcctttgacctctgcaaacacagccacaatgggcagcagggtgctgcaagaggtggcgatagattgcacaatcccaagtattccctgctgattttagcctgtcctggctcaccatgacctttcctgtacttctacttctgctacgattaagtcttttgaatctgttgcagcatgttacacctttttgtttgtgtgtgtgtgggttggggggtagcctatccatgttgatgtcttgttgattaaacatgggtggtttagagtgagggcctgagggggatgatttgcactgattgtgatttgcgattgctttaaaatgatgaaatttcaactttggagctattcttttaaattggctgtaaggatgatgctggatctgaaccatggcacattagtctcttcatttattatcttgcagcatcatttgagcaccatgtcatgttattcatcaatttgctatggtgttacctgcaggaggccccagctgtcattgaatcctactataacaa

SEQ ID NO: 1733 - DNA, 3777 bp, Oryza sativa
  Intron number 1 from transcript LOC_Os12g36490.1 (locus LO C_Os12g36490) derived from phytozome v7.0 (chr-ID Chr12; p os 22297282 to 22301058 reverse strand)
agtctcaccatcatcacactcgtccaaacagcagggttagactgcttactttcaatatatatatttatttatttattttgaagctttcctgcttagtaatgttcttcgccaaacctgtgtggctttttatttgactcttttggtctttccctataataaacaaatctacttttggaacaaaggattttcagtagttatccttcgttcctctggaggaatttctactactgttgatgttcatttctgggggaggaatgctgcggtcgaatttcgttgggagactgtagcattagtggaattccataggaaaggaagcatacactctgtcactcatcctacctcatgtttcactacgtgtttatgctgcgtaggatttttagaggaaaggctagctatacgcgctgttttttttttccgaaagcataagcatcttacaggtttattgctgggaactccagctagtttgcctatatactagcattggtaaacagacatctgctagggacatactaacatctctatatctgccaagctaaacgaccttcttccatagagagttcttgagaagctcagagcaagcaaactcctttcccacagcaactgcaagctcagagctacatgattgacatcgcaaaagacctgactaatactaaggccttgtttagttcccaaaatttttttcccaaaaatattacatcaaatttttagacacatgcatggagcattaaatatagataaaataaaaaactaattgtacagtttgcatggaaatcacgagacgaatcttttgatcctaattagtctataattagccataagtggtacagtaacccacatgtactaacgacggattaattaggcttattaaattttctataatttttcttgggttaaaaatgctattactttttctttaaacttagtcaaacttaaagcagtttgactttaaacaaagtcaaaacatcttataacctgaaatggagggagtattatatatcttcatattaaactaatactccctccgggttgataatacttgtgtttcggacaagagcacaatctcccaaaaaaacaactttgaccattattttctattataatatgtataaaagtgttaataaatatatgattttattaaattactttttaagactagtgtatacatgtagtcaccatatacgaaatacaaatatttttaaaatgatttataataaaagattctaaagtttgacctcacccttgtctaaaacgataagtattatcagtatggagggagtaaatactaaattgataagaagaaaatgtattaaagatattgttggtgttttcttcgccaacatagactcacctaaatatttacggtgctagcagagtcactaatcacattgatctataaaagctcttggtcaagatggatttagaaaaccagcctctagactaatttagtttgatttggagataactactcttctcgtgagcgaattaaaagatttacgggacaaacctaaggatttcacactctcaagcaaaagcatatgttttatgatgccgataaagatggacgaaccagagtacttggtagaaggtaaaggtaaaaaatatgatttaattgatgtcttcacaagccttttgcacgtcatattagacttagagatcaattaggactcaactaaccttaggcctatgctcggaaacacgcgaactgccttaattggatattagacttagagatcaattaggactcaactaaccttaggcctatgctaggaaacacgcgaactgccttgattggattcagactctgggccaccggtccaactgggccacaaaatagcggttcaaccacagttcaccctctggtccaaccagccatgggaaagctctgtttgttacaaatctagcctaaacttgctataaatttatccaaatgtcaaatttggttgtaaacagatatatttgtcaacaaaatcatgtattcattgaaacaaatgtatttggacgaagtatagagcaagtttatttgctatatagtatttacttattaggaaatgaaattgccataaggttcaaaaatcaaatggcatgaatcaacaaggaaaaatattttttacgagataatagggaaaaatattgaaacataatttgttattacatgagatttcaatcaaagttagaacatttgaagttcgacagaatacctacataatttgcagttatacctatgctgcagttccaaagcaacagaaaaatataatagtaattactacagcaccatccaaaaccttcaactttcttgtgtaaaatatggtgtcccctttcttcttcatcttttttatttttttcacttcttctcacctctttttttttcctatctttttaacttgaaccaacaaaaacatgaaacaaaaaggagttgcgacaataaaaattgcaacgggaactagcaacacgatgaaagcgaatgacacaagatactagcaaagctttggtattttgtagaccattggatggaatcaaaatcaataagaacactcaaatatctaatggaaagaagctatatgtgaatgataaacctaccatgtcaaagaaagacatatgacacaaactcactcaccaaggggggggtccatatatatcttcaattcagggcaataggtttgaagcaaggaacaccagcataaacagagcagcttaacggtaactagctgcgtgtagcaaaatgatagctagctttattcttaccaaggtcgatgcggccaagtagttagggagagaatgattcgaaacatcttatactccaatacaacaattaaaaaaatcgtaaaaccacaatccggatctacttcacacatgaactagggggtctatgagaatccttctcataagtccaaagaatactcaagagcattgggggtaagacaatacacggtcttcagcaatctctcatccaagagtttttcacttgaacaatagttctctaatagatggagtagaggagtatttatactagaaacatccccctactaaggtgtgaacatgaacaaccaagttctggtgtttaatggcaagataatgaagaatgcaaagagttttctctggttcgtgcacgacctttcagctcctacgcagtattcagtaaaatgattctaactcctcggaaaatgcttttgaggtgggctttgttgtgttcaaagctataatgaccctcttttgaacaatgtatgccatgcaccatgtctcctgattggctaggtggcataaaccttagagtttggccttcccttcagttgtgtaaacagtcttctctcaagcgtaattagtcgttgctagtgtaggagcccatttttgttaactgtaatccttctcatcttgagcatatgccattctccttagtgtaaatcatagtaatgcaaatgtgaagcatttaggtagtataaacttcttaccattatttatgttaagttttataaagagcgagttcacctcctgttgtacctttctagcatgactgcacctaatcgatccatggtacggtaaatgtgaccatattcccatcgagctagtttttgaggtgtaattcatcctcacagtttacaccatcttcgtttcccacttgtggtgggtgacgtaaatcattgttttggtttacatcatgttgattttcgtgtgcagttaggatatccttatcatttaagtgtgtatatctacttacagatatagagaccatatttctctatccatcgtgtaattgtaagaatgatctaaacagggtgttcg

SEQ ID NO: 1734 - DNA, 5039 bp, Oryza sativa
  Intron number 1 from transcript LOC_Os01g53779.2 (locus LO C_Os01g53779) derived from phytozome v7.0 (chr-ID Chr1; po s 30908482 to 30913520)
ttgaagcaaggagttgtgttataacgctgtgtaaggtaagaacagcttgcttgtacctaccttcgggtttcccgaaagggaaaaccgtatgtaagcttatctgtttaatatgaagtaattttccttaagtattcctgcacgtttattctagacaagtgtttatgctaaggaccctataggagaaacctcttcggtttgttctcgtttttagcctgcatcttgcataggcgtctggagaatcggtatccgtagagaagtgttcccttcgggtggaactgcctggggagacgataaactcttagctagaacaagtgtgacttggaatatctttttaagttgcttctaaaaagatagataggtgaggcatacggtgagtaccgagtaggactttacatcatctgaaacaagcttctgaggctgtctaaataggattcgccaccctgcaaagatcctaaagttaaaatatctctcgaagtgaacagtattgaacagtaatttaaacagtaaactaaatagtgtttttgaacagtgttttttgtccgaagcatatatatatatatatatatatatatatatatatagagagagagagagagagagagagagagacttacttttttttgttaattgaccatttagttgaccgtaaaaaatttagttttaccctcggatttcgatcgtccagcgcgcggtcgcggcggaggcatggagatcggagaggccacggcccagcgcaacacagcggcgaacgcgacgtggagcaacgcctcatgattattcgttatgtgcatacgcatgacactattctggtttctgtagcagccgtcgagcacgtaagcaaccaagctatcacacattcgtaccggtctactacaactctacaatagcgaaagcaattggtccaaaccttttttgtggttgacatgcatatgcatgattcaatatctatctattatattatcaacaccacgttcgctgtggcggctagaaattctcacattaatcggagaaaaagagaaaactttacaccattagatcttagttgtctaaattttaagggctgagatttaatagcatagaagttttaatatggtaatcagatacagatacgtgtattatagaaattggccagcagcagttagacttttcttaccaaactagcactaggaaacaaaaattgtaataggaatctagggaaaaaagctatgtccgtgtatgattttgtgtccgattgctatggtggctagctaccaaaaaaaaaaagatactacaaagcaatcacagcacgtacagtttcccatctgccgtctccaacaaaataacgaagaaataggagccagagaaagagaaggtacgaccagtacacgagagaaatagatgtatttgatggctggtccatttattcaattacctcggctaactctttgtactctactcctgttatgagggatagaaattcccacattaacccaaaaaataattttcaagtaaaaatacaatttaaaagtaactaaaattcggaattaaaaataaacaatattgaaaggagagtctatatatataagaatccaatatgagattaattaaaatttaaaatataaataaaataaaatccgaatttttttttaacaaaaagaagatttcaagtagtaaaataactaaaattcgaaattaaaaaaataagcaatgttgaaagaagagtccaaataaaaacccaacacaagagtaattgaaattcaaaataaaaaaatgagaatacaaaaataaaaatgagagtggaatacattatataaataactaaaatttgcaataaaaaagaactattgaaagaagagaccgtatatagagagattaattaaaattcggaataacaaataaaataaattctgaaaatagaaaaatatttataagagttcatataggaatataatttatctccaaataagaacccgacatgagagtaattgaaattcaaaataaaaaaacacaaaaatacaaaaataaaaatgagaatggaatacattatacaaataactaaaattcgtaataaaaaagaattattgaaagaagagaccatatagagagattaattaaaattcggtataacaaataaaataaattatgaaaatagaaaaataattataagagttgaattaggaatataatttataaataaaaaatatcggaatgaaaaatatggaattttcaaaacaaaaaggtccatttagaacactacgatgacaaatacaataaagaggggagaaacaatgagcccgtaaagaaatagagtggtggtggttgatgggacatctaaaaactataaacaaaacccgaaatagaatcaaatgacaattaagaggagggacgacaggcataccattaagcaacacggttatgacagttggcgagacttataaaaagtaaaaccccgatgataattatgttcgattttaaatatctctatgggcgggccatagaggagtacagtggcgaagccgttaatgttttggtgggacttctagaaagtaaaaaagaacacaaacaataattatgttcaattttttaaatcctaatgataaaaaagagaggatgcggtggatgggccgtagtggagtacattgacgacgtttgacgggacttctaaaaattataaaaacgaaacccaacgagacaatcaaatctgaaaactataagttctaatttttgaagttctaaagaggatgaatagaagtaatgatagatcaagcaatcaaataaaggtgtagcagaggagcaagggtagcgactaacgtgacttttaaaaactttaaattagaaacatgggaatgataaattttaaataaaatcatatgtaaaaacaataattttatacgggtactagccgcgcaattgcgcgggctacccaattataagagttaaagtaggaatatattttataaataaaaaaatatcggaatgaaaaatatacgggttctaaagaggatgaatagaaatagtgatagaatcgagcaatcaaataaaggggtgacagaggagtaagggtagctattgacgtgacttttaaaaactttaaaattagaaacgctagaatggtaaattttaaataaaatcatatgtaaaaggcaaataattttatacaggtgctagctgtgcaattgcgcgggccacccataagagttaaagtaggaatatattttctaaataaaaaaaatatcggaatgaaagttatggaattttcaaacaaaaaattcatctagaaaacagatgacaaatgataataaagatgggagaagcaacatgcctgtaaaggagtagagtggtaacggttgatgggacatctcaaaactattgataaagcctcaaatagaatcccattgatgattgaaagtaggaacaacggaaaggtcgttaagcaacacggtcacgacatttggcaggacatccaaaaaataaaaaataaagagggaaggcagcggcgagccgtagaggagcacagtggcaaagccaatgatgattggcgggacttctagaaagtaaaaaaaagaacacaaacgataattatgttcgatttaaatctcaatgacaataaagagatgagacagcggacgggtcgtaaaggagtatagtggcagtgtttgatgagacttccaaaaataatagaattgaaacccaatgaagataataaactctaaaaactataaggtccaatttttaaatgttccaaagagaatgaatagaagcagttgtaacgattgatgagacatctaaaaactattaacaaaaccccaaatataatccaatgacgattaaaagcaaggacgatggataggctattaagcaacacggtcatgaaaaaaaataaaaaataaaccccaatgataatcatgattgattttaaaatctcaaggacaataaagagggcaggtagcgggcgaaccgtagagaagtacagtggcaaagccagtgatggtttggtgggacttctagaaagtaaaaaatgaatctaaacgataatcatgtttgatttttaaaatcccaggcaacggatgggtcgtagaggagtacagtgacaacatttgatgggacttcaaaaaaaatataaaaatgaaactcaacgatgataataaactatatctaaataatgtctactacatccgtcctaaaatatagcaacttttagctatgaatctagacatatagttgtctagattcaaagctaaaaatgcttatattttgggacggagggagtaatttttaaagattcaaagagagagaatagaagtagtggttgatcgagcaagcaaataaggaaggaggtgacgaagaagtaaggagtaacaactggtatggctttaaactataaaattagaatcacggggataataaggtttggtcctttaaagttttaaaacaacgagatagctatttaataaattttaagtaaaatcattttagaaaatatataattttaaatgggtgctagccgcgcaatcgcgcgggccatccagctagttccttcgtatggtagcagtgctagtctgctagacaggctcttaattttgctcaggataagaaagtagaaacacgcctagatcattacgcgcccccacctcgcaggtgttatctcgatccagtactgccgcgattaatatggaaataaaagcgaaccgacgccagcccatgctcggtcgcaggccgcggtgtctttccaactcggtcgatcagcactccagtatctggtcggcacagcatttgcgtaggcaaccacatctccacacatacaagcagcacgtacagcggtacactatacgtagtcacgtagcaattttcgtaccgctagctgcagctagcgttgctcagtgctgttcccacgtatatctaatgacacccattctccgtttctcctgctgtcctgcatatacgagtccaagcttaataattctgccaccttcagaacaacattatgtggactcacaaaatctgcgaatcgatatattagcatgatttttttttacaactgtaacccgctgacacagatc

SEQ ID NO: 1735 - DNA, 6587 bp, Oryza sativa
  Intron number 1 from transcript LOC_Os11g10310.1 (locus LO C_Os11g10310) derived from phytozome v7.0 (chr-ID Chr11; p os 5589335 to 5595921 reverse strand)
gcaccaggtacatcactatatatagcatatgcactttgttatatataactaggaagtaggaaggtagcccgcgcgtatacgcgggcatgtatcgtaagttgtgttcaagaaatttataagattggaatattaaccagacagtatatgctacgcttcaaatttcaaaaaagtatttctctacgattgtttttcaacgatattctttgataatttttataagctatttgttagttttatacaacaaaatatttaattcatccctatgagtaattatccatccagttatcgagaaagaaagtagacttattttgttaagaaatcatgtttaataaattaaattcaaattaaaattgaagtgttattaacaaaacaaacattatacactgatgatttgattcatcttcaccttggcaaatcagtattgctgcgacactcgtgatgaccttggtaaatcaccttagctgtcttaggtgtggtggttcatctcggatgttttgcttttctctcagaatttcttggatttttctaatttattagagcgccatgttgtgtcttaggagcatttgtaggaagtttaatagacttttagtactgcctctgtcctagaatgtaacaacctaggataggatgagacccatcctatattctgtgacggaaagagtatatgatagatagatagatagatatagtattatgaaatttactctttttatttatataatgagttgctagctacaaaatagggaggagaaagtgagcaaggagagaggagcgaagatcatatatatgttattaatttaatatttaattactttttatttttcatgtaaaagataggattttttttccaaaagatatattcttgtatatccaaacatggccaatgtagataaataaaatataatgtaaaaattataatcatttagagaatttacttttatttacatattgaattttgctaggtagaaaattggtagattgaatggaaaatggcaagacaaaaggaaaaggaagtacaggagaggaagagacgtatgtacgtacgtacgtcaggggagaggaggtctcgtacgtacttgagggccacctgagaggtggtgggttaggggtgggaggagattatggattgggttttaggatattttttttaagataagatctaatggtgaagaataatggtccaccatcttaagtaaaaattaacggtcggatgttttgctttttttcttagaattttttggatttctctaatttatttgagcgccacgtggcggcttgggagcgtttgtaggaagtttaatggacttttagtatataatagatagatagatagataatagatagatagatagatagactagggaggaagcccgcgcatctgcgcaatttatttattctttttattagaaaaatgttaaaggatcttattatggatgaatagtacttatttttctgtggtatgtacacgggagattaatatggagggattactttcatacatctaatctaatgtttaaaaataaccaagaaggaagcccgcacagatgcgcgggcaatttattattcttttaaaaaaaactactaaaaaagtcatatatcatcataaaaaaccatagattacctcataaccttaccgtaaaagaagaaaatatttataccgtaaaatagaccatagattttgatatactaaatgataatgtctatcatattcaaacaaaaatcgctttatttcagttatatgtaaacttacctattatcatcctttgtaaacataatatgagtgttgattttttttcttatattatacatctaatttacctatacatgatcatgggtaatatacaaaggaataatctatattgtcaaaattatttgtactaatttttagcacaatttatatgagaacaacataattaaaaaagataaaatatagttccatatgacattttggattgtacgtatgtatgtaagtttttttcttgcgaatggtagtctctcatatctacatactttttcatgttttgttgacaaatatttttctctcataggagatagggtatgtgtatgtgcattcatagggtgggtgtgtacatgtttatatgatcgtctatgattgccttttacattgttagttaaaaaaatattttgaaggaaattggcgagggtggcgtgaagcagcgccatggcaacgtggcttcttcatcaacctcgcaaagagtggtcgctacatatatgcataatttgtggaaaaccttagggatacaagaaaaaaaacagaaaactaccagacggggtggaccatatatgcgctcttcttttttgtttttgacatctcttgtgtatgtacgtgcatagagagggattagctggttcttaggagcgagggcttacctaaatcaatctaatttaatggttgaaaatattggattcaccggtttaaatgcaaatcgatgactatatgttttgttttcccctatattttttcttaaattttctcctatttattagagcatctcatggcatcttacaagtgtttgtaggagtatatataggaacactattacttatggtcacaatctacttatagtcaactattgtttattgggattttgtggcatcctctatttacctatgatttattgttaatggtttcccacttagtaccatccttttatctttggtgcttgatgacatacatgtttactggatgtcaactaattattaggtgcattgtgcatggatgtatcataagcaatataacttgacgattggtgacactggtttatatatagaacttattacatgggatttagcggggacatacgattgatatattataccattcttgattcacaaagtatattatatactacatatttagttttagtacataagtaataaatttatggttaagttctaaagtacttatcggattggagtactccattatttatcgtgaccacgtttaccgaattgctaaatggtgtgtattttacaaaataatttttattatagaagttttctaaaaaaataaaatccattttcaagtttgtaatatttaatactcgattaatcatgtgctaatgacttgtgtcttttcgcgtgccctatataagctaaatcaatgagccagatcgaacgaaggctctaagtaggagaaaaaggatattaatatggtgtcaaatgaatatatttgatattcaattttctagtaatatatgaatagagtaaacacataatacatgaaaatatatttgtgataaatttagtaaaatcctttttccatataagtattttttacaatagggagtgaataatttttgaaattctacccacagttgaagttgtttttattttggaaaatgtaagtctaatttaacaaccatataatctatacttttaatttatttatgtttttttatgtttcgatgacatgcgcctaattggaatacaactcgaaatagcatatattgttttacaacttaaagcatagttaatatgggtttaattattagtttggttttccatcaagtctaaatgagaaaaaaaagaaaaaataaggatgtgggacccgacgtgtgtacataccgtacataagtacatatttttttttcttacggagaaatacatgtgtatgtactgtatgtaggtacatactttttttaaggaggaatatctacgtacctatgtgcatgtatattggacgatagtggcattatgacgtgggcctttttattgataaatttaattagtaatttttaagatagatttaatggttgaaaataataggtccaccagattaaatgaaaatcgatggtcgaatatttttcttttttcttataatttctatgatttattagagcgtcacatgatggtatatgagcgtttatatggtacttgtggtaaattaaaagggtttgtaggaagtttatcctcttgattactttttctccctttttctctttatgaaaatatttgcaacaataatttttaaattactacatccttctaaattatatatttatttgtaacgatatattttatatcatcataattttaaacttttaaatcatacgtttattttttatctatttggaccattatgttatttatgataaaaaccacaattagaatttgacatatgttgtctatttcacttgtgaaatgtatattcttctaaattctatttactattccttgaatgtcattcaaacatgtataaaaagttataaaaataaagtgactatatattattttatatattatttcatcttgtactacctcactgggcatgcataaataaaatagaaagtgactatatattattattgttagatcgactttttaaagcctcactaataagaagaatgcctgagcagctgaaaacatatatttttaaatcatatgtttttattgtatgtttgtttaccatatttgtagagtaataaattttgtttttctactatagaaaatactatttttaaaaaatctatttttttaccgacgtacatatatatttttaatgaacagtatctaaagttttttttcatttgtgggtacacacgtgagatttctttttttcccatgatgcatacgtacgtgaaattttccttttcttttccgcgtacgtaagtgacgtgagattttcctcttttttttccattgtgatctaatccaatggtctaaaataatgggtccatcaatttaaatgaaaattgacggtgagattataaaatgccacgtggcaatctaagagcgtttataggaacaccacacaacggtttaggagcgtttctagaaagtttaatggacttttagtatataatagatagatagatagatagatagatagatagatagatagatagatagatggatcacgtggtggcctagtagcgtatgtatgatgttcaatggccttttagtactccctccatattttaatatatgacaacgttgacttttggaccaacgtttgactattcgtcttattcaaattttttgtgcaaaaaggtatttatgtcatgttttaagaacatttgatcataaatcaaatcacaataaaataaataataattacataaatttttgaataagacaaatggtcaaatgtatcttaaaaagtcaaccgtgtcatacattaaaatatggaaagagtatataataatattctgcctcaatgattggtggatagcagtacatacatagaattgatacaagggctaagtgtaacatagaattgacacataaggcaagatatgtgtgagacgagtacattggaccttatatactatatactcagattaacttaagtttaaactcgaaagattgaagatgaacggataaacatatacacctcctattactcttaattaagacacattggtctagttcatttaactattttttatagtcctttaaatactaaagatataattatatcaaaatatttatctagacatatctagatttacattattgtgataattcatattttaaagtggagataatatttttaatgctaatcacaattagagtattttagtttgggatattgtagattgctttaaatatgaaagttatgatgacgtcaatttttcatgaaatatttaagtaacattacttcgttttgtgaaaaataatattattttaacatatcaatattagaacagtggtattttttttgagtgctaagcagaactaattatagtattttattttatgatattatagatctaatctaattatacatgattgtgaagtgatatatgatgatatgatctacattatctatttctacataattttttttattattgggatggcatgcgaaaggtactgatatgatttaaaataatagaggaattatttttgaatgttactaacgatttaagtgtttttatttttgtcatatctatcatatttaatttttttatgaatattttataaagtgatacttgatcatataatatacattgttgttttttctattttttttagcagtttcaattgcatcctaaggttaggatatgatgaaaattaaatattccttatgagttaaataatatagtagcttttattggtaaataatatagtagcttttattggtatttgaatgattgattaagcactatgaatacgacaatgaagaacgataaaaaagatttatgtgcaatttaaaggttatgattatttctctatacgaaaattatttaaaaaatatttttaattataataaacttgaaaagaaataaagagacgagaagatttgataggaggggggaggatacgtactcacgtaggggaggagggtgggctggtggggagaggggagggagatggattgtggtgttttttttttctaaaaataaatctaatagatgaaaattgtgggcctaccgatttattagagagccacgtagcagtttaggagcatttataggaatcccacatagcggcttgaaagtttttgtaggaagtttaatggacttttagtatataatagatagatagatagatagatagatagaagatagatatcacgtcgtcctaagtataacttctttaatgtttttcctgtgtagaat

SEQ ID NO: 1736 - DNA, 8218 bp, Oryza sativa
  Intron number 1 from transcript LOC_Os01g22249.1 (locus LO C_Os01g22249) derived from phytozome v7.0 (chr-ID Chr1; po s 12508790 to 12517007)
actgctttgtcagagtacgtttgcatctatcacgatcgatcctagtttcgtttataactgcactgtttggtgtaagaacagctagctaaccttggttgattttgttttctttgttcaaaaagggaaactattttaaactctcgagatggcattccctcattatttgcatgtcatccaaatgattaagaaaaaaaatcaaccaggtatattaatatgtgataaattattccacaaatatgcaaggtcaaatttaacttctataagtttgaatgaaaaaaataaatttgattaagaatattcgttaactagccatagtttatttttttataacctgtaaaagttaaattttaacttgcatatttgtggagtgatttattatatattaatctatcttgttaaatttttttaaaaaaattcataactatttggataacatgtaaataactagaggatgtcctcacgagagtttagaatccactcccacacaaaaatgacaaactctagcagtgataaaaagaaaaggtgtcaatttttcatattatagacgctgtgttcggcaaaaggagttgggaacccactccctctttttccacgcacacgcttttcaaacggttaaacggtgtattttttttaaaaaaaattctatatgaaagttactttaaaaaatcataaaatcatatttatctttttttttaaaaaaaatagctaatacttaattaatcacgtgttaatagaccgctccgttttccttgcgggagagattagttcccatccctgctactgaacacagttcaagggagagttagctaagatatatttatgatcatatgttatgaaagatcggcatatacgtaccgctgtttttttaaaaaaaacagatcacctgaagaaacattagtgctctctattacaatcactgtgttagaaacaaaatacaaccatgaatcaaaaaaataaaaggaacagaagaaggtattaccatactccctccgtcccaaaatataaagaattggagggatataacataatattcatactaataggatatgtcatacctctctaaaatctctaatatatattagagtaggtataataggtaaatttttgctggctatattgggtccaaactgaataaaatacagagttagagaagaaatgagtagaaagagggtctgagcgggcgactaattacatactagtcgccagctccacacaggctccaattcaacagtagcagcgcatgaccagtttcggttgagctccagtagctgctcacttctcaaggaaaaatgagtgtacaggaaagcttcaaaagaagaaaaagtataataaaaaaattaagaagggacatactaatagctctcttattgtacacataccacagttattagttaattaaatactaatatagatatttttagagccatcagtcggctatattattaaacttgctcttatgagatatattcctagtactaggatatgtcatatgcctccaaaatcttttatattatagaacggagggagtaccacttaagaaaacacaagcagctttgccaattttgattgtaccatcatagtagttaatcactatcatttcagaaaagcaagctccataaaagattggttcattaatttcctgagttaaaaatctgatacatttcagcatattccaatttagccagaaagtagtggccaaatttagaagttaatactaatatcacactccacttctcgaagtctcagtttttccaacaatataagcagctccagagggcaggcaagcaccattcaccaagcctgctgaataaatttaaataatctatatactcttttgtaagcatatatttgtcatacatagagtatagctgttgctgctttaccaaatcacagcttccacctatgacaatgatgattagaaacagcagagccagccagttgaggaacgtaatcactattcagcaatagaagtaaacctgatcataactgtgatcagatgcacgacagcggcgtcgtcgtcactgacatggattgataagcaactagagtcttccctttcgtttgccaacccatgtgattttggccccataaatgctgggtcgggtcgatgggtcactgggttgacccagcccatgtgcatcctaaggccttatttctatttagtttggatggaactgagggagattgaatgaaaataattccagaaatgctcaggatcggtcgatcggagggaggttgaaaaatcggtcgctctctctacctcccacgtgcgcaccccactggacctatccacttatccctccccttttttaaaaaaaatgtttcacctaatgtatttagaatgttttattatgtatagatctaatgttgcagtgaattaaaatattcttatgcaacaaattatcaatatattttggaaaccctctattaagggaattcatttcattttttttcaccaaaaatgtttcacctagtttaatcacaatgtttcactatgtatagatctaatgttgcagtgaacgaaacatttcttctgcaacaaatcacccacatattttagaaaccctctattaaggtaattcgtttcaatttttgtttcacaaaaatgtttcacctagtgtactcacaatatttcactatgtatagatctaatgttgcagtgaactgaaacattattcgctatttgttgaaacattgtttttatataaggtgaaacaatgcccgatttaattgattgaaacattttcgatatacttagagaaacaattccaatatacttggtggaacatcgtgcaatatttaaaaataggcaaattttgctacaggacaacgtgacttcgcgaggacaccgcacggaatgacttttgggggaatacactctataaatgtggtaatttgccaggggacaccgcacccattaaaataataattttcgcttgaaggagagagaaaaatagcgtgaaatgtcaagaataaccttggacccacgtgtcagctctcccatctctctccatgtgtcaactctcccatctctcttctctttgtcccctccttccttcccacgcttccctgcgccagtccgcaaccgctcatcgattcctcacgcgctccagcccgcagccaccacctcccgccggacatccgagcgccgtaggtggctccgggtgtacgccctaccccaccgcctctgaccgccggacagccaggcgccgccactggttcagggcgcgcgcgcctgccggacatccgagcaccgctgcctcctcgacgctggtaaattaatcgagattcgctatagatgtttctctctcgtggcaagaggatggataatcaaacagacgtccaaaattaatagctcataggctgaccatggacagctggaccatgacgagctcacatgtgagctcgaacaccttggcggagatggcgagcgcgctcttctgtccgttccgcgtcgcctcgatgctcacctggcagtccttggtccacgccatgaagctcaccatgccggcgatctcctctagcttggcgatgatgtcggccaccgacgcgccggacacgaagcgcatcctctcgccacgctcctggaacagcccggacatgtcgaagctcggcgacgatgcaatgatgtcgaacccgtttaggatcttgggccgcggcatgcgcggacacagtcgtggcagtacgcctccccgacgtggcgtcccctgccggtgggcgtggtgccgaggtaggcgcgcggaacacgttgttggtcaggtcggcgaagcgcgtcaccagctaccaccagtgagccctccagtggcgccaccctgtccgtattgccgacgaacccatctgtggcatcgatggaggatatagagagagaagagagatgggagagctgacatgtgggtctaggggtatttctgacatctcacgtggtttttctctccttcaaacgaaacctattattttaatgggtgtggtgtctgctggcaaattaccacgtttatagagtgtattccccaaaagtcattttgtgcagtgtcctacggctaaaaccgcgaagtcacgatgtcctgtagcaaaatttgccttaaaaataattcaataataagctaaaaaaaatttcgtcgaaatatatccatgtgtggtcttgttttaaagatttaattgcaacaaatttaattgtgcaatcggatcatgatttggataaataatttaagagaaaaatcagtttaaagtggttttgcatgtatgtgtggcgtcagcgcccaatttttcccaatctggattgggtgcccgacgcgtaggcctacaatctatagaggtgaaaacggataggatattatccgatccgatctaaatccatccgaaaatgagggtatagtatggtttcttataaatccaacggatatggatacggattcggatgcggatatgatacctttaaaatttggcggatgcgcccatgtaaccactctatttgttgcatgtaacatgagctggcaaaatagagtgcttagaaatgcgagttcatagatttaatgtcacgtccggaaattcactaataatttctgaattaatttgtgcataaaatcctcgtccaggaatcagccgaggtacacaaactgataatttaatatacaaatccatcataataataacgttacatacttacaaaagaaaagaaaaacagtagcggaattaacggtctagcgatggcttcagctccactcccacaggcaactcaactggggaataagccaaacgtcttctccttctggatcctttttcttcaactgaggttgattgattattgcaagaatgagcatatgacatactcaacaagctacacagcaaatatgcaagtgcacaaggataccaaaggatagcataatatagtctcatttgcgaaagcaacatttagcaaagagttaaaagtagtaaaacagtagagtaattaatcagaaattttaatcaacactgaacagcacacccatgctgcacaggcccaaccatcctgaacaaccatacccggctgtacagatttaactctaaaccaggagctaaacaaattattaccagttatagcatcatttattatggtgagaagtgtgagactaatcacgaaagacattgttcgacccccccatgaccgcgggcacggctattcgaatagttttactctgaccagaggtgtaccactgtacccacaagacacaacccaccgtcatgtactcatgtcaccgtgtccgcgcagacacgtcaccatgacgagtgattgtgacaagacccctcgcataactcaacccaaagcagtgcaccgttcctggatcataatcacccccttataaacaaggcatggactccccagcgacccccgtgggcttatctccgccacttctcagtctggtgctccgcaaagagccttgttatacaaagtgtccaggcgttgcccattctggcttgtggttggcacggttaatgtttcacaaccgaaaatcatgaaccggtccttaattgtcacgagcactaccatcaaaaccatgtgctcacaacccaccattatcaagttttagttggcacattaattaattaaccaatcacgattaaccatcgtgagctatcattaaatatccatcattaagtaatagtgaaacattagttatcccaattgtgtgctaatgtttttaagcatggctatgcaatgatatctaacatctagctgaaccaatatataaagctcaactagtcaaattataataacccaaggtaatcaagaaatagggtaatcaatgcaaatgggccataacaaaggaacatgttcacaccacccggtgacattcaaaaataaatacacagttgaaataaatagagaatttaaatataggatcaacatgctcaaaggaatggtgtttaggatctgtgtgacttgccttgcaataacgggtcttcaattaatcttcttgaacacttccggcgcactcgcgaaccttcgaaacgacggaaacgacaagctaacacgcaaaaagaggaaaaagactaataaaaaccaaataaacaatacatataaagtaaacaaacatgtagaaaataattttagaggaattatgagacttgaacggcctcattctgacttcatatgaatttattacgaattttacaagattaaatctaattaaagcctatttaaaaaggattaaataaatttaattcaatttatggataattttaatatgtagatctttattttatacaacttttgcaactggaaccacattaaactgagttacgacgaattagttatgaatttttaaagattaaaccggattaaagcatttatatggattttaattgaattatgacgcaataatgaattatttttaaaaaggaaaagggaattattgcgtcatcggctagggttcgcggtggaccgggtgcacgactgcggctcacggaacgaacggccgagatcatcttgatctaccgcggtccacggggaatgacatcgatgacgtcggcgatgacgtcatcaccggcgacgaccggacggcgcaagctcgccggcgaactacggcacgacaatgctaacgaagggcaccaaaatgatgcgggcgacgcggcgaactcaccggtgaccaaaacaacggcggaagatcaacggacggcgtcagcgacgaggaagaagcggcgacgaccttcggcttgacgacgacggcggtgctccagcgatcttcggcggaaacggaggggtggacgagatcggcgacggcttggcgaccatgacggtgacctccccgagcgacgacgacgactggagcgacgacaacgcatggctgaacgaacaacggcgacggcggtgctaagcggcacggtgctagagctctaccggcgacgagagacgaaggcgagggtggcggcgggtagaggagggcctggggaaccttttatagaggctaggaggcggcggcgaaggcccacggcgaccggcgacgcgaaggaaaggttagggttcgggagagagagaggaatccgattcgagatcgaatccggcactttccaagcgattttagccgatgataccaaaagaggaaagatagagaagatctcgggaaacatttcccctcaaacgatttcaccggagaaggaaaggcgcggccgaatttggaaggaaacggcggcggagcagctagggtttcggcgcggcggcggagtgaggttgacgacgagccagacaagtgggtcccgcctgtcaatgaaaggaagagaggagggagaggtggcggactgggccggcttgggccgagcacgcgcaggccgaggagagggagagagacagacttgggctgactttcggcccaaagccaaaagaggattttaaaaacctttttccatttaaattattcatgaaatgcaattacattgattaaaaatacttccttggctcaaataaatcccagaaaaatctaggaactatagaaacaaaagaagtatttaacaaaattttatctagcccacttttatattgagatttaacaaattaaaattagatcttctcttttaggcttttaagatcatttctaataattccttttagacaacaatttataatttaaggatttttaaacaagaaaaacacttaacataattataattagatcattaaatgattaactaattactgaattgttctttgtattattaaaattaggaattgagctctgaaaaatccgagaaaatctcagagagtataattaatcatggagaatttaataaaaattaaatccatccatgctttaaatttaggaaattttatttcccacatttaaatttacttgtaaattaatgaacatttaatataaattcttttaataatttattaaattgtttataaatcctgaaacaaaaatcaggctgtgacatttaaacaccagtagtatatccaagcaatatagtggttacccgaagactattttgcctggatatttgtaaagagttcacaacagagatatgctacgtgtttggatccattttaccaaaaaagtagttcaaaacggtaaaacttttgctattttgaaggatctaaacatgcccgaaatggtaaagagaaataggaaaaatattcgtgagatgcaacatttctattatttaaaagaaaagaaagaagagaattctcaatttctgcccaatgtctgcagggctgcgacgcctcagttttgatcaacgggagcac

SEQ ID NO: 1737 - DNA, 782 bp, Oryza sativa
  Intron number 1 from transcript LOC_Os06g48770.2 (locus LO C_Os06g48770) derived from phytozome v7.0 (chr-ID Chr6; po s 29522063 to 29522844 reverse strand)
ctccccgtcccaaccccgcggccgcttcgttcttggtcgtcctcggtgtgttcttgttgttgttgttgttgttcggatcgagttgatttcgtgcccctcccattatggaatcaggtttcttcagggtttctctgatgtagggtagaagattgtttggagaggccaagaaaaaaaaagttcttttggagttcagctgaactcgttgttaggtcgtttgcccctgatttagattcgattctgaggtaataaagttgcggaattgtggatgtccggaggatatccgagggttttatccgctcaatttgatgtgatcaagcaaaaaattcgtttctttttatgtttaaaggccttaatactacacaagctagtagtagtttgttttcttctgctctactgcaaaagtaagtactccttgtttgcatcccttggtggctttccagtacctaccatctgatgttgtagctccttggaaactgcttgcttatccctttgtcatgataagaatgtggtgtgaggaagaaacctgtattctttgtagttatacgctttatttgctttccttaaactctgtctttgtctgatttaatgtaaatacaagctgtcgcgcgaattcgttatcttgtcatgacttgtcaagaacagaagaacagtcctttctatgaagaagttttgagcctattgtatgtgatcggtagtgactaaggaatgctgatttggatttaccttcttgtacttgtgacattgcagaagatcaaccgtctggccgggagcctagagttgtt

SEQ ID NO: 1738 - DNA, 817 bp, Oryza sativa
  Intron number 2 from transcript LOC_Os01g28680.13 (locus L OC_Os01g28680) derived from phytozome v7.0 (chr-ID Chr1; p os 16046272 to 16047088)
gcttgtgtccacgttaaagtcttgttcttttcgaggtgaatgcgaaatttatatttgtttttttccctcctcctttcagttcctatttgaacagatttagttgtaatcatctgtacaaagtgtatgtcagatatccttttttgggggaaattagctcatcaccacccatcagcgattgtgcattgccaaaaaaaaaaagaaaaaaaagaagaggtttttaaaaacgaccagaatacccttaggtatttgttcattgtttcattttcactaaggccaagtttgattttgactcttgcccctcccatcgagaacatggcttctttaattgagatggacgaaggctttattctgttcattttgagttgtgtcatttccaaactgaactgtttttctagtattgttttgtagtgatgctcattttgaatactattttcgtggtcatattggtgttgctgagctactcagccatttccttttttgtattattaaattaataataaaaaactgatttacctctacaagcatgcatgtcccgtttttattctgtaatgaaagatgcagcggaagagtatcattaatatcctagaaatataatataataaacgattacaaccttttataactataattttcttggagttacttttgaagttaagcacagtagctgtctttctgtcatgcagactgctgtactagtatatcaattgatcattctttggaggtgttaggtattcagtgaatatttagcataggaaagttgtttgattattgtcagaagtgacaaacttcatcatgctcataatttcagtatccaaac

SEQ ID NO: 1739 - DNA, 779 bp, Oryza sativa
  Intron number 1 from transcript LOC_Os12g37570.1 (locus LO C_Os12g37570) derived from phytozome v7.0 (chr-ID Chr12; p os 23028193 to 23028971)
tactggtgagattttcttcttcttgttctttttttttcatagcatatgctaaatgtttgaggaaatgccgtgtttgatgatgtaggatgatctagtgttgtcgtgtgctttagatgaagtgacccgtatatcggaatgtatcagcttgagatttaggctattttatctctttccaactttgaaacagtactaacccctagaagagactcttgatgcattttggttgtggtctcattttcaccatggatggatttaacaagtttgagcagcagtacacgcacgtacttgaagtaacgaaaccttacgcgtgtaaggctatagtttttttttgactgtgttgaatcaaataaattttgtagtggatgtctagattttagttgcttttagtaatgagtttttgcattctttgaaagggaacttttaccagattgaagaagacattaacttcggtagtacatagcaaagcgataaggcatgtcgtaagttagtggatcaagatcagtagtcaagatttgagcttaacttggtaagctaacactgcttatatgtagatgtaattgatataatattgtctgacgcatattgcttgtggatagaaccatttaggagtacgttagaaaagaaacatagttcgataagcacatacctactcctcaactttgttatcataagctttggtattttcttgcagtctgcaattgtgcacagatcttctcttctccttcctcattaaaccttgcatttactatgacgcaggaatcgatctgcagagaaactgt

SEQ ID NO: 1740 - DNA, 7243 bp, Oryza sativa
  Intron number 1 from transcript LOC_Os06g48990.1 (locus LO C_Os06g48990) derived from phytozome v7.0 (chr-ID Chr6; po s 29681811 to 29689053 reverse strand)
cctgcaacagcggcgaataacaagtaagcaggtgcgttcccgatgctcaaacaactggttggttaattagttgcattttctgttctttttgatcttcgcatgcatgaaacgtcaatcgacaaattgacactccaagtctgaaagtttgacctcggttggagctaaaaacagagctagccatttatcgactaacgatcaggtacgaggccaatcttactaatcgtttcatattttcttccaaaaaaaactagtcgtttcatattacacatctggtttgaagaaatgattgagctagctagctattgatttactctcgcttaagtaacatccgctgaagtaaaatatgcaacgattagtaatactcaacagctagctagctcaatcgtcttctccagaccagatgtgcaatatgaaacgattagttttttttgaaagaaaatatgaaacgattagtaatgacgagctagctagcttgctccatctttaatttagatgggtgtgagctcctagcttagcttgcagtgcagatccgcgtttggctttcctatgcaacctgcagtgatgctgtgatggcgagcagggtcgaggagtagaggagtggcgttaagcagattagggcagaactggagcagagccgaagctagcagatgctggctggccagtggagaaggaggagataatcagtgaggagagaattcgggtcgggggaagaagacgagggggcatttttgacatttgctagatttgtcggggttaaaatgagttcacctaacaagggcagagaccgaaaattttattcaggctgtgtttagatctaataggtgaaaagttttaacgtgttaaataagtaaatctgaaaaacaaggttaaattgatagttggactttaaaataggataaataagcaattgtccctaaattttaacaccattaattactcttaacgaagtatggtgaaacacatgcttgatgaccacaattgctataaagaaaagaagcaatgcattgtataccgtgtgtccgtgtgtcacatgttgtcacacttgtttactgcttgtcccttgttttgagatgattattgctgacctgtcacatgtctgatggtacagtgtttgttgaagttgacgagtttgggtctttttctttatccagtggcaagctgttcctcgactaaggtagtgtttggatccagggacttaactttagtctctgtgtttaaacactaatttagagtattaaatatagactacttacaaaactaatctattatattattaaaggaatagaaaaaaggagtctccacgttcgctctcatggcctagaaattctcacattaatcgaagaaaaagaaaaagcagagtccatatagaaatacaatttagaaatagctgaaattcggaattagaaaataagaaatattagaagaggagactagagtccatatagaaatacaatttagaaatagttgaaattcggaattaaaaaataaggaatatttgaagaggagactagagtccatatagaaatacaattaagaaataactgaaattcggaattaaaaaataagaaatatttgaagaggagactagagtccatatagaaatacaattaggaaataactgaaattcggaattaaaaataaggaatattagaattagagaatagagtccacgtagaaatacaattaggaaataactgaaattcgaaattaaaaataaggaatattagaagtagagtatagagtcgtagaaatacaattatgaaataacttaaattcgtaattaaaaataaggaatattagaagtagaggatagagtctatatagaaatacaattaagaaaataaaatagaaatttggaattaaaaaataaggaatattagaagtagagtatagagtccatataggaatttaaaactaactaaaatttggaataaacataataaaattaaaagtagagtttagagtccgtataaaaatacaatttataaataaataaaattagaaattaagaaaaacgtgggaagaagagtttaaagtcaatataggaatacaatttagaagtaactgaaattcaaaatttaaaattaaagaatattgaaagatgagtttagagtccacatagaaatacaattagaaataataaaaattcagaaataaatataaataatattgaaagaagagcatagagtctatataaaaatacaatttacaaaaaattcggaattaaaaaatagaaatattaaaagacgagtctagagtccatataggaatatatataatttacaaataactaaaatttgatattaaaaataattaataactaacacgtatataaaatacaatataaatattacacattagtagttttgtaaagttattgcaaaatttaaaattatattgtcattttaatatatttgaataatataatgagaaaatatatatgctattatttgagagaaaatataatgatgctagccgcgtaatctgcgcgggccatcatgctagttatataaatgaaagctattttgcgagacaaatttgttaagcctaattaatatataattagagaatgtttactgtagcatcacataggctaatgctcagttattaatcgatgattagcctatgtgatgctacagtaaacattatctaattatagactaattaggcttaacaaatttgtctcgtgaaatagctttcatttatataattagttttgtaagtagtctatatttaatactctaaattagtgtctaaataattagtgtctaaataaagagactaaagttaagtctctggatccaaacactacttaatataggccatgtttagttgtttggctaatttttttttatgtatacatacacatatttaaagtattaaacgtaaactaataacaaaacaaattatagaattcgtctgtaaactgcgagacgaatttattaagccttattgatccgtcattagcaaatatttactgtaacaccacattgtcaaatcatggagcaattaggcttaagatttgtcttgcaatttacacgcaatctgtgtaattaggtatttttttatttatatttaataatccatacatgtgtccaaacattcgatgtaatagggcgaaaattttaaccggcatctaaacaagccctcaatgccatactccctctgcccctataaaacacgatccctagattcccaattcaaaattagtaataaaagtcagaaataccctcatcaagtacatcccttaataaggtttactagttgaaagaggagagagattaagcatttctcgtgtgaacgggagcagagagaggcagcaacattcaatgtttcttgttctctgcacagaaattgttttatactaggacaacttattcactcttgttttctttaaggaacagatagtaggagtttctcatgccgaaatttatagaagaaaagaattggcccagttaataagggaaatcgggcccaaaaaccgaacaagcacggttaattaaacgggaaaccggcaaaaacctatatagaaaaggaaaagaaagcaactattgagacctcacaaaagtcatcgttgccgagctcaccaaaggcaagcagctttgacaagaagaggcctactatagtgtgttgtgactcgtgaattaaacaatttcaatatccttagtggagctatcgctccgctccttaaaattacgctacgagagtcgctccatcctcaaagtaaatattatagcaaatagtttgtaagtactattttctcgttttcacataactttttttttaaagttaaacttatttaagtataatcaaatttataaaaatagtagtaatatttctaatataaaattagtatgattgaatccaacatttgttcttttgaaaataatactatgtttacctataaagttacacaaacttaaataatttgattttgaaaaaaaagaaagaaagaaaagtcaatacctcggtgaagcggaagtagtagtaaggtagttttagttgctgcaacaagtaggatggaactgaaacgttttaggattagatctcatccatgcgtttagtttgagatgggatcatgggatgaagtagactgcaattaacggaaatatgggattatcctccatggaaatgcctttctgttcccatgccatttaagctaacagggttaacgtttttctcatcccctcatagaagaattcacgaggatcacgttccgttatatggagtagcttgttcaattaatccaatccacaagaaaaagggattgacgagattaattccacacttcaatcgctataccgtatcccatgcaccacagcgtcgtagtgatcctagatcgatcttgcgattcattgctttgtcaggatgtactcctccaatcactgtggagctcaagctcctccttgccaccaccgcacgcaaaaccatcgaagatggaggagatggtggcatcgatggttaagcagttgccgagtagcttacctccacggccacgagcacatcctctccagcttcttatcctccgacacgatcatgccgcccagtgtgcttggtgcctactcgatttaaggcaattgaagacgacatcgatcttcttcttgttggtcgtctccatgcacgttgacgcccctggacgccagtgaggtagtgagattgaactgtaatggggcgtgcactgcactgcacaatgatcaccttagcttgcaagcgatggctgccggcttgagtgtgcactcgtcggccgccctctagatctagagtcgtcggttgtccgtcgaactccgccccgccatattgacgataatgatgaagcgccctaagggtggcgatgaggaaggaggaagagaagagggagagaggaaggaggggaaaaaagaagatattttttttgatttttttaaaaaaggtataattggaattgccactgtacactccccgttccccagacaggggcaaaactgtcattcgctgaagtagcctccatcacgccggcatgcccgccgccgccggcgagcaatggagtcaagtaaaccgccgccgtccgccttcgtcgacaaccacatggtacgcgccccccagcttctaccttaccccgaccttccaactttctatccccctgtggatttcgatttttcacttgcatcaccattgactccgagttccccagatgaccaacccgaccatcaagctcggcgccgacctgcgacggattaagcatttcgtggcggcaagtaggatctatgtgaggattttaggggttgggggggggggggttcaatcagagggtttcatgggtgctcgtcagagcctgttggattttgacgccatccaggagtcctcataggcaacactagttcactcataactcgtttatgccaagtttttctgcttgagagagtttgtccgcttcagaggaatgcagggatttacggatagtgactaatgagaatgtgaatcgatcaaatacgctcagtgtgactaattcagtgcatacggcaagctgctttatgttatgccccccatttaactaattttcttagctcgcatagaagggtagctgtgttcctgtttcgactatatttgccatttacacagtatgcaaatcagtcaggtagacgaaatatgcgtgtggcctgtcatcctgagtaaattactagattagtgtcatgaattccttctctggaatgggttgcttgctatgcttttccccctgtatattttctcaactgtagaacgggggatttcaggtagttctttattcactctctttgtatggccgtgctttagcgctagcctatgtgtggtttttattcttatttcttttgcggtatataccttctgtagaagatatatggtgtgtttattttttatttcgtggacctaattctgttacatgcgttgaaatgaacttccactgtggtgtcctgcttttattggctaccagctttgagacgaacattttttctaactttagttggctacttgacttatagcatggttttgtggcagtagataagattaaaactgtcttatttgaattgctatgatctttgtttcagaaaatgatggtgaactcattcttttcttctctcactgtaagatcagtattttgtgcctaaggtttcggctatttgtgtggccttccaatcatgatttcaagaggcttcacactgtcgtagaccatcaacaattgccttcaattccccccaaaaaaaaaacaattgccttcaattttctccaatcggtatccccattgaatgattgaatcacacttcaaagaaccagcgaaacttaatttggagaatattgcaaactttttttctatccttaatgcatagaagagctactgttttcctttcaaagaaaatgattgagtcacactttactaatcacacttgttagtgttgatatcagctaaccaatctcgccaatgtctgaaattagtaaattaaaccgtagctaacttggtattgatctttaaaaaaaaagaaaaggagttattggagctttccgttggattgacttttcgctttttgggatttataatatatgatagttactttcaatgtcctgttgcaatgcaagggcattcagctagtaatttataaaggatatatgccaccaaattttagtctctatgcatggtgggtccaagttcacatgacacatgatcatcagtggcatacaagaattcaacttccaatggcttaataggaaattcctctatatgcatttatataattaaacaatcaataaagggaattacactagctctgcacaaatgcatccctaacctgtggacataaattcaggtgcttagaaaaacaaaactacttttccatgttgaacatatatgcctactttgtgtcccttactttgtctgtgtaaacaatgtaggtgagctgtagcgatacttgacaggttttatgcatataagaaaatctgtttaacagaattatgatcatttcatagtaatgtcactaataaaattacagcacacacatatgaaactatgtgtctagggtgcttttcaggacttattttctgtatttccagatttgcttatagtcattttttccccttcaagataattgtttcattacatgtgtggtgacaacaaaaacgtgaaatatttaggagcaacaaaagaaaatgaattatatttcatgctgggaatttaactttgcctctcttttttttttcaatagtccagggagtggcatacattcgtttgggctcc

SEQ ID NO: 1741 - DNA, 3064 bp, Oryza sativa
  Intron number 2 from transcript LOC_Os01g58640.1 (locus LO C_Os01g58640) derived from phytozome v7.0 (chr-ID Chr1; po s 33896922 to 33899985)
cgagcctccctcttctgtgccactaccctgtcaaggtgagttcttgcatgcaaagacaaccgctttttctatgctcttaattaacttgatctaatttagctactagtagcagtttgcaccagtaactcttccactgtagtaggaggaggatttagttgccacacaccaacgtaaccctgatcaagcttgtcgatcagatctagtagtacgtatataacgtgacatacgacacttgccatattaaatccttgatgatgtccaccatgtctgaagatttccttaaattggttgttgagtccaaggaaagacagcggcgatagcaaaattaattgggacatttcgacaacgacgtgctaatcagatcgttagttgctacacggtgcagcaatgcctgtgctatataagcctcacatgaatgatcattcgtgaagcaatcctatttgtcaagagcgtcaggggcggcggacctagttgtcatgggtctacatctgtacacctaaatactttaacaaaaaattccagtatgtatcatgtatttatactatggttagatctaaataattgtgtggttccctccaccagaaacaccagtttcaacccaaccaaatcacatgtggaactgcctctgttttagtgtttgctcataggcctcaacttttaaattaaccaatggtttcttgattagctttatttttgaacgaggatcttgcttgatttactttatacactcattatgaaattcctgcgttctccactgtcaagcgtgctaatgacctatcgtcaacgtctcacatgcatgaagtatatatatatatggtaacggcacacacacatgcatgacagcatgactcaaatcagacaacctcgtaatatctactctaaaactacctcagtccacactttattcaaaaaaaaattaattcttacctataaatctgaatataacgttatctaggttcatttttttttctgagcgaaaaaaatgcccatacttatccatgttcatagtttaaatttgtttattctttttaagatagagggagcaccttatttgggtagaattttgttaatagagtcatcagcaacaactagaaaagtgctcatgctttgttataggtaaaagacaatacattacaaaatgctatagacaatatatatattttttatcaaatatgcatgttactatcacttcattgcttatttaaatatatatatattcacttgtttgaaataaatactggactattccataatatcataaattatcaatggctcatttataaaaattgcaaaaacaaagggtgagttggtcgtggcatattcaatgttatcatcatcagtggcttctaaagaagtatatactccatccattttatattataagccgtttgattcttttatgaaaattctttaggtttaattaagtttataaaaataattagcaacatccacaccactaaattagttttattaaatttaatactgaatatatttgatacgttgttcgttttgtattgaaatgtattgctattttttttctataaactagcatagtggcccgcgcaaattgcgcggctagcatcattatattttctttcatataatagcatatatattttctcaatgtattattcaaatatattagaatggcaacataatttaaattttgtactaactttacgaaactattaatgtgtaatattcatattgtattttatatgcgtgttagttattaataattttaaatatcaaattttagttatttgtaaattatattcctatatggactctagactcgtctttcaatatttcttttctttaattccgattttttgttttctgtgaattgtatttctatataaactctagactcttctttcaatattatttatttttaattctgaatttttattattctaattgtatttttatgtgaactctaaactcatctttcaatattctttaatttttaatttcgaatttcagttacttctaaattatattcttatattgactttagactcttcttcccatgtttttttaatttcgaattgtagttatttgtaaattgtagtatttttatatgaactctaaactctacttctaattttattatgtttattctgaattttagttagttttaaatttcaatatggactctatactctacttctaatatttcttatttttaattctgaattcctattatttcttaattgtatttctatacggactctagtctcctcttccaatattccttatttttaattccgaatttctattatttcttaattatatttctatatggactctatactctacttctaatattccttatttttaattccgaatttctattatttcttaattctatttctgcatggactctagactcctcttctaatatttcttatttttaattcggaatttctattatttcttaattgtatttctatatggactctacactctacttctaatattccttatttttaatttcgaatctattatattattaaaggaatagaaaaaggagcctccacgttcgctctcatggcctagaaattctcacattaatcggaaatataataagaaaataatagaaattaggaattaaaaataaggaatattagaagtagagtatagagtccatatagaaatacaattaagaaaaaaaaagaaattcggaattaaaaataaggaatattagaagtagagtatagagttcatatgggaatttaaactaactaaaattcagaataaacataataaaataaacttatttttaattctgaattttaaccttttctaaattgtatttctatatgaactctgtttttctttttctccgattaatatgagaatttctaggccgtgagagcgaacgtggaggcttcgttttctattcctttaataagttaatagattagttaaacttttgactaagaaaaaaaatcaaataatttataatatgaaacgaagggagtagttgcgatccagccaaaattttaacggggccgggcgtgcaggcccagtacctgacaagcgacccgggctacctggg

SEQ ID NO: 1742 - DNA, 2848 bp, Oryza sativa
  Intron number 1 from transcript LOC_Os07g19060.1 (locus LO C_Os07g19060) derived from phytozome v7.0 (chr-ID Chr7; po s 11281256 to 11284103 reverse strand)
atcggcttccaggtcggccaccagctcaccgagaggtaccacgcacacccacacaaaccgcaaacgattctctccccctccccgtctctgtctctcagtttctttcttggatcggatggatctgctgcttcgcccccctccccgatccttccggcgacccccacccacactgacgaatccctctcgctcgtcctactagcctctcattcgattcttgttgacgccgatacatcttgaaacctttgcttttagttgacctgggtgagggtttgttaatcagccttgaccctcatcgcggagcacttcatgtctttaggagcagggcctttcctgcaatggaatgtccaccttatttccttgattccatgatcctcgattcttattcaatttgtacctgaactcgcagaacagattctcattcatttacgctgctcgccgttgaattacaggggctataaaatagcctgcacaagcacatctgccttgtcaaggtcgatgtggctggtgatgctaaaggaggaatcttttaggataacacatttcaagattccaatgaaatctttttgttttcaacttcagtagattgagcgaaactcaacttagatgtctatcatctcgaacagggcacttgtttaaccatttactgatgttgtttataactttgtgattgtaaacggtttatctcatcatgaacgccattattgtacttactgcatattagtctttatcgatacatctcataactggttgccatcagcaccaaagctctgccagacaggggcataaatataccagaatattttatttaaagtagtacaattcattttactgcgtacctgtcttttagtagagcgttttggatttcagtacatcctcaaatgcatagtgcacaggtttgtgtgaatctttaaagatcttgatggcatagagcattctggagttaattactcccaggcattcttcttgaaattaatgatatatttcctggactcgtggagttcctggaatatttaacttcgagttcgatggactcaactaactgaataattgtttaaaggaactttgtagtgatactttggtttgtatcattgtatgcgacataaattgataaatatgcttcttttgtaaagacttgggattttattagcatgatacatttaaaatacacacattttctcatgtcaatgtatttgatcgttattcatatatttcttcactaaccattggcgtccatagttaatcctcttgtgcgtagcacaagatatgtaagatcaatgattgagtgcttgtttgtgactattttctagaactcttagcttttggttgagctaagtgtttgttaatcagatttgactatagtatcaagccttaacctcactgtagaaaagttctggtctctgggaacaggaccttgcctgcaatgaaatttccaccttattatccttaataccaaaatatggtggtactactttaatttgtacctgagcctgatgctgaaaaggttcttactaatctaggccacttgccgttgaattacaggggctataaaattgtctgcagaacttactgaaaatgctgatgtggtgtgatgctaagttgcaatcagtttagtttcgcaagatagtgctaaattccactgatctttttttttttacatcagtagattgaatgaaactgaacttggatatccattcgtctcgaacagggcacttgtttaaccattttctggtgtttaactgtttatacaacttcatgattataaacaatttatcccctcgtgaatgacattgttgtacttactgaatgttagtctttaccaatagttcaatacatctgataattggttttcatcagcaccaagctattccagatagggtcacaaatataccatgtgatcacaagctcacagtcatacaatattttattttaaatagtacaactcgttttactgcatacctggtgttagtgcatacgaaaacatttgccttttgggctgcagtatattctccaattcatggtgtacagattctgagattcatatgatatagctttggagatctagatggcatatagcattctggagttaattactccctggcattcttcttggaatcaatgatatatttcctaaacttgttgagttcctggtatagtggtatacataactttgaaggactcaacaagctggaacaattgttaaaagtaactttgttgccatgctttggtccgtatacagcagaggttgataatgcttctttagtaaagacttgagagttcattatcctgatacatttatcatacacacattttcctgtgtcaattggtttggccattattattaaattcatttcttcagtaaccattgacatcctgagttaatagtcttgtgtgtagcacagggtatgtaaaatcaatgactgagcacttgtttatgactattttcttgaacctttgagcagataattttgaagctaattataaaaagagttcaacccgaacataactattcacaatgttcatagttttctaatcatttgtgaaacaagaaaatgccggcaattttaattatagtttattacttgtatcatttaaaaaaaatgttcagatacgcagatgcttttgcctctttttataatatgaattttgtttttcattttatttttacagctagttaaatttgttgtctttttattttccttggccattaggtgattgttttgagaagtataatactctatagcacaaatataactactcactgaaatatttgcattctttatattggttccttacctccaggccagtgctgcaaagttaaccaaagtttctgttcaaaatcagatatact

SEQ ID NO: 1743 - DNA, 2035 bp, Oryza sativa
  Intron number 1 from transcript LOC_Os01g56110.1 (locus LO C_Os01g56110) derived from phytozome v7.0 (chr-ID Chr1; po s 32302920 to 32304954)
cggggcccgaccgcaacgtcatccgcggcaccacggtatacacacgcacaccccaggccagatccggtcctgatcgatctcatgcatcaatcacacacgctatcttctcatctcttcgatctccgtcgggtgatctcactcgatctgtccttgatttacatgttctcgtcctcttgcatcatgcatgctttgcttccgcggcccgggtgcaagtgaaagagcgtgggatcatcgattttttgctttgctgcgacgaggttggcttcttgcgttgttgcatggtggacttagctcgtagcatcgtgttgctcggcggcgcggtgggttagtttctgttcagtactcgtcgtcgacctgtgaccagttgaccgcagtattagttaactcttaagtcttaactaagtgatggttagagcttgattagaaatggtatgcttttggtgatatgttaattctgtctatatgcgtccttggtatcataaatttacgtgtagctgcgaattacagctgacctgtgtttgaatcataatttagatgtaattattatagattagtggtaagagtatgattcgttctgctcatatacaattgattgtatttaaggcattgtaaagttatttttagctctgacgaaaactttagttcttactgttaatttctttctttgtgacttactttgctaatgtggttcgtcgtccacaggagtaaaaggtgtcccttattattagctaactgggattgtttgattttcacgtgttgtgcccaagtgttacgaatgaattacattatacttttatattaaactagcatagtggcccacagaaattgcgcagcgagcatccttatattttctcttatataatagcatatattttttcttattttattcttaaaatatattaaaataataacataattttaattttgtactaactttaccaaactaccaatgtataatatttatattgtattgtatatacatgatagttattaattatttagtatcggagtttggttatttctaaattatatttctatatggagtttagactcatcttccaatattctttattttttaattctaaatttctattacttataaaatttattcctatatttctcattttaaaatttagaatttcagttatttctaaattatactcatgtgtggactctaaactcctcttccaatattccttttttttaattaggaattttctttatttgtaaattgtatttttatatgaactctaggcttttatcccaatatttcttattttttaattatgaattttcattatttctaattgtatttctatgtggactctaaactcatatttcaatattctttatttttttatttctgattttcagcaacttctaaattatattcctatatggactttgtactcttcttccagtatatattttataatttcaaatcttagttatttataaattatatttctatatggactctaaactctaattttaattttattatttttatttcaaattttaattaattctaaattcctatatggactttatactcttcttccaatattccttactttcttattccgaatttcaattatttcttacttgtaatcctatatgaactctatactcttcgtctaatattctttattttttcattccgaatttcagttatttctaaattgtatttccatattgactctatactcttctttcaatattcgtttttattttgaatttcaattattactaaattttatttctatattgactctatacaccacaaatggacctttaatttgatatgtagctagcctgcttgcgtgtagttgtagtttacgatcgatttgccactcacatggattcacttcatgtaggaccaccaggcctcgcgcgcgcgtgtgtgtgtgggtgcgcgcgggtgtgtttgtgtgtgtgacacaatatatttttcatacttactaattatattcgaacacatgagctgttctctagtacatacaatgttgatcaactctactggttttttccccag

SEQ ID NO: 1744 - DNA, 3199 bp, Oryza sativa
  Intron number 1 from transcript LOC_Os02g24190.2 (locus LO C_Os02g24190) derived from phytozome v7.0 (chr-ID Chr2; po s 14005465 to 14008663)
gcagcctgctgcttctgccgcatcctcgcaggccggtgagcaccctgctcgcgtcatcctctttttaatcccttatcttctctcctagatctggaagcttttctctccgccttagttccacaaacaatagatttgggggttcaactgaaccccatcatgcccccggttaggtcaaagattctgtctttggcgaattgggaggtgaattcatgggtgagccgacgagcttcgtcgtgatttcctattcaatttggggatcttctcgctgtttgacgtattggccgtatggcatatgcagaagtcgatgtgaattcattgcttctccaccttttacaacgatatcttgtgggctagattttttgtcgggctgggactagcttgtgtgtattcttgattttgtcttcaaagatgttatcctaaaggggtggacaaactgctttgcttttgtcgagaaatttggtcagtttattaactgggagttggttgaaattacacccaaagtctgccaacttttagtgagcgcagtttgtagaatctattatttacttggtcaagaagattgtgcctatacataaatagttactgctagttgagaaatcttttctacattcagttaagcttggatttggatgagatattacaatcttctgccaacaaaagacatagttttcagcatgttgtttttgttgtaaccagaatttctatactgtgaagattgtatgtacaacagaaaatttctcttatgccgcaaagctgcatgccatactcttatttgccacatgatttgttggctttgtaaaaatgccacaaagttcagttgtatactcgtttatctgccacactttaccattttaacccaccaaatgtgcaattttcccttcttctgcaccctctttctctcttctatgagtttgtgaatggagcttggccgcacgggctggtgcccactgtgtttggcccaacagaaaattatatcttaaaaatgtatgtctctctatgggcttttacacccaggcctaggacctaggtccgccactgcggccgggagcagggcgcgtggaactggctttcaggaggaaagccgtgcgcggagtaggtgggctgcacagagccagttgctgagggcaggacgcatattgttgtgctgctggcggccagaggcggaggtaatgctaaggttgaagctggctactggagctagggtgtcatagctcatgccgagctcaggtgcacggagatggcgtgcgcgttggacatgcaggagtggggcgtcggacgtgcaggagtgggctggctgccaggtctggctcaaactttggccggacagagctaggtctgtccttgctggacacagagaagaagggtggggataggacaaaaatggagaaggagaagaaggtgggcattaatttggaatttcacactgtattgtggtaaaagaatgaattggtactcaattttgtggcattttagtaaaggcttcaaacttttgttcaaaatgagagttttcgcatccaactttgtggcataagagcattattctctttgtataatggaataccgttaacttgtctcaggtgcaattgttattaagcagaacccaagggccgtgtaccacatccttgaaattgtgtattgtctgcttctaaccggaaaggcaatacatgcgaaaactttcaatgggtaatgtgtagttgcacattgatatatgggaaaaacatgcagtggatattaaacatgggaaaactatcgcataaatttctaaaatatctcacatacaggaaggttatattagacaaccatataaaatttcaggacatatgaaattgataaacagtgaggaaaaaaagagtattctttatttgtgtttttttctttgctatttgtaaacttaatatctcacaaacaaagttgagttttatcttgaattttgtatgcccatctaatttcatatagctatcattgagttctttttttcaaataaaactctttttgagaacttatattctgtggtttacatgtttccgacctagttaaacatttcaccatgtatttacactggatatctcggaaatctcacatcgtactcctatatccacattgtctcatgtatagttgtcgatagatcccatccatacaatgctccacattgcatggcaacagatcagaatgtctgatgtttgcacttcagagaacacaaacaacaatttaattggcacataagagggcacaaacaacaatgaactgaaatgaacagacaaatcagtaattgcaagatgtttgcatagaaatcttgaaatgcaactgataagtgattatggttacaaattggaccatgcaagtaggctttagaatttctaagctctgctcagtgctattttccttttattagtgcattgaggcggatcaaactcatctacatttttggtaaggttttggaatttagactttggaattcaaactcatcagcacacattgatttcctctggagtatagacgcttcaatgccggatatcgtcttccattaggagtacatgttcaaaagattcaatctcgtggaattcacatgtctgtacaggttctgaacaaaagagttttaaatggaaggaaatgtaatgaatataactgcacacagcattttgatgaatataaatcagtatccgtgactcttgattagttatggataaaattgaaataggtcatcttatggatttcttttaaagtaaaatcatcagatgattagcattttaatgatgatgacatggcttaatatgatggctcatgttatactcaaaaatataggggagagattttctgggatggaatacattagtatcttgttataccatgtatgttaatttgattaaaaaatatcatcttcatcaatataatttattttcctttgtggctatgagaaacttttttaacatttctgttaatttcgttctctgccaattgagggaaagggaggtaaaaatgttcacagtagcatggtgaatgcaactgtagcaagctatcaaaggaatagatcatgtaaaacatgcacaatttagctataatctgtacatattggcttaaatttacattcataatgttcgttgctcagtatgtggattcatattgtagatatttttattatatacataaatttcatggttctgcaggctgttcagcacaagcaattcggaagttctgtctg

SEQ ID NO: 1745 - DNA, 2159 bp, Oryza sativa
  Intron number 1 from transcript LOC_Os03g45920.1 (locus LO C_Os03g45920) derived from phytozome v7.0 (chr-ID Chr3; po s 25941262 to 25943420)
ccgcaaggaggccgagaactgcgactgcctccaaggtaacgtacacgtcgattttatatatacatatcctcttgttctttaaattcactgtgtttcgttaaaaaaagaaaaaacgaatccttgcgttcatggcattcctctgcattttctctgcatacgtgtttctcgggcctctgtaaaccgtcgctgaaaatttagaataggatcatatgattctttaactttttttttggcaagatcattttagacggtggcatcctaaaagtggacaaggtttgtactttctgtgtgtatttttaggtaagacagtattatgctacacattattagcctatcaccgcagcgtgttaagatccgcatgaaaagaatctggagttttttttttcttttgttagacaacagagtaatacgccaacttggcagcattgataatgagcaatctggtatgaattgcttgtgggtctcagaaaaaaaataaaataaaaatgaattggtggttccagttatgagagtgtgaattgttcaatttgaggagcaaaacaaaccagtagtgctgcaaatttcaaggatgaatttcagtgtgcaaacttatcataccattttaggttggatttgaataggaataccagcagcaccagttgttgaacccaaatttggacatacatggaaaagaccatacatgatacatagtagtactggttggatcgggttaatcagacagaagcacaacatctttactcgtggttgaaattgggaatatcttcaaaaaaaaaatcgaataagatgaaattattattttcagtccccatcacattacaccacttccacctgtcggaatgagacattcatcctgtgtcaagttgatccattggcatgatgggaaatcgggatcaacacaggctagaaattgaggcgccatatattgttggtttaaatttcagtagttctctgtgttagatctgtaaatcttatatcgagttgaatcaactgcttaaaaattggaacactatggatacatgttatgaaggttctaaaaacttcaagtgcacaaaaaattcacagaatacttgaggtacagagtactgcttatgtgcgctgaatactatttttccctctatgcataaaaggtgaatctgactattatgcattcattcattgccaagatgtaagatatgcatgttaaaaatgttacccagtaatcagtaattatcattgttttcttgaaaatgcgaggtacaacgtatgcccaaacgaattgaacccagcaacaaactaaaaaaaaaaatcccctaactgctactttctggcgaatagaattgtcgttgagagagagttttcatcagttcctcaggtggcaaacaactggtattgtcggtcagatgcgagttttcggtacagaaatacatcaccatcgcatctcaccatcttcttttgccggtgaaggttcatgaggttatcatcatcacaataataatgtactactagtagtagaaaaacaatcatactgtgactagtgacaatgttgtacgacctaacacaagaaagagtgaaggaggaggaggatgtatcagctaatggaacagagccgtcggtggtggttacagcggatgagacactcagacaggctgttgccagtctctggtggttgggttacatgatagatcgatggatggattatattagtgatgatgttctgattacttgcatatgtacttagcatgattgcctttggacgtatttgggagatggattttagtgcacgtaatcatcagaaacagaatataaacacattttcggattcaacttacatattattagaaacacaaattagtactacaggaatatgattagtccggagatctgataggacagataatgcggtgctagtttcttgaattgtttgcactttcatgactcttaacaggggcatctgaactttagctcggttaaatgtctaaacctcaatgtacagtagagttcagatcattttcattttcagttaagatgtctcatatacttatcctaatctgagtaatgtcctataactactgatggatagttggtttgttttgatacggagggagtatgtagtaacgtgagtgacatgcaattttgtgagtgcaggattccaggtgtgccactcgctgggaggaggcacg

SEQ ID NO: 1746 - DNA, 1795 bp, Oryza sativa
  Intron number 4 from transcript LOC_Os01g62420.2 (locus LO C_Os01g62420) derived from phytozome v7.0 (chr-ID Chr1; po s 36129443 to 36131237)
ggcgaatcaagtgatgtgagttctttctacattgtctagaaacataggattttttttcatgtcagctttatagcaactagaatgcgggcagctactggtttagcaaggccaggaacttgccaagaatatctagacaatggtcctattttaaggtcaatctgcaccgtccctaagctagcataaaagactgttgagttactctgttgagttttagccaagttagacctataaattgggttatttcatcaagctgctggaaattctgtttgaagctcatgggattttgatttactatgttgttactaacagttcttttcaccattcatgacagtttgttgctgacaaaattgcgtacgcactttcccaaggtatcaaggtaattgcttgcattggtgagacccttgaacagagagaagcaggaacaacgatggaagttgttgcagcgcaaactaaagctattgcaggtaatttcacttgctattcttcaagttaatttcttataaagttggaacttcacccctaatgttggaacaactgaataagtgcttccttccttccttatgaagtaccttgtgctgttgataaatccagttcttccaccttgaaagctgttaaacaggaatgctagtttatatttgcagaatagaatactgtgattgcttttaccctgctaaatatccaaaaggtatctgtagcttgtgtacaggtttatgatgataacggtgtggtcaaattattaaatgatctatcatttgaactaggaattatgtcatacaagaaacacatactttactactatgagccttttagttattgaagaaaacacatcctgttttgattagtcacatccattttcgtttcatttgttctttatggcttttgtggtccattgtactgtgctgacatagaagtcttctcatttctccacccctaactttttgtcttttttactcgtcatatttttcagagaagatatccgattggaccaatgttgttttggcatatgaaccagtttgggccattggaaccggcaaggttgcaacccctgctcaggctcaggaggtattccttctaacatagagcaattacatcacgattagcatgttcccttcacatttatctgcctcataaaccaatatgggttttttcctatatctaatgtctttcttgaccgatgcctggtacctgattctgcaattctgttcattcgaattatttgaaatatgcatgacattaggttcatgatggtctgagaaagtggcttgtgactaatgttagtcctgcagttgctgaatcaaccaggattatttacagaggtatacctttataactataggactatgaattgaaatgtaaccaagattttgtttagtagtgatgccaattgctaatgtacaaaactctccccacttccctacgattaacctgatcccttgtcttcgcatatttgtcttctacaggctccgtaaatggagcaaactgcaaagaacttgctgctaaacctgatgttgatggattccttgttggaggagcttcattgaaggtcatattcctattcctttattatcctctccatgatattgatagtagcatgtagaacataagcctagttaaacaaaacaccatttgaccagtacaatccttgtgcggttgtgcctagtagcatgccaaatatttgaatttaactctatacattctcacataacatttcaggctttaccgttgtgtatattactgatgattactttttttttctgcagcctgaatttgtggacatcatcaagtctgctaccgt

SEQ ID NO: 1747 - DNA, 3981 bp, Oryza sativa
  Intron number 2 from transcript LOC_Os12g17550.1 (locus LO C_Os12g17550) derived from phytozome v7.0 (chr-ID Chr12; p os 10060720 to 10064700 reverse strand)
ggcgttcagatctgcgcatccccggcctcgtggaggtcggatctggcggctagcgcggtcggtggcggagctaagggaggcgttggtggcattggtggccgggaggcgggggaggcgctggcggaggtggaggcgtaggtggcggccggctagcgcgggaggaggcgaaggcgcggctggaggcgtcgccggcagcggcggcggaggtggagaccgctgccgccgtcaggcctcggccgcctcccctcccgccgtcggccgccaccgcgccacggctccagatccgtcgtccgccaccccgcttcccctcgcccctgccggatcgggcggccgagccgccgccgcgcctcccctcccgcccctgtcggatctggcggtcgggccggcgccgccgcgcctcccctcccgcccttgcacaaagaaagagaggggagatagagaagaagtggaagagatagaggagaagtggagaagagggtgccggccgaccttatctcctcctatgggccccgctgggagaggagatatatatatatatatatatagtggcagaagtcatctcaaacgggctaagacttaaagccgtttgaggtgagtaaaccttacctctgacgggccgtccggctgcgatccgtcacaggtaaacccgtcacaagtgactagttacctgtgacgggtcgcagccggatgactcaccgatgacggcatcccgtatgacccgtcaaaggtgacggtcatcagtgaccatttcgtttgcctatcacagttatcccgtcagaggtgtgaggatctggtgtagtgatagtttacaccgttaactttttgttacacgttttaccattcgtcttataaaaaaatttacgtaattataatttattttgttgtgatgccatctattaggaaatggagggagtataacgcatatctatcgcaccatggcccccatcctagtcggaaactaggaagaaattaaaatttactcctcctacgactcctattcggaaactggtaatttgggcatcgaatcaaaccagagcggatagatcgcagagggtttgctcctcgtaacggattgcattgctcgatccctccccggcccctaccaaattcacctccctggccgatagcgccgcaccgcagttatccacctcctccggccggccgccggccagtcgaccagtcgagtcggaggcggagtgcatcgatagatcgatcggtttccatcggaaataatcggagaaggtttcgtttccttcattaacccggatcgatcgggaggaatgcgaggagcgtgcgttgggtacgtgaggctggaggagaggaagaaaacgccgccgccgccgccgcagccggagatgatccccgggcagcatacggtggagataaggaggatgatatacctgacgatcaagctggccacaagcttgctgaaatcaagctcgagcctgcccaagaggtagcaactgcactttggttcactcgtttcttctttaattattagaattgtctttcagtttttattatggtaactagcagattgcgcggcaaacatcattatattttctctcatataatagtatatatgttttctcaatatattattcaaattttttataatgacatcaaaattttaaattttgcaataactttacgaaactacaaatacgtaatattcatattgtattttatatacgtgttagttattaattatttttaatatcaaattttagttatttgtaaattatatatattcctatatgtactctagacttgtcttttttttttaattctgaattttctataaattgtatttctatatagactctaggctcttcttctaatattatttatttttatttctgattttttattatttctaattatatttctacgtggactctaaactcatctctcaatattctttaatttttaattttgaatttcagttacttctaaattgtattcctatattgactttaaactcttcttcccatgtttttcttaattttgaattttagttatttgtaaattgtatttttatatggactcaaaactctacttttaattttgttatgtttattccgaagtttagttagttttaaattcctatatggactctatactctacttctaatattccttatttttaattctgaatttcagttatttcctaattgtatttctatatggactctagtgtcctcttctaatattccttattttttaattccgaatttcaactatttctaaattgtatttctatatggactctagtctcctcttttaatatttcttattttttaattccgaatttcagctatttctaaattgtatttcaatatggactatgatttttctttttcttcgattaatgtgagaatttctaagccatgagagcgaacgtggagactcctttttctattcctttaataatataatagattttgttaatttccttattagaaaaacaatagccttgagccaattaacaaagacaattctaataattaaagtctagctcaaggcctagcacaaagagaagcttagggtagctaggccttgagctagatttgtctactaaactagatagaaccccgcgcgttgtcgtgggattttgtgtacagtaatatattataatcaaataaaaatatactccaaagagaagtctgaaattatagttaaaaactttataaactctgttgtctagtagtactaaattatgaagatgtatatattttcttttctaagaaacatgttcctagatgtgtgtgtctatatatttcaaccgatggtaaggcaaaagaagatatcaaactccaagggtcggtgagtaatgatgggacggtggtactcataacaatagaacggatatgtactttgtcaactaaagctcaatcgttgtcattaaggaggccaggctcttcaatcgccttagttgatttgtggatggcattaaggagggttgttcaatcctacttcatgcatgcatgttgatgaaacgcccggctagcaaaattgtggcatcgaatgcattgagtgcatgatggaaggaataactaaatgcaagctacaaaacgtatcacactcaaaagtaaatctgagctgtccaagataatccaatggtgaatagtgaaatggctttgagataatctggaatgttggatttcaatctaatggctaaaaagaattaaggtgatgtagaagcaccacaagtgagaaaaatactaataactatacttagtggggatcaactatatatattatatagatatagattactattagattctctcaaaactcagtgaaaattttgaaaaagaaattaaaacaaaagatataaacaagttcaaccccccccctatggagatggattcgaatcactccggtggacgtccacagttcccctctactcttgaagatttctttctctgtgcctgatagcctagtttctcaaaattgatactgtactactacctccgttttaggttataagactttctaacattgcccatattcatatagatgttaatgaatctaggcacacatatatgtctagattcattatcatatatatgaatacgggcaatgctagaaagccttataatatgaaacagaggaattactagttagttagtacttggtcattaaaacactattgatatttcagtgcgtggatacatatcagaacaattttgtggtgatactaatgcatgatttcacgaaccatttgggaagccagctcctgaaccccagatgataatttgtcaatggaaaaaatagtgaaccaagttgttagtaataattgttaagtaacaatactaaatactagtactaactacgtgggcattaggcatttcaggttcaattgacttatttaaattatcaggtagctgattgatttctttggtccttcagtgctgaaatttgcatgatatggtttttcccctatgcatgctaactgttgcatgtttcatttctcag

SEQ ID NO: 1748 - DNA, 8138 bp, Oryza sativa
  Intron number 2 from transcript LOC_Os05g11414.3 (locus LO C_Os05g11414) derived from phytozome v7.0 (chr-ID Chr5; po s 6448970 to 6457107 reverse strand)
agccgtggccgcctctacgagtactccaacaacaggtactgcattcctcttcctctcttcagctctagaaacctaaattaatccatgtgatatatgttatcttgtcctaattggagcaagttagttgctaccttttcttgtgacaaggaggaggcatatatatggtgatgtgcgtccatctcaccttcttttctgttactacatatatgtgcttcagttaattaactgtcttgttgttacttctgtgctttcttgggggtagtagcaactagcaagtgagaaagaaattgcaggagtttctttgtgtgtgtgtgatgatctgtgtgcttgctgatgtggtgtgcacatttctggtttcttttgtgtttcctgtgaggtgagctagatgtgtagatagattcagcacaatgcatactttgtgaagcaagcatgagcatgtacatgcattcttgtgagcttttcttgtgtgtgatgggtgtctgtgactgtgtgtctgtgtgtgttgctttggcttggtggtcctgttcttttattgctccatttatgttctttcctttctctacctctgtctgtgtgatgaggcttgcttagatccttaatacctcactgcatatagcgatcatatattatattttctctattggctatgcatgtgtgcagtaacttgtaactactagtaactagtatgcaagattgtgggcatgtgaggtttgatgttttttttttcagaggtaaaaagtggtgtacacgagtgatgcacacattgatcattcatgattcttttgcatcatcttcttcaattggaggttagttagggttagggtttcatcacatcctccatctctctctctctctctctgcagagtgctgtagatgttactgttttcactagtcatttctctgttcatttacagccatgtgtggtttcctgtattaacaggatgccccatcacgagtgctctgggcccctagctacctatcctctctgacaccggcactgtacttctcatgaggtaccgaacacagtgaagtcagcagtaaataggaaaaacagtgcatgaattacccttttttttctccatctataaggtttggactttcatatgtatttttgttactacctaaggtttacagattagtaatttgtgcaatatttttagtagagaatcttaaggatttgttgtgcttctttttccttgtgcgattacagaagaaatacacgcacacatgacaccacacacgcagaccacactcacacaagtgtgtgcttagttatgcctatagttgttcagccaagaaaggataaagagtaatttatactatataatcaggatgtatgccatgataatacccttatgttctaaatcctaatcccatgtgaaaaaaaattatgaaatgtgtgatcccctgtgagtctgtgactacacatgaatgaactactagtagtagagatgagtaactagtactagtagcaaaaagatctagaaaaaaactctaaactagatcatgtatgatttgtccttcatttttaaaattacgttttaataacccgtcttggttaagaaaaaatatctttacttaaacaattaaacttcatactccaaatgttaataccctgcacaacactatctagcttagactctagtatcatatatatatatatatatatatatatatatatatatatatagtaaatttgttatatatatactcctgtattatcttgttggattacgacggactggtcaatacgtacgatagagatattttttgtgcatttcttaaaagtgatttataggactcccattaatttaacagtgaattttccttgttttgatctattgagtaataaaaaaattggtttaacaattgacgacttgtttggacaagaagcaaattctttgcacagcagcagcagacaaacacactctctcagtacgtgtgcgtgaggctgcaagtgtaaaactgtacactgtactgtgcagaagcaaaaattaaccaatggcacggtcagtagaatacgtacaaatggcagcgtttgcatcgggagactacaaagagaaaaaggctggtttacccggtcagaatggttaaggtccctgtctgcctggctggctggctaggttggaccgtagctgcttctctctcttgcattggctctctctttctctctctataagccattggtcacttgggtactcatatgattcactgtttgcagccagccaatcatgatcatgctggctatgtttagatccaaactttagatttaaatttctaactttttccatcatatcgacctgtcatacacacataacttttcagtcacatcgtaccaattttaatccaaactttcaactttggaaggaactaaacacagccgctgttgtcaataggatgctcgaagatattaaggttttgtaattcgttggtaaacattactacaagacaatgctaataaaatattcatttaggaagaattttagagaagtgttgctacttgttcacacatgctccatgttaatttgttccaatgagcttgcatctttgtatttttctttaaaaaataaattgttaagaaaatcattgttggtcaaatttgcttggaccatgatttcttcacatgttttttcttgtttaaaaatgtatccaataataccgttcctatgtgtgtgagagatagacagaagctgacttgcattgcttttatattggctcttgggaatagttacttggcactattatacgtatgtgacgtgacatttgctctgatcttgcctttgagaattcatgtttggtcttgacgaggaaagggaaatgatatgatagttttcttggttagatttttgtatggcactttattgcttatgggcatgcctgagattgacaaagtgacaaagtgttggagtacgaaatgtggccaaatgatcttgtctgtcaattttcagcaggagtacgtctttctataggaactttgtgatatcctctttggtttgtactctgtagtagtctcgatcagataggggtgtaaatgattaacccgtgacctcactcataagtaaatatataaaataagttacttatatgtcaaaataagctgtttattttattgacttataagtaggtttgtggttagccactaagtacacccttaatctaggacaatatcaaaggaaaattagttacacatattttgtactatttcaattagatgatgaacgtatatatactttgcgtatagtagtagtttttcttgtatcaagagaggaaaggacgttactctgagtcctttcttgaaacgtgtacaagatctatgatcaaggcatatatgcatagtttttatgttgttagtagaaaaaaatggctaagtaattttgcaaaattttttttggctaaaataatgaagacaactagaaaggtagcccgcgcacatgcgcgggcatcttctcgtataatgtgaatgaaattttattatgaatatttatatgcaggtggctttttattaaaatttcttgtattatattctaaactaaaattaaacttattttgtgtgctttgaaagctttttctatttttataattacccttgcaacatataaattctaaaataaaattacttgagatcatgtggttttgaattgatgagaaactattgtgtcgaaacaatggaggtggttcctatgataaaatttagggtattttaaatcgccaaaaggatagcttacaacctcaaaacaaattcaataatatcattttttttgtttgattgtattttaatatatatatatatatatatatatatatatatattcattctaaccgtccttgtaaaatgtttgaatttttctatcaagtattggttttaaatccaacaaaatttgttcaattttcaatttatttcatgcccatttttattttttttcttttggatagttttattctatgaatcatccttgaaatgatttgatctttgcaatttgggacaaaaatatcagaacacataacctagtatggggtaaaggtatacgttctaaattttctctcctgaaatataaaagtaatggtcataatgtatttagcgaatcatcactaaagtgtattgtcttataacaaatacatgtttctagattgttctacgtcaagactttacaatgtactgtagcaagcttaataaaaataaataaaaaaaggacatggtcattaattcctatatggaactgacttgatttattgctaaagccactgcaaggttgttccacggttaaaatccttaggtacaacccacatgcttatcgatatgatgttcaaccaaccacaccttcattttcaccctattgtctatattgctagatgaatacctgctatgattagtgacttcgtagatcatatgtgtaattcggacgctatgatcatctttcttaaaaatatttatctatgtactaaaaacattattttgaaagtatcaaggtcaatttgtataggcatgttaagagaaattaattaagttggcagaaagtctttagatgcctaacatgatataagtaataaatggaggtccatttgtgtttttttcccatatagataattttaattttaattgtcaaggagataaaaaatagagagaaaagaatggcgcacgctgtacatgggcagggagggagggagggaggtttgggatgtttttctaaatgattaatctaacagactaaaataatgtgtcagatgtttatgtcgaaaccgatggtcggatgttttgttttcttgtcagaattttattaggattttatttgatttaagagaataacataatatcttaagagcatttataagatgtgtaatcgacttttaacaccgtatgccgcaaaggagggagggaagaaggtttagggtgttcttttttttttaaaaaaaaagatctaatgacctaatataatgtgtcaattaatccattgaaaaaatgtgtccatcgatttatgtcatatctaatggttgggttttttttttccaaaatttctaagatttttctctaatttaagaatgccatataatagcttagaggcattaataatatatttaatggattttaacaccgtacggggatggggagggagggaggaagagaggtttgggttttttcttattaaaaaactaacaaatcgatagccaaatgttttgttgtttttttaatattttctagtattttatttaatttaatagcaccacgtggcagtttagaggcatttgtagaatatttagagttacagagcgagagctgctagacctaataggtggaggtctctttgtgatttttttaatgtaaaaataattttgattatgatttctcatgaacatagctcgttggtacgtacgtgacgggaggtttggaatgcgtgctttttttaaaaaaatctaaccttctaatataaaaataatggatcaccgatttaaataaaaatcgatgattggattagagtgcacttgacgacctaggagtgtttgtaaggtaccacttgacgaattaaaagtatttgtaagatgtttaatgaacttttattatataattgtctttttttgaaatttaagattttatttaatttaagtatgtgatatagtagcttagaggtgtttacaaaatgtttaatagattttaacactgcacaggggtggagagggagggacagaggtttgggattttttaattaaaaaatctaacaacttaaatccatcaatttaagtagaaatcgatggtccatcgttttgtattttttaagattttttaatactttctctaataatttaatagtaccacgtagcgatttagaaatagggagagctgctagtcctagtagttggtctatttgtgtttttttacctgtaaaagtatttttgtttttattttctcattaaacagaaaataacacatgaatgaaaatatggaaagacaaaagggaagtacgtacagtacatacgcacgtacgttcggcgttacgtacgttggtttcttttttctttataaataaaatagatctaactaaatccaaccatccaaaacaatgggtctaccaacataagtaaaaatagatggtcagatttttcttatttattatggtgccacttggcgatttgagagtgtttatagggtgtcacttggcggtttgagagcgtttataggaaatttaatggactttttagtatataatagatagatagataaagtggaactcttaggttatatggtttcctagtgttcataatagcaaagacattagctatttggtaaatccatagaatactgataataacttattagtaccaattacaatgacttcagatcagacttttaagtcctgttatagctatttatatatgcagctactccctccagttttataattcttaacgtttttgacagtggcacgaacttcaaattatatctttgacattgtttttctactataatatatacaataaataaatgtatgttttacttttattgtagaactttgaaagacaaattcatatatgtttttcttgttgttttaaactaaatactttttaaagttattgatagtcaaagttacaaaagttaaaccttgtccaaaatgtcaagaactgtagaaccaagggagtacaatttaagcagctattttcagagaattccttatgcttacatgtatgatgttgatcgattcccataaaaatattctgattacatgaaatcctaaggcgctggttaaatctcaccccaaaatttttcaccctatcacatcaaacatttaaacacctgtatgaagtattaaatataggctaaaaaataactaattgcacagattacgactaatttgcgagacgaatcttttaagcttaatttctacatgatttgacaatatggtgctacagtaaatatttgctaatgatggattaatttggcttaataaattcgtctcgcagtttataggcggattctataatttattttgttattagactacgtttaatacttcaaatgtgtgtccgtatatccgatgtgacacgtcaaaactttacacccctgaatctaaacacccccgaacagaacatatttatttctcatataatttgaaaaaaatcataaatcacatctgagcatgcaatacatgtatggctactgggcctctatggctctatagagttgagaaaagatgtcctcggtaaagcgcaacaactgtagcaggtagaatgacttgtgatgtaaaatttgtactagactcctgttcagactttttcaacctctccccggaccggtggatttggcattgttcttggagacaaacagatgaacacaacaatggtatatacagtacagtgtttgtacagtactatgacactcaatcttactggcttcctgatctttttgcaaattttattagcaatgactatatgaaagttagggggtgtttggatccagggactaaactttagtccctatcacatcggttatttgacactaatttgaagcattaaacataaactacttacgaaactaattatataaatgagagctaattcgcgagacaatttttttaagcctaattaatccataattagcacatatttactgtactatcacataggctaatcatggattaattaggctcaatagattcgtctcgtgaattagtccagggctatgaaaggagttttgtcatttgtctacgtacgtttaatacttttaattagtgtccatacatccaatgagatatatatggactaaaaatttttagctccatccaaacagcccctcagagtgacatttttttacaaccaaacaatgctttagattaaacattaaataagatcatgccacagttgttttattgtttagaaaatgaaaggtggcccaaactgccactaactccccttttttttttgttgatatccttcaggaaaaaccccatgttagtttgaagatttgaacttagacatatgtataattggtgaaaaaaaaaaattctagaagaaacttctataccgtggccaaaacttcgtagttattcttacttccatggacgtatgtgtgcaagtaaactaactatttatgtgtgctactatgcacaaatgcagcgtgaaggaaactattgagaggtacaagaaagcca

SEQ ID NO: 1749 - DNA, 930 bp, Oryza sativa
  Intron number 1 from transcript LOC_Os08g16030.1 (locus LO C_Os08g16030) derived from phytozome v7.0 (chr-ID Chr8; po s 9779670 to 9780599)
atcctggtatgtatgtaaaaatgttttcctttaagagaatagattaaaactcggtctctatattcaacacggatgtacacgccaaagtttgtagatgtttgtgctgtaacttttttttttcttgtttcactttggtattggtagttgataacttcattcttctgtggaacatgcatgatctagttaggattattatggtttgagagtttttttgtcttgtgaaattcagtgttaaaaactgagagtggtactactcagtaatgatggtactactttctcagtgactgagacattagtacatcactctcttttgcaccaatgttaatgatctggcttatgcatatggtacgtctcatgagtcattgttcaattacttcactccagactgttagagatctcctttttgtttcccttccggtacatgattaattttttttcgtaattcaagatttcattaatttcatttttgtgttctttttaatttttcttggatttttgtttaacaattaaaattgcgtcctgatttgagttcattgaaaatttcgtcacatttgaaatatggatagttttttatgaggattgaatatggtttctcttttaccattccttcatttttggtgctagctatttcttttcagttcagttcaagctgaggtccttgcttcttagtatgcaatactgttccctgaaaaaatagaactttttatcccacaaggccacaacaccttcattttctcattgcttcctcggcaatttgtctttctgaactttccttaatttttttccagagattgttctccctttcttactttgcatttggcaaaaaaaattgtctctcaacagataattcagctacatatccttctggcagttaacattctctgttcttgacacttgacaggcacagcagctgccagactgcatacctgc

SEQ ID NO: 1750 - DNA, 507 bp, Oryza sativa
  Intron number 3 from transcript LOC_Os01g61240.1 (locus LO C_Os01g61240) derived from phytozome v7.0 (chr-ID Chr1; po s 35433546 to 35434052)
gactgctataactcagggtacggcacacaggtaggttcagttattggcttcctatttccattgtcttttactttcagatttgcagttgatatatgttgagctaagaaagtactcagcttgttttttttatttagaaaaataaaataagtagttctggtatagttgtgtttagtaacaatgaaagtacatcctaaatgattttttttctgaagaccaccatatactccatccgtcctaaaatatagcaacttttagctggataggacataatttattactacgaatctggatagaaggtctgtccagattctactaggatacgtcccatccacaaaaaaaatgctaaattttgggacggagggagtaatatgcattcacaagataatggatctgattcttgcgctattcttcagatttgttcagaacagctcagcagcatatttctatgtacgttgaattttgatcatctaataataaatcaattgaatgtgcagcttcaactccagt

SEQ ID NO: 1751 - DNA, 2163 bp, Oryza sativa
  Intron number 6 from transcript LOC_Os04g34720.2 (locus LO C_Os04g34720) derived from phytozome v7.0 (chr-ID Chr4; po s 20836027 to 20838189)
aagttctagggcagctgaagtacgtgagggtaagttctaatgctacaaattagtgcatctacatatgtgttgtcactttctacatgaaaattgaagtatggctgcttttttttttcatgtggatacaagacttgaagaattagtaagtagtacagacgatgagttttttgggtcaggaaaagggcacattttgagaatagcacagcaatttaagaattaggtccacacctagcctgtctaaagagtaaattgcactcgtggtggcggatctagaaattcccttgagcctgggcaagcctaacaggggctgatgtagcatcccctaaaagaagcagattaagtagagttattaagtgataatccaatgtctgatgcagcggagcctaggcaactgcccgtggtgcccgggccctagctctgctactgcactctcacggtacaacaactcggcaggtgtgtgtgatctagtacaagaacttgagaattgaacgcctagttgcaacaacttggcaagtgggtgcattctagttcaagaatttgacaatatttatagtattttggtgcaacaacttggttagggatgttgtgctgttttggtcaacgagtgctagatgagttattccatgatgtcaatatgccatcacatagagcaatcctgtggatattatcttgcaatattggatttaatgtataagaactacgttgcttaaccaatttgcacccttggtttggattttttgtttcactttctcaaatgttaaccgaaatacaaaattttctgcatagtaaaatttaattgacttgtagttactagaatgaaaaaaataagtatgcgtatacaaatttgcgcaagtatattgacaacgaaagtacataaaaaatcgaatctgtaaagcaaaaagatgcttgaaataattagttcttgcatcactacttaagttattataccaaaatcatacccgccttgcaagttgttgcacccgtaagctcacttatatattgcacccatttactaagttgttgcactagcatactcacttctcaagttcttattaaaaaataaatatttttttgacttgttttatcatcaaagaaactataatcttactcttttacatatttatactaaaattttgaattagatgaatggtcaaacgttatgcgaaaagtcaatggtgtcattctttttgagatggagggagtactgaactgcacctacttgctaagttgatgtactgtgaatgcaatttactcctatctaaatcatctgccgacatcataaatctttgttcctcttgtgcagttcttgtcatgcctgtgttagtggaacgatgtattgctgtaccatgttcttgtttgttagaattatcatcaaattctgtatgcatatgcttcaatatgttttcaactgagttactagttcagttcttgcatttactcatgcttggtatagtagtaaatcctttaaaatccctctgtagcaatcttataaaaattaagtaacatataagttaattaaatattacatataatatatcgaatatattaatatatattaaatatttaaatatgttaattaaatatttgtttatcaaattaatatattttaaattaaatatatttagcttatccagattcgtagtactataaagtgtcccatccatccaaaatcccttatattttaggacggagggagtagtaaatccttctagatgagtacatagaactgttaccacttaggggaactttcttggcaatcatggatagattctttgcaattgttgctttgtaaattttcgccttttttctgtacataactctcttaacatatattaatagatagcgcagtaagagtctcctgctgttttccataaaaaaaagaaaaaaaaaactaacctggggaacctgtgcttcctgtttttgactgtcctcagatgcaatagctgtcaaattttggttagggcaattttattttctttcatacaggacattaattaaacaaaatgctatatgattattgattttactattgtcaattggcgagctaaaaatatctgtctgaacctaatttatgtaatgaactcaaggtttcgaatcaactgacatcttctctttcatgaatattcaggtgaagaatcggctggttgatcgaaatcacaagcc

SEQ ID NO: 1752 - DNA, 1118 bp, Oryza sativa
  Intron number 1 from transcript LOC_Os03g38000.2 (locus LO C_Os03g38000) derived from phytozome v7.0 (chr-ID Chr3; po s 21096881 to 21097998 reverse strand)
cgctacaagcttcttggaggcctcgccgtccgcaggtatagcactcctttcaattgctacttcgctttgttgtcatggaggatgcatctgtgatgggatcttgtggtgcaacgtactagttgttttagttggttactcatttatacttagtacttatgaattcatcttcgtgacatatggaactattgaagggaattgtagtactgcactggttaaatgttttgtcctgcttcctgcccatgtttgtgggatactggaaccggtgcagaaaggaaatgctgctctctgaagcggcgacggccagacaaccgttgagatagatccacagatgaatggcttatgcgttgtttgtctactaattctatctcacattttcatgcacaattcgatcactttgatgctctacagttaaatctagcaagtggcaatacaatttaggatggaatgtttgattgtatttgtttaccgttgatgagatgtgttagtaggtgcctgggcagttctagtcaatatatgaatctgttgttttctggtgataagatttgttaggagctgtgcaatcttgttcaatcttttcgtgtgttcatcaagtcatttaattaattcagcattctatttctgctgcaaatccatgtgaatttatatagtgactgcaccagaaatcagttagtcctactttcattttatgatggtagggtgttaaaactggtgcacaaagaaagtactgctcttgaagcagtggcggccagacaaccgttgagatagatccacagatgaacaacctttctgttgcttgtctactaattctatctcacattatatgtgctataaccattcttgtttttggtctgattggtttttttgttcaatgaagttacatcatataatatcttttaatatatgcttaacgtaagtctattatattctttgttttgtacactgcttatcttcatgataatccaaggaaaattgttgtcttcatcatctggttcatatcatgttataacgtcaccttgttatggtagctttgttatgtgtgagctagtgcggaagtcgttctgatgtttctttcagatgtcattgtctctaatatgtttgtttacgtgacagggcttgct

SEQ ID NO: 1753 - DNA, 1469 bp, Oryza sativa
  Intron number 2 from transcript LOC_Os01g29409.1 (locus LO C_Os01g29409) derived from phytozome v7.0 (chr-ID Chr1; po s 16480790 to 16482258)
aggtattttgccacctgtttacagttgatggtctaagcatcattttctttcagttctcttcatctcttgttattatttttgtccaagtatttgctgttttttgtgccagtgcatttttttgattaggtcattataccaacggcttcctttgttatctaatgccagtgttgtccttgagatgttctagtctccagttgtatccctaatccctaatattataggatacacatggatttaaacacaaagaatcagttagcagaagtgtgagccaactactatcatgagttggcgattgattgaaaggatcaatcatcaaagttggtttgactatgtgcagtaaatagccattcattttgtgttttcaaccttctgggcttctgtctgttgatctggaagccataaattatatatatgctaagaacaacatcttgctgctgttcaatttgctgaaaccggccaaagtaagaaacattgttacagctgataaatgtaaaccatcttagtgcaagtgttgcatgtcacatgtaaaaaaaaatagaggtgaaagactttatccaggagaaaacaaaatatgagttggttcttacaggcagtgttacttagacttggccagactacttgtcttgtttgacatgtgtcacaagtggctgatacttaggtgcctaggtcaatctgaccaaggtgggtaagatgaaccattttacctccttaccaactgggctatgctcagttcctttgagacacctttttttagttctaatggtatttacccttgtggcttaccttttgttctagaataaaattatccaatttctgtagatttaaaataatgcttgtttaatttactgtattgttttcaagttcttcaaagtctgtagaattctttcttttcaagcttctcatttgtgtcagtatctgatgcttctgtactgtccaggtaacactgcctttgcaaataccggatacagaccaaaagttcagtctgtacaggttagattgaattgtctcaagatcagagtctggtcccagttttctcatagatgattggtctactctgttcttgcttcaaagatgtgacaacatagaaatgcaattgaaaactcagtcgtacaaatgcattatcgaggcacaaatatgaattgtgggattactaattaacttttaggcagcacaaatttcaactccacagattttgttttcaatccaaatgctgtataatggtttgatctaccgaaatgtttagatattaaactgtatgttccaggagcatgaggactgtattagcatgtcatcacattgttacttgtggggtctattagatatgttgatcaacattgcttcacatggaaaaaaataaatattcttatgcaccatgctcgttgtctgttcactttctgctgcttaactgttttgattgaatcttactttttgtagattttagaggaaatactcccagaaggaataatcgt

SEQ ID NO: 1754 - DNA, 1157 bp, Oryza sativa
  Intron number 3 from transcript LOC_Os01g51550.1 (locus LO C_Os01g51550) derived from phytozome v7.0 (chr-ID Chr1; po s 29611078 to 29612234)
aggaggtgttccgcgaggacttcgcgcacgcagttaagcttgccgcgcttgagccgctcaccgggtcgcccggccacgtccggatccgctgctccaaacccgtggagtagttcagacttcagaagttcagagctttggctgtaggtactactccaaggtagtactgctggactagtgttgacattcaacctcgctcttgttcagaacagcaggactacaggacacctgatcagtgatcactaatattttgtatagtactccagtatttatgctggcctagaaacacgacttccaaaatacaggacacggcgtctactcttatttctacccttttattcataaagtgatttatgaaaaccctgtatcttgaggagtaaaaaaacaccgggcattcacattttacaagaaaaagcctctctcaaaacaagcacccgcgacgtcatgttacaagctttgcatataatgttatactccctccatctacttttgatagtcatatttccaaatctgaaaattttatttttgataggcatatttcaatccaacaacttatcatcttaatgattttcttgaatttaatgcatgactctctattcttccacacatgattggctacatgggctttgagaaatgtaaatattaatgaatcgcttgtttacgaggaatgactagtagcatgcttaaatgaatgataagtagaactacttatctttgatctgtgtgtcaagatgaaatatgactatcaaaagtagatggagggagtattttttaaaaaaagaatgcaagggcatataatgttataataacagctctaaatatacggctggaatcagctaaaacagagaggttatttttctgtccacctcggttctcgattcaaatggtgagatctactaataatccaaatgcatgaaacagagcataggtatagatcaactattcccccaataagatgtgaaaaactgaaaaattctgcctaattaaccctacattgtttgagttttgaccgtatgaaatgctatgtgattaaaaaaaatagataaaacgaactgctctgccataactttcctccaatgtttttgaacgaaaaaaatattcttgaaactttcctccaatgttcagtcttactcttacagtaactgggaaaaccagttctg

SEQ ID NO: 1755 - DNA, 2453 bp, Oryza sativa
  Intron number 1 from transcript LOC_Os09g24310.1 (locus LO C_Os09g24310) derived from phytozome v7.0 (chr-ID Chr9; po s 14444626 to 14447078)
caaggaggcaagagggccttgcctcgattcgagtaagtgtaaccctgatttattcttggaaatagatgatcgggaattctagcaaatttcagaggtagttcctcttagaatacatccactgattaaccacctaaattaactcttgcagatcttgctccaatcattgtgcctgcgctcaccaccatccccatggagtggttaaccgtcggaggaaacaatgtattttctttttatgattcatctcttgttgtcttttgttgttgttgtttgatattcaatatggtgatatatgttaataattcactagcaatatatgtaggctctatttggcacaactccatgttgggtttgaagagtatgctaaattatagtgtttaaaaaattatatttaatctaaaacaggaacaaaatgaatcatccaaatcttgtcaatgtaatcgcagatccaagtctatggatttgtcgagctacggatacccaactccaagaaaccttggttctgaagttgtgcaaaaagggtcataataaaataatagtcatttgcatgttgtacacttttatcaaattcaagtgtttggctagaacttacgattagaggtgggtattcggtttttccggtttaatcgcctcggtttgatggctccctaaaagatcggtttctgtagaatgacaaccgaagagcgtacgaataaaacaaaaaccgagaaaaaaaaagaccaaacaaaattggtttggatttttcggggttcagtttttaccgactaaatgtatgcctcgatctcccatcctcccatcatgcaaagctagccatgggcccaaaggtcgtgggctccaccacccacgcccacaagataaagcaaaattacgtgaaacaatgaggcagattcactcagagcctcagaaaccaatcctgtgcatgtggacttcaatttacttcggtttctttggtgagattggttgacagtaggcggaggccaaagaaactaccaaccactaaactgtattaaaacgaaaaccgcgccaccagctgaacactgaaaaaaaccaacacttcagtttggttcggttcagttcggtggtcggttttcgagaaatttctgcccacccctacttgtgctaaaatatgcctaatggatcaaactcatgggatcaattcccagttccatcgcaatgaaaataaacttgactatctctaatcatgagattcaatgaaatttacacttctttttatacactttcacgagacaaaacattttcaccaacaactggccattggcttccatgggaaagagtaattgtggttaattgaaagccataaaaatagaattatttttattagtaactatcccacatagtaactgaacaaaattttaggtatgacaaaactcgggtgattatttggggtgattattctccttgcgtagaactttcccttactttgtcatacatttatatagggagtacaatttgaatttttgaaacttgacccaagttatggcccaaacaaaatgatatttactatgcatgtgaaattgtattggcaaatttcttgaggctgatcaaagcagccccaacatcccacatgaggaacccttagagcataattcctcaaaactacatggtgaagctgccatttcacaacccacataaagaaacctaattgtgcaattacagcaaactctagggtcctctatgcaaaaaaaatattcattcccctcctataagaacccctacaagattaaagtcttcatatggctgcttttttgtggcagactaaacacgagagatatattggatagaaggaattgtgctcctttgatctcacttgcgttctttgttcgttgcagcaaagagaaactccgtttcatctgtttttctagtgtccatttagtagaaagtgttggcataagcttggaatatcatggaacacctctttggaattctttcagatgttggtgctggcaagattgaggttcaggaggaagggctttttggaaatttgctttattgcgtgctgtcacatttgggaacaacgaaataggaagatttttcagaatatggatccttcttttgatagattcttctacatatgtgtagaatgaatgatccacttaggcaatcggtctctgattggttacaaactttatagttctttagggaggctgtagccttttgtaatttttcttttttgctgtaaatactttttctccttttttataaaatacactactgggcaaatgcctggtagttttcctttcaaaaaaaaagaacccctacaacccatagcccaaacattgtattgcctggctgtgagaatttccaacgttgtctagagtatttttcaaatttcaaataaatatttgtagcctaccactataagcttaatccctcacttgaactttttttcattatctcgagcataaggtggtcactaatcttctcttcctctacta

SEQ ID NO: 1756 - DNA, 2774 bp, Oryza sativa
  Intron number 2 from transcript LOC_Os09g03630.1 (locus LO C_Os09g03630) derived from phytozome v7.0 (chr-ID Chr9; po s 1818261 to 1821034 reverse strand)
ccaaaggtcttgcattgcctctcttccgttctattttttcagtttgatttattctactagtttgttcaaaaaatggtataattagttatggtttaagctcagtcaacataacctaattttagtcattgtgcaagcattgcatatctccttttctgagtgcattgaaaacccacagtttgcattgaaatcacactccaaaactatcgtgaacccaagtatcaaatttggtaacatcatttttttattactcagaaagattcgataggacggtccctaacagttattgcaattttgaaacggggggggggggggagttactatctcggccgaatttttgggtttttctcaaatttctgtgaatttggtcaaaacttagtcaaattcagttaaaatttcaagtccgaaaagtgccaataataccaaaatttcaggaattttggtagaaccgaaatggctgaaatctatattggaagccctggtccctactaaactatatatatgtcttgcgaaagaaaaaatgtcacaacaattaacagattaaccaaaaccgaaacaaattgcttgacccctcacccccactcaatcccacaaatccacaatcatcacaaagaaagagagaccaaatatatcacctaattaagcaatgcggagagccttgtcatcatgtgtgctggaggctgccactttgtggaccagaggagttgttagggtgactggggaggccaggtcttgcacatacagtagttggagaagtagtggtaccattgcagagatgcgtgagaggcgagagagttgacgtgggttggaattcaactgagttacagcgtccgtgattgtgtagcagcagataactggtttcatatttatacacagtaccttgtctcataattggacttgaattgtcaattccaattcctaatggcatacaacaacctcttcaatggaattggaatgtgttccttggaactggaagtattctgagcagtaattgtgcattcttatttccttgcatgccatactttttacggtaatcattaatcatgtggagtcactggtactaacattagaactactgaggccaggtgcaccccatctttctttctttttttttttgaaaaggagaagcctacttaacctcatgcagaagaaaaaccggtatcatgcgtcctgaaatgcttataaactagtcggtaccccgcgccgtgccacatgttttgttagttttatcgtcaaacaaaatcaaaattttaaatggctgggtgcaactctacatatatacagaatatatgataatgtggctttatatatatcctctggtattatgatacaattcatgctttatttttcaaagcgtcattgtgtatttttacgatatatgaatattattttcatgcacaatctaggtatcattgcaattagattgtttgcacatctctacttctctcaaagcatatgaaaatgggttcgggaatgatgcctaataattgtatgctatctaatgcatgcataataaaacaaaactcacatcttaaacaataatttgagttgtattcgaaaaaaataagttagcattatctttcaggacttgggaggaaaaaacatggtgttatgtgcaaaagtaggtaacaatgttatgtgtgcctttgaggtggagcaaagggaggtgaatggacgactaataaatgattgagttagatggataataagtagcttctttatccaatggctattatctttgtactaatgcaatttgatggcttaaaattgctgatgatgtggcttttggcatatcttgctttataggagtaaatgccccttagtgggtaccaactatataggaagatggcataggatgtcaaaataatccctgaggtggttttgccacggtaaacaacatgactagtgagtagtgagacttagcagatgaatataaaatcagtaataaaatgccccacttcttaaaacaatgtttcatgccggtacataaatttaactttggaagcaaaagataaacttgaccctcgcatgagtggattcaccacataaaatatttttaggatgcagaccatcgcgacattgttgtccgcgactccacgtcatttggtatattggcatctcaggggtttttttagatggctttcaatacctactagggatacggtaccaaattttatacttaaaggcgtaaggggttaatgacctaggtttgagaagtgggatgatgatgaattcaccacttgatccttgatgacattatttgatttgaggaatggaatgggccatcaccacctcaatctaaaaagtacatgctaagctattggggaaaatatgtagtgcaaacctggaaactaacgtaggatcaaaatatggacatctgagatttgtctatcacactctgaggatgacgtggacaaatctcagacgtcccttttttatcctacagtagtttccaggtttgcactgcataatgtcccaagctattggatgaagaattaatggagtcattttcaaattttgtgggatgatcatgtgatcgataacccgtcctagatgtgttggttagtcaaactaaacagcctgtaagtagatgagctcccatacgtctaagtggtaaaatagatttttttttttgtttagacaataccattttacattatgcacctttgtagtttgtattgttgaaggctcgatccatatgaccatacgggttccctatggtccttatgccatatttttcttggcaggtgaaacaccactgtgcctttcttcaattc

SEQ ID NO: 1757 - DNA, 3880 bp, Oryza sativa
  Intron number 1 from transcript LOC_Os11g34624.1 (locus LO C_Os11g34624) derived from phytozome v7.0 (chr-ID Chr11; p os 19798902 to 19802781)
tcccaatacctggtatgaacttttctctttattttttctcgattacacggaagatgctgcccgcgaatgcttcccctaacacatgattaagaggtgaaaaccagcaacaaaagctttgtcaagtgattgatttttcttatttatcgatcatttttcaaaattactatattataacattcaataacttacatctttttgttgaagtgagacaaatattgttctagattaactttttgaagaaattgtacagtagtgttgatctttctaaaaaaatcgatctagataagcataaaaatacatctagattaatccagcaaatgaaaacaaataaaactaaaagttacactgaatttgttgtagtagtttctaaattacctaagtttagttgattgacacataaggaaaaaaaaaacccagaagactaacgaaacttaacggtcgttttatattcttcctttaatttgattatctaacaaaataataaggattctttttctcatttttacctacgtataaggatttcagaaaaaatttatgcctgggtagagtgaattggcgggcacctctcatttttctgcttagaccaatttcgtgttgacatgttatccaaaccgaaagtgattgcactataaacaattgcacactgcgttgaataatgtagtatgtgtgagaaagtttgaaaatagtgacaaaattctagcatcgagactttgaacagtacattgctatacctctgactttaaataagtgcatttctaatatttgaagaacataactactataaagataaaaatgacatagataccctcaattaaatcaggagaagtcaaaggtgagaacgtaattggggtatggtaggaaaatacctgaatataaaatacttgatatgattagtactccctccaccccaaaatatcagcatttttagacttcgacacagtttttgaatatctataaagttaagatgctttaaataaaaagattgcatattacaatagtttgtttaatgataaatttaataacatcaattttacatgattgatctttttatttgttggctattaatagtcaaatttgaaaatgtttgacttagcattattctaaaaatacttatattttgggacggagggagcagtacttgagaagagtatttatttttgaaaaaagttaaagtgttaactatttaggggtggaggtagtaaaaaaaagtactccatccgtcccaaaataagtttatctttgtcccattttgtttgttccgaatgagtttatttttaagtcatcgttggattaaagtttataaaagtagggaataaatacattataagtaaataaagtgagggataatttcattaagatttggtaaagtaaaaggtattattgtcattttacttttgtattggtaggtgtgggatgagcaaactataaacttatttttgggatggaggtagtactaattaaggatgaacaaaagatattgcaaactaatcttaatattggaaggtactcatggttggtaaaaacctccaacctttaggggagttgtgactcaggagtcctatttagcgcgtacacactaggggcctgtttggtatagctccaactccaaaatttagggcttatttggtacagctccaactcctaaatttagctccaggagttgggtctggagtggagttgtggagctgtctaaacccagctccacaactctagttcattttatgagagagctccaactagctccactcccagttttggtggagctgaaactgtttcgctgagctctagctctaggaggggtggagctggagctggagctgtgccaaacaggcccttagcttcaggaattgggtctggagtggagttgtggagctgtcaaaacccagctccatctagttcattttgcgagagagctccacccagctccactcccattttaggcggagctgaaactgtttggttaagctccatctccaggagaggtggagctggagctgtgctaaacaggctctaggtagggaagaagcgcacacctttttcaatctccttcttccattgttgaaaatttttaactcagatatgaaaacttttaacttagatttcaaaattttcaagttagcttttaaaactttcaactttataatttaaaatctttggactacaaattcaaaaattttaactaaattatttcttttttttaaaaaaagaacagaactatatatattaccattagcatataaatcaacgccattatttaacgagaaagaggaggggggggtacgtgttgcttatgtagccagtgcgcacgcgcccattagccgcccacgctgtggctagctgttgtgtttacaacgcagtagctaaaaagaaatcctttagtttccatttatttggcattcttgagtccatgagcaaggcaacaatacatatctacctatgactaaatgtcccgagagaatgtgctatttaaaatccaagaatatttgtagatttgtcttaagttctttcgtaattccataaaacttactattttttataaacttgttctaataacaacaacatatttgttcaatgaagggagtatatatttagaatctagaaaagcggttaacaatgccaattaaataaaaatggaaagagttccgttacatccataattgagggacacacatgttagcaacttttgaggaagtttcctcacggcgacgatgcacaccaccttagaatattaattttcatgttcaaatcatccgctatagattaaaaaaatactaaaagtataattcagttatagattttcttttaccattacgattttttttcaatatcatggaagatgcaaacaccatcagatatgcacggcaccgcacacacgtccatgagtgtgccacatcaacatacttaaaaagacagggaccaacggaaaactcctgtctcctgacatgacctcactaattaaatgtctaaatgcttaaatggattcaaaagcactcccacatgtgtaatattcatgggtatcagattgaaccctgtggggtagagttatatgctcccatgactccagtagtaatacatacataaaagtgtacaattcacatttcatacctaattgctacttattttgcacaagcaaagcttatatttgtttttgaaagctctcttaccatctttgcatcaagaaatttcacattaagtttttagggctcctttgtaatgcatgattaattgagaaaagactagaatactataaaatagattactacaaaacataaagaaaagaccgtttgataaaatgcatgaaaagccacaagaattttttagggagataaagactaatagaaaaatatccatgaggttggagaccatgttaaatttccttcaaaactttgatggattgaggcatttatagatcgatttcatatgatttagtagtgccccaatcatttatttgaagggccatttaggtaaaagaatctattggattcaaatcctaattttttttccatgtattctttgttttgttctttttcttgtttttgggacaaacatgaaatccttagtaatagtgggttatgttcactttattttttaatatgagcctcctttacctagggttacctgtattttacatatgtttcggatatatttacatacttttgatgggtacctacttgttcacttttaaaactataatattactaaatagaattcattgtattcattatctttatgcggaaaaagctatctaaaggagcctagagattttattttttaaatggcatcatgtctcattttagctagttactagcatatcctctcctttaaaaaagaaaactcaaatattttgaatttacggtgttaattgcttgcatggcaggta

SEQ ID NO: 1758 - DNA, 3119 bp, Oryza sativa
  Intron number 3 from transcript LOC_Os05g07040.1 (locus LO C_Os05g07040) derived from phytozome v7.0 (chr-ID Chr5; po s 3698561 to 3701679 reverse strand)
ttctactacgccgcgcgcctcaaccgcaacgaccggtacgccctcctgatctcgcctctgtttgattttggttttgatttgtccctaattgtgccatatcagcgtaatgtttgagcttctaaattacggtatgttcatgacaaaatataaatcagggtaagagtatgaggcaacttattacttctagtgtgaggaaatgatattgtggccttggggtttgtttcgatgtaatgcttgctttggtaggtactgcttccagtgtgatgatgccaagtacagtacatattagatgcatttaagttttggttcttttggttttccatagtattatggaatattgtgggttgttgtgctgattctatatgagccaagagatttaatttgtttccaaatttgtagttccatcatgtttgtctgctttaatagtgtgctgggttattccaagggtacatctttctagaagtgaacactggtttttttgtagttttgagttgttaagagagaaaatatggctgcatactcatgcaagtaatatccctttgtattctcaggaggaaaattaaatttcctaagattttttttcctttcctgaaaaataggaatgggaaattgtgataaaggtggaatatgcagggttccatttgtcatagagaaaagaaatagatcaaaggacatgagttcctagttttggagcaaaaaggttagcacctcctgacaggagataggaaaggggatcaattccggggaagtattgtttcatttcttgcagccatcttctgcagcactgttctcttttttcacaggcctatatatatgtgctcctcctcttgattcaatttcaaaacctgtttctgcatcattgggttatggctggtcaaacttttgtcggtgccagtcaataaagtatgacctaggagttcatactatatttatccttttcatggttcaccgttaaaaattacctacaggcatcttatggtcatgctatctctctgtgttggtgctattgtaattcatcttgtctcaaagaaattctggaattatttgcaagtactcctgcttattagttatcaccctgcccttctagcatagcttggttatggtgctttggtaagtaccatgtgaaacacaagtttgaacaatataataggccttgggtagtgacacttttgggtaatatttggttattctgctgatttgagaaaacaatttcctttgttgctataactacacttttggccataatgtctgcttgcattagaatgtgctggttatattggcatgtttttgtacatacagactcgttggtaatagcttgattactaaaaggactatctgattgcattctacaacataattgtgatgtagaattgcaagcatgcctattattttgagaccttcagtttttaaccctttttttgtggaagaaggtagtaatttaaaggccatactcattcccccgtgatgaattgtttactatggccatgtggagtgacagtaatatgctcgcaaagtgatgtttttagtgtgcttttgtgcacctgttgccaataaagtatggtgttgtttctaccttttactgtgggaagagggtgactcactgactcagcactttaagagagagatagagagaaatcagagaagacagactctccaattcacaaataatgtgagagcacctatgtaggtagggaggttaaaaaacctccccaccatctgatgtagactggatctccataaagaatgttcatatgtgggctatttgattttctgctaattgttgttaatgtttgcttcaccaatttttggttgcatttgtgggatttgggatgtatttgatttggtacgaaatttggcaagatgcctttctagtgcttggccaaaatatgggttgccaattttatgaccaaatcttatctagacttttggtatgttagcaacttcgtggagctctagtttataggagccgcagctcatgctgagtttttggttctaatgttctatatagtttcactttcatatttgggtcctttgtgatagtaatgcggttactacttactagtgtctttaacttttgataattttggaggtgggaggacttctaaagttgttttgaggcaacgtttctttattcacatgggcaaacaagtttgagctgccttttgtcttatgggtatctatgaacaatgcattattgctgctatagttaaaataaggattagtattatgcttgactctggagcaagtaaaatatatcattccattagccctacaaaatttattttccagcataacttgagcaataggcatctttatttattttgggggaaatggagtaactttggatctttgtgctacttggtacttttgcacgtaaataccttgtatgaataaactacactctaaattgtcgacatgtgaatacagccattgactgttttgcatgctgaatgctgatatcctatgcatatgatgtgccatgtgttgggccatcctgcaaatatatagttgtagggctgtactgaagatgatatttttagaagttctgtactgatgaatgatggcgataaccagtaaacctatagggggcagctggcaaaaatcattcatgttgacagtccaaagtgatcttgtaatagttaatactcaattagttcctgtgtatagttgggacttgtgagcctatatttcttccttttgtttgtacagttcagaagtactgctgtttgctttatcaaacagggatagtcagatagctgatctgcctactcattcatgttttgtaggaatttaagcgttgccttggtttaaaatgggtttttttaacactccatgttccatatttactttgatttaatagccgtaatccattgtgaatacttatggattataaagcggtcttaaaattcactgaattggtagtttcataatgataactaatgtttggcatttctattttgagtataacattgttgagtataactcatattctgcatttctgtttcttgaaaatttcactccattggtagtttcctaatctcaacaagagtattaacatttgttctctcattgtccttgctgttttcgctctccaattcaacaggaagcgtttgtttggc

SEQ ID NO: 1759 - DNA, 1258 bp, Oryza sativa
  Intron number 1 from transcript LOC_Os02g19860.1 (locus LO C_Os02g19860) derived from phytozome v7.0 (chr-ID Chr2; po s 11671679 to 11672936)
gacaggtaactatttaattttcagtggtttgaactaaaatcctctgtgaagatatatattctttgacttgtattcttgttagtttgccatgtacataggtcaatttcttccaagcttggtttgccttcagattactctgagttccttgctctccccatttgatttagattattgagcggattaaatcgaatattttgggaaataaacttagcaaatagcttaaaacaagtggtcaatgcagtacaagaaagtttttgaggcaatgtattttcttttgaagcatagagcaaataatccgtttcaataatccaacgtattatctgaaaaagaacattttatattattgtcatcaattgcctggtttattacgttagcattcttcatgtcttaacacagttgagcttttctgatttttagttaaaagaaaagcatagtagtcaaaaaaagaacatgctgcaattacttcaaaaaagggagtagggaggtgatgataacttgacctacccaaggcccaagtttagatattttttactacaatttatgtagctgggtgtttgttatttgtaaaataatagaaaaatagtaatctttgcatatgagtatatgtaggtggtcagttcttctataataatgtatacaagttctagatttgaggataacttgttgcatttatattttattttagacttgtagtttatttagttggggctcattgcaaattgaaacacctagtgcatatgcaattatgcagtgcattgtgacaagatgtatactaaagacataaccataaaaaaagcaaagtatgcatggtaatttgtattacactttatttcaacaatatgggagttagatctgaaactgggttgcataattaacagtttgccccgcagtatttacttgataccatgttattattcatcagggttttgcatagtttacagtttgcccccacagtatttacttgattgtgtgtaattcatcaaatggggttgatatattagtttctgtggatggactatactattcgatccctttgttgttgttttagaaataaaaatctcaagagaaattattagagaattgcttcatttgttacctgctctgtgatcgaggtcttttgaccattctagttttaatagcatattccacctttttagatgagctgttatgtcttatgagtttttcttttaaacgagggcatcttatgagttccatcgttatactaacaaattccgtgatttttgcagatataaattgg

SEQ ID NO: 1760 - DNA, 2069 bp, Oryza sativa
  Intron number 1 from transcript LOC_Os01g18640.1 (locus LO C_Os01g18640) derived from phytozome v7.0 (chr-ID Chr1; po s 10496144 to 10498212 reverse strand)
gattcaccagcagcaagttgcggccttcgcagaaggtaccatctcgctaaagttgcattcgctttaattatttcgttttctttgtttgcttactctggttatccattgatggttgccctgactagtgtagaatttgatagatgccattacaactccatggttgttttatccactggtaatttggttactcgatatagttgcttttgagaagacatgtctttacaatccatttacattcttaggcattggttacttctgatgaacatcccaaataagcttcaggttctaaccatatatttctgaatagatttgggtttggtggtaaagagtcaagacaatctgttgcaagaaagtcactttctttttcgttcatccatgttttgtcaaatgcccacacataaagttttacggattgttccatagtcataataatttagaatttactaaggtttcattgacactaaacttcactagattttctcatcaataattgatcttatgcaagtatatggtgatctacagtagcatgggtttatctatgtatggattgtgaacattccgatggtatgcagtacgaatctttgctttatgtccatagaatgtggaaaagtttgtcaaaattgttctatgcatggttgaagccacatttttttaaaaaaataattatgtgttagcattctggtagatcaaaacaggcaaaagaggtgctgtagtactatgaagtgtcaagtaaaaatcattttaagccattttaaacatatttacttggaagtacatagtgcttactagatttctttgagcagcataactgcataagtatgtttttacctgttagtgtaatgtttgcagaatcaaaatgaactggacattttgactttttaagaggtgttgatgtaatcaagagaacaattgatattaactatcttatagaaaatacaactgatttaaaattctagaactgatcgtgtttagttgtactactccgaatgaatgattccatttctgcattagccttattatactcctgattgtatagaaacttagttctcatatggcatgaggtgtttacatcatcgaaataaaaaatttacgatgaatgctagtaatgcttactacattgggcatttatactgggactaaaatgttggtcatgatgtcataatatctttctgttttgaaattcaaaaacagctttttgtgaattattattgctggttcttgcttttgattagtgcacattgtacttaaggaggattatatttattcataaggaacagttattgtatttggatattgttctctgtgtgcataacctctgtttgtagtcttgttactggaaattagcgaaaaaagcattgtagcactccaaagcatatgcaatgattctgattcactgtttaagacctttgtgagaccctgtgttctactcaagttaggacagttgttcatttgctacaccggtaactttgctagtacctgtaagatagggagctgtgcctagaagcaaaattctgtgttattgtgcattttgtttgtggaaggttccctcactagaaaggtttaaagtattaagtttcacattcaaacctgaaaatcatctggtccttaacttatcacctgatttttgtttaagaaagtatgcaatcagcatttctaggttaatcgcctgaatatattggcttgcccaacaaactgtttattaattatgctaaattgttctagaggaaaccagagaagatgcattttctacttttattggctttatgtagtactaggtaataagggatggaatttttcttttattttgtattgcacataattgaaagcagccaaactttggtgtagcttggtccagctagtcttttttcatgaatgaaatctgtattttgtcatcagggtgccaaatgttccttaattttgttggtaaacagtctatggattgtatgggttttcttcttcacatgttgtgtatctggggctactattctaatatttcattctgacataattttgaggcaaagctataatgcgatctaattttttatgttctatggttgcagcaggaaacg

SEQ ID NO: 1761 - DNA, 6391 bp, Oryza sativa
  Intron number 2 from transcript LOC_Os11g12000.1 (locus LO C_Os11g12000) derived from phytozome v7.0 (chr-ID Chr11; p os 6667142 to 6673532)
tcccttttgtagtcggcctacaaatcttccagcaggtgagctagcattagatcatcgtataaaatcaccaatatgacagtgcaaaagttccacggtcagttcttcagttcagagatggggaaagaacctttgtgttgttgttttgttcagtgctgattcaactgcaacatttagcgattactgttgtttgcagtgcatcaccttaaatactgtgtgttaattacatgtttcccgtatttttatcatttattatcttattgttggccatctactgcaaggacatcttaagctaaaattgaatgcccgtggaaactattaccaatcatttcaccaagaacaaagcatgaaagatgagtagcccaacgaaattttctaatggccaatcaatttgcgatatagttgaaatgttgctttacaaaagatccagtgctactatagcggctgtacagaattaatatggattacaaaaggaagacaaaaacaactaggaccaaataaagaaacagtaacaagtcaaccagataaacgagatttgaagggcaaacatctattatattattaaaggaatagaaaaagaagcctccatgtttgctctcatggtctataaattctcacattaattagggaaaaagaaaaaacagagtccatatagaaatacaatttagaaatagctgaaattcggaattaaaaaatatggaatcttagaagaggagactagagtccatatagaaatacaatttagaaatagttgaaattcggaattaaaaaataaggaatattagaagatgagactagagtccatatatagaaatacaattaggaaataaataactgaaattcggaattaaaaataaggaatattagaagtagagtatatagtccatatagaaatacaattaggaaataactgaaattcggaattaaaaataaggaatattagaagtagagtatagagtccatatagaaatccaattatgaaataactgaaattcggaattcaaaataaggaatattagaagtagagtatagagtccatatactgaaattcggaattaaaaataaggaatattagaagtagagtatagagtccatatagaaattcaatgaagaaaaaaaaatagaaattcgaaataaaaaaataaggaatattagaagttgagtatagagtccatataggaatttaaaactaactaaaatttggaataaacataataaaattaaaagtagagtttagagtcagtataaaaatacaatttataaataactaaaatttgaaattaagaaaaacatgggaagaagagtttaaagtcactataggaatacaatttagaagtaactgaaattcgaaattaaaaattaaagaatattgaaagatgagtttagagtccagatagaaatacaattagaaataataaaaattcagaaataaaaataaataatattggaagaagagcatagagtctatatagaaatacaatttacagaaaattcggaattaaaaaaaagaaatattaaaacacgagtctagagtccatatagaaatatatataatttacaaataactaaaatttgatattaaaaataattaataactaacacgtatataaaatataatatgaatattacgtattagtagttttgtaaagttattgcaaaatttaaaattatgttgtcattttaatatatttgaataatataatgagaaaacatatatgctattatatgggagaaaacataatgatgctaaccgcgcaatctgcgtgggccaccatgctagtttttattataagaataaattgtgagcgtgttgggattgaacatgggaccttgggattaaaaccacgcaccccttaccactacattatcaagtgcatctcataacaaatcaaccatgaccctgcctatacaacagatctacaccagtgctaaaccatatgcatgctagatacaacacaactttttggcattgcagaagtatgtagtaaaaccaaatatcataacacagcttggtatagatatataaggttctgaatccatcggtaatggcatttactctctccgtttcagggtataagacattttgactttgggcaaagtcaaactactctaagtttgactaattctgtaaaaaaaagtagtaatatttataacatcagtatagttccattaaatctatatttgaataaattttcataatatatttgtcttggttaaaaatgttactacttttttttataaaattagtcaaacttaaagttgtttgactttgaccaaagtcaaaatgtcttataacatgaaacggagggactattagacaactttactctaaagataaatgccaaactgtttcatacatttaccgatgtgagaaaacagttgacaggtaaaatggaagccattctattcaggtggtgttacaaataatagacttagtgaaatactccatctatttcacgttataaaacgttttggcccctccatcccttgttagaatcactaacattcatatgatttgtacacatatatctattattaacttattataaatatttttatttgtctatcatttttttttaaaccggtgaacctattatttttggacaaccatatatatcttttgttaagaaaacaaaaacctcggaagacctctctatttttctcagcacaacacacgtgcgcgtatttgccttatgcacgcatgacaaggcaccgtacctaaagtagcttgggtgatcacgacgctgcaatgtgaagacatcaaatcatcaatggataattattgtttttttaataacataaaaacaaatcgaagatgtgatgtagagagaagagtcaagcaccgcgagttatatataattaatttatatttatatgtatataaacagggtaaagctagaacaaaaattaccctatgtcatatacatatatattacacagataatattctaattacattacatgtgttaactaagaacttgttttggcgaaaaaaaattagaccatgtgtcttatgcacgagggagaagcaacgtgttgttgttactagggatgaaaacggtcggaaacgatcgaaaaacagcctcaaccatttccgtaaccatatttttctcggaaacaaaatcggaaacggtaaagtcggaaacgaaaacgatatcggaaatatcggaaaaccagaaacggaacaatacggacggaaacatgtcggtacagatcggaaaccggtaacaaatacggaaacattaaactataaaaacatatatttaactttacataagtatgttatatatatatacataaattcaagcttatactatataaattataaattaactttattttagccatgtacaaaagttagagattttattgaagagtcagtcaatctataagctgtgggtcacgtatagacatgtcctataatatcgacatatttagaatacggtaattaccatattataagaaacggtaatttccgcgagaatacggtaaatacggaaacgatcggtataacagcaaaaccatttccgttttcatttccatattttttaccatttccatttttgtttcggtcgattaccatttccatatggctcggccggtagaaagtcgaaaacgaacgccggtcggccggtaattaccgttaccgttttcacccctagttgttaccccttatataaactaataagtagataaattagataaaatatggtcttacgactgtttaagatgatgggtgagtgaaggatacaaccaagtaataagtggaccgagaataatgacaaacagcttacatctgtatgtgattgagtgatggcatgatatgtcagttgtacaaggagtttttctttgattatgataaagacaagacatcgataagaaggagaatatgtgcttatttgaatttttttttaaaaaatagacaaacaaaattttttaagtagtcatggatggttttaaaatatttttaatttttctgatgaaaattgtattgaacttattgaacaaaactatattttttatatatgcagactacatgatagaaataagtttcactataaaacacttcaaaatttataagtaaactatccatactaattaaatttatataattatggtcttatttcaaacaaatattgtttcaaataaaaccatcaaacttgtgaaaacaaaagaaattagcttcaaacaatgttgatattttgcactaccaagcaaagcgattgtgtaggtgatttgtgtgcagcaacaccctttaaagttcttcagaactatggagaaaatatgaaatttttgaacttatatatagagaaaaaaaaatccaacttctaatttacccttaatttgtttgtcatgtgccttcacgaggcgattcaactcttagatctcgcaatttttgcttgtagccatatttgcacggtatgtcagtatgtgtacaaatgatatgcatgataattagttacaatagtttaatatttactttgatgcaaaagtcgtataaacttaatctatgttctattcaaagagtcgatgaatgcttttttgagatatattttttctaaaaaaatagaatccctaaatcattttaaaaggacattgtttgatctttagttccctatccataagacaatttttgaacaaactataatcttacttcctctattgcaaaatataaggcataactatttttcttacatgtttcaaaatataaggcatgcatgcatgcatgcaattaactagcacctcttctccactaaattattatatttttttaacactttcattctcaaaatctcgaattctattgggtgcatgcactgaatttattaagatgattcaaacaatgagatgataataattgtttcttggtttttagagttaatggtggttatggcttacattatttaatggagggaatacctttcaaatataaacgctcacgcatatacgtgggccaccttcctagttatatataaaacacaagcatgaatccatatatgaatatattcaaaatctaaaacatcttataatatgaaacataagtagtttctaaagaacagcttgcaaaacaattcccttgtagaaagatgaaaagactgaaagcattgagtacaccagaataagtcatctgccaaagaaagcataggtgattgccaaggaccatcaagcctggaagactgggacgtagtagctaggcctcgcagcgtaacaaagaaaatgaaaactgtgaataaatggcacataaaaacgcaaaaccatccgtgacagtaagtgatgcagatactgtaaactaaacagttctcagtggagtcttcacaattgagcccgtttcctaattctatcttaatataaagttatcccccactaactctttaagcttaacatacaaagatgtcgcatcatcatccactaacaatcatcacatttaaacatcatgcaaacatgctatatctttatagtttttataatttaagagtttttcaaatacaaatatgtgaaattatcatccaacatgattcacataatgtttcaatatatatctttattatattttatgatatcctctatacttatatggttcatcctcacttagttagtgcttaaatgattaatctatggtccaaattatctttctccctttttcctctaattaagtcatatcacatcaattgtttttagcctttaaataattaatctacggtctaaactatctccctacttttcttcttccataaagtcataccaccttactttttacgtttgaatcaccattctacatactatttaaatttaaattatcataaaccacattaatttacttaatctgatattatctagctatcttacacgttattttttttatttttatcatactaaattcccgcagcaatgcgcggggtttcagctagtattttctacttatagacctgtaggaaaaaaacattaaagaaatggacccttttgaacagtgccacatgccatttggctgtatgttcatagaatcgcactccatataagcagcctggtcgatgcagccactaaaatcccacaaaataaggaacacagcgccaaatcttgcagtgccattctattcatgcttatggttcattatagaaaagttttatcaggagttaatttataattttttttttgttgaaactaccctcacgcaacagagtaggaacagaggggatcaaaataaaaaactcaagcatgtagggaatgaactgaaactataggctcaacatgatgaactgaaaactgactggaacataggtttttcttttcataaacttgttgctaattacatgaatcgatcctctgggctgtgctagtttactttagtttgttactacattatgtaatacagtatattcacctttgttcagctgac

SEQ ID NO: 1762 - DNA, 12789 bp, Oryza sativa
  Intron number 5 from transcript LOC_Os06g25500.1 (locus LO C_Os06g25500) derived from phytozome v7.0 (chr-ID Chr6; po s 14897691 to 14910479 reverse strand)
aaggtaaaaccgtggatctattttccttttattattggtggctataaaatagattgatgctaattaatgacaagctggcgaaaatactgaactctcatatctccagaattggctataaaatcgccagttctgggtcatggggtcatggaacagtaaaccttaatttctatttgtttttgctaatggccaatttgtatagattgtaaaacatacacaatatgagttgccactgtggttagggttgcgatctgcggttagggttgcgatctgcggttagggtttgggtatgggatggagcaagcgtgctggccaatgtgcatgacaaagtcagctccactaaccaatgtctttagatatggttctactctgtgatctcccccatcatctccgtcatggattaggtctaagcttgatttaggtgtgtggctgtccagccatctgcgctcctccgatggcatgttgctggatatgcagccatctccagtttggtcattctctgctgaaaaaaattaatccctcctatcacatctaacatttgcttcatttcctttcagatatgcttttagacctgtcgaaacaagatttcggcaataataaagggggtggctgtcaagctaggaaagtggatgggtttggagacaaggaattttatacaggttcatgccttcttattaaagaagtaataccctactcctgtccggggatgattccgccgagtgtgttattgattgtatgattgaagaaaaaagaatcgtgccccaagaggcacacggaccctccttatataggggaagggatccgtaatacaaggtacagtccatatcctaacggaatatgggattacagataaaatacaatcgtaaccgactaggatcccgggtattttcttgatatacaagtttagaatctaacccgagtccttataaagatattctatctatatttggtaccatatatccgactaaagtataactgtcatgcagatatggggtatccataatctccacagtagcctccgagaccttcgcagttgacgaaacaaccttctcgaaacaaaaaccagtagtccgagtgctttaattcaacttgctccagcttgtcgagtactaaaaatcaaaaactgtgaatggcgaaaataaaacatggtgcatcgagtagatgcacctaattaggtgtagcccccgactatgtgattagttgaaaaactaaacatatagtcaagaaccgagtggttttatagcgaagcacgcatggtacttagtaagatacccagccgactgcttctcaacttgaatatatcaaggacaaaaaatacaagaagggccgagtgacaaacactcaaaaggcccaaaaatagatatatttggtaggaatccgagcaagaaactcttaaaatgatccaccaaacataacagaaaatcatggtaattaatgagtctaacagcctgagctgtaacccttaccataaccaaaataagcatataacatgctagtagaatgactactaataaaccagtcatcttaaattaacccaacagctcttgtagcctaaaaaagcttacaaaaatggtataacacctttctgtcgggcaccttttcatgtgcatcataataattccaaagaattattgaatcgcgttaaaaaggattttaacaacatcgggccacatcattgtgagcacatattgccaaagcaaaaagcgcctaagtccctagggatcacaacgggccacgctgaaaacataattgggctgaagtactgtacaggcccaggcccattagtactcccgataacctaataatactgaagtgaaaaacgtctcttcgtcttccccaccgagactctcgccattttccccatttcctgctacagtgcaaaactgcgccggacaaactagggttcatcaatccgctccaatccacccacaaaaacttcacaagatttctccccgcatccaccgctccgattcccccatccctttccagccatatctcgaactaaatcaatccatccagttcacattcatggcggaagaaagagaaagcttcgagagtcagtgggcgccctccgatgtgacggaagacaatctgaaggagatggtggcacacggcgttcttccagcaaaagagatcatcgggtggcgaccggcatttggtgaggtattcccgacccccgatacacacgaaatcgtggtatttgctcatttcttctatggcggattttctctttcaacttcgagatttttccggggcattctgaacttctacgggattagcttgcatcacttgaatccaaactccatagtacatattgccaatttcatccacgcttgcgaagcttttctgggcattaggcctcatttcgccttgttccgccgcatattcttcctcaagccccaaccaaacaaaaacaagccgtgcgttgttgggggagctggtttccaactcagaggaaccttgagccaaaaatatttctccatgcccttcaaaacctcgaacaaaggctggcatgcgaactggttctatgttcagaatcctgagcccgcacttcccgagtactgctgtcttcctccggtttaccaggacacatggaactcattgcctatgggagatgaagctgctcaggcagtagaactgatggagaggatgataaagctgaaagaacagggtcttcaaggagagcagatcacccggcactttatcaagtgtcggttagctccaatcaaagaaagatcacgcacagcttttgagtttgatggcaagcatgatccaaatcgggaagatccagattctcttgactttaaggtcatgaaagaaagaatgtacaaaatcttctcaaacgctattgttgtcagctattcatatctgttgcccgttgtgccattcaacgcattcaaccctcctccaccagtatgcactcaaacatttcatccttccccaaaatgcgatcttgctttcctgttgaatcaattaacaatgaaagatattacacccaggaatttgctttgatgaagtcggatcccccaatcgctcaacgccgatctccccgccactaaactgggcaagggagcgaaggaccaagaattcggtctgaacctcaaccaagtgcttctgatccagtcggccagtcagactctcgaaagaggaagctggttttaagtgacgacgaagccgatgatactgccaggcggcctggagaccgagagacaaccaagaaactaccaaaacaggctactccaaggaagaaaaccaccagtcgccctgcgccaaagatcaggaagtcttctaggtacaactcatataacgatctctcttgcattaatgtgcatccattgcggcaataacactgataatcaaatttgcaggaaaccatctgatatagatccgtctgggaaagattctgacccgactagcatggacgcaagttcttccaaagaaaccgggccaactgccgaggaccgtccgagtgacaatcagccggcaaccgataacgtaggatccggtgatcaacccctgactggaaaccagtcggccgaagccgaagccagagttaatcaggagcccccgactagaaaccagtcggacgcagggccaagccaagagattccagaagtcggagctcaagcaaacagccttcgcggtcaagacgccagcaataaccagagatctggatctcctttaaaggcatccgaatccactcgtcctcgtccagaaatcattacgggtaaaacactttgtctgaaaccatgtcgacccaaataactctgaccaattgtctaacctctgtcagtggatacattagggccaatgatcagtgatgaagaagaaattccccgcatacaagcagctgagggttcacgccctccgattctggtcaagtggtgggatgacaacatgcagcctcaagggatcgtgataaataagcaaaaagaggacgaagagttatgcctactgaagaaggcacttagttaggcaacccgtatggtaaatgtaagccctctggtacctgatcttgaccatcttgtttgccatttaatccatgcgctaattaaactgtcttgcagaggattcatcttaggaacgaagttaaaacggcaaccttagagaggctagtccctcatctcgggaccctcgaagccaccaggagtctgctgcacgaaacaaaagagcttgccaggaaaaatgagcatgatctgaggaatcgaattgccgagctccaggaatccaattttgaactgagtggctcatcaaaaggttcgcgcaaactctgcccacctgattcatactgttatctttgcgatcttgatttacagtaatcaatgtagtgcaagctgccaagatatctcagttggagaagcaaattcaaactctgggaaacgacaaggcagaactggcaagacaaaaagacctggctttaaaggaagttgaaggtatcaacaatcaatacctcaaaagccattatcttccatatgctgacttattaatttgagtctgtcgatgcagactgcaagatcaaatctcaagctcaattcgacgtcctggttggcaagatcaaaaaacttgaaggagcccgggatgaggttgctaacgctgctgccccaatagttcaagcgatgttcctcaataacaacggccctagtgcacttgatgcttctgaaattttcgacaagctgagagttgctccggatatatatttcaagaacatcaaagaagctggaagtatgggagcaagcatggcattggcgatgactaaatccctttatccgagagttgatattgacgccattgatggctttgcagacgggacgagcgaacaagctgctcttgacctcatcagtaatgcgcagaaagcggctgacaaaattgctgctgatgtagttgagagatttcaggacaccgatcttcgaccgactagtcttgatatttctgatgatgaaaagactgatactgattaatgtaccgataatcttgatgattaatgatgatggaggcacaatttgtaaaatactgatgaatttatgctgtgcttgatatcttaacttagctcctgatttcttaaaagtttttgtcaaaccttgttgagcctaaaacctgcaaaagttgttaaaaaactttcagtcctcattgactaagccgagaaatcgaacagggcaatgatacatcaagtaagcaaattgaattgataaaaatcacactccattattattatagtagccccctaactgaaaacttcgaggaaaaacttgaagttagcagtcaaagaggaaagatacaaacgaaatgcctaagcgtaaaatcgacgaaggtgttcaatattccaagaattgttgatgatagtaccatcttcgcgcttgagtcgataagaacctggtcgagtgacttcagcaattatgaacggtccttcccataagggagataatttatgccgatcctgtgttgtttgaattttcctcagaaccaggtcaccgactaaaaaggctcgcgatcgaacattccgattatgataacgacgcaacccttgcaggtatcgagtcgattgaattaaagctgcttctcgggcttcttctagtcggttgatgtcgtctactcggccctcttcatagccctcctcgttgaagttccgaaatcggagtgattcaaattccacttcactcggtaacattgcttttgcgccataaaccaaaaagaatggcgactggccggtagcccgactaggagtagtgcgtaaagaccaaagtacggacgacagctgatctacccacttgccagcataggggcgtagtcggtcgaaaactcgtgctttgatcccttgcagtatcatgccgttagcgcgctcaacttgtccgttactcatagggtgtgccacggaggcataacaaattttaataccgaagtcttcacaaaagtctttaaatgttccgccagtgaattgagtgccattatcagtgatgatctgattaggtaccccaaaccgatgcacaatgttgatgaaaaaatctctagctttatctgctgtgattgtgataaccggtttagcctcaatccatttggagaatttgtcgatagccacgaagagatgtgtgtaaccgccgactgcccttttaaatgggccgaccatgtcaagcccccagaccgcaaacggccaggacaacgggatggtttgcaactcttgggctggcaaatgagtttgtctggcaaaaaattgacaaccttcgcatgtccgcacaatcttatctgcatcggacacatctgtaggccagaaaaaaccttgccggtaagctttgccgacaatggtccgtgcagcagcatgattatcacaaataccagagtgtatatccttcaacaattgtttcccttcctccaaagatacacagcgctgcagtattcctgatggacttttcttgtacagctcagtctcatgaataatgtaaagtctgctgcgcctggaaatccgctcggcttcatttttgtcttgagggagttcttgtttgctcaaaaactttataaacggttctctccagtcggcttcaagcatgcctacgccttgagtatccatggcttcagttatctcctttctgggtacggtcggttcgtaaagatgttcgacgaacacatctgaaggagctgcttcccgttttgaaccaaaattggccagtctgtcggctgcctcattattgggagaattgcaaatataccactacttttatcctctaactcgaaatagccattaaaaaaacgcaaactgcaaatttgccactggaataacttccgtttactatttccgttggtcaaggacaattaagacaataaaaacaatttagaaaaccaaagagaaaaatcaagacaacaatttaccggttttcccttgccaagatcgatcgatcagctccctgcctcttctccggagtcctggcccagacatacaatactcatccgcgatcccttctccctcccctgtcttgagaaaccctagatcctcaaatctcatctcttcttctaaatccagaccaaatcatctgaaaattggtcacaatgaggaagaagatagcaatgaaaaagttataggggagagattttggagggttagggcagcaaggcgacggtcaggtttgcagcggcagcagcaggcggctgctgcttgggcagtgatgggcggttgcgggcgacggaggctggcgctgcgacagtcggatctgcaggcggcttgggcagcgatgggggcgaggcgagcgctgtagcggtctgttctacaatctacatgtggctgcagcttgggcggcagcagcaagctgttgcggcaacaacagcagcagcttgaatcacatcatctgcccacgaatttgcaggaacaactacgatatcattttggcatgtagcagtcgaaggaggataaattcatgccataatatgtaaatcttacaatttcctggtaggacatcctgtcataattttcagggaaaccaaccttctaacggtgtttgtccaagctgtcaatccaatggcggataggatgggttcgaaccgtttttggtggcaaatatgcaattgtattttttctaatggcagattcataataccaattcaaactagtggcaaatatgcaattggcccctcattattatgtcggaggacatgggtgagctcgagtccgtcgaatttatcttccagcttacgtacctcttgtcggtaagcggtcatattaacatctagacatgaccactctttcatgacttgattaacaaccaactgagagtctccacagacgattagtcggcgaatacctagagatattgcaatccttagtccatggaatagggcttcgtatttcgctacgttatgggacgcagaaaaatgtatccacaatacgtagctcaatctttctccagtcggggaaatcaagacgaccccagctccagtgcctgtaagcctcttcgacccatcaaaatgcatagtccaatattccatcttttcctctggcatgtcttcttggcactcggtccactcggcaaggaaatcagctagagcttgtgacttgatcgaagttcgtggtttgaaagatatatccaaagacatcaattctaaggcccacttcgcaatctgcccgtttgcttcgcgattatgaagtatatccccgagtgaaaacgatgtgaccaccgtgaccgagtgactttgaaaatagtgagataatttcctgacggtaattaagacaccatataataacttttgaacctgaggataccttgtcttggagtcggctaaaacctcgctgacaaaatagattggtcgttggactttttgaatatggcctttctcttcacgctcgacaaccaggaccgtactcacaacttgggaggtcaccgacacatataacagtagcggttcttgtggatgcggtgaggccaatactggtggagtggtgaggagtttcttgaagtcttcaaaggctttttgtgtttcgggtcctcactggaaatcgtcagttttcttcagcagtttgaagaagggcatcccccgctcgccgagtcatgagacgaaccggctgagcgccgtcatgcaaccagtcaacttttggacgtctttttgggagcttggcggtttcatgttgaggatggcgttgattttctccgggttggcctgtatgcctctgggttggcctgtatgcctctgagataccataaatccgagcaacttccctgacagtactccgaagatgcacttttccgggtttagtttcatcttgaaagcacgaatgcttgtgaaagtttcttctaaatccgcaatcaggtcatccttctgcttggtcttgacgactacatcatcaacataggcttcaatattgcgaccgatctgagttgaaaaacacctttgaatcatgcgttgataggttgctcctgcgttcttcaatccaaagggcatggtgatgtagcagtaggccccaaagggtgtaataaacgaggtcttcaagcagtcggattcttttagtcggatctgatgatatcccgagtaacaatccaagaagctgagtagctcgcagccggccgttgagtcaaccacctggtcaatgcgaggtaacccaaaagggtctttgggacaagatttgttgaggtcggtataattgacacacattcgctattgccccgtctttttccgaaccaggactgggttagccagccagtcgggatgaaggacttcctttatgaagcctgctgctaacagcttggttaattcctccttgatcgcatccttcctgtcttgtgcaaaacagcggagtcgttgcttgatgggtttggcgtcttccttaacatgtaaagagtgctcaatcacctctctggggataccaggcatatcggatggtttccacgcaaaaatatctttattattctgaagaaaggtgatgagcgcgctttcctatttacaatctaactcagcgcctattacagcagtcttatcaggatcggagtgatctaggggaatctttttcgtcttggcatcactttcttcggtcttcgtcagcttggttgcaggcacttctccctcgcctgtcgtggttgcagatagtcggatctcttcgcgagcaaaagtagtctcgtgggtttgggccatctcgcagctttctttgtcgcatgtgacggcctgcttgatgtcgctccgtagtgatataacccctcgaggaccaggcatcttcatcatcatgtaggtgtagtgtgggacggccataaatttggctaaagccggtcgtccaagtatagcatgatatgctgtctcgaaatcggcaacttcgaaacaaacattttctgtgcgaaaattttcccgagtgccgaaggtaactggaagagtgatctggccgagtggtgtagctgacaatcctgggataacaccgtggaagggtgcattactcggctttaattccgtgcgaggaatctgcatatcgtccagggtcttagtgaaaaggatgttgagtgcgctgccactatcgatgatattccgttagagcttgacattgcgaaccactgggtctagtaccagggggtaccgccccgggtggaccactcggtcgggatgatccgagcggtcgaacttaattgctgtttctgaccaccgaagatactggggcgtgttaggctgaactgcattgatctcccgttctgttagcttctgttttctcttggactcataagccaggggtccgccgaagatgtgattaagttctttgcgatgatcttgaaaaccagtcggggcatcgtcttcatcatctttcttctttgatgtgcgttcttgacgtattgctccacgaactgttttgtagacgaagcaatctttggccacgtggttggaattgggatgatgcggacattgagagttcattatcttgtcgaaggtgttgaagcggggacgttgtcgggaagatggagaggtggtcgccacaagttcttcgggcttacgcttgcgatccttgtggttgttacttccactcccccctgcagtcggcgtgtccttctttggcttccaagtggtgcccgactgtttggacgcggtgatagcatgttcggctttggcatactcgttggttttttcgaacatctgcttaaccgtcctgggaggtttacgtccgaacttgccgactaggtccccgtggcgaatgcctttagtgaaggcggcgatgatgacgtcgtcggtgatgtcggagatctttttgcgttgctcggagaagcgtcggatgtaatctcgaagggattctccagacttctgaacgacgttgtagagatcaaactgtgtgccggggcgttcaaaggtgccctgaaagttggcgatgaagtgatcacgaagttctgcccatgatccgatcgtgccacggggtagttcgtggagccaggatcgggcggagtctgctagggccacaggtagatagtttgccatggccttgctgtctccacctgctgcgcggattgcgagtccgtagacggtgagccaagactccggattggtggtgccgtcatacttctcgattccagtcggtttgaagccgactggccaatccaatcgatgcaggtcattagtgaaggcagctactccatccacgtcgtcgtcatagcgatttggtgaatgacggtgacctcgtgctgcacggtgctggttgatcgtgtcacgaaggtcgacgggacgctggcgaggtggagaacgaggctgtttagctcggcgctccctgtgacgttcgagaagcgagtgaacagatcgttcgtcgtgacccctgctcctgtgactagatcctgtgccggtgatgctgaggcttggctgatgatgagggactcggctaccagtcggggtgcgggtgcttgcggagttggctggaaccgaggcagcgatcatggtcttcgtctggttcaagatgttgacaacatgatcggcttggttgagggcgtcttccttgaggagggtgtcgaggagagtgattgctgcaaccgcgttctgctggggggtgcgaaagaccgctgtcccgtcgacgtcttgttgcccaatgagctctctcgctcggcgcccagattccaaggcacggtgccgtcgatcttcagcttcctttgcaatccgttcgtgatcttgttgttcacgctgtagtcgttctcgctcctgtcgctgtcgctcctcctccagtcggcgacgtttagcttcttgccgtgcgcgatcttgttctgcttctcgggctcggcgctgttcttctgtttcgttgtcagccatgaatacgccgaagaagaggggcgtgtagttatcctcgtagctgtcgtcaaagttgtcgaagtcgccatggtcgtagtggtagccgaagtcgtcgtagtcgaggatctcggttggtcgggaactgacgccgggggagctgaggtagccatccaactcttccgtcgagactgtcccaagaggttggagtataacgccaacctccctggatctagactggatcggggccggtgccggagctcgcctagatctccgagtgggagatgttttggctgtgaagacggcggccaagtcatcaggaagtttcatcaagattgagggataggacccgtcgtcttgatctgatcgtgggggaatagattggatctcgtccgagtggcttgaaatcgactcaggagagatgatcttggagtaggcctcggccgagttcggaataccgaacggcacggggacctggtttctccccgactggtttgaatccgagtcaaggagagagatcttgccgaagtcgttggtgatgaagtcgaggctgccgaatcggaacgcctgcccgggaggcaagacgaagtcgtcgatgccagaaacgaaacccatcgtacttagtcggcgagaacttgacgccacccctacctggcgcgccaactatcgaaacaagatttcggcaataataaagggggtggctgtcaagctaggaaagtggatgggtttggagacaaggaattttatacaggttcaggccttcttattaaagaagtaataccctactcctgtctggggatgattccgccgagtgtgttattgattgtatgattgaagaaaaaagaatcgtgccccaagaggcacacggaccctcattatataggggaagggatccgtaatacaaggtacagtccatatcctaacggaatatgggattacagataaaatacaatcgtaaccgactaggatcccgggtattttcttggcatacaagtttagaatctaacccgagtcctcataaagatattctatctatatttggtaccatatatctgactaaagtataactgtcatgcagat

SEQ ID NO: 1763 - DNA, 3859 bp, Oryza sativa
  Intron number 4 from transcript LOC_Os09g07320.1 (locus LO C_Os09g07320) derived from phytozome v7.0 (chr-ID Chr9; po s 3621324 to 3625182)
tttgttgagataggtatagatctacttccatgcttatattctctgtattagcatgtatggtagggtgttttgtaaagcttcctacaaactggtttttgtcattgccctttacatgtcttttatagtttcagaaacatctgcgccattagcttactcaggtgtttcatgctgtacatttgttttgtgctctttgcctcccaaatgtcaatcatcaatgcctaaacacatgctaggacttttttgggggatagttgcaactattgcaatgggcatttcataatcaaaaagaatttgtgatttcacagataactaatattaagcattagtaatcatttgatcattcatgtaaatttgaaacttttaatttaatcatgttccacttgtagttgtgtacttgtgtaaacttagatagtttgccttagatacgtgtaaccttcttgagcagggaagagtcagctagcaaaattatatacacatttactccctccgtcccctaatataaggaattttgacattttacttgcactgtttgaccattcgtcttatttaaaaaaatttggaattattatttattttatttgtgacttactttattatccaaagtactttaagcacgacttttcgttttttatatttgcacaaattttttgaataagacgagtggtcaaatgttacaaaaaaaatagtgaatcctatatacctatacaaatcatccccactactagcaattctctgcatcctcatgcttccacgtcaccccgttttctcctagccattggatctcgatcaagcgcttctcccggtcaatctgttggcaatccattggatcaaatatcaatggttaatgtgcagtccctctgttttcttttgctggccaacaagcccaactttacacaccatcaagcccagtccacactccttggcccaatttccaccgcatcttcccacactccatccacaccaccattcccgttaccctcttgagttcgagcggtcacgtctccctgcgccgctagaaactgcgagtgcggcgccggcgcctcaccttccagatcctgcgtagcgtcgtggttccccgccagctcttggactgctcacctccaaatggaaaccaccgctcacctgtcgtggttcgatcgctcaaactttatagctgtcatcaagatagttgttgtctcctcaacttcaagaaactatcatcctccacatcctgttcggtcgaatcctcacacgctgcccgattcacttcctactgcatactatttcacaccggaaaccatcgttccattcgttttccctgcctttaaagcttcagccgcctcctcaccttcaagaaacctcaggggtatatattcatctaccaaaggtatgcttcttcctccttttcttgaaccataaccatatatgttcattcaatttattggcttacatttctcctttgaatcgcactcgattgatttgttcatgttatataccagattatcaatggattaaggacatacgagtattgatttggtttcggctcttcttcagatttccactgtcccaatatttatttggatttgtctcttcttcagatttgtactgtccctattcaataggattgaaatttatttggatttgtcacttcagatttctaccgtccctattcaacacgactgacatttatttggatttgtttcttcttcagatttatactgtccctattcaacaacattgaaatttatttagtatgtacaatttgttaaaggagccaattcatgatcatggtattatatgacgactctaaagatcatatatatgcatataccggttttatgtattgctgcaccttaatttgttttatttctgaatactccggttgcagatcattgctattagtagattagatactgtcgttgtagcagcagctctgggctactgctaaggtcagtcgccatggccatccaaagcagcagttgcagcataaatttcctcctatatgaatcctctattaagaaaaatatcaacaatacaatcggtaatgtttaattgtatctacttcattcatggtcatgttttccaaatattatattatgcccaccctacgttacttgctttgcaatttcttccataagaacaaaacaatatcatattttctgcagactatcagggactgagttcagcaatgaacttaatttaggtaaatattggtccttggatctgttcattttttttagatgaagggcaacgccctttgcatcctatggtggatgcaccttgcatctgtccatgctaaccttctttgctatatgatgttcttacttaacatacgggttaataagctacagtttgtgatggatgtaacttaattcttatctttcccttctttcttagtagaatataaaggatgctctttgtaatagcacacaattgaacataataggggattcatcatttatgtttctatcgatacaatctctctgccctaatgattagtatcctcaagaaaaaaaaattaagagagtttctgatgctttgtttagatatggtagctatactttttccaaagatagaaaatgtttaattttttggctttcaatttactttatggtataggatggtaagggattgagcgatgttgatccaataagttagtaagggattgcactatgtttatggattttttacattaatcataaaacatagattacctcacatgtagaccattttaactgaagaaaggtcaataataatcaaaattattctctcttacattgctataactatttgagatatttgtatctcaaacttcacctttgtcgggcattccgtttatatttcttccaacaaaatactaaatactccctccatctacttttgatagtcatatttctaaatctaaaaagtttatttttgataggcatatttcaattcaacaacctatcatcttaatgactttctcggatttaatgcatgactctccattcttccacacaagattggctacatgggcatcgaaaaatgtaaatattaatgaatcgcttgtttacgagaaatgactagcagcatgtttaaatggatgataagtagaattacttatcattggtctgtgtgccaagatgaaatatggctatcaaaagtagatggagggagtattgtttgctgaaataaaataaaataatcattttccatggctatctattgcatttgccttgcatctccgcatatatagtcttatgttcctacctacaaatcccgcagcaacgcgcggggtattttctagtatcccttatattaggggacggaggtagtaggtatctaaaagagattatagggttgaatcctagaaactgataatttaatggaagacaactctagcatctgattcttgaaaggtagaaagtgagacaaggcttcattttgtattaagacccagataacgataattcctttggtgcaattacttttggaaaatttggtgtttggcaaactgattttctttttaattgaagttgcaaccataaatagaaaaggcagtgcattgtgagaaaattaactgtttggtaacagaatgtctagccttaatttgatttctcaatagaccacatactgcattccaagtttatcacaaatagatccttacctctctgctgtgactcctaatctatctctttacaataaagcagtaggttgatgtaatcttgattgatattaacttcaccctccacctccatccaattccaacaagtgattcttgtacaaaaaaaaaaagagaaaaactaataataagttctatcttccatttgatgtgttgagccaaaattgctaataccaatgttcttctcaggaagtactgaagaatattggtgtcggcaag

SEQ ID NO: 1764 - DNA, 1207 bp, Oryza sativa
  Intron number 3 from transcript LOC_Os02g07180.1 (locus LO C_Os02g07180) derived from phytozome v7.0 (chr-ID Chr2; po s 3688422 to 3689628)
gcggaagcgtcgacgaggagctctggcgagaggtagctgcaacgttttcttctctacctgtttttactgttgtgtggcgatttcatcagaacttggtggcatatctcgaagcaccaatgtttctagagtgatttatatcaaaattgatcctcatggttggtgaggagtaacaaaattggacctgattgtgtaatctacagtgtatctcattgtgttgtcacctatgtagtattgatgtgctcttccagtggactcccttgcagctttgtaggtgcttggttatgctctctccttgagttgtaggttatgcgaaaacgacattggttgccaattttgttgtttaggtccaaaatttggctcttaatatagtcgcgcttcactcgatgtgcatagaatttaccgctaaaattacaccttaaatctttctgaagctattttcatgcctgcacctatcctcacaggcaaaattaaactgcaaattattttactcttttttactttaagaatttgcaaatgtgtgttaggtcacaaatcagtgttcagctgtccagtccattaccatgtcaagttcttttggcactaacctcctatagatggatgagataaataggagtagttgataattctctgattatcaatattagtatccagatatatattatgctacagttacactagagtgaaggcagtgagctttttgcaggtcggtagattatatttctatgatgatcactcgatcagttaagattatattcttcagatataatgttgtactgattttgagctgtcagtgtctagttttcattcaaagtaccataaaagagtttactgatgcccaacttgctgtctgtaggtttatgtgcatgatattggtttatgtagatatattgttgcctcgatcaaatctatcttgagattgatgcaaactttcaacattcatcacatcttctatttagtataacgcccttgcacatgcttaaagaactttgaatggatgtcctacatgtacatgtggtttgcattttcattgggcacactacatggaccataccatgttttaactttcacggttctgctttaacagttgaacttcatcaatacatgttacattataatcaattctttttttttgcggggacattataatcaattcaactgaaattaatttcatagcatctctctataaccaggcaaattatctgaaatc

SEQ ID NO: 1765 - DNA, 2202 bp, Oryza sativa
  Intron number 3 from transcript LOC_Os02g36390.1 (locus LO C_Os02g36390) derived from phytozome v7.0 (chr-ID Chr2; po s 21977029 to 21979230 reverse strand)
ttattcacagcattcttcacttatcttattttggggtatgtcctggtgatacctcctatttacatattacaatgtattgatgatgcacatgatcttatgaagttataaccatgaagtgtttgtgtcactaatatttgaacttcccttaatgaatgccactgtttggcctggcatgatcttaacatttgaatttttactgtaaatttattattttacaatatatcattgacactttttactgttaatttattttacaatatattatttacaatcacagaattattaccatatggatgtgtttttgtttaagtacaaatataatggtactgtttgtgtgccactaaatctttgttttgctagatttacaatgtttgaatcaaatacatgggaatcttgcaaaagtcaatgtaaggagtaatgttgtattcaagccactgctaaaacaataggttcgctttgtttatatgcatagttttatggttcaatcctttaaatggtcctagatctccacccaagggaaaactagttgtcctgatttttgcatattatataactaggctttaactgaaatccttatttaccatccatggtcactgttttagggattgcaatttaagttcatgatatttaagactttttccttaacaaatcaagttaaaactctattggccttgctggtcgcatcattatcgggtttattttctgtaccatttccctttttaattcattgacatatggtgagttggtgacaagccagaaagaaacaaagttaaggactggaacattttgttccgcgtcaccaaaagatgcacaatttagctatttatgactgcgtgtaatttaataccacagaatgccgcacatgaaatcctaaattgccctttgttccaccatacagccaatttgtcccttgcgtttcctctattgccagcatctttaccattcttttcgtaaatgcaccaagcagaggttgctgacaggttaggaatgtggtggggttgtggcttgattgggcagtggcaacaattaaacacaagggtgatgatggtgtggtgcttttgagaatccggaaaacggcagaagaaaggaagatgattgtggatctgagcagtagctcaagaattgcagccatgccttatccatgtgttgaccagcaggacgtccatattgaccatgtgtggttagtgtggggatggaagcctgttaccagcatccttgctggccactggctaccacccaccaccacctttgcttcaagtccgaccacatcatctatgagcctgctttgaaaaagagaggtgagagggatgatgtgtgccatttttcgttgttggttcctgttgtcactcgtacttcctgcccaccagtgaggatggtgtccacacgctaaaggaggtaaggactgagtaggaaaaagaggacaagacaagcaaaatagaaaatgactggatcccttaattgccgggaattgtattttttaaaagattggaggaaaccagtattggagtgcgttagaaaagttcagttctatatagctaactagatgatgcgccgtgctttgttgtggaatatatgctagatattgtagaaatgatttggattgaaatattgtagaaatgatttgaaaatgatgatttagcatatgtatgtttagttttagaatgaaataaattatagatataattactatatgcttgcatgttgagctttgtgtgcttagtaggttgatgtggcatgcttgcatgttaggttttaggagtgctaataaatactatgcttgcatgttgagctttaggtgtttagtgggcattagctttatagaaagaagggattagatttattactacaaaaccttcaccacctactttttcctggtatttggtaaaagttaaaccaaaacaagggtatttggtaaaagttaaccaaaacaagcccattacatattattcttcactacatgtcatgcaggattagagctagggttacacacctgttactagttactacacggaacatgaatcgtttggttgtgttctaacaactgccctttatattgtttccttttttcttatgctccacatgtcacatgctggtctattctgtcactaaacatctgaattaagggcctatccattaattttatctctttatggattatatcatgcaggcaaaagcaatcacccaagcaaatttttgcattaa

SEQ ID NO: 1766 - DNA, 2185 bp, Oryza sativa
  Intron number 1 from transcript LOC_Os07g36210.1 (locus LO C_Os07g36210) derived from phytozome v7.0 (chr-ID Chr7; po s 21633078 to 21635262 reverse strand)
cggcgcgtggtccggtcggagtacgacgacttccggtgagttttttttttctctttctccccgcgcgcgcgaacgttagcttgggcagttttttttggccgttggatttcggtggttcgagggatcgggacggataggatctcgacacgtgtccttcggcgcgcttctcccgcgtcgccggacgccgtggcgcgtacgtgtcgcttccaggtgggccacgggtgacgtggctccgagtcaaggtcgtccgtgcgtgcatatgctacgcagttttgacttttttgacatttttacctcatcaacttaatcctctcctgcagcttctttcttttggatttttttcctttttttgggggtaatactccgtagatgatactacgtataaagacaaaattgctgaaacttggttggtttgatcaacttgcgagttgcgttgagtacctaattagcaattggatctcgcagagagtttgactccagataagagtgagtagaaaatttaaagaatcctaaattaaatgggttcacagggatcaagcttgccaggtcaatgcactttttttttttggcaactagcagcttatacagttgaactgttcatcgcagctcatgattatccgtataacctagccatgttgcaaagcgtaacgctccatcatactttgacgacgtctagggttagttgaaaccgtacatattattccaaagacacataagcaatacctattgtggaaaaaaaaataagtgagtgaaaattcataagtcttgttttgtatgcatgaattttaagatgctcatgtcacgtcgagatactgcagaaaaaagactgcagactcatccggtttttcaatttccattatcacaacaaaagaaaattgacatactcatacggcttaaattaaggaattcatctctatagttgaatatcttagcactttcaatttgtgtacagatgttaatgatgttacagattcttagcattattaggtgatgtctaatcgagtactaatttattatatgttatgtaagatggaaggagtagatggacacttcgaaactcatcgcggttgccccttttttttctaataagttattttggcttattagaaaataaaaactaatttatagataaaacttttatatatatttctaacgatttaaaagtcgatgttgaaaaataaactacgttaaaaatatcttaaattaactttaaaattaagtttaaaaatttaaattttagcttttgtttgatttattagggcaactctctttaattccctgcaactagttggaccaccgtgtcctaacaatggaatctactatgtatatagacaatctcaattctcaccgtccttgtcagaatcaagaacgagggggtcctccacacgtactaatttcctcccttttatcgctagtgcatgttagtcaaactcaagctatagtacactggcccagatgacaagtgaaggccgtgaaactcttcccctgatcacttcgtgcctgctaccgctactacttcttgtccctcacatgccattatggcaaaaatttcaacagacacccatatgttcaaagttcaaacatagctgaaacttgcgaaatatatccagattcatatgcatttcgtcccaaaatacataaactttaaaagttacgaatctggatatgcatttatccatatttatagctaaaggttgttatattctgagattgatggtagttacttttgtggcctagttatttttagcttgttcactaaattattgctgcagattatttgctttgcgtttctttttctattttattgttcaccgttatttgcttcacatggacaaaataatccgcggcaataatgccttagtcactctctctttttttttttccttagggggagggggtttggggtttctattaactggtactccctccgtttcacaaggtaagtcattctaacatttttcatattcatattaatgttatgaatgaatctagatatatctatctatctatctagattcattaactttaatatgaatttaagaaatgctagaatgacttacatatgaaacggaggaagtaactcacaatttagccttcattactggtaccgtggtactaaccaaggtgcatctctgtgtctctacctgcaggcactacggggcacccacggtgttgccggcgttcg

SEQ ID NO: 1767 - DNA, 6176 bp, Oryza sativa
  Intron number 2 from transcript LOC_Os01g42234.1 (locus LO C_Os01g42234) derived from phytozome v7.0 (chr-ID Chr1; po s 23924135 to 23930310)
gctcaccggctggtaagtatcagagtacctccctttctgcgtgtttgtttactaagcactccatagtaatttattatcaatgtactactgataatgtagtagtacttcgtaggttgatcacatattcctgtgagtaaatgtcaacaaaattaatctaatcatgctgctttagttgattaacacaagttttattattacgcttatgcttattcttataaatccaaatttaaattttaaattttaaaacttaattttaaggttgattttgtggtttttttttatcgcagaattttataccatttgcttttgaatcactaacacgtatataaaagttgagctttatatacaaatactttcttttaagatagtgaaaatggattatacctcctgcctatacccataaacagatctacagccaaaagccaaaaaaatctcagatgcaacgcctgcgtacgtgccataggttggtcaacgtgagtacgtgagtccttgctgtccgtggattacagagtacggagtcggagtagttaaaattgcaagtgtgggagcaaaaggcaaccgagccatgaacacgttctgtacgaatcagtcggccgcggaaggaagagccgcacttctctttttttttttcctccgtcttggtggcgcacgcacgtaaaaagatgtcggcctcgcgctcgcctgcttggtacgtgtcgtggctgcgcgtgcggcctctcgtccaccggcgtaggggtgaggcgaggtttttgcgagcggcggcacgtgcgtcatgcgatcgcgatcgacgcacgtacagacagagccatcgacgtccgataaacaggaggatatgggcgaaaagtcaatcccgaatcttttgattgcgcaaagtgcaaagtgcaaaaaaaagaaagaaaaaatattagttcttttggcatctctagcactccacggctaggcccataagagcacccgcaatggtaaagtaaggtgatatctataaaatatgtacatctcagcaatagactagattaataataaaccacttcaatgatatgtctacatgggtatctatagctctctaatcaattgtctcgtttttctctatagactatatccaggttagtagatagctttgctctttctcttcatttaatctcttccaagcaataaaatatgctgacatagatatcttgtagatagtttatagataatcattacgggtgccctaataattaagtctagttgagtgagtacgtacgttaatttgcacgtacgcccggctagcgaatccacacgtctctacggctcgtttaataaacacgagacaggttgcaatcaggacaaagcaaagagaggaaatggcgtgccaggctatatatgctcggttgttaatttcgtgttgtgtgccgacttcgaatcccgacatcccgtagacacgatccggcaatataagagcaggtacaatcaataacatgctataagatagctgtaaatatattttaaaaaattaaatgaggagagagaagagcaacggactacagatttatagccagctgtagcacggactctaagacgcagtatgcgtatgacaggtgggaccatgtattaatagtgtagtatgtagctattgtatgaatgagctattagaatggctatagataaattggagctagtagttggctatactattaaacttgctctaaggggaaccgttgacaatttaagatgtatacatgtctgtctattccaacctttcattctctcagtcatcttcaaagtctgtttcttaggtgcataatataggctctgcatctttcctatgagtctgaaatcattaatttcaaggaatggttaaattcaaacaacattttcttgtcagatactactcccaaccacactaatttccggttgttactgaccgagctatgttaggcggtgtttggttggagggattaaagtggtgctaaactttagtccctctcacaaaaatataagttcttaccatagggacttatacttttgtgagagggactaaatttagtccctagttcccaaacacccccttaaaatggttacagacaaaaaaaaataaaataaaaaaagaaacatagaaatggaaacgaaaacgatttgctttgccgcgtatcgatcatttctgaattttaccatgtccttacggaaattatttttttctatattgtggtaattatcgtatttctattttatacttcaatgtttccgttcgacatcaatatgtttatgtctatataatttcgtttttatgatatttctgatactgtttttattttcggtttcatcgttttcgattttatttccaagatatatactctatccatcttaaaattaaagaatctagtattgagtatgttatatcctaatactatgaatctaatattaatctaatattatgaatctgtacaaatccttcttacgaggaaaatatccacaatagtaggatggcagaaaaaaaagaaattgcctctttgtctcgtggttgactgaaaaacaatccatatcctgccaacccgtacgctagtactcctctgataatctgaattgaccgtaacctgatcctttgcagcacccaaaaaaggggtgtgtttagtttacactaaaattaaaagtttggttgaaatttaaatgatgtgacggaaaagttagaggtttgtgtgtgtacgaaagttttgatgtgatgaaaaagttggaagtttgaagaattattttagaactaaacacggtgaagatctagctggtgagtcatgtcgtagataagaatataaaaggttcttttacatttctttccataaagtgtcaaatataatttgctacttggtgtgcagatgatgaatcacgtttgcagactcgcatgtaacagaacctgttatttttataagcattttatatgccacctgacctgcgtacgcagcgcgcgtgctgtgcgtgcacattttcaccgaatcccatcctgcggtcctgccatctctgatgcacgcgactttatttttttttctgaggacttctacacgtactaaaacttttttacaaaacatttgcaaacaaaattttcaaccgtttaatttaatttcatggaagttaaaataatcttgatttactcacaatatgccacgtcagagttactacgtagagagcattttgtaagaaaaaaattagtatgtattatatactgtactttccttttttttcttattatatcccttgattgggtttcgtgttaaaattgagacatctacagtctgtgtcgtatgattcgaattcccatggggttggggtggcccgtacactagacgcccgaatccaaagttgcaaacctttactttagtttagtaggaacactttactttatgaaactataaaaaagagattacgcgtgttcatgccatctacttaaaaaatatatatctagcacgaacaccaaatagtaggagtactaagagcaagtttaatgaggcacaatcagcagacgataagagtgccacatcatctaaattcattcgtggaggagagagaaagatagagggagagggcaacaggcgcttctgcaagcgccgagctacagcacaagaaactatgcatattataggaaccaatgcaaaatcaatattgtggttgtttttctccaatagcatagctatggccccattagcagaacacacgggataggatagagagtagcaagttagattaaaaaatagaaaaagttaactacctagagaagtgtgtaggtagattagcagcctgctattgtacgtatcatctttattttctacctccggatgacatgtacatttttatcaccagttgatggcggtactattaaacttgctctaacttatttctgttcgtggcggctatcaatagtttaaagagcagcaccatgctgacaggcaaaagaagatattagtttagggagattcgcactcaccaggaagctcaatcaaaatagcaaaatagcatgactaaaacgtagtattttagtttttctttttcgttgtttgttatttatctcaattatgagattagtattgtatgcactcgtgtacttttgattgtgtatatttactagtggatatgacaattttttatccaatatctaaaacatatgctgacagccaaaagaagaagataatagggagattcggattctcgtcaggaaagctctatcaaaaatagcaaaacggatctccacccctcgtgggcaaatggggtctcgtctcctctttttttaggcaggagggagcaaggctagattcctcaccccaacactgtcgcagatcccaccatcttacctggcagattcggtatcagcgcgtgccagtccgcccggcgcccggaggtaaagcaaccaaccaaacaaaccatcacaaaccccgcactttcgatcgtgtacgtttgaccccgcaccccctctcccccgcccgcctctcggcttcggccttcggcgcgcttcgcctacaagtagtagccgcgcgcgcagcacaccacaccaccacaccacacacggtcacacgtctcactcgccgcgacctcccctccaactccaacctcgcccttctcctctcccccgcgcgcgcgcaagcgagcgagcgaagcgccgcaatgacctggaacaaggccccggctgcggacgccgaagccggcggcggcggcgacaccggccacgcgcgcctccgggagctcggctacaagcaggagctcaagcgcgacctctcgtacgtcgccacactgcccctctctctctctctctctcgtcccttttcgcccttttcttggctgactttaaaccggttcacgcgcgcgacggcggcgtgcagagtgctgtccaacttcgccttctcgttctccatcatctcggtgctgacggggatcacgacgctgtacaacacggggctcagcttcggcgggccggccaccatgacgttcggctggttcgtcgccggcgccttcaccatgaccgtcggcctctccatggccgagatctgctcctccttccccacctccggtggcctctactactggagcgcccgcctctccggcaagcgttgggcgcccttcgcctcctggatcaccggatggtacaaccgccattcttttttttactaatccatagcggttaattttttttgaccccccattttttaattactttactactgtcgtttgcctgatttcttgccttggttcggatcatgtgaattgggggcgcacgagaaggatcatgatacttgcatgtgaacggggtttgttgatttactaattgttaggccagtttttctcttttttttttctgtttcttgttgggagttcaagatatatatggataatgggaacattgtcaaaaagcttgattgtttttctttctcatgttcccttccgtttccttgttttcttttctggagtgacatcaaagcggcatcttcaaaagctctgcaatcttctctccttcttttcctgctgaacaaaatcttttttgttccgcccaattagatggagagagagagagagagagagagagagagaagtgctgctaattcgtactactactttgcactgttctgatgtcgtattcaatgatgtggtcctattaatccaagtaggaatttttgtttcatgcgttttagtcaatgttccattctttgaccttgtgcagggagagcattgggcaaagtttagaaattttggttttgatgacgactgacgatatagtgtttgatcagggttaatcattgaagcccagtagcagtagttcaactgagtatatatattgtgctcatatcaacttcttaatactaaacatttagttctaagtagctctgggaggggatatgggtttacttcgcattcattggaaatctgtcacactgtcagcatatcccttctcggacaagtcctccatttctattcccagcaacaaactctcatttgagtactgatgatggtacttattggtcgtgcagacatagtcttcattctgataccactgaaacatgacatcaatcaattatgttcctttcaacctgtcaccataatgaattgggtatgatttgattccaaaacagttactttcagcatctaatcctctgttgttttttgcttgtttgtttctgtcacctgcaggtttaacattgtcggacaggtaaaccgaaccaaac

SEQ ID NO: 1768 - DNA, 1215 bp, Oryza sativa
  Intron number 3 from transcript LOC_Os12g13590.1 (locus LO C_Os12g13590) derived from phytozome v7.0 (chr-ID Chr12; p os 7639787 to 7641001 reverse strand)
cgcaggacgccaagcatcgcaagacgctcggggaggttagcttctacaaacgcacgcttcttataaattcgttgctgttaacaatatttgcgcgaagacaaacaaccatcacattgaataacactaggaaaaaaggataaaaccagaaagaccctatggatacagaaacaacaattggtttcgtttagggatatatctgacaaatccacagtacaaaaggaaatgtttgtactccttttgctccttctggtaatgataatcgatctgtcatcctgttaaccacagttaaatcaagtgcaaatccattgcaatttaaattctgttatgcacattgtatagatgtaattgcatagttaatacacattctttacgagaaaatattctgctcataaatgttgcttcacatctctggcctgcatattctgttagacctgttcactttgtttatttctcccaaacaaccagttaaaccaatctcttggaaaatttcattgatagtaaactgggaagctgatgttcagaatgacagaatgtagagcattagggaaacaattaacagtataaaagcttctgtaccagagtacttgttggcattttttttctaggtatttggttataaaatgcttttcttgttacggacagtatctgatgaaggttgtagtttgattaaaaaactctgctgcatgttaattactgcttttttgcacaacggctcctggtgtgttatgtggttgtttactccaacagttcctttctattatttatcttttgtgattatataaatataaatgaacaatgtagtccttcctcatttggtatcctggaaaaatgacaatataatataatgaatttttttcttctgaaaactactgttataaattcaaaatatatgagctgggtaaaaaaaaaatggtattcccgctcttgtagctacattttcccatagccacatgaaccctctgaattagattccattttttgattgaccatgttttgttctatacctttgagaagagttgtttttaggggagcataatatgatatattataatgaaagttttaagctccattctggaggtaaggactgtttattagttgtagcgctgaaacatattcctgggatatattgttgaacacttgaactactaattcttgcttatttttcattttcattgttcctttgtttttgtttactccagcttgagaaaggtgtgg

SEQ ID NO: 1769 - DNA, 4476 bp, Oryza sativa
  Intron number 3 from transcript LOC_Os05g23924.1 (locus LO C_Os05g23924) derived from phytozome v7.0 (chr-ID Chr5; po s 13700769 to 13705244 reverse strand)
tccgcggcaacagtatacagcttctcctgtgagtatatatatcacacttcattttttgttcgtcacttctgtttttgttcctctgtcttctaatttgtgctcgtgttttcaaaactagtgaaactgattttcttctctctttttttttcaaagaatgagtatttgactagttgatctgaaaattttacatggagctggtgcaactttgcagtgtgttggtgctatccacaaatgcagaatttcttgcttatcttgtactccctctagtaggaagtatttgatgtttagaaaaaaagatatgatcaaaccctttaaatttgactagtagtttctaaaatgcttagttaaaaagctatacatatatttaccttgaaaaatactatcacaaatttattagatttatttataattttatttcagtacaacaattgatagtcttaaacattaaatattaattaccaaatggattatcttgaaaacaaattctagagataacgaattgaattgaatgagtacgtagtaattttatgttgaagtgaatgacggcaaagggtatcttggcgaacaattgcctgaaccatattataggaggttgtgaagcataaactctgtatgaaagaggtatcaacaccctaaaataaaatgataaaaaaggcaaaattggttatatagcatcgaaagttcacgtttttggttttatagcaccgaaaaataccggttcactttaacagcacccaaagtttaccctgttcccatttttagcacttccgtcaatttttccgtccgtcttgatcgttattgacccagctacgcacacgatatgacgtttctacccctcattgacatgcattctacttgtacttgtgaggggtagaaacgttgtgaggggtagaaacgtcatatcgtgtgtgtggctggatcacgacggacggaaaacgatcgagaattgatggaagtgctaaaaatgggaacatggtgaactttgggtgctattaaagtgaatcggtatctttcggtgctataaaaccaaaaacatgaactttcgatgctatataaccaatttttccaaaaaataactatgggactcaaaaaagaagatatttgtcaaacttcaagcattagtaactcgacaaaaacttgttctaataattttgagggttgttggctttttgatatggctagcgttgtgcatgcatgcaacacttatgttataatatggagagaattattatataccatcgagtttactatgacttgccattaacgtttttctctctctataatatgctactaactttgtcaactttttctactgtgtgattgaatggatatttttcaaaaaagtctaaaatacccttcaagtcctaagaggttataactgattgatccactagaagtttcgaaaaaatataaaagtttttgtgttgtcttttatataatatagaagtttttgtgtatattttgtgatttccttttttttgtttggaaaactacttttatatagcctatgaaagcggaatcacatacacaaaaggtatccggataaaaaatattttatatcatatgaaagataatttacataaaagaacatcaataaaaagagtattctattagcatataaaatatatttatattctcaaaacagttaatacatgtaaattcaaaatcttgaaatatacatacacttctatattttggaaggaggctacatgaaaaaattatattttttcgaaacttgtagtggggtcaatcaatttgttaaccccttgtgtaactcgaattgtattttaggtatttttaaaagtactccatcctaatgatatattgtagaaaaaaatagtaaagttagtggcatattaaagagagccaaagtcaatggtaagtcatttaactatagtaaattcatttacatagaatagattctctacgtaatatgacacgaatgaggacaagttcactgaatattcacatgtgcatgctccaaaatatttttggtgccttaggcattcatttgcgcacacaatgctctttatgtctgatgcacccatcatgtaatgtaatatttttttatagaaaatatttattactaattgttacgtcccgtcccccaccaacacaaaacataatagtatatagctagcagcgggctataaaaagtccagctcagcaaaaattattctcttacaatctctattctctctcattgaggccattgggaagcgtgtaattagtggaaaaatcttgcagctgaagcatgcatggatgaccgattggtcgtgctgtttttttaatggctagcctggcgatagattaagggccggctactctctttctgatgttttctcactcttccatgtaggatttacttttagatgaacagttctaccgtctactgactgtaccctattatacctgctctaagcatggtatgtttccagccgttatccttttctttttgtttgtttgtactagctctctcagagaccgccatttaattctaaagtataaaagctagtaattgctaatttaactgtagaaaaggctaaaatttccccggccactcgttcgatcatattgtacgcgtaaaagaaaaaaatggataaagcatgcatgcttgcattgttatcgaactatgcattagcttgcaggctagcctaaatggaatcccctaatacatgtcagagacgacgagttccatgataaatatttgacctctctaaatttcttttgaaaacgtaaaaaatatataaaaatgaagaaaacaaatacatacacgttcacatctagggggacgtatccggcgaaaaccatcgaataagtaaaaacccgtgaaaaccatatctaaaagttttgtaaatttatgaaaaaattactagagataggtatatgcatgaaatacatttataccaaatctcgagtccaaaatcaactccatttggaagaaaaaaaaagctatgtattttatgcatatacctatctctagtatttttttttcataaatttataaaaattttagatatggttttcacgggtttttacttatttgatggttttcaccggatatttcccccacatctagataggttaaatataaaggagcaagctagaacttaatgggattctgtagtagcgtatatagctatgatatataacatcctatagacaaattcttcgactaaaactacactcttttaaaatggaggagtaggttccagttgattagctttggcaaaatataactgatcctaagtgggctgattgtttttaatggctcaggaaaaagtgtcaagtcacttggtgacatatgcaaacagccatggattgtaatccaaccgatgtgcgcgaatattagggaatgaccaaatatcaaataattagaaggggtgagacttcgaatccaagtcgtttagccaaccaccttgtggagctattcggaaattccctaggcgtttatcaaaaaagacgcaaaatattgggaattacctaatatcaaataattagaattgatgatgtttcgaatccaggtcgtctagtacaccacctagcttgtggagctaaccataagacccctaggcgtacgccacaattctagcaaaaacgaaaaataatttaaaaatattgagagaatatttacttttttttaccatcccatccaccctgccctccaatcaaacaactcatataatcggacagccatctcccatccagtcacatccacccaatcaaacacaccctaacatttggaaccaaaaggactgtggctgcagtaggggtccctgacccaatgtatcccagccagaaatgagcaaaaagaaaccacgtgagcgtgagcaggcccccaccatagaagagaacaagccaagaagagctacaagacacacggaggaaactagggagaatgatgatgagatgggcacgccgcacgcatatagccggatctcgccggcatcgcatcgtcctctctcaagtctcaaccctggccgcgcatgcgcatatgcatatgttgggcgcggggcggccaaagattcgtgcagattgcccgcgtacaaacgaaagaaaacggggagtcccaaacatcgtatcgtgcatatatatgctgccatattgaaccagcgatgcgaattttcctgccctgttttctactgtttggcacgcacattttcatgcatgctcccctgcttttttggcatggtactgattttatgactttactatttggtactggtctgttgagcattttcttgaaagttttcttcaagcaatcgttattttttaggtgaattaaaaattattggactagcaaatattcaagtgaaatagataattgtttcccttttcatttaatttgattttgttattggtattcagatttctgatggacctgcaattctactggcttaattttgtcatttcctgggagtaaaattaaccttgtggaattgcttgcttgattttctctaggctgggtgaaaatcg

SEQ ID NO: 1770 - DNA, 2620 bp, Oryza sativa
  Intron number 4 from transcript LOC_Os04g27190.2 (locus LO C_Os04g27190) derived from phytozome v7.0 (chr-ID Chr4; po s 15889772 to 15892391 reverse strand)
aagccatacaaaggtacgattaattaataggtcaaaaacaacagaaattaatatccttcatctcgagccaccaattgtaagagaaatcaagaaaaccgcacaacaaattatatttaaaagttctaaagtttcacagaatattataatatgttaaagatcaggcttttcaaaattgaaaggtacagatgatcaaatcagaagcccaaaaataaatcaaaatttaactattctacccctatacctgtaaatctgaatcaattgaaacttctaaacgctatgcatgaccgtgtgatataacctcatatacttaaagtaatttctatggaaaaatatacagagatagatagaaagagagagagagagagaacgtgctattgcctaacacgtagcatgttgtttaactaagcaatgtgtcacacgcgtgcccatcgatcctctgcacctctcccaccccttcattagctaccctctgcccctcccatgcagattcaatattttgtgtatttttggaagaccctacctatacttttacttctagatgggatggggaggggatagattgggatggttgtctctgacgcattgtctagatggccaaaagctggcagtctttttatttcaataataggcacatgcacatttttcatcgtaaccactacaaaccatttccgtgtccctatgaagatgactaatgccgcccagggtcatataacaaaagaaaactatttttacagatagctccttatgaaaaattgcatgtgaaaataggtctattaacacaaatgggtcgcgtaatttgaaaggtggggtcatttttatatacggatctcataagaaaaaatcaataaaattgatttttaagggcagttctattaggaaaccacttgtaactctttcctatgatgtcgcctaatgacaaatgttatgtgacaattatagttcttgttgagatgttgtagttaatgtttttctattttaggtagttaatgggatcaaaagttcattataagaagctttaaggtctacattagaattttttgttacatacgttgacgggtacaatttctataaaacaatatagcgctcgacaaggtttgtaactttctagtcaaagttatttcatttaagaacatttaggtgccgaaatattcgttacaaattcggaatctactttttaaaataggatgattttacaaacagatctttatgaagtctaaagttttaaaattcatagaaaatacaccttaagtccaattgagttaatccaaagttctatgagatccttacaatatttcctcaaatatggcctagtcaattttttttttgatatttcctttattatgaacattcacaaatgtcaagttgcataacacatcaaaacatacaatgggaacttgacataagtgaacaaggatattaccaaaatatggaccttacaaatttaatgaaaaaattgttgggatcatatataactttagttcacctcaatcgcacttcaaatgaacactacataaatctttaaggttttaatatgtgttacaagtttaggagagtttaaattagaagaccaacgtctatttcatagtaattaacaaagtgcttcatatgtaagatggtaataagtaagatacacatgaagggagagatcccggatttgaatcctacatactagatgcatattttgtgtgaaaaaattgcgaacttgtgataattaaaatatgaaatactttttgcgcctacaataattaaagacttgaaagtcgaacttaaaatacaaaaaaatagatttgttaacatgcagttgtgcaatccactagcacaaaactgtcgatttctataggccctatgtaacatttggttggctaaacacttccaaaaatgggggtaccaattatattgtaaccgcctataaaagtagttttccgagcattcaacattccacctctaattctagagcagcaaaacatgcgagtttttccaactactatgcaatgaccaagcagagtaccgctcatgcatacacatatattctactgtcattctatcaagaaacagctaaggccaacttttagttaattaaaacagagatgtgcaactggaggtagagctagctacaactaccaaaggtagctggcatcagtattcttgttaccgagctgttgctgccagcatgatatgaaccaacaatttccatgaacccgagctacttagagcaaataaaaaagaaattgtttattttaccttttgatgtttaatgcacctaaacaattaatctgagtaaagcacaactgaaaaaccatgttgatcctctaactaaataaatttgttgtacagttaccatcgaatttatcgatcactatacatctcaattaattatggtcacgcgtttcacacaatgttaacaagtctttcattcgagaaatattaaacatcatcaaaccactttattcgtcactggtacatggcgtgtccatttgagcataatttacaaagtatttcattcatttatttgtggtttcaacgcgatacatccctgtcaaactatctttttcggctagatttatttacacttgcctaattaagtaatttcataaaaattcccaattggcctattggacag

SEQ ID NO: 1771 - DNA, 3549 bp, Oryza sativa
  Intron number 2 from transcript LOC_Os03g44900.2 (locus LO C_Os03g44900) derived from phytozome v7.0 (chr-ID Chr3; po s 25332845 to 25336393)
cgtggatccagtccagcgagatcaaggacaagaaggtgagccctcttaacttcttagccgtagccggtagcttctctttagctccaggggatgcggttcatggtgcaatgcactgcctcctgtgcttagaattatgtatgttctgctgttctgtccagttaattgtacggagaaactgatgattttagaagaaactccattaagttacgccatacgtgcagtgattagttttgttgagtgaagacttatatgcttgctgattggtcagtacaaacactgatctgggaatgctctttattttacctgattcagttaacagaactctaggtgcctatcagctttcctagcgagttatgtattatacattatgtggtctgcggggagtgcgtgaaaatatatttgaggttactgttggtatgcaacgccttttctcttttcgtgtttatgctgttagtagctgcattgttgtgtagcttcaatctcgatgtgatgctattgccactaagatgggatgctgattttgtggtttgtaggcttttcttttcttgttgtgacaaggaaatccattcttaagtaagttttcagtagatgtttgtaagcctgttgtgatgctaaattatttggcagaattatgaatagtttttggggataggttagtaaagatgatgagaactgagatccacttttcaatactatccatggttgacatttgtatccatatttactgtggtgtttctaaatctcaattaagagtgagtatagaacattcctgataattctgaatgatgatgtagttatagttggctcttattggctcactgcggcattcatacttttggtaactaattttaaaatgttttcagttgcattttatggaactacataaaacatatctgtacttaaagtatgtaactgcagcattagttgcagtagggaagtaaagaggaatctggatgatgtattagatgctgttaatcaggagatccagtagatgaacgactctggtacaacagagcattttggaaattatttttggtcttcagcccaaaacatggcttatatggcagtctggtgacacagttttcaacttatgctgcaattgttatatgactgaaatacttgatcaaggcgtgcaacctactgtattgagaagatattttgttttaaggcatcctcttcacttagactactgtttgttgcagtatgtctcaaatcaatctgtacagatggccaccggaatttcagaatttacctgaaggccatgctaaacttcaaggtcacacaagcttagggacaaattcactgaatctattgcatattgattctccttgaagctctttttgttgcttattttccttgtaaattatttttgaaggtttttgtttgtaaaccagatgcactgttatttcaataagtccatttttttcattcttaataagtagtccctctgtcccaaagtgtagttacctttaccattcaaaatttgccccaatcacaaccatttcccatttaatttctccacctatttcctcatctcaaccaatcacaacaatcccttgttttatttaacttttctccttaatactagtgcctgactctaaaagttcttacattttgggggcggagggagtatttgcttcatcttgctgttggtacttgttaaccttggttaaccattctaattatgaatactacgaaacatattttaccatgaacatatgggagtgttccaataaagaaatggagcaggattcacgattatagttttaaaagcagtattctgttcttcccctctgaatttcttcttcaatcatgttttttttttgtatgatatattttgccgttgcaaatgacttttttgttaacattacttactgttctgggtttaacccatttataatatatgtgttgacataggttagtgcctcttatgagcaggctcttatggatgcccgaaagcagattgaacgcgagatggaacgatttaaggtttgtgagaaggaaactaaaacgaaggccttttccaaggaagggttaggtcaacaaccgaaaactgtaagaacttgccctcctctgtttgcatcatacttttcctggttttggttgtaactaatttgaattgttatttaaacgctttgttcgcaagaggtgaaggctgaaggttctgattataaattcttgctgcattatgcttgttgtaatcttgtaacggagtgttcagattttgtgctaactctatctttatgtgataggcattcgtcgtcttagaatattcaaactttgaaagcaacttaagttaaaactagctgttgctatgatttttaaaacaatactattgtacgaaataagatgtccaaaatccaactaatgccattgtgaattcgagatggttatctagctggtaattggcacttccctagcagatgccacacaacggcaagttttagttttcattttgcacaacatgcctacgaccataactccgtttccatcttccgggatggattgatccattggctcagtcagctgatggcctgttagccatgaccctgtgggaaagctgcagcccacactagtgggctatggttagaccactgctcaactgcctgctcattcatgatatgtttcctcttcccctctgcttccttccttactgctctccaatctgccaaacaccccagcaacaacaactcaatccactactggtgactgcacagatcttacttgctgcatggatgctgggttaaggcgagcttgatgaggtgcatggcacaaaaggtggaagagatatcgatggtagtgctagaggatgggctcatgagggtggcacagggtgttgaaaatgcggtgccgtgttgaggggcagttgtgcttgcgcagggtttaactgcaccatcaagagcttgccgctgttgctgaactgtcactaccgtctgccagcagtatcagccttcaggttgggtagtacaagcgtgattgagtggatttctgctataattttggggatttggtgaagggagaaggtgacattaggtcgctgacacttggtcccgcacatcaggttgttattggtggtggcagactcacaacaccagtaccaccccccttctatctaaacgagtaaagataaatcgaagcctgaggctctgaactgattgttcataaccttcattggaattacaatgatgctactgacgtcttttagaaagtaaatttatctcaagctattaatttactccaaaaactaggagatgcagtgaccatttggctgttgggaaaatttatggtttttttaaaaaaatatccaacttagatttgagcttgtattttgtatctggtccaagtttccattgcgagccttgtctgcttagttatggccttatttcttaattttacacagcagtcttagaaagtgagtcttgatttatcaattatcttttttgtcagtttctgtgtatgttgcaggattttgcagctcccctttagtctaatggtttattttcaatttgtgcaggatccaaaagagaaggcaaaagctgaaacaagaga

SEQ ID NO: 1772 - DNA, 17614 bp, Oryza sativa
  Intron number 1 from transcript LOC_Os01g69850.1 (locus LO C_Os01g69850) derived from phytozome v7.0 (chr-ID Chr1; po s 40343617 to 40361230)
cccgtcggcaagctctacgagtactcctcctccaggttcgctctctgattccatccccctccctccccccgcctcctcctgttgttagtttgttagttacgatcaaaacccagccgcggccgaatcgagaccccccgccgcggcaggatctgccgattggttccgatcccatttcgttctgctatcccggatcgatcgatgattctccctgctatactgtatcgtaatgggtaagcctagtgcacgccatgtgctcgagactatctcgcagaggcccccccccacccccccaaccccccaccgccacctaccggcgttgcgctgcatgacagccctgtgatttctgattagtaggatcttgttctcttagcctgtacagtagcagcagccagcagcttgtatctagtatatgaagctttgacaccttgtactgttccgcgcttcgtctccccgacggcgtgggccgcgttgtttttcctcccctggtgtgcttttacacgtgtttcgcatgaggagacaccagccttcgtagaggcggaggcgcgcagcaatacgcgcatcaccctgagagccaccgcagtgtacggcctacggcgagtgaggagtttatcattttctcccaacttttttttcggcatcttgttttttttttctctgagagggagtgatgaaggagtacagttgtgtgtgttttctttaatttatttcagcgacagggacgaagtcggcttgctctgtagcgaccggcctattctcataaatagtcttttgttatggtattgagtggcatatgttaaataatattatttgatacaactgcttaaagatttttttgtaatggcttatttcttgtattttagtgtacacatcgaacaggactattcttagtgatatagtagtgggataacatatttatctaattaacctttattaatgatatactataaagaacattgataatatatttatatatgtcaagcaacttgattgaaaaacaagcacatcactcacaaagttagcccaattgtgcacaatagtccatttcataccatgatgctaaaaatcgcgcgctctgattgtttgagcgacaacccagaataattcataggtataatattttatatatatattaagtggtttaaaaaccaagattgaaaaatagacctcaataaaaaaaatgccccctaaaatcaactctcaaggagaaccgcgtttggctttggccgataatccacgaacaaatgatgaaatcacatattccatatattcgcattcacttatgaacaaatggcaacttttcttatttcttggtaatgtacgccctacacattttccaacccacatttttctagttttgcaccccctccaccaccaatatggtacaactacagctccaaaatttagctccaggagttaggtctggagtggagttgcctaaatccagttccacaactctagtttattttgtgcgagcttcacccagcttcactcccaattttaatggagctgtaattgtttggctgagctccagctccaagagaagtggagctagagctggagctgtgccaaacaggcccttagcttgtccaaatggtctagattcttatttcagattctacgagtcagaaggtgcataatcaataatcaatgaactggaagccagaagttggataacgtaagcttcagctagatactcaccaattgctttttaggatctgtagctttcttaaatagggcatttcctatctttaatactccatatgtcccaaaatataacgacttttagcctttagaatttgttccaaaatattacaacttctccaccaacattctcttctcaaccaatcacaaccctccaccattcaatttctccacctacattcatttctcaaccaatcacaatcttccaccatttaattctacttattttcttaataaccgtgaccaactctaaaactcattatatcctgtccgtcccaaaataagtttatttttcacgcatctcacgcgtaccaatatctaagaaaaaaaactagaatacattcacttcatcaaattccaatgcagttgttcctcactttatctactcctaatgtattttccccctacttttacaaactctgttgcaataattgctaaaatatgaacttattttgggataaatgggaggggctaaaaatgatcttattctgggacggatggagtagatgcttcttgtagcatatgtttttgaatttaactaccatcaagttccaccacaacatatagaagtatcttgtagtaaccgttattttgctattttgctaatgaaatagactagaggcattttagcttgccttgcacacgagtgacaagtaaactagaacggaaggagaattttattccccctcaatctgaccaaatcgatccaaagccataccagtgtatgattttccttactaaatgtgaggttgatctttcactaacaatgaataaactcctctaaattttgaactaggatgggacaatagacccaaattaacataaaactaggaaatcaatgcggcgatgtttaagtaatgaccatgattgtagacaacaaaataacacaaaattgataaaataactcgtacatgtatgtcatagattatttaatatttgttgggtcgtccccttcatgtgttaaatcatctaggaatttgtcctaacatttgggataaaaaatttcgctaataaatctattgaacatctaatgtacgacaaaagtctctatgacaacccactattagaaattggggcatatagatctccagcaaaccttaacattttattcaagggtttgtccttgaatacatccaggcaaaatgttgaggatttcaatcaaagttcgggccattggatttatttgacgcgtatcttaatggttaacatgtgccctacctcttcttaccttttcttgttatctcactattgaagttgtccatggttactaatactcaaagcctagaggctatacacgcactacctcctgctattccatatcacattctaaccacaatgtctacggttattacttattagctatgtttgcaatgcttcgggcttgcattcaactaagatagcaaaaaaaagtgttaaagtgttaaaaaatccccacaattcccggcacacgagggggtgggggttaaaaatccccttgaatataatttgactaggtatctcttctttgttggcttagaagatttagttgtgtttagtacttcatgaagttatggctatcactacaacttggtcaagtttgatttcttatctagtttgttgccatactaattaaagtgttgcattttgaaatgcacccaaagaagtgaattatgcacacatactagaatcattaacaatcgtttttaaacttgttttatgaatactaatatgtattttatacgcacgtaagacacacataatatgctgaccatatatgtgataaattatgaatgatcttatatcttttatactcccttcgtttaaaactagagggtgtattatgattttacacaatctccaactttgaacattaatttcttttgctataaattatcaactacaaaaacaatatcatatgagagtattttttaaatttgaatctaatgatactacatgtgtagcattaacaacatatttttgtttaattatcagtcaaaattttaaaatggtgattttacagaaaacaacgatgtcatatatatattagagcggatggagtatgttacaaacaaactaactagcatcattactacaaagcttgtccaaggttgaacaaaatcatctcaaaagctctaaccatcatatcattccctcaaaaggcacaaatcattccttgctagactgcttcctatgagtaaattacatcgagcagtaatgtttatcagttatctctatgcacaacctaataatacatcatgcgagtccacaacctttttgcctcctgccaatctatagtattacataattattagaacatagcatatgccattgtttttaaaattcttcctaaatattttaacaaatcaattctaaatatgttagaacatctattataatgtttcaacaatgcacatagtttcatctggtttccttatgcctctccgtagtcggatcattgatttgtcttacgacattaacaatgtgaagtgcaaaggtgctcccagggagaaaacaagtccacataatctagcgtttatgaaagagatgtttatctagttagtaaccaataattctgatattggttttcccatgggtgtgatggatattcattgcaacttacaggcaaataatattgtgcattttcttatttcgaaaagatatcgtacggatgaaagtacatgcatacacttttacacaatattatacaaaattaggtttgcttttcttatcttcagtcttataatataaacatgcaagcatatacaaaatattatctcaaaaatttataatcaacttatgtcaaacatgcaagcaaggatgttgacaagctttaaagtttctttttaaaaaggtcacacttatctgaaatgatcccaattatctcattagtttggatactatattactcctaaggcatgccaaatttataattaacctgacgggttaattttttacattatgattgtagatatcatgaaaacatgtgcttagattattattaacctagaaaaatatgggtttcactattttagttcatagcgtacctgtagttcacacaaaaagtaaatagtattgaggcaactttcaaagtttagatataaagagaagacatatgcaagatattttaaaatataacctttttttggccaaaaaagcactgttattctatgggatcgccaatcacacttaaccatgcaaatatgcaatttgcattgccataagatatttgcactaccatttgtcgcatatttcttacctaatttgcatctctacctttggaccacaaactcttagtctacaactgcacataccactatcaagcatgccagaaggtatgatgtgaggactatcgcaaatcacgtctatagtagaaaaaaaaatcatgccatataaggttcatggagcacatgaaggcaaccatgatatggatgatgatgatgaccattaaatcttctttagggatttggtgcgtactagtagtacgatttaggtattattagtcttgcttcatggaagtacaatttaatgtcaacatcaccatagatatgctaatcaactagagcaaggctgataatattttcaaaataattatgggcacaaatagatgacgaactcttagatgaacttaaggggattgtggaagacaacaattgtcagacgttgatgaagatccatgcatttgtttttatatgtatcttgatcattcatctatactaatataaaagatgctagcggtggaatctatcatcaccaccacccaactacgatgttagacccgcaaacagtgagtctttccgtattccccaacccctacaagccatagaccctaagacctctagctcaattggcacaacaaaagtaacatgataataatatattagtcaatacaaataacatttttagggacttgaaaatatatacaaggagccattttttcttaaaaggcatgtgcattatgctattatgattgataagcataactgatatgccacacatgaagtatttttcatacggcctaatgatggattaatactaaccaaataaattttgtaaattatgattattaattatataattgtccttattagctatctcgcggaaattcctatgtttcaaaaaatctgcatcaccaaactcttttgagggaccaaatatgcataacatctgacttatacttttgtcatttctccatgtgaaagtgttaagtcaaaagtactataagaacatgtggatttatgtaggccgctatctatctagactctcaatgtgaaattaatcacacaaacaccagaggccatatgggtctctactaccaagctgggtatcacattcacacccagtgagctcacaccttttgtctatctgaatcaaacttttttttaccataatgtgttcttcctactatataccaagtatattgttctaatcttagatggaaaaataaatagaaaaataatctaaaaagatggatcctccaccttcattatgagtaatgaactaggtgctgatacaataaaaagagttgactagattaaccggaatagagtctagtctctagttgcctaagagcaacccatatttatccattccaaagtaaatctactgcctgagaccatctctctcccaagaacatatgcacctgaatgtccagaagaccaaaaccagcccatggtccatggtacactattaggctatataatatccatcgtcccaaatgcacatgtttgagtagaatttttttatttagacctttttaataaataattttaataatagacctcgtcgaaacttatttccaaaaatgagccttttggctatgccgttggaactggcgtggccaaactcttttgccgcaccgttggtcccagcgtggcacctgctacctcgtagctgtcatcgtgttgattaagtgaacgccgacgtaccacttcctgtcacaccaggctcattagtgttgcagctgccaattgccacgcctggctcgatggcatggcagtgtcctctctcaattcttcctcccatcctgtgagaaagtaattttcattgggagatcgatattgttaggatgtattttcattattttgttagccattgtggtttatagatgaacatgacaagtttatagttacaaatttggcacataacgagtaaagatcagatgaagtattagcggtatttgtgaggtattgttagaaaattccacaataacgaatggtttggatggtccattttagaagtgttttgatggacttgatttatgtgttaaagatatgaatggttcaagcattgttgtttttgtctttaatacaatttagatgggtggaaatgactaaatccctcgtaagcaaccatcggttggtgtcgtaggaagagaaatttctagcacacgttgtaacaaccacatccatagaacaaacttgtgatcttgaaacgaatgcaacatacgtcgaccacttcaactcacatgatatgagcatcgccacaaagtatttccttgatccaatccctgcaaccttccattcttggcatgtccataggttcgacatgttgcactttagatcagacccgatcacatgattctacccatataggattggtcgtaaacactaacatgtctacttccataccatcaaactttctatttgcactaatggttcaaccgaaatatacacgcaccccaggatctatctacatgcataatattcacatgcaaatcaaatactcattatagaaccacgtgaccgagcaagcaaacgacttctataaggaaataagcactgcgtgcacgaacctatcatccctacataatcaaaataccctacaaatatcatgtccattctatctcatgtataactcaaattctatacatcgccgagcctggcatggcagttaccacgtgggctacctctccaccaagtccgaacgacgaccgccacggtggaacatgttgccacgccaggaccggtgacgtggcagtattctttgccatgccatatatgtggcgtggccaaaaggtttatttttgaaaataagttttggcgtggtctattattaaaattatttttaaaaaaggtctaaataataaaaaattgtcatgtaatgaaggtttgtactctaataccatgttataccctagctttaatacccgcattattctaaattttaggaaaagcaaactcctgtacattcagaattctacatacactttaatccacacgatatgtaaaatggttaacccaaaaattctatggttagaacgcatgtattttatatgttgatacctacctgttaagactccacccagacttattctaccatcaccacactatcggccaaactagggatggcaatcgggcgcgacgggcacgggtagtgcctacccatacccgtgcccgtgagattatttgtgcccgtgggtatgcctgttactacatgacggtcaaggattgttgcccatgcccatcgcccgcaggcgccttatgcctgcgggcgtgcccgtttacccgccacagcaaaatcagtggaacaaaaagtctacaagcttctaagttcgaatcgaacttaaaacatcaaatattctctgcctcggtgtggtgtctctccttaggcggcgatagaggaagggggagagaaataataagggaaataaaacggaaaccgtagaaaacaaagaaagaggcttatgtattctagtggattttactcctagcctacatgtaagttagatttcgcgggtaaatgggtaaagcgggcatgggtagtgattacccataccatgcccatttacccttcgacatagcttttgacctaataagaaacccatgggtataaaatggagaacaaacccaaccctaatagggtttttacccacgagtaaacgggcaaacgggcacaattgccatccctaggccaaacatgtgtccacaccttcacttacatcgtggaccaacgtgtggtgttgtggttcttagatgtaagatttatttaccaattgccccacgcggatcattagagataaacatattatttttttctttctaccacttattctagccttattctatcatcgctttgggcccatgaagcgaagggaatgagctcaactacttctcttttacacttctttatttctctgtgcccttccgcatgcgcttcgtatgtcattggcactttgatctcttatttcttcattggaggttttggatgaacttcgtcgttctttcccaacaaaaatggaaagggttgtatcacatcaaatgtcgatttgttttccgtcccaaatgagatggggaactagtcacctttatctcttcatctctatgaaagtctttatgaaaggaatcgaggtctggcccgacccggttcacgtcattccaacaactgacgaggagcaccttagtgtacgatcacgtcgatcaaatacctatatgtcatttgtcctagaactattttggtataatgtatatctatttcgcgagcactcaacattaagtgcctatcgtactatccatataatgccattatgtccttgtttagtttgaatttccatgaaatgctatatggagtaatacaaaaaaaaagagcaaatattacaagtatcgcaaatgagattatcttcaaaaaaaaaaatttgaccaaaatttcttagaaataattgtcaaaaagatattggagtgtattgcgttgttggtgtaaaaaactagacaacgatgccaatgaggatgcacttgagtataacaactttaaaaataagtgtattgatctgattgattacttagttcgtaggtgcattcttggacatgatctcctttttttttccattagacacattgattgcgtgaaacttccttacaaattttgcaaaaagtaatttaaagtaaaagagagagtatgcattgttaaaattatagttctaaacgacttcctttatgaatacggagagagtatgcattattattgtactggaggtcatgatctagccatattaaggacattgtttggcatggaataccattattaaactaaaattgtagttacattgaaaaaaagtattgtactggaggtcatgatctagccatattaaggacattgtttggcatggaatactattattaaactaaaattgtagttacattgaaaaaaagtaacaacacataaatagatatagatgatattgtccaaaacatcaaggacaaaaaaaattagtagttttccaaaaaaaaaaagtatggaaccccttgatttagccaaaaacgcacatggcacctggtttgttcaagaacacacacatagccaagtcacatttagctagttgttgaaatgaatgaattaaacccgctaccaaattaccacaccgacatagtaaactttcaagtttttgcaatcaatgtacccacctgtaatttttttattatccagagtgtaatcactccttatttaagtaggacaaacaaatacattaaacattttttaatgtaactatattgccattagagaagtgctacacttccaaaacaaaaattcttacaaatgttttacaaacgatgatgtaagatattgtgatttaatattgattttctataactttggactaattagatcaaacagttaagaaatttgtttttaagaattttgcatgaactttttagcatgtccaacatgaatacggagagagtatgcattattattgtactggaggtcatgatctagccatattaaggacattgtttggcatggaataccattattaaactaaaattgtagttacattgaaaaaaagtattgtactggaggtcatgatctagccatattaaggacattgtttggcatggaataccattattaaactaaaattgtagttacattgaaaaaaagtaacaacacataaatagatatagatgatattgtccaaaacatcaaggacaaaaaaaattagtagttttccaaaaaaaaaaagtatggaaccccttgatttagccaaaaacgcacatggcacctggtttgttcaagaacacacacatagccaagtcacatttagctagttgttgaaatgaatgaattaaacccgctaccaaattaccacaccgacatagtaaactttcaagtttttgcaatcaatgtacccacctgtaatttttttattatccagagtgtaatcactccttatttaagtaggacaaacaaatacattaaacattttttaatgtaactatattgccattagagaagtgctacacttccaaaacaaaaattcttacaaatgttttacaaacgatgatgtaagatattgtgatttaatattgattttctataactttggactaattagatcaaacagttaagaaatttgtttttaagaattttgcatgaactttttagcatgtccaacatgaatacggagagagtatgcattattattgtactggaggtcatgatctagccatattaaggacattgtttggcatggaataccattattaaactaaaattgtagttacattgaaaaaaagtattgtactggaggtcatgatctagccatattaaggacattgtttggcatggaataccattattaaactaaaattgtagttacattgaaaaaaagtaacaacacataaatagatatagatgatattgtccaaaacatcaaggacaaaaaaaattagtagttttccaaaaaaaaaaagtatggaaccccttgatttagccaaaaacgcacatggcacctggtttgttcaagaacacacacatagccaagtcacatttagctagttgttgaaatgaatgaattaaacccgctaccaaattaccacaccgacatagtaaactttcaagtttttgcaatcaatgtacccacctgtaatttttttattatccagagtgtaatcactccttatttaagtaggacaaacaaatacattaaacattttttaatgtaactatattgccattagagaagtgctacacttccaaaacaaaaattcttacaaatgttttacaaacgatgatgtaagatattgtgatttaatattgattttctataactttggactaattagatcaaacagttaagaaatttgtttttaagaattttgcatgaactttttagcatgtccaacattgctcttgttgttacaaaggttaaatcttgtttgcagaggcattaataatattacgaagatactgaggttgtgttcgggagtgagtccctagcatgcaaaacgaagcatcgtttagcacatgattaattaagtattagctaaaataaattttaaaaatggattaatatgatttttaaagtaacttttatatagaaatttttttgcaaaaaaacacgctgtttagcagtttgaaaagcgtgtgcgcgaaaaacgagagagatgaattgggaaagtagagataagaactcagcctaaatagtttctttgagttattataacacatgttcaataagttaattgtatacaagttttaattggtgccaaaaactggtataacaatgacaataaaaacgtatgttatttttcactagaacaacattgtaattacatgtgttaacctatacaatgtttggtttgccatgattacgataatattagaaagctcctaacaaatataaaacttgcccattttcttatccaatgatgaaatgaactatttcattatcaaattttaaatgcaaacaaagataatcttaattcgatagaactttcacataagaaaaagtcatatgccaacttcctaatgagtttttgagtaatcccttgcgtagttccatactgtgcttttagccacattgttatcaacatattggttgaattttggggcatgcaaacttatataatgaccctcgaattacactttttgaattgtaggtatgaggtgtttgggggcatattatcaacgaaacatatcctcactaggtagacatgataattacatgattaatttacaaatgactatcataaatatatggaatctcaaaagtccacttgggacacgaaatctaaatgataacatgaaagattgttaatagagacatgttagtccaaattgtttatactttcgctactcatatattaattgaaataaatatttaaatgtgcaaataagagaacatccatgcattgcaatgaatctcaaaaggtgcacagtaattttgaagtctatttaaattctaaacaaaccacaatttaaaaatagccaaactatgtgacaagatatacaaatcattcattaaagaggtggcacactagagccaccactagtcattttatatagaagaaataaatttagattgtccaacaatacctttttttttctaaaaccttattccatcatatatttttttaagaactgaaactccgttgtaatgtagacattttaccattcaaagaaatgctaatatggttgggaattattttatacttgcattagatcatctattataaccttgatgtgagtatccataggattcgtgaattctaattaacaatactgcgaaatatgtaacacttttaacataacattcacgttataatgatgttagttaaaactttattaacatccaaaacaattttttcattggacaaataaatgctcacaaggaaatagatgttatctcaaattggtatgaagataaagaatggttgactaaggaatctattaaaataccttttttttcactgtgtaacttgttggtttgctttacactagtactttattttttgggttcttttgtatttcttatagcaatgtcattcttgtgcttatctcctttgctgtgttttaaacataaacatcatgttttgcattgatttccctgtgttgctaaatatgtgtgttttgatatttatcatgttctattatttaaatatgcatgaattgaagtatactcatatatcctatttccacaatacatactttagtttgttaccaactatgctgaattcggtgctcacattttattatcatcatgttatggtttgatacaatttgacagtttcaagctaaattgggtcaaaaaatgttcatcggaaaattcaacttgggtaaatatttcatcatattgacttcatgctctgatcttcgtggaaatagagaaggatctgctgactgatttagcttttgaacaagtgcaacttggtgcatcgacaagattttgtaggaaatttactacatggggtggccatcatactgaaaataatttatataaaaacttatgtttcatcattattatattcatgtgattgtcttatacataactatttggattcattcaaaccctactctcttttgtaaacttgtattttgcaacaatattatcattggtacttagatgaaacttggttaacaatataatcattagttcttaactttttaagttgactttttgaatatccgtccttgtattgttttagctatgttttattaatagttgtgtttgatcttttttgcggagttggtgccttattgttttgtttacatttctagatatatttgtcctaggattggtgctcttatgcatactcatgatgaggtactcgtttaatgaaaagaaataaagattgtacctcatgttccaaaacaacatattcacaattcattatcatggaagtctcatccaagaaccttttttaactggcgtttcttaaattttgcaaaaactctgactttgaattaagatggataagttcccatgatcaacatagctttcaattctatatagtagttgttattttctaaattagtcaacatctcctaatcttatacattgtactacttacattttgcatgtttatcttcatgatagttcttaaatttctatgacatgtatgtaatttacctttaggttttatgaaaaaggtcgatgacaatgatatgaaattagactaaggaccgatatttcgctgtcaagaattgacatgctaaatcatttgtgccataaaatccaaattgaaaactcacttgtgttcacattattggtcaaaacaaattatatatctatgttctaatatcatgaaaaatgtagaaaaaaagcacttcgaagcttcctatgcaaactgctctcaactagtgccttcagaatattttaaaatagcaactcctacatagcctcattcaaatcaaagtttcaatcacactattgatattactttgagctatttacatactagatgtttatatttgttatattaatagaggttcatgttggtacttctaagaaattgggtcatatttaacatgcttaacctcatcaccttcaaattatgttttagatttgttatgtaaaactagttcatatttattatactaatagagggtacatggaacaaatatgacacatatttaatggttaaaaccttctccattacggaaaccgattcaaatgtgtcatagttggtctcacaacaaaaaaaataggttatactagtcatgaaaatatacaaaatcaagttagaacataatagcgtaatctaggaattaaaagtgcataaaaggtggcttttgataatacgatggtggaggttgggcgcacatatcatgaccggtgttttatggagaaattttttattggggcttggaatatttaaaagcaaaggaatggtttcatctttgaaaatatttttccttccttggtttcttggagacaatcccttaagggtgatctccttttgttgttttgttgtttagattgagtgagggtgataaagatgtagtcttaaactggattaggttgttgtaatcatttatgtttctttttattatcaatatagttttttaacagtggggggcctcccatgttgtgttcctttaaaaaaagtgcataaaaggaatatgtcaggatattatttccatttttagtattactaggcttttgaaaacataaggaacattgaaaagaaaattgaattaagtgcatgtttaatctataaattcaaaatcgaaagagttaatacatattgtatagaagttcaacacaccaaagcaaaacatactactatgactacttgttgaacttcacaatatgctattcacaaatggtagtgagatgcaagtagcactcaaatttagctaaaataaaataaaaagaataagctacaattctagtaacataatggttcttagaagtattttcattactatttgccctacttgagtgataatcatcaaaagtatgcactttatgaaggatatgggtaaagttattgataataataactaaaacatgctatcaagatgcaccaaggactcatggtgttgaagtgtaaaataattatattcctctagtggatcaaaagtatgcactttatgaaggatatgggtaaagttattgattgagttgtttgaaatttcctttggcatatcattactctagaccttgcatgaagaatgcgtaaagtttatatttgagttgtttgccatttcctttagcgtattttgctctaaactttgtaggaaggatgggtaaagttattgtttcgagttgtttgaaatttcctttggcatatcattgcaagaccttgcatgaacaaagggtaaagtttttgttcgagtggtttgccatttcattcaccacattttgctctaaacttatgtaggaaggatatggttggagttatcatttgggttgtttgccatttccttcgatgtctcattgctctaggcttagttgatatcttggtaatttggctcatcttggacttagctatatatttattgtcattggagtcatggctctagtcatcctaggatcgtggttagtggccttgatgatcttacttggttagttgtggtacttggttagttggtaccacattccttgtagaaattcggttaaagaaacattactggagtttataattcccaaatgtaaatcattgtgaattattaattctctatatactctaacgggacaaaagaaaattattcataccaaatcatagatactatttgtacacctaaaaatataagattgtaaagaccatgtatctcatagtcaacaaatcatgttcccaatcatgtatatatgaggacatgcatctaaacttgattttaacaaattttattttaaaaacaaaaaagtaacaaaaaaaaggtgatttatattggtaacacatatatcctctaccctagaggggccactatatcttggttgctatacatttatctccctaagaccacaatattcatccatatgaggggcatccaatgaattatctcaattcctcttgactatggccttattaactgccctacttataaagtctcaatatgtcaacatacttattggcaatcatatggccaacatgttgatcaagtgtttgcgtaggagttgatccaacactagtatcatagttttgtatagaaggtgaaatctatcaccttttacatagaaaatgatcctacagtggaaacctaaaatggtgatttcttgaaatgaaatccattagtatgtttttttaatatgaaaaatcattggtctagtttgtcgttgccagaacaaaagttctgacaattttatattagttcagtgtactataggtgaaactagttcataaaaatatgcattgtcttgatttctgaattttggcaccaaaaataagtgcactaaaggatttaaggcgttctattactaatttagagctttttgtttctggaataaccataaacatgcagtttaaatcagagattcaaaagattgagcataaacacaatagagctctttgtaaatatttcattttgatcataaatctaactcttagtgaattataggagaagacggcatgaactcagcatttttattgtccccattgtttatagttccttttggtatttagccaaagccttgaagttgaatcatatcgactgcctaggaggatattttatctaactcttacctgccttgttttctttttcagcattgaaggtacct

SEQ ID NO: 1773 - DNA, 3068 bp, Oryza sativa
  Intron number 1 from transcript LOC_Os12g42550.2 (locus LO C_Os12g42550) derived from phytozome v7.0 (chr-ID Chr12; p os 26393174 to 26396241 reverse strand)
ccggcgccggaggggtggacgaagaaggttcgagacgagataatagctaagctttggtttcaactgctgctttaattcggttgctgttttgcttttgttatgcttcgcttcgattttgcgtcgaattggggcggaattcgagcggctggggggggggggggtgttggtgggaggaattgagggagttggaggtcgaattcgaggtggatctagggttttgaatttaggggtttggtgcttacatcgttccattttttttttcggttctagggtttgtgcgattgggttcacgtgctcagctacggaagattaagctagggtttgtatatctgttagtcacgtgagttcgctgagctcgattggagctgtatctacacgtcgcgagctgggcgagcagtgttggagcttgtctgctatagttggattacgtctcacccacttccgcgagtaggttacttggtttggtggagcgtacgctgttcgggtgattagtgttagaattgagagtttccgagctcgattatgctctagtaggctgattcccaaatttcggctcgtactgccgctctgcattacgaggtggttgtatcgttggtcggaatattccatggcgttggttgagtactggtgtgcaggtctgcccctgttgggaagtgctttgccatttagtttgttgttaggggataagcatatggggtacttcattagcgaactctttaactgtgtagtatttgtagtgaagccgaaatgggaaatgttctgctgctgtgagctgctgcaattgcatttagtgggattagggagtgcaccgagatcgttattcatatttgtactttattttggaatctggcaatatcttaggtttagttttagtattactattagagcttagcactgttaaggaggcactgcttgagcagagtgatctgaaaaatgcaaagcgtgatgtaacagagcagggcactggtgtgtcacatgttggcagtcatttgtttccctgagaatatgttatgtttgtctaaaataaggtgtcggtttggaatgcttctgctcactcatccacttagatattctctttagcccttttctattcctctagggtcgcatcagaaaatcccagcgacaatgaccttcttgagttcaggaacttgttagcttcttacttgatactttgtgtgcttatggtgactcgactccctggattttctactggataaaagaagcatgcataatgtatcaactagactattcagtttagtttggctgtttccctaccatctgtttctattttccttggataataactgtgctgggtgatcgaggttgcttgtgacttgaattcagccagtaacacctaaatttgtcaggtaggcccattacctacttgttttgttagttagttggaactcgacctatttttttgtggtatagttggcattatctattattgcttacatggatggatattggagtttatttttaaagcaatataggtgggattctggttggtgcttttgtcatttactcatctattgctaaatttttgtttgaaaggggaataaaatggtttgctaaatttgtggacatttggcatgcttgccaaattagtggttaccttgtcattggtgcttgtggtgtttctgtttttccacttcaccagaagttctgttttacaaactgtttacatttatgtgattttactagaaattggtgaaatgccccttgaaagtgccatttttgaagttggtacaaccgcacaagcttagcagcgctagtcttttgtgctacaaaagcattggttttcttttattacataactgcaaatgcagaacatgctgccttcgacatgtctgttgccttttgttatgtttcacaaatggagataaatctctttttcctcatggcagagttcttagtctcactctgttctttttcttcataactgtgtttgaagccagtgtcacttcccaatactgaatctgggcttttttttgttaactttgtgttttactgcctaaaaggagcccttttgtgcatactgtgcataaagtagggtattactgataagcaataccattaatagcagtaacttgttgtccctaatattctgcagtcatattcatgttaaagtcaacctggttagtacttattgattctgtaatgtactatatctctttaatatactttgctggagacaattaattgaagtaacttgagaagttgaagcaatattgcctatgaaaccaagtcgaaacaccaaataccagtattagatttagttttgtgcaattcaatcattcatggtgaaagtattagtccatatgattaattctggagatgtaaaccatatggattgcagaatggtttacctttctgaaactgtttattcaattaaattaattcttgaatttggtcactttggcagcagtgtttgccagctggcagttgtttttattatatatagttggatttgtattttttttaggatcattttaaaacaattttcttgagattgtcacattttaccattttattgttagtctataatttctgtttaggcaatagccactagttatccacagctttcactagtttggtagaagatgtcttaatacaagcaagtatcagtaattatgggtgaagtcggatttggtattttgctgttgtgcacaaacaagtctacgggattgttctttattggtagttgtctaagggcaatgctaattctttttgtggcattctttgttaaccatgtaacttcaaaagtagtatcaagcatgcaagcttgctttgtctgacaatattagggggacttgaataggatgcctgcctcgtagaaggttgtcgattcactattaaacattggatagcactaggatctgttttgttcagcaatctgttgctggggacatgttgatgtgtttattttgtttaatgttacaaagaaatgtttgtaggcatatgtattgcattcatcatttgatagcatcaattaacatccttgatttctttctattgtagtttactccccagagaggggggagatttgagattgtttttgtttcacc

SEQ ID NO: 1774 - DNA, 1476 bp, Oryza sativa
  Intron number 1 from transcript LOC_Os07g26700.1 (locus LO C_Os07g26700) derived from phytozome v7.0 (chr-ID Chr7; po s 15422621 to 15424096 reverse strand)
cgccctccccaactccggcgacgactattcccaaggttggtgtactcaccccccatcccgtaccctcctcttggtcctaggtttattaaagattgttagtaggtctctaaatctgcatattcgccgtcgatttagggctgcgattagcttgtcttctttaaattttactgtccatttctaggctgctaagctacagaattaggggcgatttgtgagctcgtcccttggtagttgatacggtttaatatggtgtaggattctggaatttagttgttcctttgagccggttacatgaattattttggtttcatcgccgtcattggatgaaatacttctcatcttattgacgtttatcgttgatctttcattgtaaagttgtgagaaaatggaatggcccgcctatgataattctttggtgtcgattttcctatgtgattgttttgcagtagatagtttacggtggtgtttggactcatcatttgtcattgtttgccaatgcaaacctgcggaaatagtctgcatcatgtgagttatatataatgttacagatcacaaattgtagcaccagtatttatttgatttataatatagaatacaactaggtgcttccattatctcaaaaaatatagaatactactagttaatgtgccaaggccctgtttagttcacaccaaacttcccccaaactcccaactttccatcacatcacatcacatccaaaactttcctactcacataaactcctaactttttttccaaactaccaactttccccaaacttctccccaatttcaggaactaaacacagctcaagttactcctatgctttacggtattaaaacagggcaccacacaagtaagattttaaaacaagtactacagtaactctgatatctttatgtaccccttgccattgtgaaaagtgatagccacgatgcaaagttgcaaacatatgaaaaaaaaggatgtctgtgatgcgaaatatactcataagctagtggccaaataaaaaaaggagaaatttcatttgatttccatccaatgttttatggccttcctcttctgctgccacatgggatcccctagtccatgagccaagcttatagctatgactgttcaatgaacctggttttcaatttgttgtcaatccatttatgcttcatcgccagcatgttctgctgctgcagtcaggagtgatgctgcctgtagtggcctctgctgtggttttgaacaggttggctagcttgtttttgaataggcctacatataaatggaactctgtgtgatatgaataagtggtggtatctcagacgctgtatttgcatattctggttgaggttcatctatgccctattactcttggtagatgggcttgtctgaaattaatcttgtttcacgtatgccgtttgagatatcatgattttcctttttctgcttgtagggtgcagtggaagtgtaaacagtttctgtggaagg

SEQ ID NO: 1775 - DNA, 2162 bp, Oryza sativa
  Intron number 1 from transcript LOC_Os02g53620.1 (locus LO C_Os02g53620) derived from phytozome v7.0 (chr-ID Chr2; po s 32790187 to 32792348 reverse strand)
cccctcatcgtcttcttattcctacgcctccaaaggtcataatccaaacctttctcttctcccttcctagacgatgtagcagtagctatacccctgatcttgtgcaagtgctgagaccactgggtaatcttggtttcttggagcatatgtttgtttgctgatcttgtgcaagtgctgagaccactgggtaatcttggtttcttggagcatatgtttgtttgagtgcgtgttcttgatctccaatctcctgggtagtttgtcatgcttgacttttcgtagtcaaagaacgattcttttataggattgtaatggagcatattcttgatgccgaggcttattacgcttagtgtttgtggatttgactggatgcatgtcgttttggcacaaagattgattgagtatggagattgttgactagtcgtgtgtggcttgtaaggctactattggatgtctttggggctctagggaggatctctcaagtctcagtgtcagactcgatggcagcagttgttgtcatgcatgttcttgggaatttagatcatatatcatcatcatataagcttgtgtttatcacttgatgtgggaacatttctagtgctgcctttctctcgaccatatttgaggacgagtgatgtgttgatgactgatgaagtgatgatatactcggactatagaaattcagtccacctattctgtgtgttcctatagataatttcctgctggttaatactctttatatttgttgtatctttaggttgtgttgtatggatttatttggtatattttgcttcggttgtattttcccagtgctattcatatacagtacatgacagtcttgcttttttttttctgaaggaagtttttggtttgttgatctttgtctacaaaacatagctaaatatgggacaaaggaactgtatttttccgacttttaagaattaaaatgacagatcaatgaaatcttgtgtgttttagctctgccaattagctaaacttgggtcatatctgaggcttactcgaggaaaacaccaagatagacattatgaacttggcagttggcacattgaacaaacagttcattttgtggcacgtgcatttattatctagcatattagatgagtttattagtttcaattaagacatcaattagaaagattggaggaatattatttctttggcaagcatcttcttcaatgttagcataagtacaacctctagttacaaagaaacaatgctgccctcaaacatttttgtgttagaccattcattttaactattctttttttgaaaccgatcattttaactattctctccgtcccaaaatttagcgactagtcctaggttgctatattttgggatggagggagtagaattttcttgacctttttgagagtccaaagcactcactaaactcagaatgtaccacattcaagccctggtgaagcacatgtgcaaatttccacactgaaacatgcacaaatatgtatccatgtgtgcttcttaaattggacaacatcaacacttgtagtacctagcagtcgggccatttcagaaagtagaaaattttattttgttttgtttgcctaaacgtagtaaataagaagcttgttgataaacgcaagattcatgtcctgtcctggctgattcactaaacagatagtagtatcttcaagaagcaactaaatatgtattcctgaaaaactaggtagaagggacaagatattgacataaatttgtggaggtaaatttaaaacattgcttgctacgcatgagtgatacctgcttataagcataagcaataatttgaattgaaaacttaattttcgagttgattttggtatattttcatcatactagtttattttacagcatttgcctttatatcactaagaacacatatataaaagttttacccataaattattttttaatcactaataaaccgtttcacttataataagtataagcgaaacgacgaggctgctaaattctacacaagtactgaatctaaactttctgaggatgttattctcttttgttgtttatctggtttggataatgccaggatacttcctgtgtttcctcatgattccttttgtaatttatcaacctacactacattttcctgctgtcaccaggtgactccttcaggagaactgttg

SEQ ID NO: 1776 - DNA, 3348 bp, Oryza sativa
  Intron number 1 from transcript LOC_Os12g38590.1 (locus LO C_Os12g38590) derived from phytozome v7.0 (chr-ID Chr12; p os 23670059 to 23673406)
ccgccgagtggtttgcacttctctcccccgttccgcttctgcttattttacgcgctttttagggggatttcgttgcgttggattggagtattttgctcgagttttaagtagatggaatggttttgtatggtctggtgcttgttgatggagaagtgtgtgctattgacattggtgaatccacttgatagaaaatcaataaataaatctacttatttattatgaaatctggtaatatgctgctatgggaaataaggggggaaatcacattgtctggcttcaatgttggggcttcagcactagcctatcagaagcatatggaagcttaggctttgtttcctttggggattgggcttgttaagttgaatctgtgcatattgagccatttctgtggatttgaataagtaggtttaggataggcagcttgcctaatatgtgcatggcttggatgggttgtgaggtgtatgcagacaaactgttcaaccttcctttgtgttccgattggacctcattaacactcatgagtcatgaatcgccaagaagcctatcgcctactttcatttgttcccatggctttagtggtgtgccgacaagaagaaggaatttactgacaggctaagtcgaatcagcggaggaagctatgatttcagtggatatcatcggtagtgtgtcatttccgacgagaaaagaccccctttgttgttgataacgtcaatgataatggcgattcctcatcaatgtcttctatggtagttttaagatttttcatgctatttggagcatgtcttctccaactaaagcttattttggatattctttttatgataacctttattttccccacaacaatggcttctctggcaaggaaaagcttctatggtgacaaggaattaaattgaaagtctcagttaacgcggcatcaacttcaccagcgttgggatgggtcaccttcaatgagcccacggttttctcaaacctgcagaagctgtcaacatcattgtttccaatttcttgaatttatcttagtcttcttaagtatgttgtaatatcgactactgtggagaatcactgcaaaccaaaaaccacatatacaaaataattctacaccttccatgttttcttgcacgtgcttgtgcgcaccattggcaagaacactaacacatgcattcttccgtccattgttgatgatctaaatcgcttgactatttatcccattctagtaacttgtcccaatgttcctagtcggtagtaactagctggccaggggcagtgttgtatattgaattatttattctagcaacttccttaagtgtaaatagcgtctagaggttttccattaggtttagtttaatgcaactttttttccgcaaatattcaacaatgctcattttatttttgaatagttgaattactgaatagatcatatacttcggatcctggctcaaacaagggagtcaaaccacacaagtgctcccattttgtagaaaatggattaaaaatcaggcctctccacccggaatgggagaacacagccaaaaacaattgctcacatgacagactgaaatgatattagttgtcttttgtaacagtagtgtttgtaagttcatgcgactgatcttgcatggccctttgatgctataaggacttcaaacacaccatagtggcatgcacaaatcaacaaagtcagggattcactatccgtcttggcattggcctagtcacttagcccatgctacagtctgtattgccacagtgcagtgaatggttcacttgctgctttctacttgttctacaacctatctatgttgtgtaggctaagatataatgcagttgaaaaaagaaccacccattagaaatgtatatatcgagaaattgatgttgtattgcatcaaggttgaagatccattaataaagaataacttcacttcctcagcaactttcattctttgatgtgacaaaattgtatgcataattctggcataaatatatacctaactattcgaacatggctttgttgggccaaactcggaaggtagggctgaaaagcaaaagccaaagattgaattcctagaagtagcaggccttcaggggttttcttctatattattggccgatgttgcattgttctgtatagtgtgttggtaggcactggatagtgcaaaaactccgaactagatcatgctctcaagctttgtcttgttgcatttggactcaagatgatgtaagtcagtacaactcccttacctagctcggattaccgaattgtgccagatattgcattggttttgtgctgtatgactcattcttaagatattttgtaatatatttgtatttccatagcaggtttgcctaattctgtatgtcaaaacatgcctacagtggtttagcgccatggtattgttgagcactagcagtagtcttggtattgctttggtagattatatccgataaaaactcttgcttaggataattttgcactgtcatcaatttatatttcatttaaaaaaaacagtacccagttgagtggacactggacacactataagcttttccaaaaccattatttttcatgatttacaccaactgtgcctattcatgtctttccttcagtgaattgatttttttctatttatgtttatcttgcagccctaagtccaaagttccaaagaattgttgcgaaaatatctcctgtactaaaaatcccgtagatgagataccttcttcagggaatagataaaagaggaaggcccttagctttttaaatttgggggcaagcaattaataagctagtaaatgtgacgactctgatatatgagaaaatgtaactctgccagagaactaaaaaccatgttgtgctgttaggatacttggatttgttcctcatgttttgttattttcattatgtctgtattgtactgtgatcattgatcaaccattagttctttgacatcatgagtattcaattctacttttatgttatatttttgccagataattttgtgaagttacagcaataagattgcttcatgattattcttactgattcttgatgtgctatttttcttacctctaccaagagtaattatgcttcttgatatgtttgactgtcttgttcaatgatatttattcaacgcaccatttcatcatatggcaaccattgcaatatctctaccacaatgtaaagctatagaatacatataatgggtaatctattaaataactatatgaattctgggattactttatttaatataaatattttgcatgcaatctatgcaaataagtaaaccacctccttttgttttactaaaaccttttccatttcctgctcaggatatcccaggtgaacac

SEQ ID NO: 1777 - DNA, 8599 bp, Oryza sativa
  Intron number 2 from transcript LOC_Os09g18159.1 (locus LO C_Os09g18159) derived from phytozome v7.0 (chr-ID Chr9; po s 11132159 to 11140757 reverse strand)
tcagccggtgaatatttcgaagtatgggtgtgaatgttgggtgtttgggatgatatgtacatatattgggtagagcttggttcatcaagtactctctccatctcaaaatataaacatttctgaaggcttcgtgagaattaaaaaaatatgtgaaataaaatatgaaaaaaattaattgttgagaagataaagtaggtgaaaaattaaatgggagatggttgtgattggcttcatgggaattaagaaaatatgtgaaataaaatgtgaaaaaaaataatagttgagaagataaagtaggtgaaaaattaaatgggagatgattgtgattgaatttattttttttagaaaaaaatattttttaggtatattttttataaatgtgtagacttaaaagtaaatattggaaaataaattacaaagaaaaaccatcgaattcaactacaaaattatgttttgaaattcaaaatttatttgtggctaataagttgaagagcagacgaattttgcaattattttgttgtttatgctatcttatatgttatttacgctaataccatacatgcaaaactcttgtagcaacgcgcgatgtttcatctaaattataatcaaaacaagtaacaggtatatgaattaatgatggttacttcaagttgattactccttcagttctattattatacaaaatctaaatttcatatggttatggcaacaaatatgtaagtcataaatgaatctatataggggtatcaaaatttgtaagggtcagaattataaaaatgcaggagggtgcatatcagaattttgtggggtcttctttttccattcaagccgaactgttgcgtgtggtcttttttttttttcttgggactatttatatttatatttatgacgtcatattttttatggaaaaatagttaacatgtttttacattgtaattgtaagttactaaattacatatgtaattttattgtatttaccatgtaggttttaaaattacatatgtaattttcgtgtatttacaatgtaagtataaaaattacatatgtaattagtctaatcacataatgtaattattagtctaatcaccttgtattaccatattgtaagcctgtttaataggtccaaccacgtgaggcccaatacgaaaaccgaatagtcctacaccagcaccgtacctatctccacgcgcatcgaacggttataaaaaagtggcgacagaactatagcaacaccgttttttatatccgagccgaactgcttttatctctccgcgtggcgttcgccgctcattgcgagtcgatctttttatctcttcccttgcccactctttttttctctcagttccttcgctcgccgtaaaaatcgccatgggccatggctgctgctctctctccctatcgcttgcttagcttgtgctaatagctcgaacttgattcagcgatggtggaggatcaggcagcggtgctcggtggcccggcatcgttcattccctcccttcctctttctttctcctcaccagcttttccttcagccacgttggcccagatctggcggtggatcgagtcaggggatagctgttgagaggtggcgagggtggtgttcgctggatccgggccaaagatcctgccgtcctttcctctatccttgtcggattctccatagtccatactcggtgacggcatggtgatcaagcaaggggaatctattgttcttgatgtttttatttcttttgcttggattctttttttttaatttttttcccctctaatcccgactgttctagatgagattgcacattttgtgaaggatccgttgaaggttttttcaccattgatatattatcggacggctgcaggatggttgggaatacgtggcacgttctccggccgagaatccggctggagctctgggcgtggtgctacgtggcccaatgaggagtcagggttgtaaccctgaaatcggtttataagataggacctttagaactggcgcctttgggcttttctgtagtagtgtccgcctacctccgtcatagcccatgatgtcatggatcacacaagagagaaatagaggtagacacatgacggagagaagaacaggggaggagacattgacatatgggatctagaagatttggagaatggaaaatgaagatgctggttgagtgtgtaagtaatatgaagagaaatttatttggctgttgccaaatgagcacatagaaagttgttttatgtgacttacatgaggaaaaagtttgatttgtggcattcaaaactgtctcaaaataagttgatctagagctttttgccttggtcctatttgagaagcttaagattttaaagaacagctagtgagaaaattggaaaaaaagatgatttttttatctttaattttctgctttctagttcgttttctggattctataactatacccctcataatctgattgaaaatatgaattgtttaaaaaactaaagattttaggaagaacatataggtatgcatgctactccaaacagacctagtctctagatagagtccaaaatgatttttatcccttgcagccaagccaggatttcgattatgaatgggcccagcaagggatttataagaacatacataagaatattcccgaaagaaagacatacataagcatatattgtacaaagtaatgactaatctacaaaatcaacactcatgccataaccttttgtcgtaacatgagaaggtaagcgggcgccattgttaattgacggtgcacccacgcatgcaaccgccgcctcctccacctgtacatgtccatcctatcgacgcatagagcctcggctgggagtagcacctggtggtggccatgacaacggcatcgaacatttcctccatctccaccttgcggtcgcgcttgcttctcaccgtccatcgcaggtccacagcgagccatcacgctgccgcggcagcgcccactgcttggggagccgccgccgccggatctgccactcaaaaacactactagaaaaagcatttccatagtcggccaaaacagtttttgacatgcggctagtcgcgacaactgcaatttaaggcctaaagtgatctgcctatgaaaatgttttcagagtgcaaaaaaaaacctgctgattccaaaatatccccctatggtagatccaaattcctctattccccttgccacccataatccattcacaaacttatcacaatcctcaaaatccattcaataaattgatcacaaaaaggggtcaaagagtaagattccgaggctggaaagtggatccacgcttccaaggctggcggttggtggatccatgcccctgaggctagccagtgctggatgatccggtcccacaaggcctggtgactgcaggcagggtcgacggcaggagctaaggaggaaatgccaggctcggtggtgtggatgcaagctcctgaggcctagaggcgccgtggccggtagcaaaagtcatattgtggatccgtgctccctatccatcacgtgcatgggtataggtgtccaaacgggcggcacggcccggcccggcacgggcacggttccggcacggcccgtttcggcacggcccgttaggcacggctgatgaaacgggccgtgccgtgccggcccacgtgccgagccgccggcccaagcacggcccgtggatggccgggccgtgcccgtgccggcacggcacgcccgcggcccacgggccgttcggggcacggcggcccgtgaaggcaggccgccagcccgccagcctgcagtgcacagtgtttttttttaaaaaaaaagcaaaggaaatgtataaggaaaaaaaaattaaaaatggaaataaaatgtttaaaaaaagtaatgatttactaatgttaaaaaatgaaaaaatggtatttaaaaaatggaaataaaagttttttaaaaaagtaatgatttgctaatgttaaaaaaaagaaaaaatggtatttttttgttgtgttgaaaaatttaaaaatatagattgtgattcattattttgaaataatttaaagataaatccacacttgcgaaaatattgcaaaagaatttgttaaaaatagtaatgacctttattgatgtttatatcattacaggatacaatgatacatgctgtctcgttaaaaactttgtcatgtaaaaactcataggggaaaatgagaaaaccatgacaaagaaaagagtacagctcaaaggtcagaactacttctaacaaaattctactggggttggtctggatccaggtagagttgctcgaactgggcggccaattcttggttgtccgcagtgtattgggcatgttgtcgagcaagctcccagtctttaacgcttagtagcatttcgacgtgatcgctgcgcagagtcgtcctccggtcttcgatgattcggccgcatagactgaaggccgattcggaggacaccgtcgacacgggcaccgtcaacacatcccgtgctagttttgaaagcacaggatatgttatcttgtggtcattccaccacccgaggacgttgaaatcttgtgcttcgtggtggatggcgtcgctgtccaaataaccggacaactcttcggccacaacatgcgaagaggcgtctccacttgtagccgacgaactgccaccaccttggattgaacttgaagacgatccaccccaaatcctaccccactgtatcttcttcttacctgtagtggggataggagggggtctctgctggcgaacttcctgaaactttacttcatatcttccaaaaacctcatataatttacgtctaacctcagtataaaaagaactataatctacacctatagtatctccaacaagtgataaaatagcagacaatccccttaatttacacctaggatctaaaacaaaagcaagagcatacaacataggtatatttttccaatatttcaaatatttttgtttcatgtgaaagacaggttcagttagaacgtcatcattttcgtattctttaaataaagtagcaatttcaagaaggttgtgcaaaattatattagcagttggataataaacttgtgacaaagttagagtacaatcataaaaagtttctagaaattggtaaaatttttggacaattgcccaaacatgctcgttcagtactgaagacccgtcactgtttcttgggccaccacgtgactgaacaaaatcagaaagtaaactactataaggtaaaacaacttttaacattaaatacgttgcattccaccgatgctctgcatcggtggcaaacttacgagctttcacaccggccgcattgcaaaacctcttccatgcagcaatccgcgggttagaagcagttaaccacgcgattgcttgacgaacagcatcgatgtggtcacctaccctcttcatgccagtcttaacaatcaaattaattatatgacatgcacaacgctgatggagtagaaaagattgagcatacacacaaaataaaggttgcaatatttcaatagccctagaattagcagatgcattatctagggtgacagcaaatattttatcagcaagattaaattcattaattacttccctaattctttcagctatgttttctcctgtatgtgagacatctattaacctaagccctaaaactctcttttgtaattgccaatcatcatcaacaaaatgaacaactacgctaagataatcctctctagctctactactccatatatctgaagtaacactaacagagaaagtacatgtactaaacagttccttaagtgcagttgcttccttgtgataaacattctctaaatctctagttgatgtttgcctactcacagctttaaacctagggttatgagattgctgaatgtaatgttcaaaagcaggggactccccaaagttcaggggtaaatcttgcctggcgattaaccggacaagagattcccgagcaaccatgggatcgtactcccaactgcgtaccgtaccgtctgggtttaccataagttgctgctgccggagttgtattccttgcttcttggcacacgactccgcatggcgcttgaggtgacctgtaccaccagaagaacgagcagataaaatttgcctacatattctacaacgggctttcgatacctcccttccgtcggggcaggtttcctttatctcgtcgaagctttgccacacaccagaggttctcgatctcttcgagccggtgtgtgtcgaaacacttccgctcgcggttccggaaaatccttccgaagctgtctccgcctgaaccggtacctcctcaacgacagccgtatgaaccggtacctcctccacagatggtggagttggagccgatccggaggtaccgtcaaaccccgacatgtagttggggtcgaaatcacccaaggtgaacgacggcgactggtatggaaagttcggatccattctgaaaatttaaaccgacataaacaaattttcgaatatttattgaattcacaaacacaatacaaataatacacaaatttgaatattacttacatctttccaaccgcgagctcttcaaacctctgcgatcaaactgttgaactacgaaactaattttgatttttgacaaaatttgagcaaattttgtcaaaataaaaaaaaatgcacacttgagaacaaagagagcacttaaaacacttgagagcacaagatgaggagtgtgggatgaggagaaatggctggggttcatgccctatttatagggcgaaatttgagattttttggaattttttcgaaatttttatgaattttttagcctcccaacggttattttcaaatttgaacggtcaaatagccgttagtgccacgtggcgccttcccattcgaccgccgcccgccctgtccgcgcctgacgggccgccggcgtgccgtgccgtgccgtgccgcgggccgtgccgtgccggcccgctacagtagccgtgccgtgccgtgccggcccgcgggctcggccagcggcccaagcacggcacggctactcgtgccgtgccggcacggcccgttactgtagcaggccgtgccgggccgtgcctgctacaggttcggccgtgctccgggccgcccgtttggcccggcccatttggccacctctatgcatgggtcactatcgctgaaccattgcatgcgctggtcgctatcaccgtcaccaccttcttctgcttctaatcccgccatcgtagcggccgctgctttgtgttgctcctgccgcctccaccaccactgctttttgattcttcttctgctgctactaccacagccttctacttctgctgcagctgttgcctccgctgtcctactcctctttggccagatctgggaaagggaagggccgtcgatgccccctctaccgctttcactactggcttccacccctgaggtagatcagggggagggtaggcgaggggagtggagggtgagggagggagtgagcagactaaggctgcgttctttccacaagtttcccaacccctttccctcgttttccgcgtgcacgcttttcaaactgctaaatggtgtgtttttttgcaaaaagtttctatacgaaagttgctttaaaaaaacaaattaatccatttttgaaaaaaaattaactaatacttaattaatcacacgctaatggaccgctccgttttccgtgcggtggagttgggttcccaaccccaagtatcaaacacagcctaagggatgaagataaaataatagatggagacttagctgcgtggattttttgagcgctcgtaccttttcgcatgctaacatctttacatctcacctatgataattcgttcatcttttttcgtaagcgaacctcttatggctccgactgtaaaattcgaccaagcgggactaaatcatgggggcctttggctatttttgtaagcagtaaccagagggtatttttttactccatatagaaataaaagcctggtattggtaataaccatttttctagtagtggaagctgttgctcactgttgctgtctaggcccgccgatgctgctgaatcagtgtggcactctggctgggtagtggagggaaagtatgcagctttctagctgtggttgacaatgatggtgccatgacgcctgggagtgggagggagcggacgaggagagtccaagggactggatttaaccatagctggttgggctggccgtttttttagtgtctcctgaattgtatagccgtctttggtaaaagaactgcgtgtgaaaatacggttattttctttggtaaaaatatggctatttcctttggtgatctcttatggtctgcacaacaaatttagacgataagacctctcgatgctttttcaagcgcataaacaaaaaacacggtgctcttataaacaaaaaacacggtgtttgaaaaaaaatcttgagatgaaaaaacccctcttgttccataccaatttcctgagatttttccgccctgtacaccagtgggtattgtcttggtttgcttcaaaatgaagacgagatttggctattttgattcttccgttcgatcacttgtgtgtaacgtcatttttcttttctgtgtgtattaggtttcctaagcatcgactgtggcctggatcaagat

SEQ ID NO: 1778 - DNA, 7994 bp, Oryza sativa
  Intron number 2 from transcript LOC_Os07g09460.1 (locus LO C_Os07g09460) derived from phytozome v7.0 (chr-ID Chr7; po s 4987543 to 4995536)
gtgggtaacaagcccaagtgcccaactagtatgtactccctcctttttttacttatggtttaggacatttacagtttccaatgcacatgttttattgttgcttactacgattatatatccacaaaaataattaaaagcataacaacatgaaagtatttttccaagaaaatcaactaatgacattttcacatgtcaaatcttttttttttgcatatattagtgaattaacattttgagttttgattgcacacattctaaaacttcatttatttgacaacagagggagtgtcaacgattttataaggaaattagattgtgcctaagttgcaagaatattatgcaaagtaatgtcttttacctaaacttttcatagtccactagatagtgggagtagcttgtactaaatgaaatgatatactacctctgtcctcctgtccagattcgtagtactaggtaatatcacatctagtactaggtagctacattttgggacggaggaagtaagagagaaatacttgaaactttttaactaaaatatacttaaccaaagccggtggagtgtcggtggacagtggaggatcttccaaagctagaaaatggtgctggaaggtacatgatggttcacaaaattggagaaacgaacctctactagaagacgagagtaaacttcccctcagtaaagttgcaccctaacagaacaaggctgtaaacaactttaacagaaccttggtaacatgaaaaactttcagccttacaactaggaaccaaatttgagaatgaagcctgagcatatttttacactatttttctgattagccaatatgattttgacttgaccataatattgccaacttgttagcttttctatgctcaacatgattttggaaggcatacattttagatccaacaaggtggagatttacattcctattgtgggaactagaaagatgcttctccagtcttcacacccaaaagttccaatatgttagcttttgaggcaaatgattgtggggaatagatgtgcacacaaccaccatcaaagtctaccaaagagcaagtaaatggattgattttgattgtatgatcctcgtggatccatacataaaacacctggagagaatgcatgcaagtaaaatgctgattcacttgaaggcgtgagtaaaacttacctcacacaaaagctacctgcctacccccttctttttcttttagttgatccttgagtgtgcacacaagactagaaaatcattatatttttctagatatgactatttcgccttgaatatattgtttagtattgtgggtagcaagttggtgagagtgttataaagcaacttttatatttgtgggggactgtgggtagaatatgactacttattataggggtaaaaaaggaaactacacattgggaatgcatttcaagtatttgcaaacaacattttttttggcaaaactatcaattgaacaagaacggagggagtataaaccaacaataccaagttgttaaacaactttccatggaaacatgggaacactagaattgcgtgtacttacattttgccacgggtttggccaacttaaggcagacgttttgtttgccaccacacttttgacatgccacataaccttaccttatttccccacatgccatagacacattttctagccatgtcttacctaagttgtggccaactatattcaggcacacaatccatggcatgcacgctttagcttaaaaaattggcaacttagcatatgcaaccaaactgacctttacactaaagccatctaaaattatgaagtacattaataaggacagtaacacatctaaaaattgtagtgcttatcttggatcgtttaagagaacaatggaagacacaaaacatgagaactaacttgttttttttctttttttgcaatttctatctgattgatttgatcacaattgggtcagaaagtgaaattgacgcaaacatggctaacttgttagctgattatttgctcaacatgtttgtggaaggcatacatttgagagatattgagttgtgactaggttgagatttacaatgcaatagtgagaagtggtaagttgcttctctacactaaaaatctccaatgcttcagcttttgcacctaggattgtggctaacagatgtgcacacgatcactattaatgttcgtaaaagaggagagtagataattggattgatttggttgcatgccacaacgtgcctagatgatattgtttgccatgtagaaaagtgaaagccatagtgcacaatgccacacaccatctgatcgagaggcaacccgttgtggttggttggcttgctacattgatcatcttggcgccacgagcacacgcgcgtagttccatattgcttatggcattgacttggtcaaagttgggtcagaaagtgtaaatggcacaaatattaccaacttgttagataattctttgctcaacatgattctggatgacatacggtttagtgctatacaaatcacacaacactgctagcttaaacaaaagtgtttggtcagattcagaattgagaacaaaaactgcatgccatgccaccgcgtgcctagctggtatccttagctaggtaggaaagtgaaagctctagcacacaatgccacacaccagccgatcgagaggctaaccattgtggttggttggcttgttgcatcattcatcctggtattgtgagcacacacgtagtaccacactgctttagagctaaatacctattaagaacattatagaaatcaagtacacaaattctagtcacatattcttccacggttgtctgattgtccaatatggcattgacttggccatagttgaattagaaagtgtaaatggcacaaatattaccaacttgttagataattctttgctcaacatgattcaggaagacatacggtttggtgctacacgaatcacacaacacttctagctttaacaaaagtgtccagtcgggttcgggattgagaacaaaaccgcatgccatgccacaatgttcctaaccgatatcctttaccaggtaggagaatgaaagctatactgcacaatgtcacacaccagccaatcaaaaggcaaaccgttgtgactagctagctttgtcgttgctcgcacatttcgtgcactataccaccctattgtctgtggtttccatttctctaaaacagaaacccacacgaatcacacatcactctgtgagctttaacaaaagtgtttaggtgggttcaagatcaagaacaaaaaccgcatgcctagctggtatccttagccaagtaagaaagtgaaaactttagcacgcaatgccacacactagccgatcgagaggaaaaccattgtggctagctggcttgttgcattgttcatcctggcactgcaagctcatgcgatcacgcacatagtaccacattggttgagagctccatatgtattaagatcattatagaaatcaaatacataaattctactccttttgtcccaaaataagtccatactccatgtatagaagtggacttattttgggacagagagtagttatatgattcataaatggaaaatagagcatttaaagtcaggcttcctcagaatagttaggcttgaaagggagtatcaggcacgttgaacgattggctggtggatgcagctcgagaaatattctagtttgaggaattgttacggaagagggaacaatcggccatcgacggcgcaaaaggtagtgatgtcagtggcaacagggttgggatgcaattattcaagctttagaaagtgccacaatagggttagaaagtgtaagtggcataaaccttggtatcttagttgattctttgctcaacatggttttgggaaacataagttcaatgctagaaatttttgagaagcagaaatttgattcatgatgaaaagctccaatgcttcagcttttgtagcaagtgattgtggctagagaatgcttgtgagtactagatggttggtgaagcaaaatgtttgagaaacacaaacaatcctactttagaagacacaagtagaactttgtattgattgactgcttgatcatcgtggatgcagtagagaatgcttgtgagtactaggcagttggtgaatcaaaatatgctaaaaaactcaagtaaaacagatggcacagatcacaatcaaagtccaccgaagagaacttgtgtaagtgtattgattgactacatgatcatcatggacacaaattaaatgcccagagagaatgcttgtgaatactaggtggttgccgaagcaaaattcaagaaacaatcctaaaccagaagacgcgagtaaaacttccttgaacagtccaacaaaaccaaactgctaagttaggaacatttttatcttgcatgcttacactaaagccataaaaaagtatgagtcgattgacaagcattgcagcacatttgaatattgaagtgcttttcttagacccctcacaaaaatattagagcataccaaatttgaagacaagactacaattccgttggtagcattttgcactgtttgtgtgcttatccaacatagttttagttgacaacaaatttggagatgacacaaacattgccaacttgtttgttaatttgcttcttggcaagatttttgaggacacgtttcgaagctatcaaactatcaataagtataccactttgaaactggatagttgcttgtcgatgatataaatctcctgctttagattttgctacagtataatggacaattgaagaaacacaataatgatcaaagtacattgacggggagagcatataagtggatttattttgattgttgttgatgtatacatttaaatccaagagagaattcttgtgagttgttaggtgccagtaatagacattttaggaagaatcttccgctagaaggtgtgagtagaacatcccttggtaaatctacataccaaaaaaaaccaagatgccaacctactttgatagaaactttgtattgttgaaatattgcatgtttacactaaagccattcgaaagtttgaagcctgtcaactaaggttgcagctagtttaaaaattgttgtgtttctcctagaatcttcacaacaacaatggaggatgccaaatctgaggatgaaacctaagcaaaatctttgtcaaagatctagttttattgcagtgttgtcctaactaagtgtttgtccacttgggaagttaattctgctagcagcaccttgccctatttttatgattgtccaacatggttgacttgaccacattaacacaaatgttgccaacttgttagttgattcttgattctttgctcaacatgattctggaagacacatttcaaagctagcaaaccatcattaggtcaatattttcatggccactctaggaactattaagttgcttatctaaggtgaaaagcttagattcttcaagttttgtagtacacgactgttgggtataaaatgtgcgcacaatcacctgttaaggttcactgaagaggatgcattggttttgactctttgatcattgtggatttatccatatagtgtctagagagaatgcttgcgagtaatatgtgtctggtcaaaaaaaaaaggtgaaacaatcgtctgctagaagttgagagtaaaatttcctgagggtaaaaaagcggcaaactagcaaaaccaagctgccaaacaacttttcatggaccatcgactctacattttaaattgttagtgcttctcctagatccttcacaaaaacaatggagcatactctatatctaagaatggatcctcagtagattccttgtcaatatccagttttataacactgttagtgtggttgtccgatgtagttttgacttgaccacaatagggttagaaagtgtaaatgacacaaaccttgctagtatttatttattgactagaaaagtggttgtgtcttgtgatggggaaaactaacatattagatgattaaggttcaatatcgtgatatgaacattttaagaaaacatattcttcacgtaaacctgccatttgacttgtaaaacatcgtgctttgcaagagactataataatattacatggtgtccttaatgtttggaatagaaaggaaatctttcacgagttgatcctggaatgcacatagtagttggcatcatgccactatcacgttgaggtcgatctccacgatgtgtgctttggcgagcagagcagggacaacgtcggcacgatgcgctatgccaggccctcagtgatggtcatcttctcgaccccaacgacggaagagtatgcacacaacgtggactatgacttcgtcttggtcgagcacgaggtccatcgttgtacggccgttaagtcctagccgtacgcttcacgttggacctcgagtcaatgggaggttcactggcagcattcctcaaaatatttgggctttagatagacagggtaccaaacacgctggtagaaacggcgggtgacagtagcggaggaggtggcatcgaaatattggagctcgaggtattgttgttgaagacggaatggctggccggtgacgctacagagaggtggcatggtaaaattcaatcatgaggaagtgccacaatagggtcagaaagtttaattgacacaaacctcgtaaagtacacttctaagcatttgagtggcgatgttggatcctaagtcagtgggaggtacaccagatgcttcctaaaattactcgggtttgagagtgggagtaccgaacacgttggaataattggccggcggcggcaatggaggtggcattgaaatactcgagctcaagaggtggttgccgaagagggatagttggccaaggtgcgacaaaggtggggtggtaaaattcaaacttgaggaagtgccacaaaagggtcaaaaagtgtaaatgacacaaacctcattaacttgcttgattctttgctcaacatggttttgggaacattagttcaatgctagtaatccatgaggagcagaaagttgattcacgatgaaaagctcaagtgcttcagcttttgtggcaagcgattgtggctaggagatatgaataataaatatgcagcaacgaccattgaagtccaccgaagagtagagcatatgagtggattgattttgaccataaatattgaaagaattcttgtgtgttctaggttgttggtctataaattcgcaaataatcccttgttaaaacgtgtaagtgaaacaaccccatactataaagctacaagcctgcaaaaccaatccaccaaaaaacctttgacaacaacactggagcactgaaaactttgtgaaatttcatgaaaaccagccaagagtacgctcctaagcattcgagcgatgacattggatcccgagtcaatgggtggttcatcagtagccttcctcaaaatactcaggcttgagagagggagtactaagcgtgttggaacattgcctggtggaagcagcgcatgaggtggcatcgaaatattctagatagagggattgttgccgatcaggggatggttggccggtgacattgcaaagggtatagtggcgtagtggcaacagaggtgggatggaaaattgtaagcttgaggaagtgccactagggtcagaaagtgtaaatgacacaaaccttgttaacttagttgattatttgctcaatgtgtttttcaggaacataagttcaatgctagtatttggtgagaagcggaaagttgattcatgatgaaatggtccaatgcttgagcttttgtaacaagcaattgtgactagcagatatgataattaatactccatctgtcacataatataagggacttttcccatcaaatttgtcccaaaatataagggattttaggatcccaagacatactccacctaccaacttttatactagtttattcctccaccatctacttttatactaatttaatctcccatctactaacttttatactactttattcttgataggaaaaataaattatccaaatct

SEQ ID NO: 1779 - DNA, 1151 bp, Oryza sativa
  Intron number 4 from transcript LOC_Os04g08749.1 (locus LO C_Os04g08749) derived from phytozome v7.0 (chr-ID Chr4; po s 4746243 to 4747393)
ccacgacatccgaaaacacagaggaccaggttggttagccatatttcacactcgttgcactctgaacaatcaatagagaatcacttctagcaatctattatgattcatttccagatgcattaatctattctctttgttagtacttttcttggtattttaggttttcttggggcttagttatagaatagggttttggagtgggtttgtggaggggtgattagaaagttgaaactcttttgccgcgaataaatctgcagtaacatgcctatcatttcacttcagagccaatgcatttgggtaatgtctcaaaatttgttttgtatttggttgtttcggcttttttggttgaaggaatctgcaatatatcatgcttccccaatgagtgagccattttttccccatggttacttactatttcagatttgtatttctatacatgtggcaccttttcattccagtgttgtgcctgaggatcatttaaacgactctgatcaatcctccaccatagctggttgttctacttgctgtgaccatgccatgacatccgaaaacacagaggaccaggttggtttgctatatttcatactcgttgccctctgaacaatcaatagcgaatcacttctagcaatctgttatgattcatttctagatgcattaatctattctctttcttagtatttttcttggtattttaggttttcttgggacttagttatagaatagggttttggagtgtgtttgtggaaaaatttagaagcttcacatactggatgaatttttttagtagttagcgtattggttattggcagtcaaatttttttagtacaactggtaggaggatgagcttatatttggcactattattcagaagatgttaatctcaatctcccattttactgtacttaatgttttcttaaatgttaaatacttaaaatgggactgcagttggtcactgatggttgcttgatagccataaggaaaagagagacaaaaataatgaattcatgcagaggtttcagtcaattgcaaataatatgagattggttgacttaaaattgaggatggtgtggtatgatgagcctctgttgatctgatcattttcctttttcatgtcaggtttgacacctttggattgcataccagaattttcc

SEQ ID NO: 1780 - DNA, 728 bp, Oryza sativa
  Intron number 22 from transcript LOC_Os02g13850.1 (locus L OC_Os02g13850) derived from phytozome v7.0 (chr-ID Chr2; p os 7512020 to 7512747)
acgaatatctccatcttcttgactgggtatgctattttagcttctttttttctgttactgcttttgtcttttaggactcgaattcataaccagccgtccagccccatagaattgggtatgatcttatgggacgaatttctgtcatagatatgttatcttttataaagtcagtttgcttaactttggagagctctgtcacattttaggctgataatatgctgagtaattgatgatttggattggctgttcaaaattatgttatgataggaataaaggtcaattgtaacataaaccaacaacattagttccaaaaatcgatcatttgaatggcagctattctgctatagccaatgaaataagaccaagtttcttggtactcacccaacggataacaatggataatcagtctgtctagtagctactgagattctgtcaaacaaaggctaacaatgaactaggtgtgcccataaacaattttctcttgatcaggattagcccacaaacaaaccaatattcttcatgccagaagaaagaattgcctagtgctaactgaaagtgtttcacatctgaaaggcgaattacccaagaaatttagccttgcattgcatgttaatatcaccaagtaaactgctgatagtcctgctacacattttaaacacgaatctactaactggatttattttctgcccacaggctgaaagattgaagcaggaagggagactactgga

SEQ ID NO: 1781 - DNA, 14820 bp, Oryza sativa
  Intron number 3 from transcript LOC_Os01g71300.3 (locus LO C_Os01g71300) derived from phytozome v7.0 (chr-ID Chr1; po s 41252096 to 41266915)
agagggagaggcagacagttgggattttggtgttggtaaggatttaatctacaatattcaattgttgtgctcttcgcattctataccatataacaacatgttgcatggcctttctttgccataaacaatggactatctctttgttggctttgtttagatgattcatgtcctagaaaacattcatctgttgtcctaaatctgtaagatatgcctagcaaaccgtccatttttttgttattcattgctggttatgtgcagtagtatgctctgctgaaaatctatacacataatggtcatgtacagcagtatgctctgctgaaaatctataaacataaataatgcattattctagtaaacaattaatatgatacggaatattgttggacatattcccctaaaaaataaatgtcttgtatttctttttatcatttctgatagcctttacattattacgaatggaaatgtaacgtgtaaaaatgaccagcaaatttggtatttatgattggttttctgaaaaaatggttttctttgactggaataaacgttctcttggctttccaaaaattaatgttctcctttatcgcaaaacatttcctgattttgtatttcacacatatttcggttactaaattggttgtctgaaagtgatgttcccttttactgataaaacattattttgttttgtattcgaatactaaactttggtatttctgattggtccaaacataggggttctttttataaaatatctcttggtttcatgcataaccctttcatttggaatctgaaacatatgtttgatacatataattggtattatgaaatttgatgctcctttttttatctaaacaaaacaattcagtctagtgtgtgacactaattaagtgttctgatttgctctccaaaactggtgttcctttttattgaaaaaacgtttcttggtttcttggttgacaattctgtttgaattctaaactttgatttgatgctctctaattggttgtttgaaaaatagtgttaaacttcctttaaaaaaacgatattgtatttgatacttttatttggattctactcgttcagtttgctacttctaatttgttcttctaaaattggtgattcctttttatttatgcttcttgcttgatgcttctatttgtaacctgaagctttaatttggtatttatcatttgttttgcaaaaattggggttcatttcataaaagaatctacttgtttcatggttgacatttctatttttgtttggtatacttataattttttttgaaacaggatgttcccttttattaaaacaaagaaacccaattttatgtgtgacactttaatttgctattatgatttttatcaaaaaatagtgattcgtgttaaagaacattttcttggcttcttgattgacatttctatctagagcttcaagttggcatttgtgatcggtttcgcaataaattggattcatcttgtaaaaacatctcttggcaacgcttaatgattttttttcttggttacatggtggtggtgttccattttcttgttttcctgcttaacgcttatagttgtattctaaagctttactttagtaattcttattttttaaacgacatatcttgttttcatgctcgatgatgttatttggattctaaaactttatattggtacttatatttttttccctaaaatttggtattcccatttgttgaattgattatattcaaaagttttgatttcttattctattttttaaaaaataaatttggtttgttttataaacggaacatatagttttcatgttgatactttcattttgtttgtagagctctatgttggtacttacaattggttttctgaaagtagttgtttcctttaattgaaagaaagaaaaccaattttgttcgagacactttgatttggttgtctaatttgtttttcacctaaaaaacattctcgtttcttgattgtcacttacatttggattctaaatctttacttaggcacttacttttggatttcatcctttgtcacaaaagcatttattgatttagcatttgacacctttatttggattctaaaacttgcttggtaccaatctattttccacaagatggtgtttccttttatcacaagtttattttatttggctttgggtaatttggtggctgtttaccgaataaatatctctgttgagttcttcgtgctttacatttactataaatttaactattatgtttggtacttacggattccaaaatttggtgtttccttttatcaaaaaaaaaaaaatcttatatggtatttctgattcgtttctaagtttggtgttctattttaactaagagaaattctcttagattcttgattgacacttctatgtggattctaaatctttaccttggcacttacttttggttttctgttagttggtgttcccttgcgtcgtaaaaacattcttttgttgttgtgcttgacaattctatttcaaatcttgaagttggtacttactatttgttttctaaaaggtggtgtatttttattttggttttatgaaatgtggtgtttgtttctatctagaaagtatactcctttttaatgctttggcgcatctattcatggattctaaagttttcactttacttctaattctcattggttacttgctagtagtttttttttgtgaaaaaatgtttctagttcgttcttcaaaatcgtttttccttttcatcgccttgcgaaaatatggttttttgctttctattaaaaatactctatttttaatgctttggctctctatttgtagattcagaagttattttgctttgtaaaaaatgtttgtaggtagttcttcaaagtcatgtttccttctatggagaaaaacaatgtaaagcttttcaatcttgtacttttcctgaatttggtgtttgcttttcttttaagaacataattagttccaaatctttaacttggtacacactctttgttttctaagaggtggcctatcattttataagaaaagcattgccttggtttcatgcttttttttggattgtaatgcttttgagcttgaccttataattccttgttatttggaattgggtgttgccttttatcaaaaaatattttgatattttgatatttttatcacaatacttattattggagttatggagtttggtgtttaatttaatttcttgtcaatgccatcttgattcttctacatcttcaaattttccttattttggtttttgtaaaatacgatgtttgttttctagtaaaacaatattctcgttttaaatgctttggcgctttgtggattgttaagctttttcgttgcacttctaattctaataggattttcataagttcttctgttttgcaaagaagaatgttctagttcttttttcaaaatcgtgttaccttgtattgagaaaaaagattctctaaagcttttcaatttggtacttataattagttctccttagtttatgtttgcttttgcaagaagaaattattttggtttccctgtttgacatttgtatttgggttcttaatcttgaacttagtcttactattggttttccgaaagattgtgtcttgttttatccaaaagtaaaaacattaccttggtttcttgcttctatttgggatctaaagcttttagcttgaacatacaattcgttttttctagaatttggtgtaccttctattgaaaaaaaaagaaaaacattttcttggtttcatgcttggtacttctggaattctaaatcttttgacacgatactcattgttgaatttatgcgatttgatgttcctttctatgatcgttttgttttcattcttgtcattgtcattttggtttttctaaattttcaatttggtacttacttttgttttgtcaaatgttgtgtttgtttctgtcgcaaaagtattctcgtttttaatgctttgacacttctatttgttgtttctcaagttcgagctctaattggttttccaaaagttgtttcgttttgcaaatcagaattttttctagttttcttaaaatcgtgtttccttctatggagaaaaatgttctataaatcttttcaatttggcacctattatcgcttttcctgaatatgttgtttgcttttacaaaaatacattattttggtttccttggcatttgtatttggattcttaagctacttgctgttggtttcttaaaggtagtctatcaatttattgcaaggaaacattgctttggtttcttgctctattctgattctatagcttttagtttagacttataatttgttcttttttggaatttgatgttcctttattgatgaagaacaatatcttggtttcgtgcttggtgcttcttccaggatatatatcttttgacatcatacttattattgggtttatggagtttggtgtattgtttaatgaacttttttggttccttccttgtcagtaccatcgtgattgttctagatctttaatttgttcctttttggtttttaaatgtggtacttggttctatcaaaaagtattctcgttttcggtgctttgacgattctattcttggattctaaagctttcatgtgtacttctaattctatttgttttttttgaaagctgttttatttagcaaataagataattgtagttcatttctcaaaatcgtgttttccttttatgttggaaacattctaaatggttttcctaaatttgatgtttgcttttgtaaaaaaaaattttgttgccaagttgcatttgtatttggattctaaatcttaaacttggtacttgctattgatttttcttaaaggtggtttatcccttttttttaaaaaaacattgccttgggttcatgcttctatttggattccaaaagcttctagcttgaacttataatttgttttttttttttggattttgaggtcccttgtacggaaatcttctaccacggtacttttggaatttggagttttgggctcaattgtatgatatttttcggcttaaccttttgttttgtgaaatgtgggtgtttgtattaaaaactatcctctttttaatgcttcgacgcttttattcttgaattctaaagctttcaattggtacttctaattctaattggttttcttaaagttgtattatttcgcaaaaaaaaaaattctcttgttcgttttttcaaacgtgttatctttcatgcagaaaaacattatcttggttttagcttgaacttatatttaatttttttttggaatttaaaattaccttttatcgaaaaaacattctcttggttttgtgctttgcgcttcttggattgtatatatttttattggtgttttattttacctggaagacattctcttgtttcttgattgacacttctatgtggatctcttagtttcttgattgacacttctatgtggattctaaatctttaccttggcacttacttttggttttccgtaaattggtgttcccttgcgttgaaaaaaacattctcttgttgtgcttgacaattctatttcaaatctttaagttggtacttactatttgttttttgaaaggtggtgcatttttatttttgttttatgaaatgtggtgtttgttcatgtcgaaaagtattctcctttttaatgctttggcgcttctgttcgtggattcaaaagctttcactttgtacttctaattctcattggttactctatagtacactttttttgcgaaaatatgtttctagtttgttcttcaaaattgtttttccttttcatcgccatcttgttgtggatcttgaattgggtatttgttttggtttcgtgaaatatggttattgctttctattaaaaatactctattttttaacgctttggctcttaatttgtagatcagaagttattttgctttgtaaaaaaagtttgtagttagtttttcaaagtcttgtttccttatatggagaaaaaaaatatgtaaaagcttttcaattttgtacttttcctgaatttggtgtttgcttttctttgaggagcatatttggttctaaatctttaacttggtacatactctttgttttctaaaagatggcctatcattttataagaaaagcattgccttggtttcatgcttttatttggattctaatgcttctgagcttgaacttaaaattccttgttatttgaaatttggtgtttccttttatcaaaaaacattttgataattttattttttttatcacggtacttactattggagttatggagttcgttgtttcgttttctttcgtcaatgccatcttgattcttagtttggttttctataaaaatcgttttttccttttatggagaaaacattctaaatggttttcctaaatttgatgtttgcttttgtaaaaatagaaaacattgtttttgtcgccgacttgcatttgtatttataatctaaatctttaacttggtacttactattggttttcttaaaggtggtttatcctttatttttttacattgccttgggttcatgcatctatttggattctaaaagcttttaggttgaacttataatttgtttttttttttggattttgaggtcccttttatggaaatcttctatcacggtacttacttttagatttatggagttttgtgttcagttgtattagtttttttggcttacccttttgttttgtgaaatgtgggtgtttgtattaaaaactattctctttttaatgcttcgactcttttattcttggattctaaagcttatacttggtacttctaattctaattggtattcgaaaacttgtactattttgcaaaaaaaataaattctagtttggttttcaaaatcgtgttttcttttatgcagaaacacattctccaaagcttttcaatttggtactaataatttatttgcttttataaaaaaacattattttggttgccctgcttgcatttgtattaactctaaatcaactcggtacttgctattagttttctaaaaggtggtctattttttatcgtgaaaatatatattgccttggtttcgttcttctattttttttctaaagcttttagcttgaacttataattcattttttggaacttgttaccttttatcgaaaaaacactctttgtttttatgcttggtgcttcttctgggattgtaaatctcgttattggttttatgccgtaggtgttttgtgttttgacctccttttggtttctttcttgtaaatagcattttgatccttctacatcttcaatttggttctaacttaggttttgtgaaatgtggtgtttgcttctatcaaaaaagtattctcacttttagttctttgacgcttctattcgtggattttaaaagctattacttgctacttctgaatctaatttgttttctagaagtagttctgttttttttttaaaaaaaggtttctagtttttaaaatcatgtttcttactatggagaaaaatgttctctaaagcttttcaatttggtgtttgttgttgtaaaggcattattttggtttcgttgtatgacatttgtatttagattttaattcctttacttggtactacctccgtcccaaaataagtgcagccataattttccgcgtccaactttgaccgttcgtcttatttgaatttttttttaaaaaaattaaaaacataagtcacgagtaaagtactattcatgttttattatctcataacaacaaaaatgctaattataaaaaaatttcaaataagacggacgatcaaagttgagcgcggaaactcaaggctgcacttattttgggacggaggtagtacgtactattgggttttctatgctttgatgtaaaaaaaagtattgccttggtttcatgcttccatttaaattctgaagttttagtttcaacttataattcatattttggaatttgatgttgtttcccttcatcaataaaacattctctttgtttcatgcatggtgcttctactcggattctatatctttcatcatcaaacttactattagatttttggagtttgatgtttcgttttgttttaacacttctattcgtggattctaaagctttcactttgtacctcaactctaattggtttttcaacagttgtttcattttgcaaaaatatgtttctatttcgtttttcagaatcatgtttctctttatggagaaaaacattatctaaagcttttcaatttggtacttataattggttttctaaattttggtgttcccatttattgaaataaagaagcccaattttgtttgtaataatttaatttgttattttgattcgtattacccaaaaaagattctcatggcttctcgcttgacatttcttaatggattcttaactttaacttggtattctctaattgtttttttaaatagtgttttgttttattgaaaacatcttctgtttcatatttaacctttatcttgcttcacaaatctattgttctaaagcttttatcttacttgttttctaattggattctataatgatttttttcttggttacatggtggttggtgtttcattctcttgttttcctacttaacgcttctagttgtattctaaagctttacttggtaaatttctaattataatgatttttttcttggttacatggtggttggtgttccattttcttgttttcctacttgatgcttctagttgtattctaaagctttacttaagtattctcctttttaatcctttggcgcttctattcgtggattcaaaagctttcacttggtacttctaattctcattggttactcgctagtagtttaatttttttttccggaaaaatgcttctagtttgttcttcaaaatcgtttttcctttttcattgccatcacattgtagatcttcaattgcgtacttgttttggttttgtgaaatatggttattgctttctattaaaaatactctgttttttaatgctttggctcccaatttgtagatttagaagttattttgctttgtaaaaaaagtttgtagttagtttttgtaagtcttgtttccttaaaaggagaaaatatatgtaaaagcttttcaattttgtacttttcctgaatttggtgtttgattttctttgaagaacataattgtttctaaatctttaacatggtacatactctttgttttctaaaagatggcctatcattttataagaaaagcattgccttggtttcatgcttttatttggatactaatgcttctgagcttgaacttaataattccttgttatttgaaatttggtgtttacttttatcaaaaaacattttggtaattttttttcacggtacttactgttggagttatggagtttggtgtttcgttttctttcgtcaatgccatcttgattcttagtttggttttctataaaaaagtattctcgttttcaatgctttggcgcttcaatttgtggattgtaaagctttctcatggtactactcattctaataggattttcagaagttcttctgttttgcaaaaaaagaatgtttatagttcttttttcaaaatcgtgttcccttgtatggagaaaaaagattctctaaagcttttcaattaggtacttataatttgttttcccaagtttgtgtttgcttttgcaacaaaaaaatattttggtttccctgtttgacatttgtatttggattcttaatcttgaacttggtcttactatcggttttccaaaagacggtctatcattttatgcaaaaaaaaaaacattaccttggtttcttgcttctgtttgggatctaaagcttttagattgaacacataatttgctttttcttgaatttggtgtaccttctattgaaaaaaaaaacgttctcctggtttcgtgcttggtacttttggaattctaaatcttttgacacgatactcaattgttgaatttatgcggtttgatgtttgattctatgatctttttgttttcattcttgtcattgccattatgatttttcaaaattttcaatttggtacttatttttgttttgtccaatgtggtgtttgtctctattgcagaagtactgtcgtttttattgttttgagacttcaagtcatggattctgaagctttcactttgttcttccaagtctaattggttttccaaaagttgtttcgttttgcagaagtttccaaaagttatataaaattgtttcttttatggagaaaaatgttctctagatcttttcaatttggtaccaattattgcttttgctgaacatgttgtttgctttcacaaaaatacattgttttgggttccttggcatttgtatttggattcttaggctacttattgttggttttcttaaaggtggtctatcaatttattgaaaggaaacattgctttggtttcttgctcttgttttgattctatagcttttagcttatacttattatctatgtttagaaatttgatgttccctttatcgataaaaacaatctcttggtttcgtgcttggtgcttctactaggattctaaatcttttaacatcatacttattattgcgtttatggagtctggggttttgtttaatgaacttcttttgtttccttccttgtcagtaccatcatgattgttctagatccttatgttcttttttggtttttaaatgtcgtgcttggttctataaaaaacttagtgctttgccgcttctattcttggattctaaagctttcatgtgtacttctaattctaattggtttttctgaaagttgttttattttgcaaataaaatgattgtagttaatttctcaaaatcgtgttttccttttatggagaaaacgttctaaatggttttcctaaatttgatgtttgcttttgtaaaaaaagaaagcattgtttttgtcgccgacttgcatttgtatttataatctaaatctttaacttggtacttactattggttttcttaaaggtggtttatcctttttttaacattgccttgggttcatgcatctatttggattctaaaagcttttagcttgaacttataatttgttttttttttttggaatttggaagtcccttttatgaaaaaaacattctcttggttatcttctaggattctaaatcttctatcactgtacttacttttggatttttgcagttttgtgtttccgttgtatgaattttgttggcttatcctttgttttttgaaatgtgggtgtttgtattaaaaactattatctttttaataatttgacgcttttattcgtgtattctgaagctttcacttggtacttctaattctagttggttttctaaaagttgtattattttgcaaaaagaagtttcttgtttgttttttcacatccttttggtttatttttttgtaaataccatgcttatccttctacatcttcaatttggttctaattttggttttgtgaaatgtggtttttgcttatatcaaagatgtattctcatttttagttctttgacgcttctattcgtggattctaaaagctatgacttgctacttctgattttaatttgttttctagaagttttgttttccaaaaagaatgtttctagttgtttttcaaatcgtgttccttattatggagaaaaacttctctgaagcttttaaatgtagtatttataattggttttcctaaatttggtgtttgtttttataaatacattattttggtttccccgtaggacatttgtatttagtttttagttcttttacttggtacttactattgattttctacaagatggtctatgcttttatctaaaaaaaaatattgccttggtttcatgcttccatttatattctgaagtctttagcttgaacttgaattttggaatttgatgttgtttccttttatcaatggaacattctctttgtttcatgcatggtgcttctactcggattctaaatcttttatcattgtacttactattagatttttggagtttgatgtttcgttttgtgtccttcgttagtattctcgtttttaatgttttaacgcttctattcgtggagtctaaagctttcactttgtacctctaattctaatgggttttccaagagtttttatttggtttttcagaatcatgtttttgtttatggagaaaaacattgtctaaagcttttcaatttggtacttataattggttttctgaaatttggtattcccatttattgaaataaagaaacccaattttgtttttaacaatttaatttgttattttgattcgtagtacccaaaataagattctcatggcttcttgcccgacatttctcattggattcttgactttaacttgctatcctctaatatatattttttgaaatatagtgttttgttttgttgaaaacatcttaatttcatatttaacacttatatttggtaggtccagactgttctagtgttttatcgtgtttcacaaatctatttttctaaagcttttatcttgtttgttgtattacaacaaaatatgtatcattttcatcaattttattttgatttggaaacaaagtttggtatctataattgcttttctgaattttggtgctcgataaatggaaaagtcaatttcatgcatataacaatttaatttgtattttgattccttcccaaaactagtgttttcttttgaggaaaacattgtcttggtttcttgcttgagagtttcattctggtttctgaactctaaattggtatttctgtataaaatagtgcttccttttatccaaaaatttgtacttgacacctatattttacttttttcaaatgtcagtgttcccttttttagttcttcgtgaaccttgttacgataatgcaagctatttgttcatgtaatgcttgtcatgcagctgctattttgctgcatgctttatgctttgaagattgctgggaaataaaaacatctattgaaggaaatcacagactagttcttaggcttagtactacctcacttggacacacatttttatttagcaagtgcagtttggtttgctctctgaatggaagtagtttggacaatacaacacaatcaaggtattcttatgcaatcttggacaacatttcaaccatgagcaatgtcaagatttgcacctgccttgggatccaactagagttgagctttgcatactctcttgctatcggcttgccaaacctttcatcttctacctttaaatcccaactactgcacttgaaggttatgcttcaatttcaattcaatccccactagcgcatttacattggtgaagtgtgtttgctaactgagcttcaccgcgggaatggcttgcggtgctccacatcgagtaaacaacaaagtagcgaatgaaaattgccacatgtatatctgtttactaacacatcatttatcacctgtgttttcctcatcatatgctcaaaggtcgagagattcctcgggaactaggggccaaaattttcaatgagttttgtctctaccggagctttagtcgatggaaggccttgatgttggagtggtcgaaatctggatgggcggattgaactcatgccaaacgtctaagtgattgattaaatttcacattagagttcacaatatcgggtcaacagaaaaatccatatttctagatagtagataataaggctacatggactaggcaatgcaagctctagcgcgtgtatctatgaaaggttcaccggttcgcgggtactctagagcgaggtgctttcccctcttgccaggaaggttgccattgtctgaatgatcggactttctagcacgctgaaatattagtgatgctccaatgccaaaatgggcaactgaacgtaccataccagatgacccattacaatgcggcgtgagatgttgaagctgcaattttctttgttcaacatctcacgccgtaaagcagtgaaacgatgtagcctgtgaaatgatgtgttttttgtagatgcccatgctattgctcgcgttgcccacgtgaaataatgcatgtagccttgttatatgctatttatgaaatatagattttgcctttctatcagcctggtattctgaactataatctgaaatttaatctatcgaatagcaacatagcatgagtgtgtcatgactcatgaggctagtgtttgactgaatttgtgctacatttatatggtggattcacttcgcgatttgtcctgttcatatagtgtagtcagttggtgactctaatggtgacttattatttactacataacgttgaccttatgcaatgtggatgcagctaacataaaggaaaagtaggtacggtggcatgaggttagtgtgacataatgtgctctacataaagttgactttatgcaatgtagatgcagctaacataaggaatgagtagatatggcggactctcttcggcatgagtagataggctgacagtgagatttttgtacacaatgttctgtgcatgaaacttactgattttgattgccaggttagtagttcttttgctgcatggggattgataagattatgaccattgtaattaagttttgtaaatgaataaatttaatatatattagaagtatcccccaaatcctattttttaaagtatccctatacatgtaacactgttggactctaagaatacttgcattttattttcaagtaaaacctgattatcaaggttataatatattttcaattaaaaacttgaggttaaatttggaactcaaatgtatgttcccacaaattaggggaaaatctccacatttgtctcctgaactatttgccttggtctgattgtggtccatcaactacaggtctctcaactctcaaaacggtcaacatttcatcc

SEQ ID NO: 1782 - DNA, 5191 bp, Oryza sativa
  Intron number 3 from transcript LOC_Os04g17700.1 (locus LO C_Os04g17700) derived from phytozome v7.0 (chr-ID Chr4; po s 9686392 to 9691582)
gcgggaaggaaaaaggaggcagttcaactatatcggtatctttacttactgggttaattggatccatgccactgcaaatatgtcaattcaaaaaaatgtcactactattcagtatatcggctacgtggcactgaaaattgtggaaattggatccatgccactccatcacgttttccgtcaaaaatctttattagcccccagctgcacgtgggcccccacctcccttccctctcttctctttcctcttcctctctctccaccaccgtagatgcggcaggaggtgtcgtctccgtcgtctccatcgttgtctcagagaggtcgggccaggctgcgcctgcgttgtcgttgttgtcgagcacctcgtctcggagctggtgagccacgcggtctctgtcaccgttcaagggaggaggaggtggtggtggaggaggcatcaccgacgactgagtacccatcctcgccaccgttgccgaggacctccatgatgcgcggctaaggcagcggcagctagaggggtgcgctatcagcaaggaccctctcctcaattaatccatcgctagtacgctgctctgatggctcgcttcgccgtcgtcgccatcatcgtcaccctcctcgccgtcacggccgctgtgcaggccccgggagcggcccccatcccggcacccaagatggccccgctgcctgctcccccgacgaggtccccggccaccgcttcctccatcccggcaaaggacaagagtccatggtgcaacagtcacaacaatggcagagcaagcaacagtagtcgcggcacgagcaatttcggtggcggtggcaaaagctcatcgtgatagtggcgaggtctcagtccatcgtcatttttggcttgatgggacaagcaacactgcatcagtcggcatggtggacaagcagccgtcacaataacgatcggggacctcgtcggcatggtgggctaaactaagccctttggtttgagaaaaaccgatccttgtttcaccgaggaaaagagagaaattctgtataaattgacaatgctgacttgaattgactaattcagttccaactattccacattaatgggagtacatttatgtttctgcttcacgaatatgatattttttgggcatttctaataatagcaagccttattcctattttagcattttggatttcagcacttttaagctccggtttgtgaaggaccagagaagctttctagttatgaatcgggtatagaacccatggggggggggggcttggttacaattccgaatacgctattacatgtttgcgctagtttttgttgtttttgatgtggaaacggtctttctctacccttgggcaatgagtttcgacgtattgggtatatccgtttttatcgaagctttcattttcgtgcttatcctagttgttggtttagtttatgcatggcgaaaaggagccttggaatggtcttaactgaatattcagacaaaaaaaaaaaaggattgcttctcttccagggaagtttcattttcccagaatgtatcctaatttttggcctaattctgatgatcgatttaacctctgatcaaaaagatagaccttggttctatttcatctcttcaacaagtttagtaataagcataacggccctattgttccaatggagagaagaacctataattagcttttcgggaaatttccaaacgaacaatttcaacgaaatctttcaatttcttattttattatgttcaactttatgtattcctctatcagtagagtacattgaatgtacagaaatggcagcagtctcctccgactccgcccactgatgccccagacaccaatgctccctccgcccttgcctcgtctgcggtcacccccaccgcctctgcagtctgcaccgaccggcgctcccaccggcgcccccgcgagctcctctgcattcaccaccaccggtgctcccatctcggggatgaaggaagagatggggaagaaagaagaggaataatggaggaagatagaactgacatgtgggtcccacgtccaggagggtgacggaaaacgtgatggagtggcacggttcaaaattttcaaatttctagtggcgataagggatcgcccaggatcgggtggaaggtcggagaagccagtcttcaggtccatatttttggaaaaactgtgatgtctggagttggtaatgatataggtcctagaaatttggctggctacgttacttataaccgcagaacgagcaatgaatccccaacgacaaacgaacgtgcaacaattcctgcacccgcaactccatcctgcaagttcagtgctccatcagtgttcagtttcatccatcccaaagcaggtcgagcccacttctgaaccacagccgatggcctgaacgacaccttctgcagactctactggtggtattccccgaggcgacctatatccccaccaatgtgatctccattacagatggacaaatctgtttggaaacagagctcttttatcgcggaattagacctgctattaacgttggcttatccgtcagtcgcgtcgggtctgccgctcagttgaaagctatgaaacaagtctgcggtagttcaaaactgggtacctcaagtttatagttctaagctgaagaaatagcctgagtcaacttatcttctttacaacctccaaacaaacagaaagactaacgccgaaagatatgttttgaagagagctccatcgggttgaagccgaattgcagagaatcaagatcttctacctttgtggagggacttgaattattacttctatttacttgatttgctggggaagaaaatcattaaaaaaccactaaggccgggcaagtgcaagtcccgataacgggaagaaatgcctaccaagtgaaagaaagagatcgcaatggtctaagatatagtcagtgaacaataactcagggtagccgatatgctgaatagtagtggtattttttctaattgtcatatttgcagtggcatagatccaattaacccttacttctttcgttgatgctacagttattcccatccattcttttagttgccaactagacattgttatcttttttaaatgaattatttatgagattttgtcatcttgtaatacatatgtaatgtcttctggtagtgtaagttggaaaaattagtggcatatatgagaatggacattcgttagtggcaaaaccaaactttcccctaatatgtccgaagtctaaaagggatcaaatttatttgatggtttgtttcagatctcaagtgcttttgtacactgcttgatctatatttgctgtgtactgcattaatgtcctatgatattagggagtgatttctttagtgcttttgcaacagtactgacttggacaccgggtgttgcaacagaaaacaaattgaatttatagcttatttaatcaattaataagcatttatttagttctagtaatttttcttattgaacgagtaggtgatttttaaaatttgggggagccaatagtgaaatggaggacatgttgaaaagtggtgtaaatagtataaattgtgggcccccagatgtcagtagtaggggtggtgtggggatggacactgcgactactaacatcattattttagaaagattgttaaaaatataactaaaaatatatgtgctcagactgttgccaaataaccagccttttacacatgctcaggttttggcataaggacatgcacacattctttggtcaaattatacttatcctgagtttctgaatacacaagaacttattcttgaataggacttccttttttttttaaatatccttgctgatattatcatcctagcattggaagttgtcatgaccaggctgcacatatgagctttttctctgactgctctcaagttcagctcctgctattcacagcaatcaaccaacaaattaaatagcaagtcttacaaaaaactcccaccaaaacaaccaagctggtctcttataaactgaaggaaaatcaagaaaataagcaccactcttgattccaggaagccaaaaaccagaaatttcctcaagaataagcaccactcttgattccaggaaggtgacttgccgatgtcctccaaaacaaccaagctagtcttttatagggcttgtttggtacagtccaactcctacatttagctccatgagttgggtctggagtggagttgtggagctacctaaacccagctccacaactgtagtttattttgtgagagagccccacccagctccactcccatttttagtggagttgaaactatttggctgagctccagctctaggaggggtggagctggagctggagttgtgccaaacaggcccgtagtctgcatggtctttttggcagctgctaaaaggtgttctgtgttatgttagttccaaaccatggtgtttaaattaaaagtccactaaacctggttcttgttattgcattagcccctaaaaatggtgcttctgctttctgaaatttcaacatgtcaaattgtacctaagcaaagggatttcattgaacttgatattgatttgcctacaaataatatgatttttacgatataaggttgtcgtcgaaaagaaacaacgggataggttctagcatcatcatatcattcagactgccacactatatttgggttagtgatgatataatatcctattgatcggcttttgcatttttctagcgtcactgattgcctagaaggccacgtcttccctgctctagtgcttaggctgaaacctttattctatggcagcacttgtgtcatttggactactagcgatccatctaagcttgagcaattgaaggaaattgctgttggtgcattgtttgtaatgtctaagtcaagagtttactattgatctcaatatgtgccatccaagcttgatgttgcagatttcatcaccaaagcttgggcttgagaacatctcttcaattactctaactcaatgccttaggtcttcctatctccaaactcacatgcatgtaggcccatagtaataagctccagacttcttcaaaaagggaaactctgtaaagaaccaaccttttctgaatgttatgtttttgcattcatgtattcacctagatcaagtaacccttggattcatatatttgatatttattttatgttattatttctttcaggaagacttctgcgtggtgcacaacccgaattg

SEQ ID NO: 1783 - DNA, 540 bp, Oryza sativa
  Intron number 1 from transcript LOC_Os09g28700.1 (locus LO C_Os09g28700) derived from phytozome v7.0 (chr-ID Chr9; po s 17450026 to 17450565 reverse strand)
cattcagatccattacaagactgctccattcacaggtgaggaaaattctcttcggaaagagcagagaaacggttttttcggctcgtcatttcagcagctccaaatcttcagaatgatgactcgaaatcgctgtcaaagatcattgtcatcctatttaagaacgggcacagctcggcagctcggaatttagtacaagatggactgttagtagatgggagctagttttacaccgaaagcaacgcaacctacagccgggaaatagtaggagtaaagctcacaccttgtagcattgcccccacatgatgatcaccacagatcgaaccaataaaatgaaccagtgcatcagattggtttattgattcggccatgctcggaatcagtacgttcacaagatcacataacgcggtagcactgtacatatgataggagctccttttccatttcagcagatcgcatcactacgtgtctgcacgatgttgctgctgtattactcatgtcatgtcaggttggtttcagttcggaattattgggtttggtggc

SEQ ID NO: 1784 - DNA, 705 bp, Oryza sativa
  Intron number 1 from transcript LOC_Os02g47000.3 (locus LO C_Os02g47000) derived from phytozome v7.0 (chr-ID Chr2; po s 28689745 to 28690449 reverse strand)
ccgccggcgcacaccgccgcgccaagagcgccgtcgtgagctctctctctccccgtctgcgccacttgggtcttcctattatattaggcccatttgtgtgtgtgtgttttttttgggtagttttaattccccaaggagggatctagatgtcgatggctatagctgaagactaggttattggtagctcagcgaggtcccttcgattggggctgattcgatttgatctcttattcgcttatcatgggtagattgtgctttctccagcgcagggtagttgctttcttttactcttatgatgtctcgaattaggattgtttcagcgaggatggttgcttttagatgatctttgtttggttggattcaagtgaaatagtatagtatgtactaataactgttgggtgctttctttggattagtcaaccaagaacagacagcttggttgctgccagaaaattggagaaagttgggagcttttgttgtttatgagaaattctctcgatttgacaattctttgaattagatgcagttcctgacaaatttgcacagagctaacaatattacgtggcccacccctgcaatcaaccagcaattgtgggaaccgaaatagttaccgactttagttatcaaaggaaaagataaatagttactgatttgggggtttccattttggtgatacaggaggttgtggagacgttggcacccaac

SEQ ID NO: 1785 - DNA, 489 bp, Oryza sativa
  Intron number 5 from transcript LOC_Os07g40790.1 (locus LO C_Os07g40790) derived from phytozome v7.0 (chr-ID Chr7; po s 24447594 to 24448082)
gtgccaaggtcaatacctagctcgaaacttgcattttgttatttctttgtattcaatgcagaggaatctgtctttgattttgtttttggacaaaaaaaagactaactttgattagttaattgattaagtatgacatcaattagtcatgtcaacatatgggcactaaatctagtcatgccaagacatggaaactaagttattctcaggtcattaaactctatggcacttcttaacaaaagctcgaatcattcagcacgaaaaatcagtgttggtgagacgttttttcagcatctgcttgctcatgctaactagcaatacagaaatttgcttacttgcttttggtacttattttgtagttattgcttttgctggcgatggcaccttgtgctcaacaaaatctgaacaccttattcagggatttgattctgacatgtttttaatttattttccatagaattcatcgcagctgcaagaacttctggagtacag

SEQ ID NO: 1786 - DNA, 1449 bp, Oryza sativa
  Intron number 1 from transcript LOC_Os01g21180.1 (locus LO C_Os01g21180) derived from phytozome v7.0 (chr-ID Chr1; po s 11813187 to 11814635 reverse strand)
ttcaaaaagtgagtcggcccccacccttccgccatctcccctctgctttcccacccagcaatttgatctgtttccatggtctgccatccaccgatctgattcgtggaatttattcatctattttctgaatcgatgatgcaagagattgtcttctagatcgggaagtgggggatctgcctactgccctgttagtcttttttttttctttttttgcttaaatgccgctgttgaactatccggtccggaagggggctttgagcttagaagagggatgaagcttttggatggacgatgctttcccatgtgtccttggtattcgtatggccatgatgcgttctcggggatagagctagttttatgcgtccgcaaggatgatgtgatgtttgtgtttctagtggtacatagcacatgttactcaaaagtttagatcacttgatgaacataattgcatctctagcgattaatgtagccatcttggtgtggtagagtatatacattggatgttagatttagggggcatcattgctccctcagagcatcaagtagtggaactacaaatttagaacaaagatatagattcggggaactacaaattaattatcatctactcaagttcctcttgactgtaacacttcacttggttgtgccatgtgcttcactggcatgctctggtccatcattcctttgtttccacacttgtgccttctaaagttttcatgcctgtattgctggttttctcatgcaatttacagcgccttctcgcggtgtttgtctgctggagaatctaattcaaaagggtgttatagtaatctctcttagtcaaaccctgtaacaacaattatcaaattatctctttttatatggcatagcttgattatgttattttagattgcctgcagtttctagctattaggtggagtggtctcaatgcaaaagcttgttttagtggcttacttttcatgcactacattgcataaaacagttgtgatatttgttttcacttcaccaatgttaacttttatatgcacatttctgattatttgtacatttgatgaatcagttccaacttgcattatacactagccaaaatagatgtgcagatgtctgacttgaacctataacaaggaccagattaattcttgtcacctcttattttcagaatgtttaattgctcttgaattacatagttctatgaaaaatactaagcaactgaaatgaaaacttgaagcttcagctcccagatgattgaattgtacagaattgtttactgattgttgcaacttgcaagcacatgattttgatggtttcatctgggacgctctaattagctatgatttctgtattatcggttgtatttgattctgcacttggatatgttattcacacaaacaaacttgttctattttatcttcaggttctcttttgaagatatatctgcgcagaatcaag

SEQ ID NO: 1787 - DNA, 2015 bp, Oryza sativa
  Intron number 3 from transcript LOC_Os01g70600.1 (locus LO C_Os01g70600) derived from phytozome v7.0 (chr-ID Chr1; po s 40876978 to 40878992)
ctcacaaggtacagcactaaacaaagcaagggctgccaaaaaactgggagtcttgtgcagtttaccaagctaataatgagcataaattatttggtagatatggtagcaccctgagatgtgccattgaactttggaagactttgaattattttgttccaaggcacaaaacccatgcttacataatacagtactaatataatttatatgggacagatcgaatctttctgggaaatgaaattcagcaagcgaagatgggatttaatattagctaatcagcaaagaaaaccaaacctttgctgaccgaaccttacgctttttctccaaacttctctcgcgcaaactaaaagaaattaaaagaaaatgacaccttaacgtttggattagtacagtacgtaatgccattgtttgcatattataaaattgtttaatagtgatagtttttaaggcttgtttggaatgttggagtttcaaatgagttctgtgatgccttaaacataacaagtgtctgactgaaattgtttttataccctgcgactttaacatgctattaatcagatcaatgtaaattgatggatagctgttggtgaaaaattaaaggaataaaggatcatttttcatgtacagattccatggttgctcttcagacagttggtcaaataacaattttgtgtaactgcttgtaggaacattctggtcttattttaactagggctgtgtttagttcagtacaaagtttggattttggttgaaattgaagatgatgtgactgaaaagttgtgtgtgtatgacaggttgatgtgatggaaaatgattgaagtttggatctaaactttggatctaaacacagcctagtactactagtaaagagggcagcattttgaaagaagaaaaaaataaaggcatatccatggagtgatcacttttcaaaaagaagaaattcacctgtccaatgtcttgcatgatgcacagttattctcctgtagtagtactaaattgcaaagctacaatattctccctttctcatagaagtgtaaagctactaacacatatagagcgatcacatgaagaaatcgaagtttgagagggctaaagcaatgtgtatcttgtgcagagcatgaacaattgttttctggatacttcctctgaaagactgaaacctgaaatagaacaagtgaccaacctctgaaagacagatctagaacaagtgaccaaccacaagtcaagaaaagttagcaaccacactgttttctggatactccctctgaaagactgaaacctgaaatacagatcctctcattcagggcccgtctagtttccaaaaagtttttcgcaaaaacatcatattgaatctttggacacatacatggagtattaaatacaaataaaaagaaaaactaattgcacagttatgggggaaatagcgagacgaatcttttgagcctaattagtccgtgattagccataagtgctacagtaacccacgtgtgctaatgacagcttaattaggttcaaaagattcgtctcgcggtttcccggcgagttctgaaattagttttttcattcgagtctgaaaaccccttccgacatccgatcaaacgtccgatgtgacaccaaaaaattttcttttccccaactaaacacaccctcagacacactactacaaaagccataaaagacactgtttttctgatataaattataatttttcacgtttgagcagttcgcctgaatcgatacacgcaaagaaaagagcacaccacgcttgaaaaggattcaggtagtatattatactacacatatacacacatggaaatccacgtgatatatgtacaaatgtagagaatgtattatagtactacacatgtagcatccacttcaaaagccaacaaaagaggggctagtacactaccagtacagtatctgatccctggctagctaaacaaatcttgctcataaaacccttgtgaacattgcatgcagaataatcaatctaattctaagaaaaacagatatct

SEQ ID NO: 1788 - DNA, 1743 bp, Oryza sativa
  Intron number 1 from transcript LOC_Os03g17490.1 (locus LO C_Os03g17490) derived from phytozome v7.0 (chr-ID Chr3; po s 9721180 to 9722922)
tccgaggaggagaagcgcagcagccgcgccgagaggtgattgctctgtccagtcccttcttttctagggtttagatttttttttttggcctaacagatcctggagatttcgtggtcatggtgagggtgaatatgggataattaatcgtcttttgaaatgatggattcagaaaaagaccttggtaatattgagccatgaacagatgtgtttagtattgttagaaaacaatatataggatgcatgcaggatttaactgtgcaccaatgttgcagtttttagttactctatcatttatacatggattttgaggagattttcccgtggtagaaaatagtactttgttgtttgctaccagacggctaggagcctttaaaaaggcgaatacgatgtattcctttcagtctcttttaacaaggtttccctgcttaagagaagggtgctcgtgtttctcccttggcaatatcctgtgaggtttatgcaattgcttgctaatttagtctctatgcgctgcatcacctaggtcctagcgcaaaccatagttcatttgtctaggatattattggtttaggcgtttagcactaaatgtcctgtttcatactgcttctgtaatacagtagtggtcctagttttgggtattcagtttgagttttggctatcaacctttatttcattggactaactaccaaatcccatgaaccattggcaacatagttattttatctatattcagtcactaagaatacaggtgggagatgcttaacaaagcttttacccaatggtgtgttcaatgcatgtctgaaatctagctgccacagtttgaaaattaaatatctgtttttgggttaatagtattcttgtgaaaatatgttccagttcaaattgtttagatgaagtgcagttagttacaacaaggaaaacaataaacttgcatcatggtttaacttacaagaaaagtgcattctcttataggaaggttcttaggctacccttattgactagctttcaatcactatgaaatccaacactggccaccatgatatcttctctgagatggagcagattagaggagaaaaattctctggcatggactaaagtttgatggttgacacttgcttgaggaacatagattgaagcatacagagggcacaggcaagccacatccaaattaagccgttgtacggatgaatgctgaatgctcttaaggcattcatgcttttaattaattactgtgatttatactattttacaccatgtttaagaagtttcttggttccttttacagacttatattgaatccaataaaaggccgttaactacaccctattcttttatgatagtatttcttgctcttaatgaagagggtgttttgaatacaaaagctatggtttttttcctttagaattaaaccatctgtttgctttatcatgattcatcaaaagcttttgagagaattcagctactttagatgttattcggatggaaataatggtacctttggttgatatcagagctcatttactagactgtcattcaatcatgtgtattagtactggtttaaaaaagtaaatcctgctttcaatctagttggtgctggatttaaatttgactggaactaaatgaagtgtctcctttgttaaactaattttctgcctctcctagctttgcatcagatatgttgcccaaacaacttatttcagttactaactctcatcttgtttacaaggtttgggactggatcttcaa

SEQ ID NO: 1789 - DNA, 4991 bp, Oryza sativa
  Intron number 1 from transcript LOC_Os11g04104.3 (locus LO C_Os11g04104) derived from phytozome v7.0 (chr-ID Chr11; p os 1661892 to 1666882 reverse strand)
cttcctcttcgtctggatcgtcacactctgcacaggtaattaaccacccttcatttactctctcatccacccaccacatgcatcatcaatcgcgctctcatctcatcgatctgcacctgattctgttcctcttctcagttgatctccatatttatcgagtcttatcataatgagtctgtttaattagtttctcctatatatacatatattctccattgatcatgcagccacattggagtgccaatatatacatacagtcccttcaattaatcaaaatcattaaattgataattactaattttatgatttgttttaagatttgtgcacctcaaccaaccgttgaattttagcaatggcttatttgaggtgtttctgaatagctgtaggttcttctgataattagaagctctccaagcggtttaacttttcgttcatattctaataagttatagttgttgaattcacaaaataaaatagaagtagaaagccagaaaaccaattttttagctctaagaaataactacccaggctgtgtgtttagttaccttcacatcaaatgtttaaacacatgcatggagcattaaatatggaagaaaaaaaccaattgtacagtttgcatgtaaattgtgagacgaatattttgagcctaattacgccatgatttaacaatgtggtgctatagtaaatatttactaataacatattaattaggcttaatagattcgtctcgcagtttacagacggaatctgtaatttgtttttgttattagtgtatacttaaaaaaattttggacgggaaactaaacacggcccaaattagctgattattactactctgtcccaaaatataaattttggttgtccagatttataactaaaaaatacatatattttgggacggagggtacaattttaagcttttttttgcagtccatagattagatttttagaggttgaaacttgaaactgccaatggccgggtgcgtgtgcatgtgtagcagacggtcgcacactcgcacatgacctgacctgctgagattaaattcgtgagcttaatggttcattcattgcttttgtactacctatattctcgtttcttgattagcacaagccaaccattgctccatgcatgattagcgcttactcagacttcacttcatccacgttaccttctgtaaatttgttttttactttattaacctggccgtatggtttttcataatgtctcccatattttgaaagaaaaacaagatagcggctcatacgatatttcaatttgtattatactcgtataagtagctaacggtaatagagacagtagcggtggagttcacgcggccgcccaacccgttcgggaagtgcctccgccgttggctgcatgtgtgcaacaataaaatgagttgtttaataaacttgctatatattaagggaattgtatactagtttatataaccgtctcatgctcgaattgagaacaaaaacatatccagtggagttaaaatttttaagtagaccattaagttttaagtgaagtctaccgtaagatgatatctctgctacttaaaaagcgaacccgttcgtttgtactctttccgtacgtccttacatgtgtataagcaccatctctttaagaaaaacccactaacatgtgatttctcactgcctacaccctgaagccctgttcgcccataatttcaatcatgttctatgataaaggtgcactttccgatcagttaaacaccatgacttttacaaaagtctcctatatagaaattccgtgatatactttctataatttgttttatcactttttaacatctaattattggtttgtgcccttaaataattattttcacttttcgtggtatactgtgagtttatagcattgcatgctaattccaaatatgcatggagctatatgtgacgtggagctccaaccacccaagtcggatagagtttttgtcactctgtccaactgttggtagctcatgtgaactttggcgtgtatcacgtacaatatacgaacccatatgtacatgcatgcatgtgttaagttcgctttcatcaaatatttaatattactcgatctctgaatattctgagtcttgaaatccacagaaaatatttgaagatgaatgtgacagtactgtttgtacatgtctgggagacgtaaggatctgaatgtgttcgtgaaaaagttgaaggaaaataaaagaattcaagtctaaaatatatgttcaaaattcgaacatacaatagaacatatacagatttgagtatagtgtgcatatataggcataagtagtacaaactgaaacacaaaaatgtcaagtccagaaaaaaaattaaatttgaatatttagaaagtttcagaacgagtataaagttcggaatactagatatcttaaacgtgctagtatatatgaaaatgcacaaattccacatagaagccaggaagtcccacacaaatttgagcagtgcaaaaattggaagtttctatgacggccacataaaaaaatgccaggtaggcagaaaggtagtgaccgtaggccgccgtctattgtgtgtgtgaggttgcaaatcttttgttttctttgtgctgatgtgctagtaatcctaaatttcgcctactaataaatgacttccactaccacccacctccatggagctaaacatatgatggtatattctacccattcttgtttgtggcaatgcgcggggtggaatgttaaagcgacgaccacggctcgctcactccgttttggcttcctcttcctcgtcttcttgtcgttgttggctttccttgttgggaattccacgtacggaacggagcttggatttggagaggagaggagactgcctctgcctggctctccctcgccgccggcgcacgccattctgggcctctcctctttgccgattgataagaggagaagccgaggagcctccctgtttcaattcgttccggcgggtcgctgcaatccggcagcgaagttgaggtacaggtacgcgcgtgccgtgtagcagtcgattgattcatctcctctcctcgccggagatctctcgggcgcattgcccatttgccttgcctggcggcggtgggagggatggaagaggaggcgggggcggaggtgccgttgctcaagatcaagggggactaccaccaaggttgccctggctgtgcctatgaccgcaagaaggaggtctacaggggattgccttacaaggagttcctctatctctggatgatctgcctcaccgccggtatgcatggaacattccctccctttttcgcaaccttttgactagctctggagattcattctggggtaaagttcttcaactttttaacccatggtgctctaggaatttcccttttctagtgtagtacgaatgaatatctccaacaaagagaatcttggtaccacgtaggaacatgacaacatagggaatcttggtacctgcaggaacatgtcttctttcttgcaaatgctacatgttactgcaatgtccatgtgcagttccatatgggtttggtcggtgttcagtcatgtcgatgattcctgttcctgtggggaaatcgctgattctctataatagattaacaggaccaagttagttaagccaattgcctcaacaagatttccataatgggggggggggggggatgttgacatgctgttgctgtttttaccacgcacttctccatatttgctttcagtgctgcttacaaccgttaattacaatgtgatgtgatgctccgactcatactacacacgacgaccgtttacaccggtcataacgttgtccatggtgttacagttgcaaacttgcaatgccacgtcctggttcatgtgatgtgggttagctggggggtctattatgttaactagaaaatttattgtttgagggacatcactgtgcgaacaatattagatgcacaattaattcctgttatgtcatagtgccagtcatccaaaccttattgggcacataattaattcctgtaatctttcatcgcaccaatagtccaacccaacttcattgataggatatccaataatgggactgtaggtgatgctgattcagaccttgcagatctttaggttcttcattgtgtttgtgatcttttttacctacctcggttgctgaaatttttacaacactacatggcatctatgtcaacagtcagcagaagcatacactaaaatgtcctactccgtgttagattagatagcatacagtctgcaatgcaatattgatttgcgaaaatgcctttaactgattttccttaatgatgttttttaacatatttttttataccgctccaaatcgtgataaaggtcattgtgtaaactgtaaacttggaactgatgcatgacttgtttcccacgtgtcctatataagcatatgtaattgtgcatattttttaggggtgaagttccatgtgctgttctggtgttctgcataagctccatcatggtttttagatgaaaagctccatcatggttgcattgaacagtagtctttctcttttacaatagtggaacatgaaattaatttttctacttgaacatcgtttcctatctgctgttgaggatattgagtgctatcttgtttccttcagagtattgcttaaaaaaatgtgcgtggaacagtcaaaatctgagaagcatctagcacttcaaattttcttcatttcaagtacaactagccataataccttgttttattatccctgttctcaccagcatcatttagttgtttgtagagaagttctcaagtagtcccctgatatcaccatctaagtaataatataataaatattgttatcaccacttgcatctacaaaagttttaaatgtatttatcgtaaccacatatcccatctattctttttttacataaattttcagtgcatactcaagatttctaattctgtccctgcccttttcagctttaccaatatcatcattgttccccttcttgtac

SEQ ID NO: 1790 - DNA, 2621 bp, Oryza sativa
  Intron number 2 from transcript LOC_Os09g17910.1 (locus LO C_Os09g17910) derived from phytozome v7.0 (chr-ID Chr9; po s 10955849 to 10958469)
ggctcaaacgtttctattttacggtacatcaaatatatatattcttccatagtactctcatttcagtaaatgatcatttgacagtaggataagatttatggcattatctttttgtttatgcttatcaaccaaaatttgaattttaaatcttaaatttaaagctaattttaaggttttctcatcgaaatttatttttatcttttgcttttagatcggtaaaaatatgtatataaaagttttatttataaattactttttatttgaaaatatatcgtttggcttattccgctaataacccatccgaagcttttcactatcatttcaaagcttatctaataagttaatgatagtgcgataatacttttcaagaaaaaaaattgtatgcatacaattaaataacgctaattcccatcccccaaaaaaaagctagtactctcatacctcataaaaccacatcttaattgatcacctttaggatcatttatatagaataaattatttctaacgttttgatcacatcacctcaattttttagcattgcatctcattgatctatgatctctcttatgctaatgcaccatcttaacatttctattatcgtagaatttatgcaagatgtaattatgtaaagcacgtgaagttaaatcgtttaggtacattctcaaaaaaaaaatcgtttaggtacaaaatcagttattatcataccactttgtcgcagcaacgcaagatttcaactacttttttttaacactaaccatttgagaaagtattgatagccaaaagtttaacaaaattttatcctaatgccaaatagttttggcaggggagtaatagcaagtttgcactggacaccggccagctgaactccgtatttatcaattatatatatatatatatatatatatatatatatatatatatatatatatatatatattgaatttgttaattaagtcacaaaaatacaaacatataccaaacaattcaatagttttaaattttaattaaatatatgaaatcaataaaatcttaccaatgatcttcaaatcaatataacttagcacttatcaattcgaatttcaacattataattcactcgagtcaaagtacaactcaatttatatttattttgtattttgaattattaaatcaggataaaaatattattaagagttcaaaccattacaacttggattctaaatttgattagctagtccacatgtatttggtggaagatattggtcatagatttgatagatggacatttataattttatactttttatgaattttagtgcgatggaactgtcagcttcccagcttccattagtaagaacaaagatttaatctactattttttaataagaaattatttaaaaaatacctatgcatttttgttaccaaccccctgttactatccatttgggacgaactctatcatatgtttcgatgagtaccttaagaaatctgtatttaattcgtgttcctttagagttcttttttctgttttataaattttacaaagcataaagtctatttttagactttgaacaaaatccatttttcaccctgagatataaaacaagttatattctcactcagcttttaaaaccagaccgaacacaccctacgacattttctactggatttcctagttcatatttttattatgcttaatttgttgatgcaaatatatattacttaatttcaccctaagctataaaaccacttgtttctttcttcaacttttaaaactaggcagaacatatgctgggacatatgttgcattggctttcctagttcatattcttattttgtgttggtgcaaatatcagttaatttcaccctaagctataaaaactggttgttttctttcctcaacttttaaaaccagacaaaacacacacatttatgcataatttatagtggcttttctaatccacattcttatttatgcataatttgttgatgcgaataattaggtcaacaaccttgaaactcacctagctaattgaaaattttgaaactcacatgattgaatttcatactagtgaaaaaaaaccattgtcaccttctaaccggcccagcagtttaactggaattaaaccatcaccgggtcgatcaggaatggggtgtactggttgagaatcaatgcctggttagcacgttgaacgtagtacatgcttatagccatcagaatcatcacttcgcttctgaattaatgaaaggaaacatataatgtacatgttttgtatgagccactcttcaaccacccggcctactcttcacactgacggaccggtgaggtgacccgagaggtcaaccggccgggtcgctcacctggtccgactttttttacttgcattatgtgcctagttttgaaagtgaaaggtgaaaataaccggttctgcagtttatggtgaaaattgaattacgagcaaagttcaagggcaaatgttgactttaacgttttatacacctatagatagtttatagtttttaccgtaaatcatgtagcttcatgatattatggcttacatataattataaagtctcacaaatagttccgttcaacgtactcttgtattaattttaccttctacatatgaataggtatcccg

SEQ ID NO: 1791 - DNA, 1177 bp, Oryza sativa
  Intron number 7 from transcript LOC_Os07g14830.1 (locus LO C_Os07g14830) derived from phytozome v7.0 (chr-ID Chr7; po s 8479414 to 8480590)
cataaccggaccattttttcagcccattggtcaaggtgaggtgatctctaagcaccaagatatccttgatacacatgatttttatcatagagaactaacaagttaactctgttcctcagctaaactgtgagcatgatttatcaacaagtatatttcataaacccaaggttttcggggcactagtaacaccagttttcacaaaactacgagttctcatgctgttacaagccctgttgtatttggagtccaccaaactgtcaaagcaactcaattctcaccatagggttccagttttatatcctaaaattttcaatataaggaaattcatgaacatatggattttttttttactgcagaacatatggaattttataaacatttattttgttcatagcatgctggatttttacccatctagtttcatgccaaataataatatgccaaaaataacaacaataaccctcaacggtgtcagtggcaaagtgatcgaatgaataatagaaagcaggaagttagacttgctcaagtccacattatgcttggaggttagtagataaattcaagccaactaacaagacctatggtttgcttctactagtgtcacgaaaccacaaattcgtgaaactatggttgtgtttactaatgcctcaataccttgctttttaaaaaattttaagttcgctctattaattcagtacgtcaatatgaattttataattattagtttattgattctatttgagagcgctatatgttctttaaaaggatgcacttgttgtgtttatgattttatgctgataaactttatatacatcaagatacctattcaagcaaaacagggctgtttaaagtactaaccttgcagtccattctttctttctttttcctattcttgttatttatttatctgtgtctcttagtaccattgctgcattcttaaatgttggatgcccattttaaggaagaaattttactaccagaaattctgtgggcactgatggtggtttatctgatgtaatttcttctcttttaatcattattgtagttttccaatattacctcagcccatatgaatcaagatgttaaaatgaatagaatagtgtatttactattctttgacattttcctgttcattcttggcatgacagcgaggatattatagccagtggcgcaggtg

SEQ ID NO: 1792 - DNA, 3407 bp, Oryza sativa
  Intron number 6 from transcript LOC_Os03g41229.1 (locus LO C_Os03g41229) derived from phytozome v7.0 (chr-ID Chr3; po s 22931168 to 22934574)
gtgggactatttcaaaacaaccgggtattctttatgctttaaattaatgatgatcttcttaactgatgtttgactggggtcagcggctcatacatgctggatgagatgtcgttcctgtttacttgtgtgtgcatgtgtatgagactatcaatttagatgcaggatgagtgatgcaatttaaggagtactgcataaactctgcagtgctgtgtgatggtgctacatgccatgatgccaaccttctttcctcctcttttccctttaaggaaatggctgagcatatattcagatgatttttgaactttaaaactggaaatattggactgaaaaattcgtcttcagaccaccattcatatcaaaactaaggtcctacatgcttgtttattgttttatcttatgcatgatttcctgtatatatagtttaagtttctgtacatgattaaaggcactaggcgctcctttagtatgtaattcagctaagactagtgaggcagtggcagggcctatttaaaattagtatactagttgacagaatttctgctataagcacccttcaagccaatttatctttcagtggttatgctgaaacaccaaattacctgaatgggacctgagaagactaataattgcagcatattttttttagataactagaaaaaatgcccgtgcgttgcaacgggtgaagtctattttaatcttattattgttatatggtttagttaagataaaattcactgtgggagttcgcttggatatatatttttttagaaaatcatgagctgcagttaggagtccgatcgtctcaagttagcatgcgagtttttttaaacggatttcttatatgattccttctgtattatcaaaagtgaacaatattaaaaaccgactcaaatacggatatgtatttccaaaagcaaacgaacttaaaaactgacttatacatggatgacataccaaaataccggcaaaaatattttcaatttttataatagtacatatgtatataaatctggcctctatatccatacacatagccaaaagttataattaggatatttagaccctaaacctcataactgaaaataaaagaaaagctaaaagattaagcttcagatcttcttctatgtccttgcttcaaacttgctctatccttggtgcaacaccaacccattacatcacttttttgcttagaaactttgatgtcaaaatcgctctgccaaaaatatgcaatttgctgcttgctgaaccctgttgaacaaaaaccgcactgaggcagtcttgagaagtagcttgatctacactcccttagtacatcccacccatcaattgaaacacgctgcctcccgtggagttccccaccttaggccctgttcggttacgcttggattcaatccgggctgggaatgacaagtatagtaagaaatttatgatagatacaatgagaccatgatttattccgggccgggaaccaatttactcttgatatgaacaataagagaccgggaatcaatccactagtcaagaggtgtggaactaatcccggtctcttattgtccctatcatgagtaaattggttcctggcccggaataaatcccggtctctcattgtatctatcataaatttcttactatacttgttattcccggaccggattgaatccaagcgtaaccaaacaaggccttaggcggccaaacataaggagggaggggagaagtggatctagcccacccaaccgccacctgcctgtcgttgccagatccaccagtggacgtgacaaggggaagaatgaaactagcccttcctgttgccctgccgcagccagccaccagcgacagcgaggcgggggaggctgcgggatccagcaggcttgatgaacctgctgctgccagtcccacttgccgaaagaaaggctgcacaacatagtccttgaactaggaaggcactaggcccttctccttctggaacttcttctatgcggagtacatcttccattcccttctattgctaagagcatcagagtgcaagcagacataagcgtggagcagggaaatggaagcgtcagcgcaatgaattcgcacggccagctggcaacgagccaaatcaggccaagtgccctgccattacgtgccgccgccttccatgtacacagccaccatggccttgccagcatgctgccacgctgcggcattggaccctatgcgccacgtcgccgccaggcggccactggttgactggcctcctcacagagctctgccagaaagcatccagatctggatctggagaaagggggaaaggggacaggagaaaggagaagagctgggggaagagaggcaccaccgccgttgctggcagcggtggtatgagcaattcgggggagcactggggttggggagttgtggggttgctagactgctggggtcagggagtcgtggggtcccaggagcgcctggactgaatgagtcaattgatagtcatatattattattctgtggcatatttgatactgtccctgtgatgtagatccacataccttcataaagaatgcaggtaaggcctgtggcatcaaagggttgatgacaagcatcatggggagcatcttgaccagtcctttagagagttatttgtgttggccttactgctatttactattcttatttcttggaaagcacaggaaagatgatataattgttatctgcaaatgtacttcactggaactgggagaaggcataacagtgcctaaggcataatgtttaagaaacatgaacgaactggaaaaatactatccgtgaagactactagttagtgagtacacttaagtgaaaaagaacaaagaactgcctggaaaatagcttcttcccaacaatgagtaattgagtatgtactgtcatgaaggtgctcaatggttgaaatgcaacacttctgagataagcttatgcctcatatacaaaacaatttgatgacaggaacaactaggcctttacaaaacaattcgatgacaagaacaatgatattaatgacgtaacagttcctgtattaccaataatctactcgaaagagtagaattcaagtttcttaagtatacagtgtggtgaatgttataataaagaattactttgttgttctgacgatgttcagagtagagtatctgtagccgagtcttctcagaacaatctgttaggtgaagataagtgcttagtttgaataaattgagaaactacgtatttaactggtgctaaagttgacttagccatttgccgatgttatttatggtattatgcatgttttgtgctactttatcacggggaaactcttgtaatatttgacaatttgtagtttggtagaaatttagtggcatttaattatcttgtttatcgccatgttcttttacaggaagtattgtcgtcca

SEQ ID NO: 1793 - DNA, 15066 bp, Oryza sativa
  Intron number 1 from transcript LOC_Os09g06464.1 (locus LO C_Os09g06464) derived from phytozome v7.0 (chr-ID Chr9; po s 3047784 to 3062849 reverse strand)
gcgggtacagctttggcgcatcgctcggccacagcgtaagtcttaatgttttttcttacaatcttacacgaattttcatcaatgaattatctacactagtaacttacccgtgctaactatacgataacattaaaccaaagactatcatatgttaacacaatcaaaaatataattagataaatttaaaactcacgtaaagattgaacaatagagagttgttatattttaaagacaaccatgtgcgcaaaatagcatggtaacctttatatcttcactcaaaaccatctattttttgatgcactgagaaattcttataagtaaataaatactatttgctcatgatatgcaaaataactacaagcaactcttattgaaaatttttccatgataattcactgacatattggtcatggatccacatgtcaatgagagaatggaggtcaactttcggagtcaaataaagattttatcccacaatttttggataattaaattatcaaaattacattatcattcataaataaaatgagttgggtaaaaggaaacgagaataccgaacacccatccatccaggtgtgacttcaagagttcaagaccaagaccaacagaaaaatgcattctcaagctcaaaccaaaaagataaagagaaacatagcactactagaaaaataatttttcatagcgttaccctattatttttctggcggttatacgcgaaaaccgcccacaaaaacgtaacaaggggtggggggctacagaccgccagcgaaaatagatttttgtcggcggccgagttaaaatccaccgtccacctattagaatccgctgccgcgaaaaatccacctattccacgcgcttctccaactctctcccttctctctccgcctatctacccaccgttctccctcctttctctgcctctccatccagccgccagcgacgacgaagctcgtggcgcgcgcatcggtcgacgggcggagcactggcggcttggttgacgggcggagcaccggcgactcgcggggcggcggatccggcggaggcgactcgcggggcggcggatccggcggcgacgactcacggggcggtggatccggcggaggcgactcgcggggcggcagatccaacggcggcgactcgcgggggggcgtcgcccagcggcggcgactcgcggggcggcgcggtgcggcgagtccggcgacggtgacaaggagaaggggcgactcgtggggcggcgtcgcccgacgaatccaacggcggcgactagctttgcgaggcggcaggtctgattcgcaccggtggatggcagctcggcgacgaggtgcagtggctgggctctacggcagtgacccacctcctcgtcgaccttgggcctccctgtcgccggcgatggaggatgggcacgccggtgattttgattttttttttcaaaatctggattccaattttcttcttttttaatcaaaaaatattttcactggcgggtgttttatcttccgacagcgaaaaccgaaatttgtgctagcggttgtcttagccagccgccagtgaagacaattttcgctggcggttgtgttaagccggccgccagcaaaaatcgatcttctctaacggtttgtcgctgctagcgtagatgctacatcttaactagcctttactttgtggcggctccgatatccgccagcaaaaacctaaaatggccgccacgaaagattgttttcgtagtagggtagaatacaatctaatgatccatcgcctgctaggctataagttatctattcgcctcttcacttctctttcagcaagcatacttatatggtgaagaaatgagacggtggagttatagattcagcaggaaaaaaaggattcaagagacaaccatactcataatttccataataggaggctcttgttttagccacgacgtacatcatactctgcttcgtcttcactccactttcacgatcctcaccgggctatttgttcatccaccacagcagagcatacctttgatctttcagttttgaaaaataatgttattcatgcatataagtagtaagtggatgattatggatgcttacactggaaatttgaaggactgggtgcttgccgtggtatatctgactggatgtagatgttgccaatatgaccggaggtccacacttgattgcccatgatgatacctaagagagcacggcggactgatcaaatgatcattacctgacatgaaagaaattatctgcacttaagaggaggcacaattcacactgactgattaaagttgttaatcagaggagttgtgttccaaattagaatgattctggtactaacagacgttacaaaattttgcaactctctctgatatcatgttaggactctgtctcaggtcaaaaacaattatgctactcacagattttgtacaaaatttagccctgacttagagttaatactccaattgtgccaaattaaactctaaatcaaattatcattacctaaaaagaaagaaattatttgcataaagaggagacataattcaaacctaactgatcaaagtttccaaccagaggagagtgcttgaatttaaaacaatgccagtactaactcagtgatcatgctctaaaccagaggtctctgtttcaaatcagaacaattctgttactcacagattttgtacaaaaatttagccctaaccaggaagtcccatagcaaacaggagaggttcgctgctttccttggaagtgccatagcaaacctgttacatttatatattctgaattcctcaaaggaattttgaaagcaagctgccagcatgctcaatattaaaaaattcaggttactttaaatgcttatctttatacaattcaaacttttataaaacatagaaaactcccagtttccattgtacaattcaaaaactattaaccatttagtaataaattcacttaaccactcatataagaagcaaagtcaagggacaataacaatgtatatttcagtgttctaaatttcagacggcccaatgcatattaaaaacaactatgccatttttctatttccatttcagcacagaaatatatacttaatataggagtacatagtagaaatacatagatatacatagttagatatggcaggtaccaatcaacaatcatccgataaacatgtagaaatgcactcctaactgcattgtggatgctgctggggaagtcaaccaagcatcaactatggacctttgtaagttcttccgaacaaaagatgcttcgtctgtacgaccataaccgtcaaacacctgtaaaatacccctaaaaatttgaaaccattaaccatctgctgtgaaaactcgtactgaacaaaaaaaaatgatgaacttaacatctcacatatgaatgttacttcagaaatttactgctggtgatgttgggtcccggtttgagcaaagtaatttattcccaaatgttcagtgttataattttattgcctagtttcaagtgctctaaactcacagattgtttacatgcatcaacagaatttgagttggaaattgtcagtgttgaacaaaaaaaaaactaaccttttgattgactggaaatgaaactcttgtgagtctcaatttccctcaatttattgcttctgattaactggaaactgaactctagtgagtgttaaattcccttaattgattgtaccactcaggaagactatctgcctacgtgcagtttgattcccaaatatgttcagaaccatacaaagacctaacccatcaatcctgccaagtctttccaatttcccacaagccctgtattgcatctgcacgccatctcatctaatctcacatcctctcacaaaataacagcaaaatagtccgggcaacagctgctgctgcggctgcttttgttgtgggcactaaaaacaaattggttattttcaagtctaagccattgagggagttgttttggttggtttgctcggtatttcacatgcactattttcgcaaatttgcatttgaactgtaatggttgaaggaacgggatcgagcgatgcttaccttgtccccagcgtggtcgagaggattccggtggtggcttaacagagagcacatggcgcaggatccttggcggcgcgagggagtcggcggtggcgtcgcgacgcagtcggcaagaggggatgccggcggcgtcgatttggaggcgtgtgagggggtgccaacagcgtcaaactggaggcgggaattgatggcgacgcgatgccgggcgtcggcgtcgtcgcacgcgaaggaggggcgtcggaatctatggcgcccggcggctgctgtgatgcggttggtgttgggatacgcgtaggctacgatagcataaatcaaaattttctatcacgtaaaccaggaaccatgcaagtattagatcatagatcgttaccactcgacgcgctgcgcagcggaaggcgctaagaaatcgaaggaattctcgcgaagtagcgcgtgtcgttatagaggaagtagtcgatcgcaccggctcgaccttctcctcgccgtattcccacgccgatcagcatcacaaatcagaggcgcctctaccggtattcacacgtacagggacggaatgccacgcgtagatgtgctagcacccgcgcgcggctagggttttgctcggggaggggagtgacggctagggtttcttacgtgatgcaatacctccgccggttacacccctcacgaatatataggatccatcactcgggcctccaaggcccataggactcctattcggatccctatctgaattaagctcatattagatccccatccaatccctttattccggcccattaagcgtgcgaccctgtaggttcatgtacactcggctgtaacccgaaaactccttttcggtccacgcgtcaacagcggctcctagcagaacgtattgactcaccgggcatacataaagatcatatcggctgaacctctagtgtatacttgtatgaacccctttgcctcacgatatcgattaagctcaaagttagatatgtgctatcctctaatagctcaatcatttactcgaacctgttgatagattatataacttgtgattgactcctcaatcacctttggcatggccatgcacttccataatctacaacatcgaggggcccagagatatctctccataggaggggcaaatcccatcttgattattcatatcccactacatgtttcatagcatacccgaaaactacttttataactacccaattacggagtagcgtttagcagtccctaagtaagctactacacatgttgagaaccatgataattttaagtctaaggattcaacaccaacactaaatgagatcactgatgacacaacatatatggctcttgcagtgtctcatgttgggtctatccaacaacatgttcaccaacatgtgtccacattattaatttggtatctctataccatgatccatgagacatgatcatcaattaatacatgtgttgatcatctaaacatatttgttccacatatgatatttgatcagggatcctttagaaatagcaacacacaacataaagagtctcatgaaagaatcacatattcattaactaataatgagttatctatttcaaggaacaaagtcggataaatatgtaaacatagtatatgatacaatcatctctatgattgcctttagggcatatcactaatagttggagcggcgacgactgttagggttaggcggcggctggcgttgcgtgagagatgtcggatgtcggtggcgccgcgcgcgaatgcggggtgtccgaattgacagtgggcagatatccggcttcagcggcggagaccacgacatagattctgtgtgagattggtggctcgacatcggcagcgaccgcaggcctggactggtctgccgcaaagaccgtctttgagccgctttctcgcccccaccgccggcaccgcctgtgtcagccgccacaatgccaggccagcccagactgtcgaagaaccatcgccgccgttgttgttgtcttcaccagctctcgcccttcattgaatcaaacacatttagccacaccacacacatgacgttcgtttcggcgggtggcggagccggtcagcggcggccgcggaggagatcgtcgctggctcagtggtctttggcttcgacgattggagtaaggggtgagacagcatcacgggtgccgcggcggggagcggggcgacgcttgcggtggcaggggatggaggaggtcacggtggtgaggggagggggatcgatctgggcgggaggagaggatttggggaaggagagcacgtgagggagtggcgagcggtgtgatttttgcgcaaggggagtggggtgatatgcgtgcgggctaaggaggggataggggaaacgtgggatgatctgaggcattggattgaatgattctgggccgttagatttgatgaatgagtaatgagtaatgtaggtgtaagagtgagttggtgaattattagagggtatataggtataggtatatatatagtagggacgatctgaggtattggattgaatgatcctgggtcgttagatttgatgaatgaggatttgatgaatgagtaatgtaggtgtaagagtgagttgatgaattatatggtagatgatatactttactagttttttttatttttttagagaagggtaaaaaataaaaagaaaacatatactctactagtgactttaaagtttcatattccaacgaatctttcaacacttgattaaaattatggaattagtggtgttctggcagcagaaggtgtttgcttttcttacgatttgtttatacacaaatcctactcagtaaaggggaacccaatgctttgctaatgaaagcgtttatcaaagcggtcctgagcacaatcttagtctactttctaatcaccatagatcctccaaaatgggtcttaattgccaaaggtctatgtgctcattggagtgtactggcttaggcatcgacaatctagagcttatgggtgttgcgcttaggtcctgatggatctcggcccaacgcacatctcaatttaagccctagcaaggtctccatatgccgtactctaggcaggaacgcgagtttgctgttgtttccatgacgtgcgtgctaggcgatggcaaatcaattctcttctgggaagatggttggttgcaaggtgcgagcatccatttctaggcgcctgcgctctatgagtgtgttctggagcgcatccactggagcctctcgatcgcagacgtattaagaaacaacagatgtatcaacgatcttcgcggttctctaggagtatggccaatcttctagtaccttttgatctggttgatggtacgtgccacaacactatctgtggaccaagtcggactccttcctctataagtgagaaagctcaggttcctactccgcttgctaaccctaccacgcactattcatgggcaggatcccattccatcactcgctgatctggaatccatggcctctcctcgctatagctactttttgtgattggtcgctcactggcattgctagactgttgatcgtctggagaaaagaggcctcccacaccccgcttgcagcatctatcatgaccaatgggaagaaacgactgattgcttgtggattgagggccctaattcattacagctttgatggatcatcctttcaggcctcgggttacactagtgcttcctcgccggagtctcctcattccatgattggttgtgtgctctagccaccacaagtccaaaaggaccagtgttgtggctttgacatgattgcaccccttggggcttggtccattcgaaaggagaggaacaatctggtgcttaatcaatttaatcgaacatggcttgaagtggtcgcggcaatggcgcgggaagccaccctctggaagctttcccggccttcgtcgcaggcgttgctaccttagttctttaggtcgctaggttgtttcctctgttatcatgagaataaacttaagcttcccctgtttttccttttcccctttttatttccctacctctgttctgtcttttggtttgttatttcttttgttttgctctttgtaagttttactcctcttgatgcaaaggtgcacaattcttttgcgtattcctcaaaaaatgctttgctaatgaagaggtcaaaaaatgcacatttttagtaaggagggaacaatgaagaggaaaacgaacaactttccttgagaaatcaaaatcaacatgtacagaatcactacaacaaaaccccccttcagtgctggctaggaaccctaattggtgccagattccgagatgaccccaaataaggggcataaatgaggcaggctcatcggtgcatgatttaaaacaaaaacccttattgatgaggtgcatgatttaaaacaaaaagtctgatcggctcgattcaagccaattgagcccatgcattgagtccaaaaatttcccaattggttcttcatctatcccaaattgtatttcaatatcaccattgaaaaagtgaatcacaaattttggctcaaatgcattacgtactactcgaattggaaaggtaaaagtacaaattgccggatctgacctcgagctcatggcgaccaatggcccatggcgaggtggaggtcgagagagcgagggaggcacaatgatcggtagggacgttgagaagggaagtagacctcgagctcgtgacggtggatctagctgccctcgagatcatggtggccggatctagccgtccccgagcttgtggcggcgtatccactggcctggaggaggaggcgctacatgtggcggcggtggagatgacaaggggcgtgcggcatctgtggcagataggaggggcatcagctgcagcagagaggaggtggtggtggcggcgagagatcaatggagtgggatcaactctgagagaaaagtgcgagagagaatgaggtggactctgagagagaagagaggtggaaagattaacttcaaggaataaataaaactagggctggctcggtttgtctgctagactctcttagaggtgttgtttttttaaaatgcctcatatgtgggcatccgctcatattggcttgactaccgatttttaattttagattagaccacatgtggagttggaatgaccagaaaatacttatgtgtgctggttttagggcatcccggccctatctggaccttttttaatacctaaaagatagaaacttatttaagaatattcgaataaaaaactgctataatagtcaatggaacagtcacttctctccttggctttaattttcctgtacctagttttaatatgaggtttgaattggtcctgtcatccctatcctagatatatacctataccgacatacagtatatttcctatactcgctttagtaaaataaaagtgttgttttggacttttctaattcaatgagttacaagttcaactacttataatttgtacaaataaaaaaaaggtaacacacgtatgagaaataatttggtacgacaattttatccacataattctagggctgtctgtgatatcatgctcagcggcggagccagaatgtgctcaagagtagggttgaactagtataatagaatgtgccctagctgccctactcctatatccgccccattcatgctgaaaaattgtgtgaaatcagttgaatttttagccatgcgataaaacatgtgtcaaaatcaccacccacccacccacccccgagcgcgccccgccgagcgcgagcgcccttctcacgattgcttctccattaaaacaatactcattgttgggtcaggactgagaaaacatattttatcttttgttatttattgggcttgttttcatattgaacaaccttaacattgttgctttgggctattcaaaagaagctcaaaatctgtctgacatcaacacacaaattctttccattaagtcataacaaacccaacatgagaaggtccatttgtagccaggaaacaacaccagagcgagattgaatccattttgttatcacacaacttttgcgtgacaaagctcagctagcaagattcattagcaaaatccttacaaacaaagaaatcttgacatatcctgtatgcataaatagattaattccaaatgatattaccatctctaatcaattttagcaacaaacttaaatgtatgcatcgcaattaatttgtgacataaatatctgacattatagtgaaggatctgtgttccctctttttcctagacagcaattacgtactgattcatcatactaacatttgtctcatgttaacaaaactaattgtgtccgattttctccatgataagcatggactgttaaatctcactgacatggaaaacccattaaggctcagttttcccaactcatctctctcgttttccacgcgcacgattttcaaactaccaaatggtgtatttttttcaaaaaaattatatacaaaagttgtttaaaaaaatcatattgatctatttttgaaaaaaaaaatctaatacttaattaatcacgcgctaatggattgctccgttttccgtgccggaggggagtgttcccaaccaggaggagcgaacactccctaagactgcagagactaatagagcaaatgggaataaatgcatgaaacatggaccagaagttttgtatgataaggcgggaggaaggacagagattacaggtattcgttgagataaagtgcaaagtcaccaccacctcccattgccaaataatcagtggagcaaaatgtgaaatctatgcaaatcctatgaaagaaattgtataaatgacctgttggatgatataaagcagttgttggtctcctgaaagattaataaatataaagtacgatcagtgtaaagatcgaaatagatatccaaaaaaattgctagaagataatcaagcctagtagtcactaaataaattactctcgaaattttttatgcttcagtgcaaacaatcaagctcagtgcactagcactactaagtagatgcttgatgccttgattgtctaaatttaagctcagtgtactgattttgtaattactaagatatagatagcacacaaggttgacaaaattaggttacgatagttcatattaaaattacattgataaagaaaagtagcataaaccctttttacatagcagtagatctatggaaaacaatcatggagtactaaaatatgcaaatgtcatgataattttttagcatactcagacaaactactgtatatatgaagtcaacatctacagtgcatgcatggcaaatgcaacccatatgatacatgtactacctatactaactcagccctaaacaaaaaaaaaatatcaccaaaaatatatgggttaattgatcaacaattccaaactggtgattttctagccaggggataaatgaggtcgagtcaccaaattcttacattaccaacttgtcatttattaatagcatcttttaggataccttccatttgtcaaggtatagaaaagaaattatccactaatctaataaggcatggagaatgactcgatgcatgccgctttcatatttccaccctgaaaaatgaagcaactaaactataatttgggtatcaaaactagtaagtacaatgactcacatagggcctaactacctctatgacatacgtctgaattcattcagcaaactatgttgcagacaaacctacaaattcatcaagtcaacgatcaggttaacaatcatgtgaatattacacacactttgaacaaaaaatcttctaggtgatagcttatgccctatagagtgggctaatgtagggaatattgcaatttgaattggctaacagataatggttgtcccagtcttacctcttggtggttggtcggcaaagttgataaaacatgtagttagataaccgctagttaaggaacattgtcatatgttatatgcaactactaaatgctaacaaaacaatactattcggatgtacaaaattaattgctcagctagtcaaggattgacaaaactgatttccagatatttggtctagaaaacaaaactaacttttgcagaaatatcaaatggctgacaaaacacaaaactagaaatgttagtagttgagaaaactagacatgagaacttgttttgtacttattattgatgaggtattcagatgcacatagtcatgcataaaattctaatgagtaaagtccatcaccggtccctaaacttgtaccgctgtgtcatcccggtccctaaactcacaaatcaaccgttcaggtactcaaacttgttcgactgtatcatcccagtccctaaacatgcggatcactcgtttaggtcctccaacttgttcagttgtgtcacctcggtccctaaacaggacggtctaaaaactttatatcaaaaaataattcataactttttcatgttaactctaatgaagacaaactttatatcaaaattgtagccctcaacgcgacctacaactttgtagttgaaaagtttttaaattaaaactgtttagggtcccaaaatattgttgcatatttatagattttgtaattttaattttaaaattacattttgggacaaaaatgacttaaaataaaaaaaaattcaactacaaagttgtagatcgcgtcgcgggctacaagtttgatatatagagtttatcttcattagagttcacatgaaaaagttatgaattatttttaaatataaagtatttagaccatcctatttgacccatatgatattcaaatccaagtttagggaccggggtgacacagctgaacaagttggaggatctaaacgagtgatctgcaagtttagggatcgggatgacacagtcgaacaagtttgaggacctgaacggttgatttgcgagtttagggactgggatgacacaacgatataagtttagggaccggtgatagactttactcaattctaattaaagactacctttggagctcttgacactagtctagaactagcacaactactcagtacacctaaaaatgtactagaaaaattacaaatgggacacaaaaaacaatttattttggcaaaatttagaaggttaacaaaaacacagaaaagacaaaaccaaaaccaaaaacataaacagaaacagaaacacagagcaaacaagaatacaatattttgctaatgattggtctttgtgtaggtactgaaaatgacattgagatagtatgcccgatttcttttcagaatccacaacaaacaaaactgatactaatcttttaaaatttacccaatattaatagcccccaagttcagatttttgaacacaaatatcagtgaatttgcaggacaaaacctgctaattttcagtaaataatagacaaatcaatacctgaacataggaaattagcccatggacgatatgttgcttaatttcttcagaatccacatccaccttcatggataagaactgacatcctccatgcatagctaaaactctccttgaaaagaattagagtaaacaaatcaagctaatcaaattcttttaccacaaacttgaaccatatagaagttctaatacttttgaacatgtaaagaaatcaaaacttctgcacacagtgacagaaatgctgaccaaaatcaaagaagtatccaaacatatgaacacattgcatgtcccacacacaatattctgactaacaaccacacacacaaatgaactctgtgtgaaggacccgagaagaacatgcaacaccatcaccaaagaagaatagcaagttactaactactatctcctgcagagaagactgtgacaaacaacaacaaatcagtttgtagcatggcctatagtactattctgtgaattgtacaaaagtactacaagttgtggtaaaaatcttaaaaataaaaatgtataggtacatatgtatgtatgtgctcgcgagaacttttacggtgtttgcattccaaaaaaggtaaaaatccaacgctcctcaataataggtaccatgtgaaaagtatttaagtattagtataggtacttagatatcaagggtaaaaacataaatatacttgttgagagaaatggtagaattgtccctaaatttatcggtaccgcataggtaccggttaagtgatttgcttggtactagctgttctcatttgcatgattttctatagatttatgttgtgttctttgagattctcatctgcatgattttctttatatttacatacgttttgttccgaagaaaacgttattggtgtaaaagttttcatttgtgttcccttgtctagatttacgttatgttctcaagaacatgtcaaaatccctccgtttaattcttttgagatttatatcttttttactagaagagatttgtattgtgtttcaaaaacatgaccggttaaaatatcaccgaagatttgcgtcgatttaaattatataatattttatcaatttatccctataaaacatgaaacttcttccttgactacataaacaactaattaactgcgtaaataagtcatggatatctctaaaggtagctagagaagaaaggaaatgtgatctttgattttttttctctctctccgatacagattgaatcaatcgctaaattaacagggtagccatgatttacgttttcatttactcatctcctatcatgttacaataattttattccgtacctgacccctccgttgatccacctttaagtacctctaagtacctcgcaaacaccgtaaaagatctctaggaattattgtgtagagtattttaaatcacatacaagtgtgtcacatcatcacgtactaggaattattttatagagtatcttaaatttcatgtaaacatgatatatcatttataattttgttgtatttttagaatttaatatgcgagcaatgtgaaattatcatctccatatcattatcacattatttaaacatatatatctatcttttatattatataaaatatgcattcatccacatatcctcagcaaaacgcggaatatcaaaactagtatagtatgcatttcaaccttgttcgacgatcgctcaggtttcg

SEQ ID NO: 1794 - DNA, 4062 bp, Oryza sativa
  Intron number 5 from transcript LOC_Os06g11330.1 (locus LO C_Os06g11330) derived from phytozome v7.0 (chr-ID Chr6; po s 5952911 to 5956972 reverse strand)
caagaaatcagtgagctccaacgaaaggtaaacaaaatgattagattccactagttacttttgttaacctcgtaataatgtccttaattacattgatttcactattgtctgccaaacatgttagtctagttaagggtattttgaatcatagctagtaattctctatgggttctcaaaattctgtgtccctgtaagcagctaataagctagatcctagaggaaaaaaaaagttagtcacaacttaattaccgtcagttgtataaatttaaccgagtgaaaataggttttgtagatgttttattgtcattgttgtactgttatagatatattggtgataaagatgattattaatacaacaagacactagtacagaacccataatatgtgccagttgagaacccccataggtgttggatttttcaactggcaccctattagaggcactgatggggagaatcaaaagtgctagtataggaaccggtacctttgaggtgtcacgaataaaaaaaactaaaactggcttgatgcatcagctcgaaccaaagccgatgctttgagcgttccccatagcccccaaggtttgattgacatccaagaacaaacacacataataacatccaagaacaaggtcgtctctgagctcgattgacattagaaatcattaacatacaaactcacagaatcaacaacaataatatgaggaggttcactggagagaaggtcgccatccccgttgctgctcaccatgggtgaaggtgaaatctgcttgctcgcccaccaccatacaagccagatttgtcccccggggatctctagttctactgctcgccggcttggcagagaggaggtggctggatttggctgctcccgagcagcgaacagtaggatcaggagatggaggcgtggtgactagcgaggaactccatgaggcacggttggtgttcgcggatgatcagatctggtagaggtcaacaaggacctcaaggccattgctcgccggcttgggggagaggacacgtggccacgccgctcgttggctaagtagagaggagccagctgcgccgctcaaaggctatgggagagggcggccccactactcacgagttggggagagagaaggcagccccgtcgcttgtcggcttgggggagaggaggtggccgtgctgcccataggctaggggagaggaggcagacggccgaggggaccggcgtgtcattcgagaagagagaaggctagggagataaagatcatgaagaaaggatggtgtgttggggatggagtcagggagataagatcgagaggtacctaataaatcgaggtgggctcccacagtcccacattttgttggctcggctgcatccttaacagtgctgtgtttttgttaaaactagcaattatatccacattataagttttggtttattaaaaaattcggtacatatattttatgtatcgattgattttctttaataatctggcacctataaggggtgataggtgctggttttcaatatttaatccatgtgcgggttttgggaggataggaaatatatacctcatgtgctggttttagatgaccagcacatgagggtgtcctcaattaatggttttgtagtagtgagtgtacggcaaaaactatgcagtgtagccagttgcaagaaacttgtataaaatggcgctaaattagtggaagtttacaatatgacatacaacaatatactaattctgaagatgtcaatatgatatgctttttggagtatttctagggaggacacactgctagagaacgggtcatctctgatggttcagaaagactatcaacggcgggttgggtgagcaacccgacatttaactattggtcagtggtgagaatgacacccccgttaatgatgaaatcatatgtaacggtctacaagttgtgacccatcacagataggaaaattctgcacaaaaaaggccaaaattgccatgactatgatagggaaatttggccaaaaaaatccaaaaaggttgtgcttgtcgccacgccgccatcatttccgtgccatggctcttattgttctactatccccgtcccgcgcgcagcttcttgtcactgtactattcctgtcatcgtggtgcacggctgcttgtcgatgtcaccatcatcatcttccctcaggtggctgaatccatagttattggaactggactagaccggtggttggaccgaaaaaactagaactagagcctccgccagtttggtccagctaaaagaccgtttgcgcaattgacccggtagaaaccggttgggtcacccgtttttgtagaaaaattgctattgaactggaattgaaccaccaaggattgccttgtgcaaggtcacatgcgtcctggaggctgttggagagggaaaatgtgggaaaaagtacgcatgtgggattcgatcccacgatcacatgcatagaagcaaaccaaacgaccagcatgctacgatgcaccttgtgttttgaaagaataacctatctatttaaattgcattgatccgcttcaaaccagtggtttaactggttgaaccaataaatcatcaaaacgagagcctcactggttcaattaccagtccggtctcaataactatggttgaatctagccaccacgaggtgagagtggtcagatctaacgtccctcgaccttggggaggttggatgtagcatccctaaggcaatgtccaatgctaaagggtggaggagatagcggccagcccttggggtggagcagacggcggctaacgctcgggatctagccaacatgcacgaggttgattgtggtcaaatccggcgtcccccgaccttggggaggccactagtccatgaggtggtgcccgacgcttaaggatgaaggaggtgccagtcgacacttggggatttgggagtgagagagtggtcgtatactttgtagtagggtcatctgtggcggtccgaaaattaagcccatttgagatgatagctcatcctaaacatgtgttactaacaccgacgctgagatgtctttatcatttgtggcggttcatatgaccacacccatcacatcggggtcatcatggttgatctttatttacagttcatactttgacccattgtcccatgtagtagtatcttaaagtttttttttccagttggagatgaggtcatcaaagatgggtcactttgaccctctacagatggcccgtcaccgatgtcccattctgtagtggtgactagaagtcgagaactagctaaagggtactaatattcactattcagtgccggaactttatatatagcaaaaattattatatatagcaaaaattatattgacgagtgaaacatgtgcatgtactatattggaatgttgcttgcagacggtatacgatggcaataaatcaataatagactgtcaatgaaatgctgaggttcgataggatctctgtacgagagtcaatttttgttgtgaacttattgcacaatttttcaggcatgaaatgttttctcgacatatattggatggaaatgttatcattcagcagcttcctgtttatttatgcatagattttcagatacagtaaactttctcgtgaggcttatgaggagtattatttatttagaaattgatattttcaccgatatccaacaatgcaactaaggattacatttagaatagaattttactccctttgctcttaaatatttaatgtttaggataagattcagtcaatcttttaaaaagttgaccatcaataatttgagattctcaaatgtttagtttaaaaacaaaagaaatgatatatatggatttacctttaaaaataaccttttagatttcataaatttattctaatacaaaactgattgtcggaattacaaaattttgataaaattttgtatgaacgtaaaacatttatgtctggatataatattttgtatttatcagcacaaaacgtaaaattgatttggttggttttgaaaatgaatcaggtataatttcacaaatcttatgatacaatttatttgttcttgtagggcattcagctggcagaagagaat

SEQ ID NO: 1795 - DNA, 2383 bp, Oryza sativa
  Intron number 4 from transcript LOC_Os10g32348.1 (locus LO C_Os10g32348) derived from phytozome v7.0 (chr-ID Chr10; p os 16900590 to 16902972 reverse strand)
gtagagagcttgatctttctgccaaagagttgcaggtaaatgtgctgccaacactacttccaactgtagtaccaccaggtcaattttatattaaaaacctatcagaataacagtgagctctgaatgtgcaatagttaagttttttgtacataatgagcaatggaagaaatcaactagtattgataatcttgtgcagcagacatagagtgtaaatcctcatatcagggtaacacaaggtcattgtagggaaagatcctcctataattgatgctactagttgccaacccgtgccttgcatgggttattattatttatagtatatataaagagtccaatgaattccaaacttatagcgtatagaatgaagagtacatgccataaacaatttgtaattatcagttttgaaatttgaaaattaaaaataaagtttctgttcaaaattccaaatagatacaactatatatttattaattgtgacttttggaaaaactgattctaaataatccatggcatctcctatggcatttattttacagaaattatgaatataatatacggtcagtcagtatgataggaacatgttttgttggaagttatatgtaaaaaagttatattatagttccaaaaaataaaaactaatacacacacacgcgcgcgcacacacacaccctagttaatgtttcttatgtaattttctattttttgtttaataatttgcaaatttggaattaataagtatatagttgcacttattaatttttgtgttggagtcttaatttagaatttatttcttgataagtattgagttgtacttggcttggagcatcttttatagactttccatgatttatattttccgattcataattagcaagtactgagttgtatatagcttggtttggagtgtaagttatatgattttcattatttaataaataatattaaaattaggaattaatcactgcatatttttctcatggtgcagtttcaatatattgttttgattaattcaatatttcaaacctagtaattaataagcatcaacttgtactctattcgccgtcaaagcttaatgtaaaaaaaatgaaataaagaatactcctcaggatttccgaaggtatgctttatttaacataaattctcaatatgatctataggctgcatttattttattagcaatctattgtttaagagaaaacatgggtgtaatgataaaaatccaatgacatgaatatcaacaataagccacggtttacatatatgcatatagataaacaaacaggatatatggaaaattaattattagttgctagtttgtatatagaaaaatatagatctgtatatgttctgttcaaaattaatattaaataactctatttttatagtgaccatggaaatttgttatgttaatcgacctaattaactgaacagcacacttatgataaaacaaatcattcgctcgacatatatgatccattatgtcaatcaaaataaaaaatcagctgtatctcttgaataggccccatagaacatacataatacatcaaattaagaattcaatacctttatatattgcatatcgatgcgggcatgcagcgacatagatgaatcttgttcggtgtatcgtactcaactgtcggacatggccatatggtgtcttgtaaatttccttttccacgtactaacaggaaaccattaccaaccaagggtcatcacctggatgctgtcgcatgcgattattctgcttaatcaatccattaatatttaacatgatcaggcattagtcgtaactacatgcacatctgcttgttttctccgcagcctgtaccgaaaggattggacgatggcatgagaaatctacatatgtgcacttaaataccaaatagtcattgatctggatgagggcaaacctggagcatctcaaatcgctttcttgagttccatcttttttcgtgcctcatctcacagatagaatctttctatagatgcatctgatcgatctcccgttactatctgcccgcctattagatgggccttaccatggcccacgatactaactaagttcagatatattttacgatctacagttattatagcacgatctatttaataaacggttagatttttctgattaacgtgagagcttgtagaaagtgcccaattagtataggtatagatagatagacttgttcataggagttactgaaacagtttttctttgtagatatgaatttatagttgatgctgcttgtttcataatggatattactgccatgtcctatgtggtgacctcttaattgaaaattttgatctctgacctgtgatctgtcagatggactgaaacctaccataaatctttgctaggaacaagtgagaagtggtg

SEQ ID NO: 1796 - DNA, 2840 bp, Oryza sativa
  Intron number 2 from transcript LOC_Os06g36850.1 (locus LO C_Os06g36850) derived from phytozome v7.0 (chr-ID Chr6; po s 21709620 to 21712459 reverse strand)
aataaagtatttgggcgccgaagtaagaataactggtaagtgttaaatacgtacatatacatgcttgcagtatgacgatcactacggctggttggtacctttctgcctgtgccttagctacatcaaaacttttctagatcatattattatcttttactagataaatacatgtgctttgttatggatagatatgaattatacatgacctagcattatttggaacaattgattgtaaggtttttagaacaattcatccctatagatgtctttgcatgatgaacttgtattttaaagatgaaataatgttgaaccaatatatatgactatttgtaatataaaaggagtagttagtaaaacaaattaaatagagtttgtgaagatggtagattaaccaccaccaccattacattctttttagaataatatagatatagataatggtggtgtgatcctttcgaggttgctccatttcttaaaaacaacaacaacaactacctctagccacaaataaatgatattttagagagtaatttagtcaccaagacattgttttaattgttaattactagtataaaatctataaaaaatatagcaaagtcataatattttagaactactaaagacaaatttaatcaatgcaacaggacctgcttaggaggtctttacctagcacaggtatttacacctaattaatcccatgtttataaagattttggggagtttaaaaagcatggcacgtaaatgttgacattggatcaacaagggtgtttacaaatctctataaatattttagtttaaacctagccataccattttcaaaagttaaatcgaaatattttcccagagatattgatcgatgatcaaagttcaaatgtattcactgcatgtattacaaaatatcattatttgtctaattaccaaaacaaacactaaaataaatgacaaaaactgaaatgagttgacccacaactatccttctagctgattatctatatatgtcgagctttactatatgcctagcaagtgggggttgaaattcctttcattccagatacttgcagcatcattcccaaactgtcgaaggatggtttcaaccatctcttctacgggggattaaggagataaaaagagatacatactaaacacaatatatgccataaacaaactaatattttttaattagaaatctgatctatataaacattaaattgttcacttatttaagcatcccaccttgtatgactacatcaaatacagtccacacacacctcaacaaacaatataagattcaagcaagtaaaacaagtagaaaaacaacataagattctaaagcaaacacctcaacaaacatacagttatcaactgtaggactcttgcaacaactaagttgatgttcaaatcggcagaatctgtgggattgatgggtacagtaccatcatcaccacctctcctcgcggatcgtttgttgtaagcagacactgatactactacaaaatggcaaaacaccaatccttagtgtctaacggttttataagtcaatttttgagatttagctttgaagccataatccattatcagtggcttgcactaatctcttatgattcatgaacaaggatagttggagattaatgaggatgtgaatggtcaaatatatatatataatacacatcccatactagacaatatagttggccatgtgggccgcccggcacggcacggcccaggcccggccgtgcctgggccgaggcttgtcgggccgacacggcccgaccgacgcaccgggccgtgccgtgccagcccacgtgccgcactcacggcccaggcacggcccaacacgcctcgggccgtgccgggccggcccgaaggcacgatgggccgtcgtgcttttcctcacaataagtctaaatttcctccctcctattgggctgtgacatatgtacagctacaaaaagtctattttacctccctcttctttgggctggggtatataaatagctaaaataagtctatttaaggtccctattctttagacagttacatttatatgtctatttttagtccccatactttatgtaccgggcctggcctgccggcccatcgtgccgggccggcccgaccatgccgggccagcccagcgtgccggtggggaggcccaggcacggcccgacggtcgggccgggccagcacgggcccgacccaagtcgggccgtgccgtgcttgggccgggccaaaaaggcgtgccgtgggccgggccttcgggcctcgggccttatggccaactatactagacaagaaagatcggtctctcagatcgatggtatagctacgtagtcttgcgcaaagatctagacatgaccatttaaagcacctaacaaatagcttgatcttaatgacgaatcattacacattgattttaccctctattctcaccaagtttaatagtagagttaactatgagcttatagctcatattaaagttaacatgtataatagataagctataagtttatcaatatctttttcttttctctctgtctctcacctatgcatttaatgtttcatcttgaagtatgtgaatagcttgctcttgcatgagagcttttaaattctttctcctccacataaccttatagttggcttatagtgtattaaacttgctctaaggttgtatcaattaaccgataagatagctcttacaaacatttggatattttctttgtaggagtacgaaaagcttaaaacatttcttacatataccagctaaagttgagcatgtttttggttgcattgatcgtatggacttctcttttcaattttatgcagaaggtccatataggaat

SEQ ID NO: 1797 - DNA, 3447 bp, Oryza sativa
  Intron number 2 from transcript LOC_Os10g28009.1 (locus LO C_Os10g28009) derived from phytozome v7.0 (chr-ID Chr10; p os 14442519 to 14445965 reverse strand)
gggaggaatccatcgctgctcttggaccagcaaaggtattcataacaaaccacctctggaaaatatgttttagctagtggtatctgtgaattgttaggatataggcatatagtagcatttttacatttcacattggagttgggtagtggagtttcatgatgttttagcatgcatgtttcttttctttggttgttccattttatagtgttatgtttgtaattctgacagctcaggtaagttccaaaaaagcctaaagctacaaaatacattgcagacctctgattttaatttaataatcttgaatctgatcgtaagaatgaaaaagggcagaacatatgctaaataaggcagctatctctgaagttcagtgttcttgctattgaaacagacagctcactaatacttatggtaaatttaggaattaggatattttgagtatctatctggataatagaaacaactttcttctttcttctggtgaaaaggcaattcacaggacgaaagctgcttcctgtttatgtctagcagtgagcttagttgccctttacatttggatgattttcctactagcatttagcaaccatgattgcagatgctgctagttgttaatttcagcaggtaaagctgaataggattccaatgcataaatggttgaggaatgatgcctccctgccttgtttggaggacatcatgagtaggtgaagcttgaagtgattcccttgcatttcttatgtccatcttgctggtcaggccagcttttacttcaattctaggacttgcttggtcagtcactcagttggcattaatttcatgatttttgcctctcaaatgttactgggcatactatattactatcatgtgtattcttaattctgatatgagtataggtattccgcaatgcaaaccaatataagcttctgaaaataaagatgtcagatcaaaattttactccctccgttccaaaatgtaagggtttctgggttggcaaatgctaagattaggtcaaaagaaacctttttagtcatttcagttgtcaatttttgaattttgaattgcttagattccctttccaagcatgtgattggcaatgctttggaatcattgaaatgatgggaattagtgcagggatccttgtattgtggtacaagatttgaatcctagaaatccttatattttggaacggagggagtagtacagttcacttctctcatgtactgatggtgtatactcatgttaatgctttgaccaatttcctgaaagaagattctgcgccatcttagctctatctgtttacggaatctttaatcataagttagtaaaccttttccagaacttcgtatgataatctgtctacacatgttctattctaggcacaagtttataacttctttatagcaagcaactgtgttatttctttgcaaaatagatggcattagcctatgcataagtttatgacttctttatcaactacaagcaatagtatgcttattgcctgctcattttcaaggttatttcatgctagacacgataaagttagtaagtcaatgttcttctattaccaaatgccaagacatttactcatttactgcagaagtactgcagaacttaacagtgtaattgtaagctctaacaaagcaatcgagtgcactcatgatagtcaacattttgagatttgactgtcacatttcgtgtttaagttcctttcatatgtttactagtcccactaacataaaagatagaaacaatcaatagaccaatttgatttactccaattttgtgtgcagatgatctgagaatttttattaattgtatgcatcctacgtaaatgtagggtttattaatctacatgcctccattagttgcccccttgtttttcgtctgatcttgacctccagcttcaagctccaatatctgttaagaatgcaaacagctaaaactgatataaattgatatgtgttggagatcttacataacccttaaagtccaatcttcctactagagccatatcactattacaacaaaaagaacggatgcaatggctgatcatgattttgttttatgattggttcatgcaactattgtggttatactaatatagtagattcattgttaatttatatgtgctcttgagcagttattaccgccgtgcctggggtgatctttttccttgcattgcatttccacttccattgttcaatttcaatgttctctcattgggcgatcagccctatcgcctaggcaccaatcaggacaatcagggcgattaatcgaggctgatcggttagtatataggagtgttcagcaggccatatatgctatatattatgtactaaatactctatagtctgtagtatacggtaaaaagcaagcatcatttggtcaaagaagaagaagcatcatttgctgcccatcatctgcccaaaatggaacatgggctgggctggcaggcccaaaattatatttttctcagggaggcagcccatgaactgatcgttttccaccctgataagacgattaatcgtgactaatcgtcgattaatcggacgatcagctttctgatcggctgatcgacttacctgtgcctgatcggaggtaggggagcgatcaggatgattaatcacgattaatcggatgatcagacaacattgttcaatttttgatatcacggaaataactaaaaatagcagataatctgtattgatctaaagcaaggatccatgatatacatgaatcttaccattgcaatgtgagcaacaatatgcaattgcatttgatacactaacctgattgacagcgtgctgatcttctatggtacaaccttagatcggtacttgtatatcaacattttgataacatgtgatgagcttgttgaggcaaaggtaaaagagaaggagcagggctgtacctttctccccagtacttagcctgaggttgatgccatatatatagacattgtagagcattgcaacagtagccaggaattctctgtactgtcaaacttggctggcacttgcacatgttattagttgttttagtgcatttggttatttgcattggatacaagacattttcctaataggttgtcctgcagtccaacctaatacatagccttttttgactgtttcctcctttctgccagcagaagaggcctccagatctctgtcatagtttgtttatcttggacgccaaccaatagtgtctactggtccctacatgtttatccaaattgatcttggatatgcttatataatcctagagttactgcctagatgatgacaccagatcactattattttttcttcaagagatgctactatttctttgcttgtcacagtcaacttcattatgcatatttatcatgataaatgtttttttcactttggtacttgaatttgttgcaatctctctgcaaggtttgacattgtcgcattctgttattgcagggca

SEQ ID NO: 1798 - DNA, 1730 bp, Oryza sativa
  Intron number 1 from transcript LOC_Os05g06270.1 (locus LO C_Os05g06270) derived from phytozome v7.0 (chr-ID Chr5; po s 3193657 to 3195386 reverse strand)
ggcgaggctgcagtgtggccacgagttccacctcggtatgtatgtggctttcggatgatctacagatgtgttattggtagggaattgtaagttagagcactagaactgcgattttttttggactcgcgctgtcaatttgatttgggtgagggtagctgtaaaatgtgatgcttttgttaggaattggggctggacttggtgggaattaagataattttacgtcttctagctgtaatggtgcagaattttgggcgatggttcgcataggtagtgagtgccttttgggggtaaccatcaatgttttccccagtgggtgggtgggttgggggatgaaaggaagatttcgtgctaaaattgctggtatatagggtgaaatagtctggctgacatgcatcacaaatttccggtactggcctggtccgatgactcgtagagtttgcggatttgatcagatactatgaaagaacatcagaatagcttgagcggagtttcttgatgggttcttagttcaatggaagttatgaaacaaagcatcggaccaaataattattttagccagacaaggaaatcaagtaaatcacatcagttggaaattgatactaacatggaaaccaatggaagcaaacagatagagcaaatattgatcttgagattgcgcttctctataccatggtagaggcaggttggcatgttgagcagataataaattggccccttaatacaacgatggacctatgcacccactggtaacctttaaacagggctggcttagtggaccaatggtttgacccacccatttggacccctggatgaaagtctgtttggttcccaggaatttttgggggttattgagctagctgttcaattttagtgaatggttgcactttgaaggcttgtctggaggatttaaaaatgtcccatggcatgcttagacctaaacttataggaaactaaggacgacacagatttgaatagttcagtttgatggtttcattgagcgttgagccatagtgacactgacatactgtagtagatagggtttccctctctcctttttatgctgtacaaggaattaggtgcaatcctgagaatatgtagttaactgcaatccttgtttcctactttcctggaaattactcttaggtaatattttttgttggaagtcagaaccatgtttacattctatatatacttggttcatgttcttttactggtatcaagttttatctggtctgttgttatttggtaacaagttatcttgatgggattgagtttttgtcttataagctgtcagccgtgacgcatgagcaaggcaacagaaaaataattttagtgcagacttctatacttctactcttagtggttaaaagcctaaggctgaaaaatagagaaggatggaaaaacatctaaactaattcaaaattaagtttcaaaactcaaatttggccgcagcttataagctgccgagctgccaacaagttagtatcaaatatggactgtcttttagttatcaaaatcctttagattttctaagttaacaagcctcaatgatcttggattcacttattaaccaccattgttttttgtgcattagcaatgattttatttgctttttacatttgttaagcgtatgatcttcaagtggaagttttgaatttctagtattttcatttattacaacattttgatgattgtggcattgtttccagattgcattggatcagcattta

SEQ ID NO: 1799 - DNA, 3188 bp, Oryza sativa
  Intron number 4 from transcript LOC_Os08g42710.1 (locus LO C_Os08g42710) derived from phytozome v7.0 (chr-ID Chr8; po s 27019437 to 27022624)
tttagttcttaatatatttatttggtaattacaaggtaattacaacaatattatatactctttatgaatttaacttttttttcaaatttatcttaacatttatgtttaaaccaacatccacgattacttgctagtactaaattaattgtaccaacaaatagttatctaacatggaagttagttttgttttttctcaaaactttggtcatagttctaacaaatatatgttttttccaagtttgtatttaaactacctattattgatgttttgtgtaattccagttctactttttttaaaaaaaataaatactttgtcttcctatgagagcggatacaattctatcagccaaaaattggtgtgtgcctaaaggatttatctgtgggtttagtaagaaatgtatgtgtaacggaaatatgattaacatggcttgtatccatatcatatttatatctatgctaattgggtacaccgaaaaaattcttgtgttaattggataatattcaataaatctgccacctatcaaagtaggaccaaactatagaatatataaaaagaaaagccagcatcgattacatccagggtttgcaatttcaacaattttcgtgaaatttctagattttgagctggttcagaaggagattttgaattgaaattcaaatggttatgaaaacaagtgaattgaaaatactaaaaaaaatcctataaattatatggtattattaacaaatattgaatcacttgtctatttgaacctaagaatgagctatatagttttaaaaaaaggcacaaaggaccaaagagcccataaaggatcagccatttaactgaaattgaggggatatactcctccatccgttataatatgttggtattatcaatttttctaaaacaatattgaatttacatatattgaacctcaatcatacaaccaatattgtataaaaaaggcacaataggccgaaattccataaatgttgggcccgtttaaccaacacagagggatatatatttatccacacctttcatacattttatcggatatttttgcactatttttataaattctgaacatttttctctatttcccatttccaaataatcgagagacttttgcatacaactgatatgcttccgaactttttcaatcaattttccctttcatttttgctaggaaaaaaaactaaatttcaatttggccaatcaaaattcaacgcttttcaatcaaattcgatcatcttccaacaaatttcaccctccaacttcaatcttctgtttttgaaattctctcgattttttttattttcactatttcgatgatactcacccttcggtgttcaattgaaagtgtaacctctggttacaactttctaattatcaattttaagtttcggaactaaattaataagttacgaaattgtgagtccaagagaggtaaaacctcatagttatttattctagattcttgaattattaaatcttgaaaactttgcatcgtcattcctaatatataaactaggttaaactatacgcgttgcttcagaagtttaatatgataataacaagtaaaaataatgtgtaaaatagctagacgacataaacttatataagttgatgtgctttatgataatttaaatagtatatagaatgatgatccaaatataaaagtaaggtgatgtggctttatgagagaagaaaaagaggaagataatttagacaatatattaatcatctaagagctagaaacaattgaggtgatatggcttgatgagagaagaaaaagagggagataatttgtaccatagattaatcatctaaggtctagaaacaattgaggtgatatggcttaatcagagaagagagaaatgatattaggtaaatgaggatgaactatataggtacatagcatattataaaaataatggagatatatatattaaaatattatgtgaattatgtgggatgatgatttaacatgctggtattttaaagctctaaaattcaataaattatagataatatagcatggttgcgtgaatttaagatataataattgttagtagatgatgatattgcatatttgcaaattgagttatggatatggtgggttgtaactttatagaaaggtaggattaatttatcaacaaacaataattaatgcttcaaaccaaggacaacttcaaatttatatttattgattatgatccctcattagatagaaattactaagtatttattttgaatttcaagaattattaaagtaagaaaatactaaaactcagatttcatgatgagtgaaaatttgtgcttattactttagtacttaattagtcatgaaaaactacaagtaagactccaaaacaggtacaactttctaatatactccttcctcgcataaatatttattgtttagtacactatttggtcaaactttcgaacaaaattttgaaagtttgaccatcattaacatcacaaatgcttagtttataaggataaaataaatgtacgcatagatttgtctttaaacataccgtcattatatggtaatcttatttgatttcatcagcttgatctaattaaaattgatggtcaatatttgaccaaatcttgttctaaagaacaaatatatatgactagagggagtatgttagtgatttttgaaactatttaatcaaggaaaaactacaaattaggattcatgacaagtttagcttttatttattaattattagttatatattttggaattattagattgagaaaaataataaataaaatgttctggttaattatatataataatataataattattgagtttaaatatcatctttttggcctacgttgtttgagttcaagcaattggacaacaaaatttggcttcttccatcgagttagggtgcccaatactgcttggttaacctctttatacgaatccttggtttattaatggccgatggctctcttaaatatgatccttggttttaatccttgagcatcatccgtagtttagaattcttatattttcccctttaaagattacaataaaatcttctggtagttaactaagatttcagattttcaactggggctttattaaaaaaaagatgaaccagtaaaagtttcttgtgcgagaaagagagatcttcatatattgtgtttaacttgttaagtgacattaatggcaggt

SEQ ID NO: 1800 - DNA, 15973 bp, Oryza sativa
  Intron number 1 from transcript LOC_Os01g08890.1 (locus LO C_Os01g08890) derived from phytozome v7.0 (chr-ID Chr1; po s 4467066 to 4483038 reverse strand)
cggcgtgccggcgcgtcatccgtctctggaaatcggtattgtgcactgctgatttgtttctcatccgtttctgaatcggtattgtgcaccgctgatttgtttgtgcgttattcttaccaatttgtccgctcaagctggttggtcttgttgtctaggagaccatgcgtgtggagattatggatatcccatatctacacggcgatgatatttgggctgaatataggataccgaatatgtatagaatatcttatttgtatctcgggtttgtttcttaacttgtacaacaaggaaacaccttgagacttagtcggttacgactgtattttgtctgtgtttgcatattccgttagggatatgtattatcttttgtaatacggactccttcccatatataaggggggtccgagtgcctctaggggcagatgttgattttctctaaatcatacaatcaataatacactcggcggattcatccccggacaggagtagggtattacttcttttataagaaggcctgaacctgtataaatcctttgtctccaaacccatacacttttctagcttgatagccacccccttttattattgccgaaatctagtttcgacagttggcgcgccaggtaggggtagcgtcaagcttttcgccgatcagtgcaatgggttccgtctccggcatcgacgacctcgtcttcccacccgggcagacgtttcggttcggcagcctcgacttcgtcaccaacaacttcggcaagatttctctcatcgactcggaattagaccagtcgggagagaatcggatttcggtcccgtttggactcccaaacgcggctgaaagctacttcaagaccatctcaaccgagtcggcttcaaaccactcgggcgagatcgcatcttctccaacgacaccagatcgagatgatggggcttacccaccgatcctgatgaagctccccgacgatttggcggccatctccatcacgacagcttctccatcccgtaggcctaggcagaagtcggcttcaacaccgatttcgcctagcttcagggaaatcggcgtcatcatccaaccactcggcacggtttcgacggatcagctagatggctactacagctctcccaccgtcgactcgcgccccaccgaaatcgtggagtacgacgagtttagctctcgctacaacgacccgcatctcgacgacttcgacggaagcctagatgacaactacacccctctctacttcggcgtcttcatggccgacaacgagacggaggagcagcgccaagcccgggagactgaagcacgtcgcgagactgagcgccgccgactggaggaggagcatcaagcacaagaacaagaacggctacggcgtgagcagcaggagcgtgagcggaccgcgaaggaggctgaggatcgacgacagcgagccttggaagcagggcgccgagcgcgtgatctcatcggccaacaagatgttgaagggacaccggttttccgcacccctcaacagaatgcggttgccgcgatcaccctcctcgacaccctcctcaaggaaaacgagctcaaccaatctgatcacgtcgtcaacatcttgaaccagacgaagaccatgatcgcggcttcggtcccagttaactccgaaagcatccacacaccgaccggcagccgagtcccccacttccgatctcatgactaccgtcatccaagcctcagcatcaccggtgcaggatccaatcgcaggagcaggggtcacgacgagcggtccgttcactcacctcccgaccttcatagggagcgccgagtggatcggcctcgctcaccacctcgtcgccgccccgtcgatcttcgcgacacaatcatacagcgccgagcagctcgaggctatcatcattcgccggaccgccacgacgacgaccttgacggagtagcagccttcaccgacgacctgcgtcgagtggattggccagccggcttcaagccgactggaatagagaagtacgatggtaccactaacccagaatcgtggcttaccgtctacggtctcgcaatccgcgcagcaggaggcgacagcaaggccatggcgaactatttaccagtggctttagcggattccgcccgatcttggctccatggattgccccgtggcacgattgggtcttgggccgagttacgcgaccacttcatcgccaacttccaaggcaccttcgagcgtcccggcacacaatacgatctctacaacgtcattcagaagtccggagagtcccttcgagattacatccggcgattctctgaacagcgtaacaagatctctgacatcaccgacgacgtcatcatcgccgcattcaccaaagggattcgccacgaggaattggttggcaagttcggacgtaagcctcccaggactgtcaagctcatgttcgaaaaagccaacgagtacgccaaagctgaagacgccgtcaccgcatcaaagcagtcgggtcccagttggaagccaaaaaaggatacgccggcttcgggaggaggtggaagtaacaatcataaggaccgcaagcgtaagcctgcggaacttgtcgcaaccgccagccactcttctcgacagcgttcgcgcgtcaacacgttcgacaagatcatgaactcccaatgcccgcaccatcctaattccaaccacgtggccaaagattgcttcgtctacaagcaattcgcggatcaatacgccaagtctacgcggaagaaccccgacgaagaacaaagcacgtcgaggaagaaggacgacggcgataccccggcaggatttcaagaccaccgcaaggagcttaaccatatcttcggcggccccctggcttatgagtctaaaaggaagcaaaagttgaccgaacgggagatcaatgctgttcagcccgacacgccccaatatcttcgatggtcagagattgcaatcaagttcgaccgctcggatcatcctgaccgagtggtccacccggggcggtaccccctggtactagacccagtggtccgtaatgtcaagcttcgcagaaccctcattgacggtggcagcgcactcaatatcctcttcgccaagaccttggatgatatgcagattcctcgctccgagctaaaaccaagcaatgcgccttttcacggagtaattccaggattatccgcaactccactcggccagatcacactcccggtcacctttggcactcgggaaaactttcgcacagagaatatcagcttcgaagtcgccgatttcgagacagcttaccatgccatactcggacgcccggcattagccaagttcatggccgtcccgcactacacttacatgatgatgaagatgcctggtccccgaggagtgctatccctacggagcgacatcaagcaagccgtcacatgcgacaaggagagttgcgacatggcccaaacccgtgagatggcgtctgcccgagaggatatccgactggctgcagctacggcgagcgaaggagaagtgcccgctaccaagatttcaaaaagtggagaaggcgaagccaagactaagaagattcccctagatccttctgatcctactaaaattgctgtaataggcgccgagttagattgtaaataggaaagcgcgctcatcacctttcttcagcacaataaagatatctttgcgtggaaaccatctgatatgcccggtattcctagagaggtgattgagcactccttacatgtcaaagaagatgccaagcctatcaaacaacgactccgccgattcgcacaagacaggaaggacgcgatcaaggaggaattaaccaagctgttagcagcaggcttcatcaaagaagtccttcatcccgactggctggcaaacccggttctagttcggaagaaaacagggcaatggcgcatgtgtgttgattatactgacctcaacaaatcctgccctaaagatccctttgggttgcctcgcattgaccaggtagtcgactcgaccgccggctgtgagcttctcagttttttggattgttactcggggtatcatcagatccgactgaaggaatccgactgcttgaagacttcattcatcacgccctttggagcatactgctacgtcaccatgccgttcggactaaaaaacgcaggagcaacttatcaacgtatgattcagagatgcttctcaacacagatcggccgcaacgttgaagcctatgtggatgatgtagtcgtcaagaccaagcaaaaggatgatttgatcttggatctagaagaaaccttcgcgagcatccgcgctttcaggatgaaattaaaccctgaaaagtgcaccttcggagtaccgtcagggaagctgcttggttttatggtgtctcataggggcatccaagccaacccggagaaagttactgctatcctcaacatgaaaccgccaagtacccagaaagatgttcagaagctgactggatgcatggcggcgctcagccgatttgtttcacgacttggcgagcgggggatgcccttctttaagctgctgaagaaaacagataacttccagtggggacctgtcacgcccagaaatttagcccaaatttccagactattttgtgcattaaatccctgtccaggaccagccagggtacacaaaacgacaagtaataaacagttccaaacgtaaataacgcgtaaaatacttacagaagaggcacttagtcctcacaccgaaacaaaagcagcagcagcggaaaaaggcgatcctagcggggcttcagctccactccacaggcaaaactcaactggggtctgagccttggtcttctaacttcgtcttcagctcagaagcactacacttctgaaaagggggaataatagcaaggctgagtacaaccaccgtactcagcaagccacaccaatgatgcagacgtgcaaggggatacaaggatggtttgtggctatttgcataaaggcggttgtaaaacattttattgagcaaaacagtaaaactgttgagtaattaaagtaacattaaaatctccactgatcaacgctacaccacgttgaacaggcccaaccaacccacctggactacagtgcattgggtcgatttattaaggtgggactaatcacggtgaatctggtcgatcgcccataaccgcgggcacggctattcgaatagttttactctggccagaggtgcacaactgtacccacaagacacaacccaccgacatgtcaccgcgtcatcatgtgcccatgatgcacacgtcaccatgtcgagtgattgtgacgagacccttcgcataaccctcccctaaccatccacaccacgctaaggtttcacccccacccctcaaaaggcagtgggcggtcccctcttgcgccgcggtgaatccggcagctggacaaccggacaccccggccgacccaactccatcacgcccaccctcaccaccggtgcctaggaaagggtcgagctatacttcagatcaagcagttacccactcccgcttgtggcaagcgctgtaagtcttccagggtttcccgtgaaccggtccttaattgccatgggtgcgactcgcaaaaccatgcacccacagcccaccattcagtcgcattttagttggataattacgaccataaaacatggccagatgtctcgagcacgcggctcaacaagatactagaatgtctaatactgcaattatcccatcgactgagctagtggtaattaagcatggctaagcatatagttctagctaggtcacataagtaacacaagctagtcgattcattacccaaggttgacaaagaatagatatcaagtaaacatggcacaagcgagcagataggtaatacccggatcccatgtaattagcaaaacatgcatatttatttgtaaacggtaaaacatttataaattgggatcaacatgctcaaggggaatatgtgacttgccttgcttcttcacttggatcttctaaactcttttcctcgcgaccgcggacttccgaaacgacggaaactacacgctggcacgcaaaacgaggaaaaactctaataaaaaccaaggaaacagtacataaaaactaaacaaacatgtagagctcaattttagatgaattttgcaagttgaatggctcaattcggagttcgaatgaattagatatgaattttagaagttttgagccatttaaatgaatttctataattaaactcgatttattgcgcaattattaattatttttacaaaggaaaaggatctcgctgacgtcagcaaggggcagccggcgccgacaggtgggtcccaggcgtcagcggctcaagggggctcggtccaccatggaccgggttcacaagggcggtccaccgcccgtccacgggatggacggcccagatcggcccaagccgatcgggcggctgaggagagcggtggccagcacgggcacagccggggctggcccgaccgaccatagagggcggcggcgcgcagtcaccggcgacggcgggcggcacagggagcggcggcgcgcagcgcgggaagcggcgagaggaaacggaggcagtgagggagagggaggtggcggagctcaccgaggggcacggcgacggcgagagcagccggcggagggaggcggcggcgctccacaggtcgacaaggaggaggggctcccggcggcggaaggcggcgaccgggcggcggatggggaagagcgggacgcggcgaagctggcgatgcagccgatgcgtcgcagcggcggccggggtgaaggtgaacggcgaccggaggcggaaaaaggcggccggtagggtggtatggcggggaggtggttctggtggtggaggggaaaaagggatcggtggccgggcttgcccgcgcggcggcgaagccggctgcggtggtggcagggcgcgggagcggctcaggtggcgacgacatgcggctggaggcggtttagggtggtggcgactcgggtgcatggtggaaggggagttttggcggaggtttgtgcaaaaggagcggtggccgatgtgcggcgaggcacggcgaagccggtggtgcaagcggcgaggtgcggcgacggctaacgcggcggcagcggccggctgaaggcggtgtgtggcggtagtggctcggcctcgcgatgggaaggtggttccggcggtggaggagggagatggagtggatgccggggtgcggcgaggcgttgtgatgctataggtggcggcggcgcagcgcggcagcgacgggagcggcggtggcgggcggctggagatcgccggcgagcggcggcgaaggggatcggcgtggagagctcggtagagggcgtgggggactcgggaaatcggggaaaaaggaagaggagtccacggggattgattttatagctcaagggggcgaggagagggccggggagcggcggatttcgaggggaagtggggcggcgtcgtgggggtgtggcggctcggcgtggcgtcgattcccgcggggagagagggggagtggggcgggatgtggtcgcgaggtggaaggggtctcgggtccacgccggttgggacgaggggaggtgcgggatcggcggagggagtgggcggcgtgggcggcggttggagctggccggaggttggggatgacaggtggggtccacgggtcccacctgtcggcctgagtgagaggggaggccgggagggaggaaaagcagacttgcgccaaaaaggggaggcaagccgggccgcgggaggggaaggagagaggattttgggccgagcccgaaagggaggaaggggaagggagaatgggccgagcccaaagacaaagaggggattttaatttcttttctttttattttaattgattcgatgaactttgtgccattaaaattacttcttgagctccgaaaattcacggaaaattccggagagtattttagggcacaaagaatattgcaaaatattcccggccaatgatttttaagggaaaattttaattctcccaataattcacttgattaaattgcttaactttttatttaatttctaggaaatgcattattaaatgatttttaatcccgaacgaaaatcggggcgttacaggacccgaagcacagaaggccttcgaagatttcaagaaactcctcaccgagccaccagtcttagcctcaccacacccgcaggagccgttgttgctgtatgtatcagccacctcccaggttgtgagcacagtcttggtcgttgagcgcgaggaagaaggccatgtccaaaaagtccagcgaccgatttattttgtcagcgaggtcctagccgactccaaaacgaggtaccctcaggttcagaagctgttatatggtattctaattactaccaggaagctatctcactactttcaaggtcactcggtaacggtggtcacatcatttccactcggtgatatactgcacaaccgcgaagcaaacggacgtattgctaagtgggctttggagttgatgtctttggacatatcattcaagccccgaatttcaatcaagtcccaagcgttagctgattttgtcgccgaatggaccgagtgccaggaggatacccccgcggagaacatggagcactggaccatgcattttgacggatccaaacgactttcgggcactggagcaggagtggttttgatttccccaactggagaaagattgagctatgtgctttggatacatttttcggcgtcccacaacgtcgccgagtatgaggccctccttcatggactgcggattgcaatttccctagggataaagcgtctaatagttcgaggcgattcacagctggttgtcaaccaagttatgaaagagtggtcctgccttgacgacaatatgatggcatatcgacaagaggtacgcaagttggaagacaagttcgatggactcgagctcagtcacgttcttcgacacaacaatgaagccgccgacaggcttgccaactttggatccaagcgtgaggcggcaccctctgatgttttcgtcgaacacctttatacgccgacagtacctcacaaagatactactcaagttgcgggcactcatgacacagctatggttgaagtagactggcgagagcccctcatacgatttttgacttctcaagaactcccccaagacaaagatgaagccgagcggatttcaaggcggagcaaactttatgttttgcatgaagccgagttatacaagaaaagcccttcaggaattctgcaacgctgcgtatctttagaggaagggagacaattgctaaaagacatacattctgggatatgcggaaaccatgctgctgcacgcaccattgtcggcaaagcttaccggcagggttttttctggcctactgcagtgtccgatgccgacaaaattgtgcgcacatgtgaaggttgccaatttttcgccagacaaattcatctaccagctcaagagttgcagactatcccgctgtcttggccgtttgcggtttgggggctcgacatggttggcccgtttaaaaaggcagtcggcggttacacacatctctttgtggccattgataaattctccaagtggattgaagctaaaccggttgtcacaattacagcagataatgcgcgagacttcttcatcaacattgtgcatcgatttggagtgcccaatcggatcatcactgataatggcacacaattcactggcgaagtttttaaagacttttgtgaagactttggaattaagatttgttatgcctcagtggcacaccccatgagcaatggacaggtggagcgagccaatggcatgatacttcaagggattaaagcacgtgtttttgaccggctaaaaccctatgccggcaaatgggtgcaacagctgccatcagtactttggtctttgcgaactacacccagtcgggccacaggccagtcaccttttttccttgtctatggggcagaagcaatgttgccgagtgaagttgaattcgagtctttgcgctttcgaaatttccgtgaagaacgctacgaagaggaccgagtggatgacttgcaccgactggaagaagtccgcgaagcagctttgattcggtcggctcgatacttacaagggctgcgacgttatcataatcgcaatgttcggtcccgtgcctttttagtcggcgacctggttttgaggaaaattcaaactacacgggatcggcacaagttatctcctttatgggaggggccgtttatcatctctgaagtcacccggccaggttcctatcgactcaagcgcgaagacggtactctcgtcgacaactcttggaatattgaacatcttcgccgtttctatgcttaagcttatcattgtatttccctatttttgactgtcaacatcaagttttcttcttgccgttgtcagtcgggggctatcatcataataatggagtgtgattttttatcaatttaatttgcttacttggtctatcattgccttgtttgattttttctacttagtctgcgaggactgaaagtttttaatagcttctttgggttttaggctcaacaaagcttgataaaagcttttaagaaatcaaagacttggttagaactatcaagcacagcataaatacaccagtattgtacaaattgagcctccatttgctacgtttacactcagtcagaatcagtcctttcatcatcagagttattattgctcggctgaaggtcgttgttgcggaattgctctacaacatcacttgcaatcttgtcagccgcactttgagcattactgataagatcaagagcagcttcttcacttgtcccgtctgcaaagccatcaatggtatcaatttcaatcctcgggtacaaggatttggtcatcgccaatgccatactagctcccatacttccagctttcttgatattcttgaaatatacatccggtgcaactctcagcttgtcaaagatttcggttgcgtcaagtgcactcggaccactgttattaaggaacatagcttggacgagtggtgtagcgacattggcgacttcgtctcttgctccttcaagcttcttgatcttaccaaccaggacgtcaaactgagcttgagatttgattttacgatctacaaaacacatttatgataagaatctgctgcatttagaagagagaatttcagaattgtcatctggcagtaccttcaacctccttcaaggctgagtccctttccgcagccagttctactttgtctctttttaaggcttcaatttgtttctccatttgagtcatcctggtggcttgcgctgtttgaaatccaaatgtttgaggatacagttatgacagcataaatgggacagatctaggagactaccttttgatgaaccactcagctcgaagtttgaatcctggagctgagcaattcgctcccttaattctttctccgtctttttggcgtgctccttggcctcgtgtagctggctcctaacggcttcaagagttcccaaatgagggaccagcttttctaaggttgtggtcttggcctcattgcgaagatggattctctgcacggtggttcatgggttagttttgctaacgagaaaacaaagtcatcaaaggcaatcacctagaagacttacattcacaatgcgagtagcttctccaagtactttcttcagctggcacacttcctcatcttctttttggcgatttatgacaatgccggaaacttgagagttctcgtcccaccatttgagtaagataggaggacgagagtcatcagctgcctttatgcggagaatttcttcttcgtcgccgcctagtggacctgatgtatttccaagacattagacgaacaagctggagttattcagaacggcatcacttgagaagatgagttacctgaggatgtgcctggctgagcgtgaggtgatccttgctctttatctggagacccaatcactgagtcattaccaacttctggtccttgagaagttgtctgcgctttagcttcaggaatctcttgatttagatctacatccgactggtttccagtcgggggctctcgggttgttgcagtttcagttgctgccgactggtttccagtcagcggctgatcactcggattggccttgtcgtccgaagcttgggcgccagtcggctgactttcggcagtcggttggctttcggcagtcggctggctttcggcagttggcttagcatctttggataaatttggctctgtggcagccggatcaggttcttttccagttggatctatatcggacggtttcctgcaaagtgtcctttcgatattcagcgtaatttctatgagagaagcatgtcgaaataaaatggtaccgagaggtttatacctggaagatgttctaatctttggcatttgacggccagccagttttttcctgggcatggtatgctttgggggtttattgggcgttcctttgtccccagatttgttgctgtcatcatcttcgtcgtcattaagcaccagctttctcttgcgagaacctgtctgcccagccggtttagaggtttgaggttgcgggtctgacctgattgtcggccctccgcttccctgaacggtgtgctggcgaggagatcggcgttgagcagttgggggatcagatttcattaatacatactcctgaatgagatgcttccacggttagctcactcaacatgaagataaaattatgttttggtcatgagttgaaggtttcagatacgtacctgtggaggcggattgaatgcattatatggtacaactggcagctgatgtgagtagctgacgacaatagcatttgagaagattttatacattctctccttcatgattttaaagtccagagagtctgggtcttcacggtttggatcatgcttgccgtcgaactcgaatgctgtgcgggatctctctttgattggagctaatcgacacttaatgaaatgccgagtgatttgctctccctgtaagccttgctctttgagcttcagcatgcgttccatcagttctaaggcttgggcagcttcatctccgatcggaagagagttccaagtatcttggtacaccggaggaagacaagagtactcggggagagcaggctcgggattttgaatataaaaccagttggcgtgccatcctttgtttgaagtcttgaaaggcatagagaaatacttctggctcagagtgcccctcagttgaaatccagccccaccaactacgcatggtttgtttttgttcggttgaggcttaaggaaaaagattcggcggaacagagcaaaatgaggtctaatgcccaaaaaagcttcacagacatggacgaaatttgcaatatggactatggagttcggattcaaatgatgtaagctgattccatagaaatttagtatcccacggaagaacttcgaggttggaagagcaaatccaccataaaagaaatgagagaagaccacgacctcgtgtgtatcgggggttggaaaagcctcaccgcacgctggccgccacccgatgatctccttggcagggagaacgccgtgcgccaccatctccttcaggttctcttccgtcacgtcggacggcgcccattggccttcgaagctttctttctcttccgtcatcgattttccccgaatgcactgatttgattcgagggatggcttgggagaggtgaggaattgaggcggtggatcacgggaaggattttgattactttttgaaggtggatttgagtggaatggtgaaccctaatttgccggcgcagctctgtactgtagcaaggagtggggaaaatggcgagagttccggcggggaagacgaagcgtcgtttggatctcgggttttcttgttaagggtatcggaggtgcgaatgggcctaggcctgaacagtacctcagcccaatacttttaacagcgtggcccattgtgttccttagggacttaggcattctttgcttcggcaatttatgtacacaatagtgttgcccaatgctgataaaatcctttttacgcggtcatataattctttggaattattgcgatgcaaattaaaaggtgcctgacagaaaggcgttatgctgtttttgtacgcttttttaggctacaaaagctgtctgggttaacttggaatgacttgtttttatcatagtcatttccttggtatgatatatacctatttccattgtggtaaatagtcatagcctaggctattagacttatttgttaccataatttttataatatttggtgggtaatctttagagtttttattcggatgcctgtcaagtgtgttcattcgtgaacctttttagagtgtaaaccactcgggttctttttattatgactaaaaagcagtcggctagaatgcctctttaggcgtcgcgtatgcttttgtcatgtgatgcgcgattgtgctattattttgttctcaactatatgtttagtttgttaactaatcacatagttgggggctacacctaattaggtgcatctattcgatgcaccatattctttatcttttcgccctttacagtcttcgtcttcgctactcggcaggctttggcatgacaagtctgaagcactcggattattatctttgagaaggctatgatggttgactgcaaaggtctcgggggctactgtggagattatggatatcccatatctacacggcgatgatatttgggctgaatataggataccgaatatgtatagaatatcttatttgtatctcgggtttgtttcttaacttgtacaacaaggaaacaccttgagacttagtcggttacgactgtattttgtctgtgtttgcatattccgttagggatatgtattatcttttgtaatacggactccttcccatatataaggggggtccgagtgcctctaggggcagatgttgattttctctaaatcatacaatcaataatacactcggcggattcatccccggacaggagtagggtattacttcttttataagaaggcctgaacctgtataaatcctttgtctccaaacccatacacttttctagcttgatagccacccccttttattattgccgaaatctagtttcgacaatgcgagtggttgcttcctgtgtttcatcgatgaccttggtgcatggtcttggtgcatggtcttagtgccactgctatgtgggccattcactttttctttgttagaaccaaccatagaacttgtttatgcgagaggcttgtcctttgtgtcagcgctcttatactgtttacatgcaccgttggaactgatctacggtcttctatgtatgttttgtggcccctgttttgcttttagtctcttctatgccgtgcattgtgttcacggtgtatgcgatctgatcgctacctgcagctccactaactggaagcatccttacactattggttcgtttttgtctaggccacatcacaatagcttgcacatggtctatgcaccttgggtctctgcattgtggggtaccagtttttgtgtgtgctggttggaccaccagcatttgtccatgtcttaatccattgtactcaatcatatactgttgcatttcacttagttgagtgatagttctactagaggcaaaacaattgtttcactgctactgggaccgcctgtcatggtgttgacagttgtctatttgttattggtgggtacctttctttcacggtggatatgagattgcttttattttttaagctaaaatagcatattggtttcatccttatatgtatcgcctccaatattgcttgcttccttcctcttgcttctcgccttatctcactgcattcagttgtgtgttgttcaccgatttcacaccactgatcgacctattatcattgtgctaaatcatccattactaatggcagggtaataattggatttaaatggatttcttcttttttatatgtgtggattcaattagattcagattgtctcctttttgggtgtgcctgatctgtgcctcttcattattgatcgtttaatactagtttttcacaggggagaagatttgc

SEQ ID NO: 1801 - DNA, 2549 bp, Oryza sativa
  Intron number 1 from transcript LOC_Os02g12840.1 (locus LO C_Os02g12840) derived from phytozome v7.0 (chr-ID Chr2; po s 6771494 to 6774042)
gcgccgggaagatccatcagtcaggcaaaggaaaggtatatgctcctgttttcatctcatgaatccttttgctcctgtagatatgtagaaatagattagaagtaaagcaaaatggaaaaaatcatatgcatatgaatctggaatggaggttgattttgggggggcatctggtctttgatgtttcctgattgattttgtttgtttgttaggagagtggagacaaacatcagttgtatcttagaacttgaattatatatatatgaccttatgggggccatctggtctccgatgtttccctggtcctgaatcctgattgattggggagtgcatagacaagcatcacactgatagaacaagaattatatatgtatgaccttgtggggtaccataagatccatctggtattctggtctgagatttttctgcccatgtccttgtttatctggctgggggaagtggagtaggggttggggttaggatggtgatgattgctacatccaatatagtccctatggaccatgcccacatgacaagttaagcctcttgaccgttgggatcgagtggcgcggattgacctgattggacaactagggttaagtcctcacttaacaatggtttctgcaaatagatttgtggggtttcatttatggtttttgatagattttgtgaggtttagttagagctgtttaccctcccaacttctggaattgaatagccagagattgatccaactggactactaggggtgaggtcctcagtctccacagatagatctgtcggattttgttttaggtttttcaatatatttgtaatgttttatttatggtttttctaggctatggtacaaaagatgttgtgctttggttggcttggtatgtcttcactgttttgtttgatgttgccaatttttgctgaagctatctatcatcaatgatggatgtttactacgtactgtattattaccgacactgtaacatactgacatttgtagatgtattcatcattagcttattcattgagttctggtttaggaatatcacaaaaaactgtgcattttattatctcctgtctaacatggtgcttgccattcaactttaatataattgcacttagttgttttgacagcttagaaaaactagtctaaaatgttttcttgaattgcaaaggaaaaatggggtgcatatccattttaaaagagcataatgaccactttatattgatgtctttgtcaagatttcacaaaatcagataatcctattgttctgtagttgtgccaatattttaaaacatatattgaaatttacaaacagaaacaatgcattctaaagctttggcttgcttgcatgcggggcacagcttttacttgtttaccattaacggtggatgctagtgttacggtgttacctagacatggacatgtatccgaatccgactcgggtttagttgtccgacttggctggagcaagtggagtgggggtggggttaggatactggtgattgctacagtcctaatatactccctatggaccatgctaacatgacaaatataacctctcgactgttgggatcaaatggcgtgaattgaccaaattggatgattgggtttaagtcctcatgtgagggtggtctccacaaatagatttgtggggttttgtttatggtcttttaataaattttgggaggacttgtttaaggctatttgcccaccctttcaaattgaacagcgcagattaacccgactgggctattattagtgagaatgtgagatcctcacatcacgacagtctccgcagatagatctgtgagattttgtagatatttttattatagatttgtatggttttatttaagctttttcgggctatggtaccaaagatgtaccttggatggtttggcatgttaactgttttgtttgaggttgccaatttttgttgaagctagcctatcatcaatgagggatactacctactgtattactgaggctgtgatatttctagatattcatcattgagttattcagtgacaacttagagaaactactataaaatttatttcttgtataaattttaaatggtcgctttttattgatttcttttgtaaagattttgcagaatcagttagtcctatttttctgtaattgatccaatagagtgaaatttgcaatcaacacaatgtttgccacataaattcagtactacggttgcaagctatatcattgcatctaatatgcatttaaaagcttgggctctgttgcatgcaggagcgcagcttttactcatataccattaatggtggatgctagtgctacctagacatggacatgtacggtatccgacttggatttagttgtccgatttgcacccccaaaaaatgtgaaatacattttgaattagacacaattgacagaatcaaacacagatgcacacttagagaaaaattaccctttacggtagtacatttgttttcttctttttaagtgtgtggtattgatttccccctttcttttgtcatcaggtgcttacataggtgatataaacagaaaagtgtac

SEQ ID NO: 1802 - DNA, 7429 bp, Oryza sativa
  Intron number 1 from transcript LOC_Os01g21890.1 (locus LO C_Os01g21890) derived from phytozome v7.0 (chr-ID Chr1; po s 12282300 to 12289728 reverse strand)
atagaaagggaagggaaggtcttgacatcaaagaggtgcatatccttccatgcatacttttatttatttatttatttatgcttgtttgcaaatgaataatggattgcgatcaatggttgttgccatgcgtaatataggcttattgacaaaatatcctgttgcaattgagattgctttttccttagtcttgggtgtccactccttgtgccacacctaatttttttccgtcctccgccagtggtcccaccctgcctctacctctgctcttcctgcgctgcgcgcctgcgcgtgtgcgactgcgtgttcgcatgcccccctgggccctggaggctggtcgcgccgccgcctggccggagcggatgccgcagccgcagctctgcgtcctcctcacctcacccagtcctcccgcgcacgacgcacatcgcggcagccgtcgtccgccgatgagatcgggatggggattggcggattgggggagagtggaggagatggtcagatggggaaatttgggtctagattcaagacacaaaacaagacgagcctcgcggacacgcccacgccgcgtctcagctgtcgctcgtcttctcacgatgcggcgtcgccactctctctgactcggctgctgctctgcacggaggagtacgaggggttcagcgggcggcgcgaggtatggcgagcgccacacctcgccctaccgagccctccgcccctggaatagtataaggaggctgctgaatttcaggcagccatgtaggcataaaaacatgtcaactcatccatgtagattgtaggctcctgaagtttaggttgcatttgcaattatgtatcattacgaccatcatcattaacctgtaggttctttactctcgagcctttgcgcacacaaaacttgtataaatctttatctcctagcctttctagacaaggatgaaatgctcagtgctattagaatatttggtagagttcaagatattgcgttataatgttgagagtcttataccaatcttcataataatatactgattatttttttgtacaaattgatgagcggatcttcctatcaatttttacatggctctaacatttgtaatagtaatatcggtgaggatatgttgcatatatactagcagttctaaagtgcatttgcaatagctcctcacaaaacataaatttggaacacttaaaattttcaaaattataaacacatgttttatcgttagttgacaattaattacaattttagacacacaaaaaaaccctgaatagcatgaattgaaagaagagagaaaattaaggatccttctcaacaatgcgatctgctatgttgaattggagcaattctgtgcaattcatagaaattcaaataatttccataaaatttcatgaaattcgtactaattaatagcacaaatttcatactaattcatcaaactttatacaggggctacagagcgagcgcgccagttggcgcgctgcttttctagttagtaatgaatttaaagaatctaaggactcttaatgaatttggttcatcacaaactttggactgtgggttgattcctaggaacctcaaggtgctttttgcatattgatctctcactgaccaatggaccccatcctttaaaatctggaaaataataaatgaaaatacccaaccaaatatatgtttaacagaaaaatgcacgaacttggaaaattcatataaaatcaaatatagctcattttgaggtgattctagtttctgtagattcacaaagttatgaaatttactatagaaacataaaacttgacactcactgtacaaactttgcctcaaaaatttgtctaatataaatcatacataaaacatacacaaatttataaaatacatataaaatttatctcaactcattttgaaacaaactcaaattctgcaaattcatcatcatgcactctctggttaggtgaaataaaagtaattacttgctttgcatcaaatgcctttaaaacaattgcatttaaaatgatgagatttagggaagctaaactttaaagatttatctaaaattcattttaactcctttttgagtaaacacaagttctgtagaatcaccgaaatatgtatttccaatttgtaaaataaaagtatgtacttactgtataatcaaagcctctaaagatttatgtaaggaataaccaacatagagcagcctttaacttgtaaaatttgtagaaaattcatttttagtccaaatgaaatgaactaagtttctatagaaccagaaaatagtgagcttcaatatagtaaaataaaatatgacaaattttgtacaggttatagctctaatctttaaatagataacctaggagttaatcacctagtgatggttaagcaaaaaatacgtgtagaggtatttaaaatgcactctagctatgaataaaccaaaataaaacttgttaggaccagtgaagccatagttccatccccatccaccaaaacttagaagaacttagctcatgtaataacctctaagttgttatgttaagaaaactaacaaagaacatctccctactttatagaatgtatagcaaattaatacaagccctaaagttatgaactaagattagattggttaaccaaattatttattttatacatctcaaacaaagtagaacatgttctgaacctaaatctccaaagtcatgtacacctaaaagttatatgcctagaacacgttataacttgtgaaccacataaagaattcataataactctaaaaattgtgaaacaaaatgtgttagtattaaaaaaacacatatctacacccctgagaattcaaatctaataaaaccactttgcaaaaatattttgtagcactgcctaaacctatactacattataccgacgtaacttctaaaattaataacttccaaataaaaagagataaaatagaaattctttcatgtaaattcattttagatcagaacctatccactgtgaacaaatcatgcattttagagcattttggattttctcctatttcggtgtttaattgtataacgtgtactttatatagattattgtataacggtgaagaagtgacttaggtgctaacaattccaagagcaaggcaaattctcctcccatcctttgatcacattgaatcccatgatttgaggaatgaaaatatttgtttgcaaagttgcatatgaatttagactatatcggtatctttaaaacatggttatggtagttatgtcctatttgctgcatattctctttgaataattattactctcactgattgtaaccttagaaatggttagagtactttctaagtactcaaataggtttatacatgcttatataaaagctctatgcttagtcatgcctagaaaatgctaaatgacatcatgatcactttgtaaatgagaatttgggtaatattttcactgctggacagaggtgaatagctcttatatttgtgaactaaaatgtgttaaaatgtggttttagacttgggcggtaagtggtgtcgagaggcccactcagaggattagagagattcgaggctagcccggggcaaggtggatatgctcgggcccctgcctggacccctagccacttgttctgcactctagggtggcctctgctcctcagagcagccacacatctggggcaggtagcgtgctcggggcaccagatcgtcccagggcaacaaggacctctccccttgctaattcacatgttttcttgttactttgggtgagcttctcgaatatgtcgttgacgaacaagttctcaatgatcacctccgtggaatatgcatcgagcaactatctacccccttagcaccttgaagatatagatcttgtagatctgtatcctctccttggcaccctggagatttagatcctgtaggtctctacactctcctcggcaccttggagatgtagatcatgtgtatctcttgaagatgtagatattgttcgttccttgaagatgtaaatcttgtgtgtctcttgttgtaacatacaacctcgggtgccctaaagaccccggaggaccggggggctcccgttcctgttcctctgacaatatgtaagggtaaaacaactcattgcagattttgcatgggagggtgatatggtatgtccatgtggcgattttaataagtccgacgactatattagcccatatgactaaattgatgcaggagcgaacctttgggatcacgttggttttctccattatcaaatactattacgaatttagaccaattttatctaagaatatatcatattcaaaccattcaccttatcttaaatcaatgcaaggtgaagtgacttgatgatcccatttgttgttgtttttttttaaaaaaaaatgataccatctgccacaaagctgaatctttctattcttgttgaagttttgacagtagattttttttaaggaattgtacttatgctttcatgtagttattaggacactagtatattctcctttgtttcatattataagttaatttgaacttttttctagtcaaacttttgaaagtttgaccaagtttatagaaaaaattaataatattttcagtacaaaacaaatatattattaaaatatattcaatgctatatttaatttaatgaaactaatttgatgttgtgggcgttgctaaaattttctaaaattttggtcaaactcaagaaagtttgacttaaaaagtcaaagcaacttataatataaaacggagggagtagaaaagagaagaatacatgctattatgcttgtcatatgcctactaaaggatccagatgaatccacttggcatggcataaagactcagtttagctgtttattttggcaacttaaaatttaagtaaatcttaatctgggacacatcccatctaaagaaaaattaagagcatcctgtagaattgattccttcactatatgtaaatcaatctctctggcaatactaaaacccctataggtatcgatcataggtgtcagtttatttaaaaccagcacctatgaacctttttctaccttcatgcgataaaaaatatagaaccggaacatttgagaattgtaggtgccacttctagagaaaaaaaaactataggtaccagttttttaaaagaacgtattataggtgtcggtttcttaaaaaactaataccagtctagccgatccgagccagcaggatgggagcgagatattttagcgaggataggagagcgccttatcctatcctcatctctctctctcgcacatctctttctccctcctatctctcgcacatgtgcctgcctcctgctccctctctgtcttccactcctcctcccccttcctcttcatccatcacccctccttccctccctcttcctcatccctctccgtctgctgcccctcctccccttccctctccgtattttctttccgcccactgcccctcctcctctcctcggcggcgccctctcctcttcaccacttcctccctgctctcactccccagtcgcgctggatccgatcacctagaggtcgggggccaccggatccgagctccttgaggtcaaggctcgcctgatccagccgcctctgacctcaccaccgtggaagcaaatgatggcggcatctcaaaggagatgaacagcaacgattcggggaatcggcgatgacggcggcagatccattgggacggtgtgtccgatatgttgaacatgtaattgtcgtccatggtagaacatgtaacggtgaattgtttgttctggtttgtgatgtatttgttcttgtcttcttggtttgtggtgtgcttgcttgttgttgatgtgttcatatactcttctgttcttattgatttccaatgtagatggagaaattgcagatggggctaggaatcagggggctgagaatcggatccggcctacaaagatttttgattgaataaaagtctttgtgattcgaattgtgcaatttaattaagtttgttcgttggaaccattatggaagtccaataaaaatctacaatgctcaaaagttgctccaacaaagaggattccaaatattccttttatatccaaatacccaatatgaaatcagggaaagttaaatatttagcactattgggtttagcaatattctttggtttgcacatctaaaattgccactagatatagggacttcttaactgtttgtctcttttacctacatgaagtgctagcatgaaaagcaccgtgggacccacaagtcagtctctccctccccttcatcttcccctctggcacaggcacataactaaaaccatcaacatgccgcctctgccttctcctccccgtagcacctccaccactcaccgccttcttccccagccttcgacaaccccgcacatagctcgctccgagtcacaccgaggttggagtgcctacttgcctgtctaagccctagctccgtcacaccgtgagctatgcctgcctgaacctgcctacctgcttgcaaattctccaccacagtatcgacaatataccataatccttgggatagcagcaacatccatattttgatactccatatatcattagtttcttatgtaaatacagtaaccaaagactacgccatggtggcgtccgaacttgaaaccatacctacagcttcaattgacaatgtcaatacaccgcactacttcatcacgccctactagcctacttgaacatgtgcactctgataccagttattggtgttgaatatgtttccaagcagggaacagagcaagtactcatcacagtgaagctaatgtttgaaagttgtacagcttgtgtgctagtaacttactggtattcctcggtataaatggtcaaacggccctgggctcgatgggttttggcctagcccaaacatggtatggcccgaatggtgtcaggtccatgccagcccgacctaacctttgggccgtgcatgggcctcttcctgggcacgatgggccagctcggcacagcacgaaccaacgattagggagccaaaatagacttactttagccatataaggcatagcccaatagatgagcgaggcaaaatagacttattccacaaaagagcacagtgggcttttgtgtcttcgggccggcccgacacgacctgagtattattgggccatgtatggaccattggtggagcccgtgagtgagcacaacctggcccggcgtgtaggtcgagccgtgtcggcccaacttgggcttggtcatgcgcgggctaggctagacggcccatttggccatctatgtttttgggtccgaaacatcagtcacttacacatacattaactacctatttataggctatactccatccgttccataaaaaaaccaacctagtaccgtatgttaacgaccaaatttggtaaatcatgaatcaggttcaacatcggaatcgaagtggatccggcagaga

SEQ ID NO: 1803 - DNA, 1688 bp, Oryza sativa
  Intron number 1 from transcript LOC_Os03g42750.2 (locus LO C_Os03g42750) derived from phytozome v7.0 (chr-ID Chr3; po s 23804589 to 23806276 reverse strand)
ccgcctcgccaagccccgcgtcctcgcgctcaccggtcactgcctcccccccctccctccttccttctttcctctcttctcgctctgctgcagctttgctggtttgttcccctgcttcgattcggtccacggtagctgatttggttgctcggagagggatcgctctggtgagactcgagaagtagtagtagtagctgatttggttgctcggggaaaagctaccatgtttagggagaaaatgtcacgctgccctaatcctgtctgatcttcgctgccgagatccttgctcggatttgggattcgagtttcgtgatctggggagcttggatcgagcgatggcctgtggttggacttcggttgacagcctagaccactaggggactatacaaggtgttgttttgggcagagatcctttttttttttacttattctatgcggttagctgtaaattgctaaaattagtaaattttcgtgcatgcgccactggagctccaaatgagaatctgccatactgtgcaaggacacagaatcatcagagttttggaagctggagctgatcctatactggaagtagcctacactacaattcgatcctatacttgaagcatcttgtacaaggaacatttcttttagagctttcatcatgcggtgttgagaccgaaatttcgaataccggtacacaagagttaatgcatggattgataggaacgtctaagcatctcaccagaccagtaatcgttggaatcgactaggtgttggagctgattggacaagtccttgtgaactgtgattagatggagcctggagttgatgacagttgttagagatgctcattaacactacaacttgtaggatgaaatgttcatcattgtcagaaggatctgccattacttgtcataaaaggggctaggaccgacgagctaattattttttctcccatatggatggacctgggccaagtagttgtcaaatccttgcatgtccaagaccaaaactttatccctggtttcttttgaaaggcttcattggctaagggaatcagaagccttggccagtatagccacttcagacttttaacttgaagcttgcttttatttttgggaggcagataagataatcaagatgtttaaaacttatgaaaccggaattgatgtctctcaatgtaatgatgcacgttagtgtggattgtggaattctcaaagttagcgtggattgatgaacattgctgtgctgaatcgattgcactgacttcctacttctttgcagttggaatgttggatttagttatctgctctatctggtgggcaacactctataaatacttgattattagaacaaggaaaccttgacattttgatattgattactctgattgttttggcatggtctaaatgaagtgaagagttaatctttggttatctcaaataaacatgatagttatactttagaagtgttgtttgccaatatgttataaacatattttaaacttgttagtacttaacagtggagatttgctagtatgtctgtttgcaagctggtttggttgacgtataaataggacttaattattgtcatgctagatttaagacagtattcgtttctatgtaaagcatatgcttgtaacaactgctaaacagtaacaacttcacgcagttaaacaatcgacaaaaggtgaggcagccaaagct

SEQ ID NO: 1804 - DNA, 1416 bp, Oryza sativa
  Intron number 1 from transcript LOC_Os01g55050.2 (locus LO C_Os01g55050) derived from phytozome v7.0 (chr-ID Chr1; po s 31653803 to 31655218 reverse strand)
cctccgagcccaagcgccccgatccggccgacaaggtattacttcctcccccccccccccccccgccctctctcggcggcaacccacctttgatccctcgtgaatcgtggtgcgtgatgatcgcgtgcagagctctgaccgaggcttattgccgcacgatttcgcctcagcggtgtcgtattcccgtgaatctattcgttcaactgaatagtgtggaaacggtccgatgaaaattggctgaacagcactgaatagtttcagttttttttttgcccaattgtaacgttcacatcgatttggttataggctcgttggtactatgcagccatcgcttgctatttcattttcttcctgacgaatgtgttattccagctatgcctatctgttgtaattcagagaatatcatggatttattttattgtgtgcatcaaggtttatatggtacctgctatacttgggattttcaggtcttattttgattaaacccacactgaattcctgatgtgcagtgtaggtttgtcttgaatggtcaatataggctggagatagtcaatgagaaattcatttaataagctatcaattgaaatattcagtgggttatttctgtgagggccactgcacgagagagaaagatgcctataggatatagttttcagataattttttctgacattctgttgaataagatttatgcaagtcatgactatttgattcacacgtaacattaataccgcctatagttttcatgttcagtaaaatttttgttacatataaattagtgaccatgtgtccaggacattgctattctaggtaaggaacacaatctaatgtttagagaaaaggtggattgacgttgattttgtacttgataagtttacctatatgttcagtctgtttagggattattgtcttgcttatctatttgttcagtccatttatgtttagagattattgtctttatgggtgaatgttgaaagtccattatagcattctggaaacttctgatgacacccttggtgttgctggaggatggtattctatgttctaacaggtgaaatataaataatcacctgtgggttggtgtgttttgggatgtgttcttggtaggagggactccttgatccctcctatgtaaatatttctttcttcttaatgaaatgaagcgcagttctcctgcatcgtccaaaattatataaataatcaaattaagctattactgacatagttggagagagcattacaaaaatctgatgtatttgtttcttaaaaaatgaaatttgtcaaagatatctgcatttttacaagcaaaattaatttaatgattataatagtagaaatccttgtgctatattcatccctcattcttgtacttgtgcagcaggactttcacgacagtagattggggagaccatttgg

SEQ ID NO: 1805 - DNA, 1756 bp, Oryza sativa
  Intron number 4 from transcript LOC_Os02g35970.1 (locus LO C_Os02g35970) derived from phytozome v7.0 (chr-ID Chr2; po s 21603951 to 21605706 reverse strand)
cttcgtgcgcgtcgtcaccgccatcaaggtcaaaggtaattaacacaacacgattacaaacaatgtttatgctttttttgagcctgcatttctctacaatttcagccagtgggatttccgaaaattttcaaaacgaacttcttgaattttgaaatgatttccactgaatttgaacctaaaattttctggaaataaaatgttttgtaaattttggtgaggattttttatacccaaacttgagtggattcaagacgatctgtcttcttaccggagttctattctggacgtacatatctagagatttttgctaaatctaaatcagtttacgacaaacttcaattaattgaaaaaaatcaagtgatctaaaattttatctggttcaaaaaattgtcaagggtatcgaagattgcaaaatttcttgagataccttcaaattattagcatgcttctgcttcttcgacctccacttaattgatgcggctctcgcaaggacgtggcttcgaacaataccgagcctttttagttgataaatcatgtgtaatcgatggatcgacggataagatatgataccgcggtaccgtctccttatagcaatggcttctctttttgctatctctcaattgccgtcagatataaagaggtaaattaatgggggtgaggcttctctaacgtacgtcagagggatatgcttcaataacttgtgggcctatgacggtggcggtgcacctattatgggtacatgtccctctgactttacgttaaagaagccatatccagattactggtaggggccaaccttgtccactccagctaacacatcattttgagtgggcaaaagatcaagtatatatataattttgggtaactacatggcaaatcatatattttccattatatataccatacaacatgattaatttgtcttgcactaaaagattctccggtagggaaaatagaatttgatggcaactcaaactatatctacaagtgttcttgaatagtgaaacagtgaggcatcatatgatttgcttaagcagcaatctaaggggttcccacaaagttcctttatagccttccccatcaaaattaatcctgatgcaatttatccctaccaaaataaattggattaattaggattcgacaagcatccttgcaagcacaggccccatgaaagctcaggataaatatgtgaacctcactaaatttcaaatttcgattggaagtatacaagtgagcatttctgctattagaggatgcaaaaacatctactactaaaagaacatttctacgggcacctaaaatggcctttgcacgggcagaaactgcctatggaaatgtagggtgtatttggttaccggtgacactttactacaactaagaaggtagtgacagccacaataaattgctagccacaaaatatagcaaagttgacaaaaaaaattgagcatatgacgtgtagaacatactattaaaaaaaatgtgtcaaaccataacatgaacctaataaactatggctgtcaaaagtgtggctatgaagtaaatagaccattagtttgaaaatatggtgtatccacgataaaactataatggctacagttaattattttgaaaaaaaaaactgcacaagataagtgcatgctaacaattgtaaaagatttaccccagacattaacaaatttgcacggtgcatatacagtagctgaactgtttcaagaattccatcaactaaaaacgtaagtttttttttttgacaggc

SEQ ID NO: 1806 - DNA, 1244 bp, Oryza sativa
  Intron number 1 from transcript LOC_Os01g35830.1 (locus LO C_Os01g35830) derived from phytozome v7.0 (chr-ID Chr1; po s 19845844 to 19847087 reverse strand)
ctctgcacgtcggtttctgcgctgccgccaagaaggtcctcctcctctcttagcacctagggtttcggtatggaagttgttgtgtagataattggtgttgaaatcttgcaattccagatgagatgtatgttcttgcaatgttttcttatttacatgtactggctgcggtttcaattttggtaggaacaccatcttcaagtggttatttagcaaacatttgcttgtggagagccagaaattggccctatttgtgcaactaattcctttcttgtgtaactaaggtttgctttctttgctacaggcatttgtattcctgttcttggtttcggtgcagctgattagattgctctgctaacatctgagtgaaacaaatcttgatcacatgttgaaattgttaatccagctagggattgtttattagtttgccgattcacagtacaaacttggaaagagctattgggattagattagacattgaatataatgtataagcttgtatctctgatcataggattctcttaaataagaataggattctcttaaataagaagtatatccagaggaacgaatattgtttcaaggcattgttattcttgctagtccctctttgtatcaaaagccttctttgccactttcagttttacttctgacactgaatgattttttttaacgaatatcatgttttagattattagttctttgtgatgattatcctgagaagttaactgtaactcattgaattttaggaatctgtaataaagaaaattctgggcataatttgtacttctgcaacttgtaatatgataagttgtatatatcttggattttaaataaacacacatatataatctgaaactgtgttggttgaactagctgctcttctatttgagattaactgaaagctggtggccatcatttgcaatgctgttggccatgtgttgatctgaatttgaggatacaatgatctgatattctgtgaatttgaggatagagtgctgaatatacattttttttcatgccacttaggtagatcgcgcattgtgttttgatttgtggttgttcgtgtagatgtatcacctgtgaaattcttgatttgaaatctgtacttttttctaactaacagttcagttatctgattgtactgaattggattagtctgtcttctactggtttttagctgctataataaatcagtaaaattaaataaattgttgcttatacaggatatcctgtcatccgtcacc

SEQ ID NO: 1807 - DNA, 1518 bp, Oryza sativa
  Intron number 1 from transcript LOC_Os07g12330.3 (locus LO C_Os07g12330) derived from phytozome v7.0 (chr-ID Chr7; po s 6955253 to 6956770)
gcctggattcaccggtcacagaagagaaagaggtaacatcaattatgctttatgccatgtctcttctagtagaagataaacttttcagttttcaatatgccttatagtatgaaattcagaaaacaattaaaggaggaatagagagatgctcaaacagtgtgtaatgatctgtggaacgattatatataaatcgtccaggtagcagcctctctttatcttagataatgattagcagaactgcaacatgggaactatgcagaactggtgcatggtaaataaacaaaagtttatgaaagaggtaacttcattagaccatgtctcttctagaagatactttttgcagttagtcaataactcaatatatctgatataaatttagataaccatcaaggaggatagagagagctcagatcaaataatgtatgatgatcagtagcattattatttatgaaaatttggtataaattctccttatcttgtacaatgtctaaaagaactggaccgtgtaactatgtggaactggtgcatggtaactacaaaaagttcatgatgaaccataagaaaaggtttggtgggaaattacaaaaatagtcagaaaggcaacaattatgaatcggaagcaaataaggaggatatagaaatgctcaaataatgtgtaatgattcttagaatgactatacaaaatctttgataatgtctagcaaaactgcagcatggtgcatggtaactaagaaaacttatgacaaaatacaagactgaaatttcatattgtactgggtcaagtaggaaattaaaaaagaggttgtaaaagtaacaattagggattgaaagcaagattgacatgtactgaatacgaaaaccattggaaggcactaaatcatgcattttattcaaggatcagagcttttgggcctgtccacaacctccagctcaaaatatcattcttaacatcactattgatgtactttctttgtgaatcatgtgtctcattcttttcacatctgtaacaaaccattattactactcaagttagcctcaagataggacatttcacctccttttgtcaatacaatcacatggttttcgagacattagttgtaccttttttctagatttaaacctgtcactcttcaagaactatgatagtcactggtgtgaattagtaacaaccaagccagctttataattctaaaattaagtagctatccatccctttcattctcttggcaaaccagagatatctttgactttgtttcacatcttatcttatgtgtgtgtgagtaacatgatgcaatatatgtgacataggatcattggttccagatgcaagacatgtttttttaaaatgattaaatgatgttatgttttgtaatataaaatattataaaactacagtaacacaaaaaaaacttgagtttctaaactgttggtgttctatgatttagtgttcgacatattatcattttagtgtgtaatgaccagttttgtgtatgtttcttcatacagatcgtctggttc

SEQ ID NO: 1808 - DNA, 2815 bp, Oryza sativa
  Intron number 1 from transcript LOC_Os05g11720.1 (locus LO C_Os05g11720) derived from phytozome v7.0 (chr-ID Chr5; po s 6653085 to 6655899 reverse strand)
tgcgccgaggcgtggttctccgtcaggggcaacaggtactcactcccatccaattccgatcaacctcgatccatttctttgtacatagaagaaagttaatggatgatgaattccttaatgataatttcaagaaaaaaaattgttgatgagctttctttgtttccctacaataatttaaatgcaatcttcgttctccatgaattcaattaaattccaattgagattagttctaaagataattactacatttattcgaaaagataaaaatcgttatattttgggccgtagatatattgtatgttataacattttggtgaaatatgtaaatggggtgtagagttcgtcttttctttttcatgaaaaaggactcattatttcaaagcgatttaattagcatgtgctggtgaggttcatgtttctgtcgaaaccagtttgaagtacgtaatatctaagttatttatttatttatatggccataaattatgacaataatgggacggaatcttcgctgtagtgaaaaagaaagaataaagccgtgcaatcatggtggaataatcccttgcaatcctagcatattacctataccaactgggagcctgggagcattgacctggcatcagttgggtgcatcttgattggtccaacaagcaattttatttaatttacaagttagggtgctattaatccaaaaattagctattattaatagctactccttccatccagaaaagttacacctatttcacatttgagttttttcaaataagttgttcatatttgtaatctttatgcattcaaaacttaaatgaagagataaattaaatattttattagaacccaagaaatcatctataaatactctttggttgtatgcttgcattcactccttgattttgtaacatccaagatgatttaatttctccttggtcttattgtcaaaagtaatatgtgtaacttttgtggatagagggagtagcataaaagaaaactacccttttaaaatactgatagaaaactacacatgtgaattattgcaaacactcagcaccatgtggacctaagtatcactcacactgttcaagaacttatctttgatggtgattcatttctttgtactagtagcaactttgaatttgccttgcttgtagcatcaatccaatctttttcctctagcactgttctgcttctacaatcaaaacaatggattgagacccccctgactttaggggttaaagtgagaggtgaacagtaccatgactagggttttcccagccatccgatttgtaacgaacgaacgagatcgatcactacagtatactacaatatataataaacaataatgcgatatagtacaattcatgttttatactgttgctactgtaaataactacaaaaataattgtttactaccatagcgattgactcatggtactgcacgcctatatttttaggctctaaactaaggtgatccggatccacaatacaatgccttcgtttcaaccctcttaggtccgaataagtgttgcctcatttcataaggataaaaaatatcttcaactcgagtaacaattcacatttatttttttatttcatcatatgctttatacgtagttcaataccatggtaattcaaacacaaatattttaattcatagaattcagctatatacaaattcacaatttcaaacaccacaattcaaattcatatttatataaatggaaatgataaatactattattaaatgttgaaaataccaatagtcataaaaaataccttgctctcggccggaggtatggtcgtcgagggattgggatcagatgcagtcctaactgtaactgcactttagggactgcacaagatcttgtccattcaatttttcaatggaaagtccagattaaatgctacagtaggcttgccataataatcttgtgctggattttccgaatgaacagtgtcttatcaaatttgggcctttggatttgcatcctacggctattgtatgactgcctaagttgtagtcatactaaagactgcacaggaaccaaatccgtcgtcgagggacctcagagtcctgatggtggaggcaggaaggggcaatggacggaggaggcacattcagaggtgggggaagtagctgggtgactatcataggacgctagggagggcggtagaggtaggaaggacggtggcatggtcactgctagagctcgagaggccaagaagcttgaaaggaataagagtgcccgagcttgggagccaaggctccacctgagctcctagtgtggagtcgaggcggtgaaacggtactagttgagcttaggtggcattgtagagatacggggaagggtggtgatcatcatggatacaatcagagtagggccaacggtggaacgatgactacatggagagagtaacggccggtggaaatgtcctcctatcaccacaactatggatggggtctatggtttaaagccctcaagtttgagggcagctgaggaagggggtcttattttggggcctcttgtgggatcttactaaacctttttattttctcaatctccaaaaaatatttgggggcttcgttttaaagcatgttaggtagaatcaagggccttgcaggaggaggttttgtttaacggcattgttgaatatatatacctctaagcacgatttgtttctaaagtataacgtttttacagaaaaatacatatatttgtcaacatatataagcggtacgcaaatatttacaatattttgcatggaattcacaaaaatggcaggcgctgcgagatctgcggcgagacggcggagaaca

SEQ ID NO: 1809 - DNA, 2455 bp, Oryza sativa
  Intron number 3 from transcript LOC_Os02g17080.1 (locus LO C_Os02g17080) derived from phytozome v7.0 (chr-ID Chr2; po s 9767247 to 9769701 reverse strand)
aacttgcaagtaatcatcaacccctatgacatctattatctatctatctatctatctatctatctatctatctatctatctatctatctatctattatatactaaaagtccatgaaactttctaaaaacactctcaaatcgccatgtggcttccttaaaacgctcctaaatcgccacgtggcattataataaatagagaaaattcgaaccattgattttcacttaaaataggtggacccattattttgagccattagatttaagctaatccgtatcctctcatctccgaacgccgcgtacctcctccccgcacgcaagacgtagatagctaggtacgcatctactcctctccatctccccttttttctccaaggttgttaagctacaaagcataatttgttacaataagttagagatatggagcctgcaggagctcgctgtgcaccatgcatgctacctaaattataggagtgatcacagtgatacacttgaactacacattcagtttattatacacttgaactactgttttttaatcaaatcaacggtttaagactcatattagttagctatattttggtggtaaagaattattacatgttggtctttttcaatttatcacatgcacgtatcattttcatgagtcctccccaaaattgaaggaaaccctaagaatttccttcaatatcaagtctaattttttattcaaatcggtggatcaattatgatacaataaggcaatagtaactaattaactacatacgtactctctcctcctcctctcctctctcattcaattcttcattcttctaatttttaactaattagcaacttaatataaaaacaaaaaataattagaaagctaaatgattataattcttaagttatatatggtttttaagttcaacaatataaaagtaaaatatattacttcacaaatataaatatatttagtaaaattaagatctatatatgataaatatccaatcaatgttctttaaaacatcttctaaataattcaagatctatattacccaatttcactgtaaataatacgtcatttgtagacacctatgcgtgtcaaccaaataaaaaaaatcaaacaaactatatcaccttaaatcatcgtacattctcaatagagcacttacatgtcacgtgttatgtcttaaattaaaaacaaaatcttagaaattatagaaaaacacatttgaccaccggttatgaattaaatatgtatatccattattttaaaccattagatctatttttttaaaaaaaatcttaagccgctaggtgttacattttaataattaaaaaatattattcgaaattttaggaacaaaacaataaatcatcggtttttatttaaatcatttataaaaactaggaaataaaccccgcccccaccccccaaactttaccccctcctcacatatgcacaaacacaacactacccgtcccctcatcccccggctcgcactttcccctataccctccttgatatttttataaccaataaaaagagaaataatcaataatattaaagcatacatatcttttgagccacacatctgattctaatataaattgctctatttataattaaaccaacaatttaaagatccataacgcctatattttaaacttaatttttcactaaaattagaacaattatacatgttcctattttttaagtgcttagatattattgactttcatgacattatgagttcctctgcacattattgtatatatataagccacacaatgtttgcggtttatagttggttgagaagttacatttgtaattactaaaatgttcagactcatattgactaggtattttcttttttttaaaaaaagaaagatactatagatcacacatatattagggaagggagatctacgatatatctttagaaatttatatataaatatataacaaattgcgtcaataaaatatattcattaaaaaataaaatatattcattttcaataatagttatttaggatttgctaaaaaaaagaaagaccctaaacattttattaaacaagacaaaacatcacatgtttccaaacaaattaaatctaactcctttctagataacgaagagatcatagataattgtttatatgaatgtattaaatattatgtattttaaaagctaacaaatagattggaaaaattatctaagcaacactgatgagataagttatggataaacagtacttatgaaatgacaagtgtcatctggctgatattctgccatcttatatatttttttcaaacataatttatagtgcatgcccgcgcgatgcgcgggctaccttcctagttctaaaaaaaaaccctataacatgagcttgttgtcttgcttcttgcatgatattaatgaactaatgagtttctggtgcagaattacccggagttatcactgtgaagcctaacact

SEQ ID NO: 1810 - DNA, 2787 bp, Oryza sativa
  Intron number 1 from transcript LOC_Os07g41330.1 (locus LO C_Os07g41330) derived from phytozome v7.0 (chr-ID Chr7; po s 24759021 to 24761807 reverse strand)
ccgatcccaaccttcgagtacaagtgaagaagaaggtgagcgacataagaaagttttcgatcttcaattcatatccgattcgatatcctcgcgttttgtttcctttatttttgttcgattcggctcggatttagggagttcgtgttcgtgccgcggaaggatacgcgtgttccgtctctgatttgtttttatttatttatttatttatttatacctcgtgtccagcaagaaggttagtagtttcctatatccgaggaagcaatttggtcgcgctatatatcttctctggtgtttcggcgcgtaggtttgagccctagagagttgttcgctcgcgttctccaattgattcctttgtcctcgacgagtcgacgagcaagcaatcgattcctccggtggagctatccgggttaactacaatgcatcaggctcgtccttcaatggaaagggatccatgcccagatcgcatccttgatgatattggtgcgtcttttggcatgggtgcagtgggaggttctttcttccacttcgtcaagggtctccgcaactcgcccagtggtgcacggtttgctggcggcatggagggtgtgcggatgaatgcgccacgtgttgccggtggctttgctgtttggtgtggcctcttctcagcttgtgattgtgccctagtttctgtgcgtcaaaaggaggacccctataattccatcattgctggtgcggccaccggcggcattcttgctgctcgtcagggcttacgtgcggttgctcgtgcatccctgcaaggcgcggttctcttagcccttgttagtagttttgggatcatgatgaatagattacctgatgctggatcaatgccagtcaacaagactgagacttgtaaggagccacaaatgccagagacttttgatgtgcctagcacaccaccaccatcgtttgagtacaagtagaatcctgtaaggggatctctcagctgatgggctttattttactactgttgatgctcctctgttcaggcatatctcttttttaagtgcctttcgggtggttgttgcccaatcttgaaaataaggacacagtaaggtagatgcaaaacatattttctatgtggaattgtgctatacgtttgtttgtgatgtacacaagaactataagagtccatctttcaccttttcttgtttgtccttagttggatgtactgtttaatgatgcattcgctgtgatgtttgtcctggcccttttttgttaatatttagcgaagttcttaggtgcaccatgaggtcaagtgaatttaatggcccccgttgttttgaagctatagttataaatggaggtttatgttacgacttattattacactcgagcacaattgtttgttttctgcttctactgctctacaaaattctgttagttgctgaaatctagaaggatgtgttctagacttctatgcatgaaaaggaaccttttgttgtgtaattcaattgatattttagttgcttgaagcattagtttgttgtagaaggtcttacttcttgaagttagcatgtgttgcaggcccatgttcatctggaagttgggctgatttgtatttgtgatgagttttattttacatgtccatctggaagttgggctgatttacttctttaaggtgcatgttagaacacgtgtgcaaaatcaaagctaagccatctactagtaaaatcaacgtaaggaggatgcgacctcacaagtgagcaagatgagaggtaaggtgaaaagaagggaaataataaattctgggaaggcagcctccaaggcccaaacagcctacaagagggaggacagttctcctgtcctcccacagcgctaacgccatctttgtcatccctgcaactcaccctcttgctgttgcttctctgtccctcattagctcctccactgctcttcccctgctgccttcttttgttcccattcatggagctaaaggctgctgttacttctctattcttttttttcctttgtcatgttcttctcgatgtgatattttctgccaggcaccaacaagtgctaagctggcgtcacctttcttcctgtctaagcttggtaatcctattcaaacatagcaggagtggagccattgtcacattgatgtgaaagtatgaatcatggtttggctgaaattttggttatttaggcctagttatttcagttcagtaagtattcgctcttcttgatccattaggtccctgttcatcaacttcataaatagcaaagctggtgtaaggacaagccgtcaatggtagatactgaaattgaaaattgagctgtttgctgtgcttaaaagctatgacttatcttatgttcttccactataccagccaccgagacaatcataggatgatgggataactgttcattgattatatatttactgatgctgttcttttcagtgggtgtatctatattacttgtgaagtcaaatgtgcatgggtgagttaacaatcccagttgtaaagtctagaatcagaagtagtttggccagttctgactgcgcttgatagccataaaagatgtatgggattttttttctcaattttattgagattctctgttagaaaagattgggcgcatggttcatctctgtgctgtttggttatttgctaacattttcgcttttgtttttttgctgcggtgattatgcatgcatatgttagtcctgtatgctttcaatttcgtagttgcacctgtcacgcatcatccacaaatcactgttcatgagccatgttctgaactatgtctgctccacagaatcgcagg

SEQ ID NO: 1811 - DNA, 2389 bp, Oryza sativa
  Intron number 4 from transcript LOC_Os10g32300.1 (locus LO C_Os10g32300) derived from phytozome v7.0 (chr-ID Chr10; p os 16880753 to 16883141 reverse strand)
gtagagagcttgatctttctgccaaagagttgcaggtaaatgtgctgccaacactacttccaactgtagtaccaccaggtcaattttatattaaaaacctatcagaataacagtgagctctgaatgtgcaatagttaagttttttgtacataatgagcaatggaagaaatcaactagtattgataatcttgtgcagcagacatagagtgtaaatcctcatatcagggtaacacaaggtcattgtagggaaagatcctcctataattgatgctactagttgccaacccgtgccttgcatgggttattattatttatagtatatataaagagtccaatgaattccaaacttatagcgtatagaatgaagagtacatgccataaacaatttgtaattatcagttttgaaatttgaaaattaaaaataaagtttctgttcaaaattccaaatagatacaactatatatttattaattgtgacttttggaaaaactgattctaaataatccatggcatctcctatggcatttattttacagaaattatgaatataatatacggtcagtcagtatgataggaacatgttttgttggaagttatatgtaaaaaagttatattatagttccaaaaaataaaaactaatacacacacacacgcgcgcgcgcacacacacacaccctagttaatgtttcttatgtaattttctattttttgtttaataatttgcaaatttggaattaataagtatatagttgcacttattaatttttgtgttggagtcttaatttagaatttatttcttgataagtattgagttgtacttggcttggagcatcttttatagactttccatgatttatattttccgattcataattagcaagtactgagttgtatatagcttggtttggagtgtaagttatatgattttcattatttaataaataatattaaaattaggaattaatcactgcatatttttctcatggtgcagtttcaatatattgttttgattaattcaatatttcaaacctagtaattaataagcatcaacttgtactctattcaccgtcaaagcttaatgtaaaaaaaatgaaataaagaatactcctcaggatttccgaaggtatgctttatttaacataaattctcaatatgatctataggctgcatttattttattagcaatctattgtttaagagaaaacatgggtgtaatgataaaaatccaatgacatgaatatcaacaataagccacggtttacatatatgcatatagataaacaaacaggatatatggaaaattaattattagttgctagtttgtatatagaaaaatatagatctgtatatgttctgttcaaaattaatattaaataactctatttttatagtgaccatggaaatttgttatgttaatcgacctaattaactgaacagcacacttatgataaaacaaatcattcgctcgacatatatgatccattatgtcaatcaaaataaaaaatcagctgtatctcttgaataggccccatagaacatacataatacatcaaattaagaattcaatacctttatatattgcatatcgatgcgggcatgcagcgacatagatgaatcttgttcggtgtatcgtactcaactgtcggacatggccatatggtgtcttgtaaatttccttttccacgtactaacaggaaaccattaccaaccaagggtcatcacctggatgctgtcgcatgcgattattctgcttaatcaatccattaatatttaacatgatcaggcattagtcgtaactacatgcacatctgcttgttttctccgcagcctgtaccgaaaggattggacgatggcatgagaaatctacatatgtgcacttaaataccaaatagtcattgatctggatgagggcaaacctggagcatctcaaatcgctttcttgagttccatcttttttcgtgcctcatctcacagatagaatctttctatagatgcatctgatcgatctcccgttactatctgcccgcctattagatgggccttaccatggcccacgatactaactaagttcagatatattttacgatctacagttattatagcacgatctatttaataaacggttagatttttctgattaacgtgagagcttgtagaaagtgcccaattagtataggtatagatagatagacttgttcataggagttactgaaacagtttttctttgtagatatgaatttatagttgatgctgcttgtttcataatggatattactgccatgtcctatgtggtgacctcttaattgaaaattttgatctctgacctgtgatctgtcagatggactgaaacctaccataaatctttgctaggaacaagtgagaagtggtg

SEQ ID NO: 1812 - DNA, 776 bp, Oryza sativa
  Intron number 27 from transcript LOC_Os03g11470.1 (locus L OC_Os03g11470) derived from phytozome v7.0 (chr-ID Chr3; p os 5919560 to 5920335 reverse strand)
tttgatatacaggtattaaaacactacaccatgtgcaaattttctaggctaagctaagctcaaggtaaagatttttattactgttttgagtgattcaagatgtctgtgcccgtgacttccatatgttccatattttggcttgttgattcttttgatttttagttctaggcaatagcaatgacaaactgattagcaacttagtataacgagccttcagcatctcaaagctgacaccaaatcgttaatagattaccttttgtcttgtcatttgtgatatttcattgtgtatcagctagaaaatgttagtctagcagtatttcaggatgatgtatattgttgaacctgaggaatagacaagttgtatgtaccttgaacttagctggacagattgagaatggttggaattttactccttgccagttacaggtcgaaactactctattcattattcgaattcaacctattgtgtcaattttctgagccttcttgaatttttagcaagcaacatagaggaatgtgtacaaagtaaagcaataaaaaactgggaaaaagaactaccagtaccactaaactaagctttccgtgccactgttctggatgattctgttatttttgtcttttcaaaaataactgggagagttagatacgttgttggagatctagctcaaactgtgtgcttagctggtccactgatccttattaaccttttttatatgtactgatggggcgattctttttcaggagacgaagctaattttggtgtcggattcctacct

SEQ ID NO: 1813 - DNA, 4918 bp, Oryza sativa
  Intron number 2 from transcript LOC_Os01g64030.2 (locus LO C_Os01g64030) derived from phytozome v7.0 (chr-ID Chr1; po s 37189826 to 37194743 reverse strand)
attcttgccctagctcattcgagacataccatcaggtaatcctggtttttggacttgaatactatttttgtatagcctcatacaattttaaccttatgcagttcaatcactgtaacgtgcattgtagagatggttcatattgcctcatttttcaatattttcctgtgaagtagttcagtttttttctataagtaaaatatttcattgctgcatcagatttcatgaacttaaaaatccaacttttgggccttgattgttatgcttagattctgacgcacagttgctttcgtaaaaccctatgtagggcttcttcagctcctgctaattgtgacgtgatgttagcccttggtgtaggtttgctattgatatgtgctgttctttcagtcgttcagtgcttacttgaaggcccatatagtggaggggaaatcaatcatttatctccttaggacagcaatgtagcatttaccactcctcaagttgataaaatttcactcttcccattgccttttataggattcactacttttaactgaatttccctttcacccacacccttttttcttcattcacttttttttgcctttactgcggtgttaatcgctttgcttttatatttcctgtcccttgtgcacatctaccttgatgagaagggcatcattttgtgatttggccaggtcataccttggttgtagcttagttttgtttctggtaataaaatatttgagcttaaatacatcttgtggacacaaaccatatgattgatgctcctaactcataagtcatactcataccaagcatatctggttggttgctgcattacatggtagacaaaccttggaccttgccaggttgtattattgacttattgtcactccctctgtccataaatataggcctttaatcattattgtcttacaattcccgatacaatattttgagtgcatttttcatgatattaagagagcaataaatgaatatctatacctaattaaaaaattcataaggtttccgttagtccgcttcgtccgtcatcgtctttttgagtccgagtccgtcttcaaaaatacccaaatcaatcaatcaacgagacaacaaaaaacagcatgaaaataccaaatttaatctggagctcatgaatttgatcccatgaaacctaaacccccaatccgatccatctgagccaagacaatacataaacgattgaaaatgaatcaaaaatccacttaatcacgaaatcaaaaatccaaaatcatccaggaaaattaaatcacaaaactaaattaccgacgccactgctcatcggagccgaggacgccgctgccctgagaccatggtggcttggcgggcgcgccgccgtgcgccgcgaggagggtgccaccgccgaggcgctaccgtgaagagggtgccaccgctgtgctgaagaacagggtgatgctattgaggagaggacgccgccagccggggaaagggcaccgcaggccaaggggaggacggtgtgagggcaccgcggctgagacgccggctgccaggggaagggcgtcctggctgaggggcaggggaagtggcgtcgcccgtgggggaggaggggaagcggcgccgccggttgggggagagggagggcgtgctggctgaggggtaggggaagcggcgtcgccggtgggggaggaagagggggagcggcaccgccggttgggggagagggactgagggagggcgtcgctggctcaaaggaacgcgcagcagaggagataagctgggcgggcggaggagcgaagtcagggaaaagagaaaggaaagagataaggtcagggaagaatcgagacgcgtgtgcgaaccgctctcttctctcggctccgcgtggaggaagaaaattacgtaggactgtagtcttaccctcatctgaaagacttgattcctttaagcgacacatgtccggcacgaatctcagagcaaagcttactccctcaatcccctcatctctcctcttcggttctcaaatcttttgctcccgatgagatgtcgagcttggggcggccccccatgcggcgctattcgggaattagagtcaaggcatcaagctagctcgtgctgccgtcctactgctagaaagatatctcatgatttggaagaacccgcgtgcttgcgttataaattcaaatctacttcttgaactgcaatgcaaagagttgcctcatggtgaagttattcaatgattagattttgtttgctgttgagtttagtttgtatagtaaatttcactgataatctttgttggtgattgaacttgattgagccttcaaggatttcttcgtgcatttttttttaaaattacacagtacaacgcagacacgcacaacgcacgcacactcacccctatgaacacacacgcgcaaaccctacccctatgatcatcttcaaagactgggtcggcaaatcctggagattgacgaagtcggtgtaatgtgaaataggttgttttgaaagaaaatttacctactgtctagaccttgacaaaagattgtgtatgcgcgcaacatgaagaatattctcttaaagcgcttggatcatgaaaattatcacaatcttagttttctgtagcaacgcacaggctttttttctagtgtatatatatatatatatatatatatatatatatatatatatacatatatgtcccatatatatatatatatatacatatatatataatgaaaatgtcctgcgagacaatccaatgaattacttttgtgtagtaaatccatatatttcaatacatattaacggtcaaatgttttccttatggacaccacagtggcctacgtttgtggactgaggatgtaaccctttagagatgagaaaatataagatgtcctgaattacttttatcttggcatgatagcaactagcaagaagctacaaaaatcagtatctacacaatccaatcaatcattcctagcttatgtttttttccttgattggatacttaagtggtggtagtataatgctttaaaaatgtagtattgtattctcaataaaacattgtgtttgttgaagaactgcaataaggaaaggacttctatcttggtgtagtagcaactagcaactagtaagcagctacaaaaaccagtgcatatacatttgatgttcatccagcccttccatgatttgcttatgataaagcaggctaccaacctactgtagcgtatgtttgttaccttgattgaatgcttaagcggcaatgatagaggacttctatagatgtagtgactgtatacccaataaaaaatttctgtttgtaaaaggactgcagtaaggaaatgtgctgatatgtgcaaaagcatatatgtgctgatatgtgcagttttatctggcaatgatagaggacacacagtcaaagcatttttttgttgtttcagttatgttgctaattatttccatgcaatgtgctgatatgtgcaaaacaccactattcttttttatttttatcattatttgctaccttattgattcctcatctcctccccttaccttccatggccatctggcaagtctgcaagttaggatcacaccattctaggatgaagattgacagataaaactaagaaaagtagtaaatgacacacaaaagtacaaagtaccacagattgactatgcttcgatgcgtctggttgtttgattcttcactatttttcctagggggtcaatctgacttctctgtacgtagagcaataatatccacagaacaacgacaaagaaaaaattaggcaccacatcctaatcacatggttttaagttacaatgttttagcaattgaaatctatcaaagtagtacttatcctataagtacttgtgtatagcgttgacattcgtatggtcattctatattatttgatgcatatggagtaatattttcacaggaggatatggagacactgcattagttttcctgctatgtagtttttttttcttgtgtgtgtgtgtgtgtgtgtgacatgatctgcatggaccaggaccagtatacgaggtctcttaatggttgtgtctaactggtgaatgtacttattattcaacttctatgtttcttagttgattaactcttttagacttgaagtatgcatgtgattgcagttacagctttcagtatggtagttaaatcttttgagtgatcagcaaaccattatgattcttctgacaagtaaagaggctgggattgaatgattgatcatttcaatgttttataggctttagctttaggaagtaataatttgtttggctttgaaattctatgaccactcatcattcttgaataagttaaaatatctgtaccgtaggatctatttgatataaggaaaataaaattattagatatatttgattccatctacctttcgcgatggcatgttcctgaagcactgattctgcaaaacaacggtggcagacaaacccgctcttttttgtcttttatcttttcctttttctggggggactacctagcagttcctgttatcaactgtgctgcactgttttacatttaaccgtgtatctgaaatctatcagctcctagaaagaactgttgtgtgccagttctgggcttgaatcttcactagtttttggtgatactgatagataattgctttgcttccttatgcatcttttatgatgaatacttttgaaaataaattctgaatgatactgatagttgtagctatatttttgttgtaaatatgtctggtaggtgttaagttgttagcctcatcaccatgcatctgaagaaagatatgttaacacagatctcacgctcctccaatatttttatctgttaactgcgagtataattttattagcatcacttattatttaccccaaacctaatggatttttaggcatcttgcagatttgcttctcatccaacttcacg

SEQ ID NO: 1814 - DNA, 11447 bp, Oryza sativa
  Intron number 1 from transcript LOC_Os07g44499.1 (locus LO C_Os07g44499) derived from phytozome v7.0 (chr-ID Chr7; po s 26566708 to 26578154)
actgcttcgtcgaggtaaaaaaaaatgttttcttattaattaatgtggagattatgggtatcccatatctacacggcgatggtattcgaactgggtaccggatacttaatgtagatagaatatcttatctgtatctcgggtttgtttcttaacttgtgtatcaaggaaacaccctgagacttagtcggttacgactgtattttacctctatcttcatattccgttaggaatatagattatcttttgtaatccggactccttccagtatataaagggggtccgggcgcctctagggatatatgctgatttttcccgaatcatacaatcaataatacactcggcggattcatccccggacaggagtagggtattacttcttttataagaaggcctgaacctgtataaatcctttgtctccaaacccatacactttccgagcttgatagccacccccttttattattgccgaaatctagtttcgacagttggcgcgccaggtaggggtagcgtcaagcttttcgccgatcagtgcaatgggtcccatctccggcatcgacgacctcgtcttccctcccgggcagacgtttcggttcggcagcctcgacttcatcaccaacaacttcggcaagatttctctccttgactcggaatcggaccagtcgggagagaaccggctttcggtcccgtttggattcccgaacgcggctgaaagctacttccagaccatctcaaccgagtcggcttcaaaccactcggctgagatcgcatcttttccaacgataccagatcaagatgatggggcttacccaccggtcctgatgaagctccccgacgatttagcggccgtcttcaccacgacagcgccttcatcccgtaggcctaggcggaagtcggcttcaacaccgatttcgcctagcttcagggaagtcggcgtcatcctccaaccactcggcacggtttcgacagatcagctggatgactacaacagctctcccaccgtcgactcacgtcctactgacatcgtggagtacgatgagtttagctctcgctaccacgacccggatctcgacgacttcgacggaagcctagatgacaactacacccctctctactttggcgttttcatggccaataacgagacggaggagcaacgccaagcccgggagaccgaagagcgtcgccgactggaggaggagcaccaagcacaagaacaagaacggctacggcgcgagcagcaggaccgtgaacggatcgcgaaggaggctgaagatcgacgtcagcgagctttggaagcagggcgccgagcgcgtgatctcatcggccagcaagatgtcgaagggacaccggttttccgcacccctcaacagaatgcggttgccgcgatcacccttctcgacaccctcctcaaccaaaacgagctcaatcgatccgaccacgtcgtcaacatcctgaaccagacaaagaccatgattgcggcgacggtcccagttaactccgaaagcgtccacacgccgactggcagccgggtcccccacttccgatctcatgactaccgtcatccaagcctcagcatcaccggagcaggatccaatcgcaggagcaggggccacgacgagcggtctgttcactcgcctcccgaacttcatagggagcgccgagtggaacggcctcgctcaccacctcgtcgccgccccatcgatcttcgcgacacaatcacacagcgccgagcagctcgaggctaccatcactcgccggatcgccgcgacgacgaccttgacggagttgcagccttcaccgacgacctgcgtcgagtggattggccagccggcttcaaaccgactggaatagagaagtacgacggtaccactaatccagaatcgtggcttaccgtctacggtctcgcaatccgcgcagcaggaggagataacaaggccatggcgaactatttaccggtggctttagcagattccgcccgatcttggctccatggattgccccgtggtacaattggatcttgggccgaactacgcgaccacttcatcgccaacttccaaggcaccttcgagcgtcccggcacacaatatgatctttacaacgtcattcagaagtccggagaatctcttcgagattacattcagcgattttctgaacaacgtaacaagatctccgacatcaccgacgacgtcatcatcgccgcattcaccaaagggattcgccacgaagaattggtcggcaaattcgggcgcaaacctcccagaacagtcaagctcatgtttgaaaaagccaacgagtacgccaaagccgaagacgccgtcaccgcatcgaagcagtcgggtcccagttggaagccgaaaaatacgccggctacgggaggaggtggaagtaacaatcataaggaccgcaagcgtaagcctgaggaacttgttgcaaccgccgctcactcttctcgacagcgttcgcgcgtcaacaccttcgacaagatcatgaactcccaatgcccgcatcatccaaactccaaccacgtggccaaagagtgcttcatctacaaacagttcgcggagcagtacaccaagtctactcggaagaactccgacgaagaacaaagcacgtcaaggaagcaggatgacggcgacaccccggctggatttcaagaccaccgcaaggagcttaaccatatcttcggcggccccctggcttacgaatctaaacggaagcagaagttgactgaacgggagatcaatgctgttcaacctgacacgccccagtatcttcgatggtcagaaatcgcaatcaagtttgaccgctcggatcatcctgaccgagtggtccacccggggcggtaccccctggtactagacccagtggtccgtaatgtcaagcttcgcagaaccctcattgatggcggcagtgcactcaatatcctcttcgccaagactttggatgatatgcagatccctcgctccgagttaaaaccaagcaatgcgccttttcatggagtaattccaggattatccgcaactccactcggccagattactcttccggtcacttttggcactcgggaaaacttccgcacagagaatatcagctttgaagttgccgatttcgagacagcataccacgccatactcggacgcccggcgttagccaagttcatggccgtcccgcactacacttacatgatgatgaagatgcctagtccccgaggagtcctatccctacggagcgacatcaagcaagccgtcacatgcgacaaggagagttgcgacatggcccaaactcgcgagatggcgctagcccgagaggaaatccgactggctgcaaccacggtgagcgaaggagaagtgcccgctgccaagacttcaaaaagtggggaaaccgaagccgcgactaaaaagattcccttagatccttctgatcctaccaaaactgctgtaataggcgccgagttagattgtaaataggaaagcgcgctcatcacctttcttcaaaataataaagatatctttgcgtggaaaccttcggatatgcccggtattcccagagaggtgattgagcactccttacatgtcaaagaagacgccaagcctattaaacaacgacttcgccgatttgcacaagacaggaaggacgcgatcaaggaggaattgaccaagctgttagcagcaggcttcatcaaagaagtccttcatcccgactggctggcaaacccggttctagttcggaagaaaacagggcaatggcgcatgtgtgttgattacactgacctcaacaagtcttgccctaaagatcccttcgggttgcctcgcattgaccaggtagttgactcaaccgccggctgcgagctcctcagttttctggattgctactcggggtatcatcagatccgactgaaggaatccgactgcttgaagacttcattcatcacgccttttggggcatactgctacgtcaccatgccgtttggattaaaaaacgcaggagcaacctatcaacgcatgatccagagatgcttttcaacacagatcggccgcaacgttgaagcctatgtggatgacgtagtcgtcaagaccaagcaaaaggatgatctgatcttggatctagaagaaaccttcgcgagcatccgcgccttcagaatgaaattgaaccctgaaaagtgcaccttcggagtaccgtcagggaagctgcttggctttatggtgtctcataggggcatccaagccaacccggagaaagttactgctatcctcaacatgaaaccgccaagcacccagaaagatgttcagaagctgactggatgcatggcggcgctcagccgattcgtttcaagacttggcgagcgggggatgcccttcttcaagctactgaagaaaacagataatttccaatggggacctgaagcacagaaggccttcgaagatttcaaacaactcctcaccaagccaccggtcttagcctcaccacatccgcaggagccgttgttgctgtatgtatcagccacctcccaggtcgtgagcacagtcttggttgtcgagcgtgaggaagaaggccatgtccagaaagttcagcgaccaatctacttcgtcagcgaggtcctggccgactccaaaacgaggtaccctcaggttcagaagctgttatatggtattttaattactaccaggaagctgtctcattactttcaaggtcactcggtaacggtggtcacatcattcccactcggcgacgtactacacaaccgcgaagcaaatgggcggattgctaagtgggctttggagttgatgtctttggacatatcattcaagccccgcacttcaatcaagtctcaagcgttagccgattttgtcgccgagtggaccgagtgccaagaggatacccccgtggagaaaatagagcactggaccatgcattttgacgggtcaaaaagactttcaggcactggagctggagtggttttaatttccccgactggagaaagactaagttatgtgctttggatacatttttcggcgtcccacaacgtcgccgagtatgaggcgctccttcatgggctacggattgcaatttccctagggataaagcgtctaatcgttcgaggtgattcacaactggttgtcaaccaagttatgaaagagtggtcttgcattgacgacaacatgatggcatatcgacaagaggtacgcaaactggaggataagttcgatggacttgagctcagccatgttcttcgacacaacaatgaagctgccgatagacttgcgaactttggatccaagcgcgaggcggcgccctctgatgtttttgtcgaacacatttatacgccgacggtacctcacaaagatgccactcaaattacgggcacccatgatgtcgctatggttgaagccgactggcgagagcccttcatacgatttttaacttctcaagagctccctcaagataaagatgaagccgagcggatttcaaggcggagcaaactttatgttatgcatgaatctgagttatacaagaaaagcccttcaggaattctgcaacgctgcgtatctttagaggaagggagacaattgctgaaagacatacattctgggatatgcggaaaccacgctgctgcgcgcaccattgtcggcaaagcttaccggcagggttttttctggcctactgcagtgtccgacgccgacaaaattgtgcgcacatgtgaaggttgccaatttttcgccagacaaattcacttaccagctcaagagttgcaaactatcccgctgtcttggccgtttgcggtttgggggctcgacatggttggcccgtttaaaaaggcagtcggcggttacacgcacctcttcgtggccatcgacaaattttccaagtggatcgaagctaagcctgttgtcacgattacagcagataatgctcgagacttcttcatcaacattgtgcatagatttggggtgcccaatcggataatcactgataatggcacacaattcaccggcggagttttcaaagacttttgtgaagattttggaataaagatttgttatgcctccgtagcgcacccaatgagcaatggacaggtggagagggccaacggcatgatacttcaagggattaaagctcgagtttttgaccggcttaaaccctatgccggcaaatgggtgtcacagttaccatcagtactttggtctttgcgtactacgcccagtcgggccacaggccagtcaccttttttccttgtctacggggcagaagcaatgttgccgagtgaagtcgagttcgaatctttgcgcttccgtaatttccgtgaagaacgctatgaagaagaccgagtggacgacttgcaccgactggaagaagtccgcgaagcagctttgattcagtcagctcggtacttacaagggttgcgacgttatcataatcgcaatgttcgatctcgtgcctttctagtcggcgacctggttctacggaaaattcaaaccacacgagatcggcacaagttatctcctctatgggaagggccatttattatctctgaagttacccgaccaggttcataccgactcaagcgcgaagacggcactctcgtcgacaactcttggaacattgaacatcttcgtcgtttctacgcttaactttatcattgtatttccctattttgactgtcaacatcaagttttcttcttgccgttgtcagtcgggggctattatcataataatggagtgtgattttttatcaattcagtttgcttacttggtttatcattgccttgtttggtttttctacttagtttgagaggactgaaagtttttaatagcttctttgggttttaggctcaacaaagcttagcaaaaacttttaagaaatcaaaaactttgcaagaatcatcaagcacagcataaatacaccagtattgtacaaattgagcctccatgtattacatccaaactcagtcagagtcagtcctttcatcatcagagtcatcattactcggctggaggtcgttgttgcgaaattgctccacaacatcactcgctattttgtcagccgcagtttgcgcactaccgataagatcaagggcagcttcttcacttgtcccgtctgcaaatccatcaatggtgtcgacttcaattctcgggtacaaagattttgtcatcgccaaggccatgccagctcccatacttccagctttcttgatatttttgaaatatacttccggagcaacactcagcttgtcaaatatttcggttgcgtcgagtgcactcggaccaccgttattgaggaacatggcttggataattggtgcagcggcattggcgacatcatcccttgctccttcaagcctcttgatcttaccaaccaggacgtcaaactgagcttgagatttgatcttgcgatctacaaaacacatttatgatgagcatctgttgcattataaggagagaagctcagattgttggctggcgttaccttcgacttccttcaaggctgagtccctttgcgcagccagttctgtcttatctctctccagggcttcaatttgctttgccatctgttccatcctggcggcttgcgctgttttgaaattcagatggttgaggatatagttatgccagtttgaactgatgaaactgatctagagattacctttggatgaaccactcagctcataatttgactcttggagctgagcgattcggtcccttaattctttctccgtcttcttggcaagctccttggtctcatgcagctggtccctaactgcttctagagttcccaaatgaggaaccagcttttccaaagttgtggtcttggcctcattgcgaagatggattctctgcacgatggatcatggttcagttctgctaaaaagaaaacaaagttactgaaggctgtcgctcggaagacttacatttacaatacgagtggcctctccaagcgctttcttcagctggcacacttcttcatcttctttttgacggtttatgactataccggcggcttgtgagttctcgtcccaccatttgatcaagataggaggacgagagtcgtcggtcgcctttatgcgagggatttcttctccgtcatcacctgatggtcctgatgtgtttccaagacattagacggatacgctgaggttatttaaatcaccgttgtatgagaagacaattaacctggagatgtacctagctgagcgtgaggtgatctttgttctttgcctggagatccagctattgagtcattaccagcttctggcccttgggaagctgtcgtctgcgcttctacttcagggatttcttgatcagggcctgcgtccgactggtttccagtcgggggctcttgagttgttgctgcttcagttgttgccgactggtttccagtcggcggctggtcactcggattggcctggtcacccgaagcatgggcgccggtcggctggcttttggcagtcggctggctttcggcagttggctcggggtctttggatatattttgctctgccatggctggatcggggtcttttccagatggatctatatcagatggtttcctgcaaagtattctttcagaatttagcatcattctcatgagagagcttaccaaagtgaaatcataccgagaggtcttatacctggaagatgttctaatttttggcattgcgcggccggccagttttttcctgggcatggtgcgttttgggggtttattaggcgagcccttatccccagatttatcatcgtcgccttcatcgtcatcaagcaccagtttcctcttgcgaggacccgtctgaccagttgatttggaggtctgaggttgcggatccggtctgatcgttggccctccacctccctgagcggtatgttgacgaggagaccggcgctgagtgactggtggatctgacttcatcagtgtatattcctgaacaagatgcttccatagttagtcaactcagcatgaagacaaaattatgttctgatcatggtttgaggatttccaatacatacctgcggaggcggattgaatgcattgtatggcacgactggcagctggtgtgagtagctgacgacgattgcatttgagaagattttatacatcctctccttcatgattctgaaatccagagagtctgattcttcacggttaggatcatacttgccgtcaaactcgaatgccgtgcgagatctttccttgattggcgctagtcggcatttgatgaagtgccgagtaatctgctctccttgcaagccttgctctttaagctttaacatgcgatccaacaattccaaggcttggactgcttcatctccaattggaagagagttccaggtatcttggtatactggaggaagacaagagtacccgggaagagcaggctcaggattttggacatagaaccagtttgcgtgccagcctttgttcgaagtcttgaagggcatggagaaatatttttggctcagagttcccctcagttggaatcctgcccccccgactacacacggtttgttcttgtttggttggggcttgaggaaaaagatccggcggaatagggcaaagtgaggcttgatccccaaaaaggcttcacaagcatggacgaaattggcaatatgtacgatggaattcgggtttaggtgatgtaagctgattccatagaagttcaagatcccacggaaaaatcttgaggtcggaagagcaaaaccaccgtagaagaaatgcgagaagactacaatttcatgcgtatctggagatggaaatgcctcaccgtacgctggccgccacccgatgatctctttggctgggagaacaccgtgcgccaccatctccttcagattctcctctgtcacatcggacgccgcccattggccttcaaagctttctctctcttccgccatcgatttttctcaaatgtgctggtttgattcgagggatggcttgggagaggtgaggaattgaggcggtggatcacgggaaggattttgatgcgtttttcggaggtggatttggccggagttgtgaaccctagttcgccggcgcagcttttcactgtagcaaggagtggggaaaatggcgagagttccggcggggaagacgaagcgtcgcttggatataggatttttcagttaagggtatcggaggtgctaatgggcctaggcctgcacagtacttcagcccaatacttttaacagcgtggcccattgtgttccttagggacttaggcatattttgctttggcaatattatgcgcacaacagtgttgcccaatgctgatcaaatcctttttatgcggtcatataattctttggaattattgcaatgcaaattaaaaaggtgcccgacagaaaggcgtcatgctgtttttgcaagcttttttaggctacaaaagctgtttgggttaactaggaatgacttgtttttattatagtcatttccttggcgtgttatatgcctattttcatggtaaatagtcatggcctaggctatttgacttatttattaccataatctttataatacttgatgggtaatctttagaatttttttattcggatgcctgtcaagtgtgttcattcgtgaaccttttagagtgtaaaccactcggatttcttttatggtggctaaaaagcagtcggctagtatgcctatttaggcgccgcgtatgcttttgtcatataatgcacaattgtgttattattttgtctttcaactatatgtttagtttattaactaatcacatagttgggggctacacctaattaggtgcatctattcgatgcaccatattctttatttttttcgccctttacagtccactcggcagattttggcttgaagagtttgaagtactcggattattatctttgagaagactatgatggtcgactgcaaaggactcgggggctactgtggagattatgggtatcccatatctacacggcgatggtattcgaactgggtaccggatacttaatgtagatagaatatcttatctgtatctcgggtttgtttcttaacttgtgtatcaaggaaacaccctgagacttagtcggttacgactgtattttacctctatcttcatattccgttaggaatatagattatcttttgtaatccggactccttccagtatataaagggggtccgggcgcctctagggatatatgctgatttttcccgaatcatacaatcaataatacactcggcggattcatccccggacaggagtagggtattacttcttttataagaaggcctgaacctgtataaatcctttgtctccaaacccatacactttccgagcttgatagccacccccttttattattgccgaaatctagtttcgacaattaaaacacgtgattaataattagttagtaatccacgtgattaatgtggctgtgtattgtctcctttcgattgatcagggctgcgacgcctccgttctgctcgacccgacgac

SEQ ID NO: 1815 - DNA, 2069 bp, Oryza sativa; identical to SEQ ID NO: 1760
  Intron number 1 from transcript LOC_Os01g18640.2 (locus LO C_Os01g18640) derived from phytozome v7.0 (chr-ID Chr1; po s 10496144 to 10498212 reverse strand)

SEQ ID NO: 1816 - DNA, 3911 bp, Oryza sativa
  Intron number 2 from transcript LOC_Os03g40310.1 (locus LO C_Os03g40310) derived from phytozome v7.0 (chr-ID Chr3; po s 22412513 to 22416423 reverse strand)
caagggaggagagcaggggtgggcagcacagccaagtatgtccagcttccttccttccttcttattgcttgtccaatcgtctccattgctcatcgcttatacctgcttagtttcctgacttagggctagaactctagaactgctggttttgactacctcgttttggcttaaatttttatttgcaatgtggtgcaaatgccaaatgcgtggtccagaccccagatcgtagagggtgaggagtcgcaaagaattttgattgtaggacttgtgttttgcctgatctagtaagagtaaacaatggcaaaagtttatcatgatttgtcttttgtcatgacttgtattttatcatgatttgtctttaggttttcactgccatgaattttcttccattcatttttatttgcttgtaacaaattggggttatcaatgtgaacaatgaaaagtttaaaatgttgaagatccttgtttcttcaacattatctttagcatttgggtcctggggccattagtcagtgagacatgagagtggcgtatcattgaactcaatgagtagcatgccctacaaaatttgattttctgttatggaagtagaactatctcatgtgataaaattcagctcttgtagtccacagaaaattttagttcttaacattatttgaatttgcagaatttagacctctattgaggcttgcaatgattactttacaattggtagtagttgatgaatgagtgtgttttaggtgcttcttgaaattctggagccttatatttttctaatagggcatttggatatttaaacatcagcgtttgctaggttaggtcgaaatcacagtgctaaaagtcccaattataatctgtagcactccaaatgtttcaatttgattcagttgtaatggtggcaataagcaactgctgtaggaaagagcaagcttaacttatataagatcatgacccttgtgtcttcagtctgtacaaattacaaaactgtatatcgtagtagatcatgagccttgtgctaatagatggagccaatgatgcgaaattattcctattaatattggatgccgtaagtgttttctaacaatctttgacggactctattgacatgctagcttgggattcttctgagaaaaacgtgtaacactagtagcaccaaaggtgcgtactgcatttgcatgcacttgctgttcctaaaatctggaagtttgaaatgccagtcaagaatggctacttagccctggctactgtttcatcactctattcgataacctatattaggttattaactgttctctgtccaatgcagtctgctaactatgtcagtattataatttcattaattagcctggtaatgtgctcgatttgttttactgggcatttaaattatttcataagttgatgtatactttgaggaaagtgaatacatgattagcagattatacaggaatgtagaaggctaaactttgtgatccctgtgtagtgaaagcacgtcgatactattagtaatgaactattcccataatatagaacttgatgttcttcctccaggacttgcaacccttcacaatgcactggagactgctattcttagagacttgtattgataatatgaacaaacaaataatgcaatgttaatgaagtcctttttaggtcatggtaatcattttggtgattctccatttctcatcgtctgaaaatatcattcaattttaggccccttttaaaatgaaggataatgttttaggaagcgccaacatccgatgagagtgaagacttccttaaccatcagtttattacaagactgctatatttcaagaatagaaatgaacttagaaatttttttatgagaatgaaaagaacaagaatgaccacactatataatttattgtacatactacaatttgtattagcggtgttcctgaatcactgcatcggcgttcacaaaaaaagtagtattatcttgccacagagtagtattgccatgcatctaatgatttaatccagccatagttacttaatgatcaaagcatcacttgtgcggaactgtcctttgtgtatttgaatgttcaagagaaattctttgttccacaaacacttacatcattttaaatatttagctaaataatctgagcaaccatcaagtctaatgttgtgttgcaatcttgtaggtcttctatatctttctcaatgatgttttccttgagtcctagctgtacataccacttacctgcactgaaatcttttttgtttatttcatttttttttgcaatatattcatttcatcttgattttcgttattgcataattgctgtcatgtatcacccaatagactcatatagtagaaggaatcactacactctagggccctttttctgttccacgtgcatgacactgatatggtgacaccactacacgttctaataaaaaagtagtatatatgcattattttcacatcctcaatcgtttgccactgaaataatgtattgcgagctttaagcaaggaaaatgtacctcaaataggatccttaactcctagaattcaatttcagtagatgtctatatgttctagaattctattaaccagagatgaggggagctgaaggattgagatggggttagggtttagtgtcctggccaagtgggttgggttgtcacatatgattcggggatgagtcgaccttgtctcggagaataaaagaagttattttttctgtataatcatccgacatttggtcgataagcatcctaagcgtatcagagctgcacatgtcattagacaccaatgctcaacttttctgaagtgtttgtgcatcatagttgtttagagataagataatgttgagctgtcaggtatttccttaattttagagagaattttcttataggtcaaattccttgatgtaaggatgaggtttgtatctcttttcattaaccaagaagtaaataaaagtctttggtatctccctcctcttccttgcccttgtagtggggctgcccagacggtgcacctgggttgcctggtcaagcaacaccttaattaggcttagtagccccttatccctaccatgcacattacaagtgctcagctcatatttagggaactactgcacagactctgatagatcttctggtgtacttccaatgcttgtgccttccataatttcttgttcaagctttttgtatttttttcaaatcaagacattatttttggaaattgaaataccaatggttgtgtggaattattcagctcctaccacctatattcatggtagcatacaagctttttagtttttaccacgttagtcctcactaatagaggggtgaaaacacttactttgccaaaagttgggaaaattattttcttaccatataatggtgtgcctggttttgccactgaaacccttaagtccctgaaagcattatgcctataccatttgttttttctaaggcttaaaatgattgtagcagaaagcagctgataaattatgtattgtggaacactgctaactgctaagaacttctaccatattactatgttttcatagatgattctaccaggtatactttctgatctggatcagagggtaaaaatgatgtcaaggtattttatacatgttttaagtataactgtttgcttatatactagtaaaccctctatgcctgcagcacgattcgccttagctgaaatcaaagatagcattttgtcgcaatatcatctatataaactctactatatatgagccatcaggacactagatacatctgaacaaattacgaatttgataatgtgattgattcgtactgtatgtcgagcatccctttgttgcttgtgcttttgttagtactgcttctaaacattgattaatggtaaaatgctgacaagtttgtttgtctcttttcagtttgggctg

SEQ ID NO: 1817 - DNA, 2108 bp, Oryza sativa
  Intron number 2 from transcript LOC_Os06g38810.1 (locus LO C_Os06g38810) derived from phytozome v7.0 (chr-ID Chr6; po s 23038257 to 23040364 reverse strand)
ggcacccgggcgaaagcggtacgtgcgaaggctttggggcgaagacataggcttcgccaagcatcaaaccacacatgagaaggcccagcgggccatcgcactctcggagggcttcaccaagatgaatgggccaagctacctaggccaataggggcccaaacatgtaaaggacactgtgtacccctaataatgtccctatcataagggtaaccatgtaaattcccctgtaaaacctaaaccctaagagggagaacctgtaatggggctataaatagccccctagggtcatgtaatagggggatccaaaaaattttcactaagtaatacaatcgtttccctttccaaccacagttgagataaccacgtctttcgacgtgacgtagttgtccattcaataacaatacgttactaattgttacttccattaaaattaacacttgtgacgatgacaagtagggccatctcagtctatgactgggccattgtataaaattatcaaaactcattttctagagtgtcaaaatataaaatatctcgctcaacaaatctggaccacacccacgctacaatgctgagaagcttaagatagggcctgtttggggggagcttaagattttgagaagcagctgctgagaagctagctggtgagaatctggagaagctggaaaacccagcttctggcttctagttcatttttcagattctacaactacagattctcagaatctgggtaaaaagctggactgtttgggggagcttctgacaactggagattctagtagaagctgcagctgctagaagctcccccaaacaggcccatatgacaacctactctcctctttgggctgcagttaaatattgtttaatctgcaacccaaaatcaaccatagcaccaaggtttttggtacagaacacctaaaatttatgtaatttgttggtagatatcaaaaaacgggtaatgattaaaagacactttaaaaaaagtaaattggtgccgactggtaaaccgccatgtataggtgttggatttcctagccgatacctagtaggatgcactgatgaggagaaacaaaggtgccagttttagaactggcacctttgaggttccatggataaaaaaaaaaggctagctcgattcaagtcgatgcttcgagcagctcccgatcaccactgagatcaccatcatcccatcaccccggtaacacaatcacaaaatcaacattgaaaaacaaaatcaacattcaatgctatcctagagtctacagaaagagagaagatcaaaatcacacatagaagaacaccaccgtcgccgttgctgccgtcgttgagcgggtcgcctgtggtcgcagcgatgaatcctccagccaccgtgctcatgatggatctgaccagccccaagagaggaggaggagatgcgggttgtcagtggctgcagtggtgaagaggaggagacgccatggatgaacaggaccatcgacggctacagctgcatcggcggagaggagcgccgtgggtgaagaggaccggtgcgcggctacaacaaagaagaggaggcgtgttggtcgaggcgagcaaggatgagggttgaagaagaggcagacgccgcctgcgctggagagatcgttggcgggcccctcctccccctctcccaacccacgccgtagaggtcttcgagacggagaggtgatgagacttggagtggataatgatggggagaggagggtactcagtggaaacggcgacttaaacaaaaaaagatgatctctcctctcatggtcgcactcacacccacgccattcaaaaacaccaatactaataattattgatgccggttttctattaatcgacaattatagcagagttataggtgttgatttttattagtgctggttttttaatgaaccggcacttatgagggatcaaagatgttggcttttaattgtagacacgttcgaggggtgggaagggatcataagtgtcggttttagataaaccagtaccattaagttgtcccgtatgagggtttaggtagtagtggcatcctaggaaattagtaatttgctagaggatactttcatctcaattgtagagagaaattattcaaatag

SEQ ID NO: 1818 - DNA, 7555 bp, Oryza sativa
  Intron number 1 from transcript LOC_Os01g56764.1 (locus LO C_Os01g56764) derived from phytozome v7.0 (chr-ID Chr1; po s 32748978 to 32756532 reverse strand)
cgtgcacgagatcgagcggttctcgcactacgttggtacgtacgtacggtttctctccatcgatcacctaattaatttacgttactttgtttttgtttgaagccaaaccttaaacgtacgttgctcttctcacgttgttagccagctagcgcgtcgcgtcgtttctgaattcttaaattccatgagacgtgtgctccgatagtccgattcttataatgattttcattgggatcagttttacattcgtaagagcaagtttaatagcataactcattactatctccaaatcatatatagaaaatacaatagtcaattcatacaatagcgcttactatactattaatacccgatctcacttgtcatacacacattacgtcttgaagccgtgctgcagctggctacatatctatagcctgctgtttttctctctctttttttatctctttaaaatatgtttatagttgacttatagcctgctattgtacctgctctaacacatgaggcaaagaagcaaagctagtggaaaaaaaaagggggaaacttgaatgcaggtaaagcgactttggagccagtccatggacgcatcctctgtatcggattcgatgcacagagttttgcatctgaacattttggttaagctagctgtagtgtaaaaagttcacatggaccaaaacattttattctcaacacttcacaaatgcaatagaaatgactccggctcgggcgcctgatggagggtttttaaaatcgggagctgatttcagcatgacatcagcgtcacgtatccttgcaaaaccactttaaattgatttttctcttaaattacttacccaaattatgatccgatcgcactattaaattcattacaattaaaatttcaaaacaagaccacacatggatatattccgacgaaaaaatagcttattattgaattatttttaaatgttgcacgatgttccatcaggtatatcggaattgtttcactaagtagatcgaaaatgtttcactcgtttaaatcgggtgttgtttcaccttatataaaaacaatgtttcagcaaatagcgaaagaatgtttcagttcactataacgttagatctatgcatagtgaaacattgtgagtacactaggtgaaacattttttatggaacaaaaaatgaaacgaattcccataatagagggtttccaaaatatgtaggtgatttgttgcaatagagtatttcagttcactgcaacattagatctatatatagtgaaacattgtgagtgcactagatgaaacatttttttggaaaaaaaaataaaccaaattcccttaatagagggtttctaaaatatgtggataattaatttgttacaatggagtatatgttgcaaataagtggcaggtgagagcagagacgtggtgaggctcagggacagagagcgcgcgtcgtggaggagggagcgcccgatatttctccctcccccgagcgaccgatccggggcattccccaaatgcaatagccattttttacgatcatctgtaatagtatatcgtacagttttgtagcgcccgttccgtcgtggcgcctagcgggaaaactatctcttaaaaactctatttgcgaaatctgtttctttgcttgttgtctagtgtccgtgccatctcagatctcaaatccccgatctatcgccgagttcaatcccgaatccaaatccttcccaaatcaattcctccgcaaaagtctattttgcctccccgggttcgatgggccgaatctctctcggcccatctccccctccctccccgggtctctctctctctctctctctctctctctccctcttctccgctctgcccgcccgtcgcgcgcgcgtgcgcgtgagccgcgccgagccgagccctcctgcctcgcgtgcgcgcgcccgcgtggccgctgccctgccgcgcctgcgccgtctgcgccgcccggccccgctgccccgccgcacctggtggccgaccgcctggtcgccgccgccgtcagcctctgccgcgtctgcccgcgcctgccgcccgtgtcgtcgccccgctccaaaccgccccgccgtcatcgccgtcgtcatcgcccggcccccgccactccgcgcgcaagctgccaagggacggaggcagagctcctcctccctctgccgcgtcgtccccgctccctcctccttttcccgaagaggcaaggggacaagcccccttttctctccctcttttcccctttttcctcccgccggcgtcatcctcctccctcctccctgtcgccgctttggccgcgaccgccgaacgctagccctctcctttgaccgccctaagtcggttcccaaaccgacattaccatcctataaacccaagcttccccctttcctttcctctcccattcgcctccacgccattgccgccgcctcccgtgctctgttcgccgtcgccgttcgtcgttgcgcgtgtcggaggagccggcacgagcaaggacgcggaaggggactccgagcgcgcccactccttcctcttccccggcccgaggccggagagattactcccgcgccgtcggcctctcgtcactgcgcccgcccgcacggtagtgcatctccccgttctccctcctcgctccatctcctccccttagactcgggtagtagcacgagtagcctccccgtagctagccggcgccgccccgaccgttgccgccgctcgccgtgtgctcgccgccgtcgccgcccgagctcggaagcgccgctcgtcgccggcctcgctcggcgcagctccgcccaatccaacgctagcatcggattcccgtagccgcgtagatgctctcgccgccgggaatcggcccctcgtgacctcgtcgccgtttcccccttctcccgccgccggttgccgccgccgcaattcgccgccgtcgggcatcctccggcgaatccgagcagttggctcgtctcccctcgtcctgtgcaaccacccggtgtgctcgctttcgcctgtatcgccgtggttcgctccgccgctcgccgctgtcgtccgccgtccgtttcggccggcgtcgtcgtctacctcccgccggcccgcgtggcagccacgtaggcgccacgtcggcgccagctcggccaaaaccgggtcgagtcgaccccggttagccgctccctccccatgcgcgcggtccaccgcgagccgtgaggctgcgcgtgggcccgccgcatccgcgtcctccgcgaaccgcgcgcgtgcaccgcgtctctcccccatcctagcgccgcgccgcgtgctccctccgcacggtgagccgagccgctgacaagcgggtcccactcgggaccacgcgaggtgagcccggtccaccggctctctctctcctcccctcccgcgcgcgcgtgccttgggccgccttgggccggccggcccatttagctcggccgagccgccccttttctctcgggccgcgccctagccgtccgagggaagtgtaatttccctccctcttttcttttcttttcttttctttttcaaaaaggatttaattaaatccttttcctgtagaccaaaaatccaataatattagaaattcaatatcttcccaaccgtaaatccgtttgactccgttcaacttccaaaatccctcaaatcttaagatctatctaatggcatgcttagaggtcattaatagggctttattttcgccgtttgttgagttgtcccgttctgcgcgtagtttcggagcccgaagacccgcagtgcgaggatttcgaggatcaagctcaagatctcgagcaaggcaagccacctttgaacatttcgagcctatatttgaatttaatcatgttgcttgaaaaatattatgcattgataggatcgcacttaatctgtttgtcccgtctgcaaggcagattgtcggacctacctagtttgttgcatttgatccttcctttgttaattgttataccatgttcccttgtaaccacccagttgcgcctcgaaaatcgtgcactctgcacgagtatcgacgatcgccttcaaacttaaaatctgaaaaacttcttgggtaaaacttgggttttacaaaagacttggaaaacccgacacctgggtcggtgcttgcgaactaaatgaattttccaaaaccgcggaccggggaacgtaccgggtgtacggtttcccgctcttgcacttaaggaccgtttccttggaatttcatccaaacataagacaagtacgaccacatgggtggaatgggacacccctggctgagtaactagcttatcaggggagccttgatgccgagagacatgtggattcgccggggtggtgtcggggaggacccctgggtttcctggcacagtatggtctgggacctaatctgttgttggtctgggacccctctcgtcggcatatggtaaacctgtgtcggctttgaaaatgccttgtcatgaaagcttggaggtctcccgacgtggctgatccacacgggctgggtgatccgggttagtaatgtcgtgtgggtaaagtgtaccccctctgcagaggttaacaaactgttcgaacagccgtgcccacggtcatgggcggatgtgaggtgattcctagtgtagttttgtttgactactacttgtgaaattgctgttgtggaaaggggttcgatgtttaaaaaatctgcagctgatgggatcagctaggcccgggtggccatttgaaagttgttggcccgggtggccgtttgaaagttgttggccgggtgccaatcttgatcaattctaaagactgatacatttgcacatactccgaccggacgagacgcactgtctcatccatgttgtttgagaagcactcacttagttgctttcagaaaagagttcaaataaaatcaattgcaaaaacaacagcctttccttgaagcctgcattaaacacttatttcccatggcttgctgagtactcccgtactcacacttgctctatataaataatctcccccccagttgctgaagaagatgaagcggatcccgctgacgagaagttcttccaggagcaagccggctacgatgagttttagggtttcggcctagttcccaagtcgcgcctgtgttgtttggtccaagtcctggcttccgcttcccttttgtaatgcagttgtgagctcgggatctgtccacagcctgacttgattgtactcctactctataataaagagacctctgttgctgtgatattatgtcttcctgtgataccagcactgtttcctgggactggtatcgattaacaggttaatttggagcgtcacgggctagtttcggtcggtactagttcggggcgtgacaagttttcaactgtatgtgttcaggtgttcgattacatcagtgtttttgtcaaagctaattcaccttgctgttcatatctatccatccattataaaagatttgaaaatatttaacaagatataaatatgcgatatatcgcttcacaaacatgtaagtcaaaccaaaatacccaataagcataagcattagctctccctgaaaaggaggtgatctagccgcaccttccagtatggctaccttgttacgacttcactccagtcccaagcctagccttaggcatcccctccttacggcagtttattggctcgttcattcactcgctgggtaaggaggcagtgacttacaagatgtcgaagggaaagtagaacttcttcggtgcttgccgctactgccgcaaatcaactcaagctcctcgttccatcatgaaagagtaaagccccaaaataggtacacagcgtttgctattgcaataagggctgctcgcctttccttttgacggcttggcttcctatcgctcctatgtagtggtcggccttaaaagtatctttggacgaggtcctacggtaggtaagagcacgcacaagcacttgaccgaaggggaccaacgcttctactcctccaccgaggagctttttttaagaataccgagtcgggttcttctcctaccagtatcgaatagaacatgttgaacaagatcttcttcatggaaacctgctcaatttagattggtaaaatcgtacagattttgaaaagaacccctagggggtagtgaaatagaacgtgaaacagtgctgagctcccaagcagtgggaggggaaagtgatctctgaccgcgtgcctgttgaagaatgagccgtttcattcttgcgaacgtactccccaagcgagatacttaacgcgttagctacaacactgcacgggtcgagtcgcacaacacctagtatccatcgtttacggctaggactactggggtcctgtccaagccaaagaacttacccccgaaaagtcctgacaaatgatgattgagacgagattccgcgtttttgaaccacgaaaggccaactttcataattaaacgctgtcactgtatggataactcttattgtgaaaagagctatttactctataatagataggtagagccaaagaatgtgaaccctttggaaggctgtgggcgatgagggattcgaacccccgacaccgtggttcgtagccacgtttcgactgtatataaattgcaattaaatttatagaattaaaagttaagagttgacaagatagattaaatataattatatttatggaatcaaaagttaaatagtgttgtacaataagtccaattagcatttccagcaacagcccctagccccctattgtaaagcctctaaaggtctaatgggggttgcccccatcttcagctacaaaccccatttcttaggctccatctctgtgtgtgtgtgttttagtacgcacattatatttatgtctagtttaacaccagaataattcaaacacgtagaattcaaccgtattcaaatttataattttgaataccataattcaaatttaaattcaaaattttcaacattgcaaaatgcataataaaattcaattttcacaatcacacacgtatgcaagttcacaagaattatatgatttttttaaaataacatatactacaaacatgaatggttcaatccggacaaccgactactagcgcgagacattgctagagttgctacgcatgaggtcaacgacctgcgacgtgtcagtgtggagatcacgtaggttgacgaacgacatcggacagggcaacgttggactatcctagcaagatggtgatcagataatagccggcggcacgacaaaagaaaagagggtagcaacacagtgagagcgcgagaacaacgggagaagcgcgcgctagggaattttcacacgcaccaaaaagaaaaagagatggggttgggtgtagagcctctaggattgagggctatggacagagatttcggtgcctttctattttaggggctttaatagcggtcctgccgtcctgctggatctcaatttttctcctttcaccccaaaaactatttaggggtttaattagtttaggggctctgctggagatgctgtctagtccgtgtaaatttgcacggcataatctgctagttgttcattatcctaaatatcaatcaaatgatatattttttttcagctaagcagatagggattgagg

SEQ ID NO: 1819 - DNA, 440 bp, Oryza sativa
  Intron number 4 from transcript LOC_Os05g51190.2 (locus LO C_Os05g51190) derived from phytozome v7.0 (chr-ID Chr5; po s 29299046 to 29299485 reverse strand)
gatcgctggattcccatctctgtaagctaattattattctgcaaattctatgtgactgatgaatatagcttagagcaagtttaatatatagccaactactagctccaaatcatctataaccaatctaatagctcattcatacaatagttatctataaaccattaataaatggtcccacctctcatacacacacaatattagagttcgtgctacagctgaccacaaatatgtagcctgtttttcttctctctcttctcttctctcctccacatgtgtttatagctgacttgtagcctgctattggagaagagtgcattggtcctgttgcaataactctctgttgatttagcttatgtcatggccatgttggagtaaaaagcatgagtgttaccttttcaaaccatctgttactccttaggccgtaacaaagagacgttgga

SEQ ID NO: 1820 - DNA, 5575 bp, Oryza sativa
  Intron number 2 from transcript LOC_Os03g51080.1 (locus LO C_Os03g51080) derived from phytozome v7.0 (chr-ID Chr3; po s 29193918 to 29199492)
gacgagtaccccgtcaccaccgaactccaggtactcctcccccccaccttgcttttccgccgccgcggccgccacccccctccctcctcatcccgttcgtcgtttcgcgttcgttattacgccgcaaattcagggatcactgcggttattaatccctctcgttttaccgtgagatttatcccaaaattttgatccaaacttatttttggtttgatttgatttgggtttgggtggcggcgtagggtagctgctgggttttgatcagctcgttccaatgggtgcaaccggccaacccagttggtggccgtccgtttcgacaagtagtcgcggtggatttctaatcctcccacttggccgctgatctggtctagagattagaaaactagctacttagaaaaatggagtacaaacagctcgattgtccgcgtgagccaagggccatcagcccatcacatactcacatgcgccttcgcccattggctctctcttgactacaataatatggatccttgtttaccttctctcagactgtacgtttctgcttttccgtttttaaaacgaaagttgccaagaactcggggaatcgtaactcatatgcagccatttttcgccagtatttaggctgtgttcttcccatgagttttcaactcatggaaactcatctccccgtttgatacgggtttcaaaaaagtttatataagaaaattgttttaaaaaatcatattaattaattattcaagttttttattactaatacttaattaatcacatgttaatttacccctccaaaagaacatgtacacagccttagcatggataggtcgagatgttgaagaatccctttgtaatgctttttttttaccaagttacacgaaaaataaaataactttaaattttaataatcctatagaattcctgcatccggcacaaccaacatgttcgtcattaagcaaacagtttcgtttgcctgtgttttataagggtgagcgataaattaagcgatacacagtagactttttgattgctttggagtgtttgtaaccgtagtcgtaacggcaagaacaagtaggtccctttgaagcaactatatatgacccgattgccagggtcaaaaatgatgtgacagaaatgaaaaacccattcccagcgtgtctgtcaccttgacgcgtactcactactgacataaaaacaacgattagtgtctctttcagtagttaattaggacagaaattgattcaccgattaaagaaaaacagtactcgtacatgttcgaggatccctcgttcctaggaggagaatcgaatttggtcggtcctggacaaatgtcacgtggtgactcttggtttctgagtggattggaaacataaaacataaaactcagtttctaattggactaattagatctgacactaccttatatttagatttgtagtattacttggtgtctaatcatgtatttgctatattttgaggtgaaataaacacattgccagtattttcatatgagtttttggtcatttcaatctgctgacctgtcaagaaaaaaaatgtttttcttctaaattttatccttcaaaatggaacatattctatgaattttccgccctccaagtgagaagataataattgtagtaattaagccaatgtccggtgattacgtcttatgtgtggacagatgcaaaattttcgctgccgacgtactctctgtgtccaccaataattccttgacaatatgtcccctgtcctctcattttctttgaggctaacgggcgggtgatcaacccgcccctccctctgtactcctctcccttctttcctatcatcgtaaaataaaaaaaaccacaaaattagtaaaaaaattagaaaaaaaatctaatactcttatacatgtgcataaactttataccgtaaactttgcacacataaacttactttatgtatagaaatattttatatatacaaatatttgaatctgaatttaaatttaaatcgggtatataaacttttgacttataaacattcgctctacaaactttaggtggataaactttagatgtgtaaactttaggtgtataaacttttgacttataaacattcgctttacaaactttaggtggataaactatagatatgtaaactttagttgtataaacttattagaagagaaaaagaaaaaaaacgatggctggcagcgattgatcgctcattaggaaaaccgtgggatattgtctattgtcaaggcctagtgggatttgcctttctctgtccactaagcagccccgtagaagaagggtaacggaacgaggcggtcgtcggttttctgacggaattcatgtgctaacgaccaaccaaatgtcaagccataacaagctgtggaatggggatggaaacaatgagttcaagttgtattctgggtccataataattgtccttttgcgatattgtgtcacgtagctgctcttagccatgtgaggggttaggtcgtgatgtattctgaaaatgtttcttttcatggtaaaccagaagaaagtcgagaactaatttcgttacatggtgggggtacatgataaagctgttatcttgcgctccaataatatacacacgcacgtaagagccacgtaaaccattcatgtccttttcccctgtttattttagtcacagattttccgaggatgaaaaaagaaactgtactagtttcagttttgttgattcaagatcactgtttaactttcaagtaaccgaaatctcttcaaatttcaatggtggggttataagttaaaacggtctgagagagtgtgctgaaggacggaacaacctggccagtgctaatcacttggtctgtagtactccatcggttgggatgagccctctaacagatattgcatctgttttgttatatggttctatcggatgaccgagagttgattataccccgtaacagtttattactacctccgtttcacaatgtaaaactttctagcattgcccatattcatttagatgttaaatgaatctagacttatgtatgtgtttagattcattaacatctatatgtatgtcggcaatgctagaaagtcttacattgtgaaacggagggagtagtaacttaaaaattaactagctgggtggccggcgcaattgcgcggctagcacccaaacaaaatcatatatatttttagtatgattttacttaaaatgtattaaatagctatttcattgtcttaagactttgaaagatcaaaccctatctcctcgtgtttctaattatatagttttaaaagtcacaccaattactatccctcatgtcatctctttctttatttgcttgctcaatctaccactatttctattcattcttcttggaatatttaaaaattggattttatagtttttaaagtttattgtcacgttggatttcatttttataatttctagatatcccgtcaaacgttgccattatactcctctacggcccgtccactgtctcttctctttattgtcattgagattttaaaaatcgaacataattatcgtttggtttcatttttactttctagaagtcccgccaaaccgtcagtggctttgcgattgtactcctctacggctcgcccgctgcctcccttctttattgtcattgagattttaaaatcgaacatgattatcattgttttttttacttttcagaagttccgatcctttaaaaattggacttgtagtttcatttttaataattttaaaaagtcccatcaaacgatgccactatgcccctctatagcctgtccgccgcctactctttattgtcattgtgattctaaaaatcgaacatcatgatatcgtgggaatttattttttatttttcatttggtgttttattaacaatttttatacgtcgtatcaaccgccaccactctactcatttataggtctgttacttaatttatctcgtcatgtgttttagatgatcttttctttcaataatctttattttttatcaaaaaatttagtcctaattgaaatattatttttctttttctaatttcagatttttttaaaaattttagttaataccgtattgtgttcttttaatgtttttattttttatttttaatttcagttgtttcaaaattgtattcctacttgaactctcttttattttttctaattttggatattattttatttttattctaaattttaattaatctcgtactgcgttcttatatggattcttctttcagtattgcttatttctaattccgaatttcagcaaattttaaattgtattcctacttgaactcttcttttattttcttttgctaatttcggatttatttatttttattccgaattttaataatctcgtattgggttcttatatagactcttcttttaatattctttttttttaattccgaatttcagctatttttaaattgtattcctacttggactctcatttccttttctaattttggtttttattttgaaattttattaatctcgtattgggttcttatatgaaaacttatttctatattgcttatttttaattccgaatttcagctatttttaaatcgtatttctacttgggctctccattccttttctaattttgggttttattttatttttatttcaaattttaattaatctcgtattgggttcttatacggaaacttctttcaatattgcttatttttaattccgaatttcagctatttttaaattgtacttctacttggactcttcttttttttttctttatctccgattaatgtgggaatttctagctcccacagcgaacgtggtgcctcctttcaaagctgttttaataatataacacatagatagatagatagattgtgggtaaaatcttttatatatgtgtgtctagtgtcctaagcaatttataagccaatgataacaaaattacgttgtgaaaataaatcaactttaaaattaagttaggaaatttaaatgttggagcattcgcgtatattgtttgtccacagcttttctaattttcactactcactacggtataataatggaaattaagaatccaaaacgtgcatattactatccattttttgttataaggtgccttgattttttttctagttaaattttgttagcgactagtgaagtcaacttgcactatgttggaacatatctttttttgtagcaattttatatatagatttttctctagacgtggttgggagcgcatatacgtcaaatatcattccacatttcttcaagagtgatcaaacttcacaaagattgacaacagcaattttaagtcataaaataaaacagaatgaaaacaatattgaacatggttatgacaacagtaacatttcctcttatatggcatcattatgctagtttcattaacatcttctccacatttagtcaaactgtcagagtatttatggctcaaaatttgaatttgagtgagtgaattacgttgtagcaaaatgtgtttattgatgtaaattcgtaaaccattgctataactgcatagctggtgcttcttctcaactttcaactgaatttgctgtttgcagaaccg

SEQ ID NO: 1821 - DNA, 5910 bp, Oryza sativa
  Intron number 1 from transcript LOC_Os11g36719.1 (locus LO C_Os11g36719) derived from phytozome v7.0 (chr-ID Chr11; p os 21209122 to 21215031)
gtgccagctcgtcagctccacggtcggcgaccccggtgcgtatctggaatcctctttccttttctcttaactagcatggtggcccgcgtagattgcccggcgagcatcattatattttctctcatataatagtatatatgttttctcaatgtattattcaaatatattaaaataacaacataattttaaaattttgtattacctttacgaaactactaatgtataatattcatattgtattttatatacgtgttagttattagttatttttaatatcaaattttagttatttgtaaattatattcctatatggactctagactcatctttcaatatttatttttttaatttcgaattttcgttatctataaattgtatttctttatagactctaggcacttcttccaatattatttatttttaattctgactttttcttatttctaattgtatttctatgtggactctaaactcatcttacaatattctttaatttttaatttcgaatttcagttacttctaaattgtattcttatattgactttagattcttcttcccatatttttttaattttgaattttagttatttgtaaattgtatttttatacgaactctaaactctacttttaattctattatgtttatttcgaattttagttagttttaaattcttatatggactctatactctacatcgaatattccttatttttaattctgaatttctattatttcttaattgtatttctatacgaactatatactctacttataatattccttatttttaattccgaatttctattatttcttaattgtatttctatatggactctatactctacttctaatattccttatatttaattccaaatttctattgtttcttaattgtatttctatatggactctagtgtcctcttcaaatattccttattttttaattccgaattttctatttttttctcaattgtgtttctatatggactctagtgtcatcttccaatattccttattttttaattccaaatttcaactatttctaaattgtatttctatatggactcagtttttctttttctctaattaatatgagaatttctaggctatgggagcgaacgtggaggctcctttttctattccttaaataagttaatagatttctaaattgtatttctatatgctcagtttttctttttctccaattaatataagaatttctaggctgtgagagcgaacgtggatgctcatttttctattcctttaataagttaatagatttaatttacaagtcgaatcctgcacatttcgcgcaccaaattcacatccatacattgatacatatctgcacacagctagagaaattgaagagctagatcatacatagcgcgaatatatacattttaccaccgtacgcatccatatcgtctatgtcacgcctagaaattcactagtaatttccgaacttatttgtgcattaaatcctcatccagtaatcagccgaggtacacaaactgacaatttaatatacagattcatcaagttaactaaaacgataaatacttacataagaggcacttagtcctcacaacgaagaaaactgcagcgaaaaataaaatctagcgaagctccggctccactcccacaggcagctcaattggggtataagccaaacgtcttctccttcgcaacttttcttcaactgaggtttgattgattattgcaaggtgagcatatgacatactcagcaagccaaacagcaagtatgcaagtgtacaaggataccaaagaatggcataatatagggctcatttgcaaaagcagcatttagcagacatttgagaattgtaaaacagtagagtaattaatcatcaatattaatcaacactgaacagcacacccatgctgcacaggccgaaccatcctgaacaaccatacccggctgtacagatctatctccaaaccaggaatgtaccattccaaaccaggagctaatcaaattattaccagttataatatcatttattatggtgagaagtgtgagactaatcacgaaaggcattgttagacccgcccatgaccgcgggcacggctattcgaatagttttactctggccagaggtgtaccactgtacccacaagacacgattccacacatgttactatgccctaaagtaccaccacggcactgcaaagggggaaatcgtgacagtacccttcgcacaacacaactcaaagtagtgcactgttcctggattataatcacccccttataaaacaaggcatggactccccagcgacccccgtgggcttatctccgccacttctcagtctggtgccccgcaatgaaccatgctatacaaaagataaagccgttgcccatgctggcttatggttggcacggttaatatttcacagccgaaactcgtgaaccggtccttaattgtcatgagcacgaccatcaaaaccatgtactcacaacccaccattatcaagttttagttggcaattaattaattcacaatcacgattgaccatcgtgagctacaattaaatatccatcattaagtaatagtgaaacattagttatctcaatagtgtgctaatgtttctaagcatgactaagcaattatatctaatacatctagctgaaccaatatataaaactcaactagtcaaattataacccgaggtaatcaagaaatagggtaatcaatgcaaattggccataacaaaggaacaggttcacgccacccggtgacattcgaaaataaatgcacagttgaaataaatagagaatttaaatataggatcaacatgctcaaaggaattgtgtttgggatctatgtgacttgtcttgcaataaagggtcttcaattaatcttcttgaatactcccgacgcactcacggaccttcgaaacgacagaaacgacaagctaacacgcaaaacgagaaaaaagactaagaaactccaaataaacagtacataaaagtaaacaaatatgtagatcatgattttagatgaattatgaaacttgaacggcctcattctgacttcatatgaattagttatgaattttacatgatttaattccaactaaacctattaaagaaaagactatttcaaattaattaaataatttacaaatgatttataactgagataaaagattaaagcaacctccggaaaatattagattatatttggtacatgacatatattagaaagaaataatatgccactgaaaagagagaacggatttatatcaattttggacggctgagattaatcttgaccgagagttgaccaagatcggatggcttagattaatctggcaagcgagcctcacgagatatcaactcaacgagtcaattctacatgacacatgatcacctaaatgatcaaccgaaaccggcgaacggaattggcggctctgaactaaaggacaactcgacacggacgaatgaacgaagcacggggaacacctcgtttgaacgaacgagcgaacgactcaacaacgtctgcggctaaaccggtgagctagacacgattcacggtaaagccccggtacggcaaacgataggttggtaggaatttagggatgcacctacggctagacaacttgactactgagcaacagctaaagcggcggttaggttaaagtggcacacagctgcgacacggcggcactagggcgacttggctcagctaggcggcggcggcgacacacagctacggcagagacacgcggctagggttaaggcgatggcacagcgacgacagatggtggctacggtagcgggacagcagcaacttggcacgcacgagcagcagcagcacggctgtagcagggagcggcacagcgacggctaggcggctagcgcagcgacgatgtacagcggctaaagagcgacgcggcggcaacaaggtgctggcggcagcggcggtgcacagggcagctgccaagtgacgcggcagcggctgcgctagggttagagcaacagcggcggcgacatgaccgagggattgaaacctaacccgaggggacacggatagaagtctcaccgaaccaaatcgatcggagagggagggtcgatgatgacgacgctagacaaacaacggattagattagattggattaaggccctagggaaaaaaatctataccggtgaacgtcataggagcggcggttgccggcgaaccacggcacaataatgcaaacgaatgcaaacgaagggcaccgggagaaagaggaggcaacagcgattcttaccaacacttacgcgacgacggacagctacggaagatggccggcgacgagatcgggacggcggtgagatactgtccacggtggcgacggtgtttcggcgaccttcggcgacaacggaggggtggacggccttcggcttggtgctgcgatgccgacgacggcctcggggtgaaccggcgacgactgcaacagcaaggaggctcggccggagatcaaaccgaggaggcaaactcggccttcacggtgacagcgacttccagcgagacttggcggaggggaaccggtagacggggtagatctcgaccttgcggagccgatggaggtggcggcgcaggagggcgacggcctaggcgacggcgcacggctgctggagtggcggccggaggcggcgaagcttggattcgagtcggcgaggtacttccagaggtcttcggcgtcggggaagtggaggccggtcttcctctccttcctgcgaacccaacggcggcagcggcaaccgaaagcgacgacagacgacgacgaacggcgcggctggagcggcgccggcgcttggagagagaaggagagcgcggggagagcgattccggcggcggcggaagacgggacttgagaggataggtagaggacgactagggggtcctttatatgggcacgggagctcgggtccgggcccaagtcgacgggaaaactcgggaaagtctagggttctcgccggaaaaaggaaagattgaaccgcgaaattggaaaggatttccatagaaacttttggggatttcttggggaaaaggaagaggagattgagaggattccattcccgcaactaatttggaaagaggagcaacggggaggtcggatttggaaggggatcggcgcggcggcacaggctcggctcgggctctgtctggaggttgaagatagagtactgtagcgccagggaagtcaaacagacttctctgcgggctgactaggaaggaagattttattgcttttccaaataaattaaccaatgagatgatctttcaattgttaaaaatacttccaatgcttaaataattctaagaaaaatctttaacatacttggacactcaaagtatttattaaaatttaaaccagctcatttcatgattaatttaatatgtgaataattactgaaatattctttgtattattaaaattaggaattgagctctgaaaaacccgagaaaatttcagagagtataattaatcatggagaacttaatacaaattaaattcatccatactttatatttaggaaattttattttctacatttaacttcacttgtaaattaataaacatttaatataaattctattaataatctattaaataatttataaatcctaaagcggaaattcaggctgtgacagtctatgtcccagggaaacatgagcactcatgtcaaatttaatactttaactcgatccgatcggtggttatgtttgatcagttaatatatatatatgctcagctcatcactacaatataatcatttcttttataaaaaaacaacattctttcaactcatttttcaactctattttaaacctacaatcccttgtatatatggacgaagagagtataacgcgctagcaatggtacatacattttagaca

SEQ ID NO: 1822 - DNA, 453 bp, Oryza sativa
  Intron number 5 from transcript LOC_Os05g06540.1 (locus LO C_Os05g06540) derived from phytozome v7.0 (chr-ID Chr5; po s 3371208 to 3371660)
tggaagcaattcaggtatatactctttttccatcagtattaaaatatactacagattgaatcaaaatcgagcaatttctatgtggcacgtaaacccactgaatcacgatatattcttattaattgaatgtttatggataaatcttttatatctactatgttattagcgattttaaaagccaatgctgaaaaaactacgaaaaaacacctaaaatcaacttaaaattaagttttaaaattcaatttgctaaataataaacatggcctacaaaagtggttggtgcgccaacatgcgcgctcattttctcctaatagactaagtccatcttatctgtagcgctcattttctactatagactaaatccatcatatctgtatgctcattgtctactaattgactgaatccatcttatctgtagctgtgttgcccgccctgtgtttgacgtggatttaa

SEQ ID NO: 1823 - DNA, 413 bp, Oryza sativa
  Intron number 3 from transcript LOC_Os03g58480.1 (locus LO C_Os03g58480) derived from phytozome v7.0 (chr-ID Chr3; po s 33305692 to 33306104)
catcaagaggaggactcctgctctgtgacttcttcgtatccttcttctatctaataaaaatacaccgtgtttctattttttttgggttgtactgtgatgatgttttctgcctttatttcttgtgaagatgtttctaaaatattgcatgagaaaattcatttcacataatgatcagatatttggttttcaattctagagtgatgactggaaaaaaaatcgatgttaaaaatgattagttctgttaaccttaattggttttcagttgatttgatattattctttgtagtgaaaacattgccaaggtgatgttctttctactcattgtttgaaactattgtatacaatttggcccctttttttttcctgagctgtgtaaagaaccacaacttcaacaagagctggcaaaaccaagg

SEQ ID NO: 1824 - DNA, 1607 bp, Oryza sativa
  Intron number 3 from transcript LOC_Os02g47870.1 (locus LO C_Os02g47870) derived from phytozome v7.0 (chr-ID Chr2; po s 29279641 to 29281247)
gagcgccaccagcgaggagtgcaccgtcgcttggggtaacattgcttcttcttaatctcccgttaattctaattctgtgccgatgcagcagtagatgtaagtgctgattcagccatgaattgcatggtttcagttagctgaagccggtcttgccctgtttattctgaatttagttttgactttgatttcatagttcgattgagtcaaattaatccatgtgtcaacctgttactgtgctctcagtacacgtcgccttgtgttgtttgtcattggtttgctcatttgataatgatttatcagaatctggggatcgtgctttcccaagactggttatatgctgctaggaatgtttttctctcgaatttcataaaatcctaacatctgttttgctatacgctattttgaatccttcgttctggaattgaggaatgcttctagttttcatgctctggagtattggtgaattgagttgtagtttaatggatcctgcattatctgccgcctctatgtcatttattggtaccagagcatgatttttaatatcgtgtataatatcatttgttgctgatcatgtgatttgcaataccatgttattattagtgattctgataattgcaagttcttgtgatctggagtagttttgactggacatgtatcaaatgagtgcaatgtgattatcttttctattcttttatatgtactggttatattcatagttggaaatttgtactataattatgcatggtttgctatattggtttgtctcttggttttttatctaagtctataattatataatatgtcgcagttagctttggacgtgacatggcccttgtagaatatgttgaatttatctttcataaagaagtatgtagttatgataggataattgaatggctactggctaggagtaccttcttctggattaaccatctactgttcaattataattataccttgaactatgcacacatgaaactcaaatatgataatacagttcatgtctgggtttcctagttcctatgatttgtcaaagagaatcactggaatgtgggttggggagggtgggtgagtgttcatgttagctgtgtcaattgatggaagtgaattcttgcatctggaactagttgaagttagtggtgtatattttcatcaaaggcttttagctacaattgctttatatatttgtatgagattcttgtgtgtggatcttccttggctacccggcatgttaatatgttcttcttctgcccacagtttaatctactttgactgatcttatgtttacagcatgttgttgtttagggatatgtacacttgcaccttctgtgtgccctctggattatatgttcaagtattgttttgaattaaacaatactgacttgcacagtcaaatgctatgttcaatatatttataatactgaagtttctctcctgggggagtattatggaactttgttttctttccgtgtaactggattcttctcgtctttttgtgttgcttttagtggatattgcattttcgcagtgaattaaatcgagctgtgaagtcaactatccatgtactgatgaacaatctatctttgttgtgtcaggagtttgcaacc

SEQ ID NO: 1825 - DNA, 6091 bp, Oryza sativa
  Intron number 1 from transcript LOC_Os10g38489.1 (locus LO C_Os10g38489) derived from phytozome v7.0 (chr-ID Chr10; p os 20482479 to 20488569)
tcgctcgcttctgggccgcctacatcgacgacaaggtgattcacaaattgcctcaaatcaatcgcaacgccctgtcttgaatttgcatcgaatcaataccaaatgacgatgtttctggtgattgattaactgtcaactgctgcgcttggtgcgtcgtcgcagctgttgaagtcgtggctgcaggcgtcgatgggcaagacggaggaggagaaggcggaggcgttgaaggagacgttcacagcggtggcgaacctggaggcggccttcgaggagtgctccaaggggaagcccttcttcggcggcgacgccgtcgggtacctggacgtcacgctcggcgccctggtcagctgggtgcacgccggcgaggccctgtacgggatgaggctcttcgatgccaccaggagcccgctcctggacgcgtgggtggaccgcttcgccgcactggatgcggccatggcggtcttgccggacgccggcacattagccgagtacgccaagaagaggcaggcggagcgggcagccgccgcggctgcgaacaactgaactggcatgcaggggccgtggttcgcgacgtggttgggcctcgacgatgaatttggtgtcatggtgtgccacttgtagtcccgtcacatgtggcgatgtgggctttgtttgccacgtgaatttgttgtctgtctgcgttcttacggttggatattgttcgtgtggttttggttagcccgtttcttccaataaatggaattattaatttttagaggaacaagagtgaacattttttttttcaaagatgacgaaaattattacatcctgggcttttacataaggaaaagtgtagttggactaaatcctagttacccttaagtaataaaaacaactgaaagccaaaaaaatcacacaaattttaaggatttagcaaatatatgttagctacctgagccaattattaaaacattttggtttattattaaaattggtagtgaatatgtctcttgcatattgcgaaaacaatatttctctcgctaaaatttattgaaatggctagaaatcaagtaattttaaagtggccagacgagacagtcgtgcccgctacaggacatgggtgcctctgtgatggcacgacagagcctgagctggagccacggatatgatgtggcgagctaatgggcactcgccatgtgcccccactgtaaatggccttattgcaccatttcttatgtttcctcttttatttctccaagaaaggatggaagacatgactttctcggttacttactaaaatgcttttagaaaagaaagaaaaataagtaagttgtagtttgtaattaaacaattagcccgatcaaaagtgtccacacaatatttctgagtatatgtctttttttttccttttagttagtattctctttcttttttttcaaacttattgtttgaattcatttttaattcatcaagtgggccacatggataggggagcaatgggagacgcgttcggcacaacaattgtgtgcaggtcccagttggtgaggatcttctagcataattttttatttttgagaatttgtttttttttcaaatttgaccaaattttgttacaaaattccaataattttggactgaaatttttcaaaattttggaaatttcgccgtaccccacctctggatacaaatgccaaaaacgaaatattgaaccctgatcccggcatggtacaaaccacctattagagttaggtaccccatgcagatgcattttaaacagcccaaattcggctaaaccataccacacggatgggagaatttggggaaaagtgaatcaaccgattgttcctttacagtttacagtcatctctattgtagtattgcatcacagtataaatgatccaaacctattgacaatttcatcttttgattatgtggccaactatatattaataactttggggaatccacataaatgacacttcctctaaattttaatatatgatgtcgtttactttttgacatatgtttgacggttagtcttattgaaaacttatgcacaaatatgtgaaaatgtaagtaatgagtaaagtacacttaatggtaaagcaagttataataaaataaataataattatgtaaggtttttaataagataaatggtgaaacatctgtaaaagaaaatcaacaacattatcatttgtttagaacctgaggtagtaaaatggaacctagtcaacttaattcccaaaacagcagaatctattcgtttctgaataatctcagtctgcattcatcgatgacatcatggatgatgcattggcacgccgcaggcatcatggatgatgcatcgatcacccgccaccctccacttcaatctggagcaccatatatacatcaccaccctgctctgatcaagcatccaagtatacgcagcaaaacacaatccaaagcgtgttcatccaatcattctctgttccgctctctcaccccagcgagatggccggatcaggagacgagctgatgctgctcggcaaatggccaagcccattcgtcaccagggttgagctcgcgctcggcctcaagggcctcagctacgagtacgtcaagcaggacctcgtcaacaagagcgagctcctcctcgcctccaacccggtgcacaagaagatccccgtgctcatccacaacggcaagccggtctgcgagtcgtcaatcatcgtgcagtacatcgacgaggccttccccgacgccggcgccggcgccgccctgctccccgccgacccctacgagcgcgccgtcgctcgcttctgggtcgcctacgtcgacgacaaggtaggatagctaagctacctttccttcatttgtgtcacagttcgagctgttatctcaaaacacaaatattagggaatgatctaatatcaaataattcgaaggatgatgctctaaacccaaatcggctagcccactaccttgtgaaactagccagaaaactcccgggcatttctctcgaggtttttatctcactgatgcgatgatgtgttgggtggcgcgtgcgtgcagttcgttccggcatgggtggcgacgttcagaggcaagacggaggaggagaaggcggaggggatgaagcaactgctcgcggcggtggagacgctggagggagccctgaaggattgctccaaggggaagcccttcttcggcggcgacacagtcgggatcgtggacgtcgcgcttggtggcctcatctcgtgggtgaaagcgaccgaggtgctcgctggctccaagatcttcgacgaggagaaggcccctcttttggccgcgtgggcgcagcgcttcggcgagctcgacgtcgccgagaaggtgttgccggatgtcgacggggtggtcgagttcgctaagatgaggctggcagaggcagctgcggctgccgcggcggcttcaaaaaactaagatggatatgtttggttatgtcgtggtaactcccattgtttgggagaaaataatgtgcttgttggaaaaattatttgggagaaactaatgtgcttgttggaaaagaatagatttagttgatttagtgttttttctgtatcagtatcttgatttatgtctgaataatgcaaggaatattcaatgaagtcatgaagatgcttgtcctctgtttattcagtagttaggggatctttttcttctgttggtgtctattagtttgtgtttgcttagctttgtttatactatcgtgaactttctatataagtttttttctgtgtgagttctaaaataattgactataactctttaagtaaaggccggaatgttttattctattattaaaaaaaaaatgaagatgcttgtcctctgttttctctgttactcgctgttggccctgttgcccttcagagattttgcaacttgcacggttgttttgttctcctgtatttatccatttccttcattgaaaattcggcagtgtgtagtaggaattttttttccatcactttgtctttttttaccattcaaaagtttattggttgggtacctacgacagagacagggacgtaacccattttttttctttataaaagagcctatagggtgaagttttatctcaaatattgtggattccgcccccattccttttagcttgtttatcatatcattgttgcgatttatttactccatatttctaaaagtatgatttctcaaaaaaaaattcttatatggtgttagcagatcacttgttgttacgagctatttattaattttattttttattaaagtacttaattatcctgatagatatctgtgatactaattcggtgaataatttgttccaagcattgcaactactcataccatttaattattcagatgaatcgtatgttctatggtgcttgtacctttaattttgggaacttttacagtatatagtggtaaaatatatcaccaatataaataatccaagagtttagattgatttgttctctcacttaaatagtttgtagtataaaattaaaagggtaaaaatattttcactattgggtgtaaattcgtagaatatagtgtgaaacaatactacgtgttttcactaatcgatctcattccttattcctcatcatccttcaccacgatgagacgccagcagccaccatgagtccacgcgcgccaacaccttcatagccaagtaagccaaccaccacatttttaatcttgtggcaaaattttaaaatatttatattatattgacggtatatattttcttgtaattttacactagggatgtatgttgacatctttagtgatactcagggccggatccaggaaaaaaaattagaagagttcagttacatagtttattcaatctccaaccatttagaaacctttaatttatcaattatggtgaaaaaatcgaagggggtgttacggagatatccatgggtcttatgagtataggggagactccacgttggatccacccctggtgacactctcttattcccaaaagccaaaatacatgcatgcggataattgtgaaataatttgcgaaaaatattactaaggttttgtaatcatttcttgtgccccaatgcacaaacacccacaagtgcccgcgatgtccatgtcatccactgccactggttttgttcttgggctctcaaaactcacaggtcaaagtaaacgtactttaactggtaaagcaaagcgatactatgacggggagcagcgccatgatctgtaggtttgtttaatttaatgccccagatcctaagcttcctcttctccaagaaagagtagaagacgcatcttgacagtctcagagatgctgactggagtattttcaggaaaaaaaaaagtgtactccagtttgaaaacaatcagcctggtcaaacgtgtcggtgtcaccatatccgtttattattgatttatctgcacatgttttgactaaagttactgatcgcatgtttttgaatacatctgaacactgaaaagagctttcgacgtgttaaagagtagttgtggaaacccctatttcaattgtgcaatcaagcatcactcgtgacgcactactagtcttctatagcatatacaaatattcacggttcgtgttgtgctccgatcaagtgctagctagctagcaaaagacaactcaagccaaaaccatctcagagcttcagagaggaagacaatggccggtggaggagatgagctgaagctgctggggatgtgggcgagcccgttcgcgctgcgagcgaagctcgcgctcagcttcaagggcctgagctacgagtacgtcgaggaggatctcaagaacaagagcgagctgcttctcacctccaacccggtgcacaagaaggtacccgtgctcatccacaacggcaagcccgtctgcgagtcgcaggtcatcgtgcagtacatcgacgaggcgttccccgacgccggcgttcctctcctcccatccgacccctacgaccgtgccgtcgctcgcttctgggccgcctacatcgacgacaaggtaatcgacgaattgcctcaacccaatcgtcttgaatttgcatcgaatcgaaaatgacgagatgaactgatgcgttgtgtgtgcatcgttgttgcagctgttgaagtc

SEQ ID NO: 1826 - DNA, 1483 bp, Oryza sativa
  Intron number 11 from transcript LOC_Os11g07870.1 (locus L OC_Os11g07870) derived from phytozome v7.0 (chr-ID Chr11; pos 4022582 to 4024064)
tcggacattggtagaagtgttgctagatcacttccgtaagtaactttctcgtaatgtggtacatatatcttctttgtctagttgatcaataattctataatgtatactgcttgctatacaacaacctactcattctgtaggacaactaatagctcaatctatcagaataaagtttagtgcatcattccgtggatttgtatttttgtaagaatagtaactcttttgtagtatagaagtgttttgttggtgaaacttttctgtttagtactccctccgtcccaaattatagggcgccctctttttaaggaaaatcaaacttggtaacttttgactaataaccatattaaccatatatatgctaagtattatgcatgttatatcaatagattcatattttaaagtactttcatgtgatgctaattttatatttgttggaaacataacatgtaatatattaatggtcaaagtatgtcattgaagaccgcgtaaaagaaagaaaaaatataggccttataatttgggacggagggagtattacagtgacacctgaatatttttcactagtattcttgcaaatgtggcactctgtcagttccaaaatacaagaatttcttggggttttactgaagattaatgttgagtagaaaagactatgatgccctttattaaatgaggtatccttggggagttgggggtggagggtggttgggggtaatatgggaatgaatgagaggtggttgatgggacacacactactctagaagtgcttatattccagtacaaattccaaatgctagaagtgcttacattttgaaatagagagaatactattttgtctgcttgaagtcattgagtgtctttttctggaagatagttggggtggaccttaccaaggggtgaggattgtattattataatatttaatgataccgaggagtgtattttgtagctagggcaggaggaaaggctttaagtctttgagtctgtttcattaaggagagtcatgtctgaaactctgaaagcagcatcctcttccatctgtatttgtttaatggtactattgtcaaatagcagacaaatatttcaacaacacaaggtagaggtcttttttggtcatttttaatcttgtattttgaatggagtgacaagtgccatgggatgtcacggaacacaacaggtagcactcaagttgtgagagaagaacggatggtcttagttttctaacatcattatttctctatagagcacactgatcggatgttacatgttattttttttcattcacatgattgcatcacaagatacacacaccctataggaagaaacttttattgattgacttcaatatcattccggaattcatttccttgcatgaacaaaaccagggcaaacattgtgaagtttcaagtttatttatgacaactttgatactggttatgttgacacaggcaaaaatccaaaggactcaagggtcattatcttt

SEQ ID NO: 1827 - DNA, 576 bp, Oryza sativa
  Intron number 14 from transcript LOC_Os01g01830.1 (locus L OC_Os01g01830) derived from phytozome v7.0 (chr-ID Chr1; p os 445775 to 446350)
aagaggaattccactggcttatcaagtatggaatttctgttatttccaacaccacttttactagaatatgtgtttcagttattagttcattactccagtgattgctggtctagtgggctatgtagaatactgctacaccactttattcttgaggtttgaaaattacaatttcgtagctgacagtttccgagttatatgtgctgttcaggtcttttaattgagagtccagtagtgcttaattatcatgttaatttcttcatttttcctgcttagtctgaatattcctagactaaaatcttgcatatacgttaatccactgagtccatcatatttaattatttgtggtgataatatttttctatccaattttccgtctcggcagaaaaaaggcatccagtgttccaaaagagtctttttagtcattcagtaatagagttcattgtgaactctgaccaagttgaaccttccattttccaaagtcacgccatatcttttttcagtgttttattagatgtattacacatctatgctgtactgatgagtggtgaacatgtactagatattccccccttcata

SEQ ID NO: 1828 - DNA, 2137 bp, Oryza sativa
  Intron number 1 from transcript LOC_Os10g20510.1 (locus LO C_Os10g20510) derived from phytozome v7.0 (chr-ID Chr10; p os 10267202 to 10269338)
acgccgccgccgttgcccggagctgcgctgccgaggtgagtcacggtgacctctgccagttgcaatttttcagagattttagcttaaattgctgatgcactgatgctcatactgaaattacccatggtgagcagattggccttttttttttttggtctgtgctgaatttttgtcattcacatcgatttttaatcgaattacatacttgtagaatacgggagcatgatgctttgatgaattttcactattttagaggttcgatttttctaacaagacctgtagaagggcacattgagcacatttccttctggtttactcaagcaagtcggtatttattagctggatcagtaagaatgattgcacattgcatttgatgatttggttagtagttggtatcatgtcatgagtatatattgacctgacaattctgttgcgtaggttttgtcgaactatagtacacaatattaaggatatgttatttatattcttctgtgttgtcgatgtgcaatatttgtaaatacatactcattccgaatcgagaaccatatgattcagagaaaaggtattctcaccattgtcgatcctcaatttgtcacatcctgttataattattattactgctattctgtacatcgcttcattgcaccatcatcttcaatatatgtagagccactggtaatgcaatctgtagatgttttgtcggtcatattttgaaaaatagaaactaggctagtaatacattcctgacagaaatgcaggaaaagtattatttgtaactcaaattaaaagatgaattgtgattgaagaacatttcctagccagtgcctgccataaacaggaaactaaaatgtaaaataaaaatttaaacacttgaattaaacaaaaacaagtgctgtatatcccattgttcatgctaatttcgatgaaaaaaaatgtgagtggaattctaacccctggtacctcagtcatactcagctccaagtggcagactgctatagccatgacagtcatataattgagaaattgaaaaatcataatgaggagaataaagatgttgtattttgagattttggtaccatgattttttttttgaaaatgaagtctttccaggttgttaaatttctcacaataaaagatgggagaaaaaaaagtaacagtcagttcattttatcttttgctaaagaaaattgttttgcccgtgaataactgtgcatccaacattattttattcatgtggattcttgcagttaaaatgcaaataatgttagtatgatgttgcaacttatgctaatttcaacttgagtttgatctactggttagatgactagattgccctctccgataccatgttgaatagtatagggagtgagatatactgcgaatattggacttgttttatagaccctcgagggccggtatatgtaggagatacatgggtagagataagaaagactacgatacaaatcaatcatatcctaatatatctcttactaccatatactctaataattcctaaacaaacagaaaacacaccgagcaacactcaaaagcttatatactaagacgggtgatttctgttcccctgtgctatgattatgtgggaaggaatctgcaaagtgagaaataacattcaaaatgttttctattaaaaatgcttaagttttaaggtttacatgttccacaagttatgtttaatgtgtactagaactcctggatgaaaattggttgtcgaattttggtggttgagggtcaacgcactgttttggtttgtcagtttggttgtcgaatcatgcatgtcttacagaactttttttttggtaatgtcacatattctactatttcattctaattgtattgcggattcatgatgtcagtttgggtaaaacgaatgaatctccaaacctgcctatctatggtttctcagggaacaaatgttggtcttttggggtatataaatatatttcagaaattcaaaattttggcaaattatatttttgtttgaaactagcggaaattctgagaactttcatgtttgaacttttcccggggtgtcgatgtgcatctttggggccgtttgtgcaaaattgttcttttttactcattttgattccacttttcagaaagctctgcatagtgc

SEQ ID NO: 1829 - DNA, 3480 bp, Oryza sativa
  Intron number 1 from transcript LOC_Os01g46760.1 (locus LO C_Os01g46760) derived from phytozome v7.0 (chr-ID Chr1; po s 26652689 to 26656168)
gcggcgtggccgtgccgctctcctccgaccacaaggtacacactccacgccacgcccccacccgctcacctcaccgcctaacaaaacacatcgccaagaaagcatgcatcaacggcatgattacccccccccccccccccccctccaaaccacgcgctccagatccacactaatctagattttgcggggtgcaacctgcaacagcgaaccctgctgcgaatcagggacgcgtggacgtcgtcgtcaaagcaccacggtttcgggctttccgcgagattttttttttctctcgctcgggcgggccccggggggggggggggggtggtggttacgtacaggtgtcgcccttgccgctcgctccccccgcgtcgcctacaacaacaactaccacctctgcttttcgtgcgtgcgggccgtgtcgaagcgtccccgctggctcgcctactcgtcgcttttggtagcgtactgtggcgccgctgccgatacgtacgtgcaaggctacatcaccgcgccctactagctaccaccacgtacgtttgcgccaaaacggaaggcgatttgcggtgaattggagaggagggtgcggtggtgtggtgtgggcgtgtgggactaggccgccttgtcacgttgtgtgcgaatgggggtgaatttgcggagactctcctacctccctggccggagtcgttgggggggggggggggggggtaaatgaccaaatccggcctggagtactaatcgtcgcggagaggtgtcgacacgcgcgcgcgcgcgcgcgcacgtacgtacgtgcattgtgtacgccattggggctagctgtcgagtggtgtaggagtgatagtgctctgctcctggttaccaagtagtagtaccaagagtgtgccggcagagtttggatggctcagagtcagtttggaatagaacggatcggtttctgatgctctcgctatccttgtgggcaaaggcgagcatcagcttttccttgtcctaccagggctaatctgctgatagcgcgcggcatgtgtttcaagcttcttcctggttgtcattacagtgatgcttgagatgatgggcagacagcagcatagggtcagggcattaattagctaaactgggattatggcctctgggaagaggcaggctaatacacatacaacatccaagatgatttatcctagctgcttagagttgagaattgcggaatcactgccttttaactgacaagtcaggtcaatgtcttcgctaggccgttaggtgctaaattccctggaactgtggtgaggatctgaggatgagttcttccctttgtttatattttgttttgaaatggtatctagaatcgtgttcaacttcatggaaactaagaccatgtttagttcctccaaaatggcaaatgttttgctgttttggagcactttttgtcaaaatggatctaaatactagtagcataagttgacaatctgacctttgtcatttaggagtctagagtagcaaattttgccaaaaagtgcgtttggagccgtgctctctctctttactagtaaaatggcaaaactttaccatgcatctaaacactaactagcaaaacttcaatgccaaatcttttgccaccaaaacttttgccaagaaaatttgccacaacaaattgatctaaacaggccctaagacttttgtgtacagctatgtgggggtttggaaagataggctcataggctgcaactctgcacgtgccgaaaataaactggcaattgccaagagagatacttcaaacatgagtgtcaaactgctttctctgttttgcctgtccctttcctaagtgtgatgaagttccctttcgcggaacgaaaccgcaagggcttctattgccgtaatcaacttgtgttatttagttttgtaagtttggtagtggtatgcattaggagtgagcaaagtttctctttacagtgtttggctaggtctggatttgtaccgccatatgcccttgtgctcaaatagtgcaaccgggcatctattgactcaagctaccttttgctttgttattgatggctagcttaacttctttagtttattgatgccaaattaaaggtctacttttatatagtcaaagttcgatttaactccagctctctaggataatattgctttaccggtttctgtaaagaaaactcccccatgcccttaacaatttacacggtgtttgcatcttattcagccctgttgagcttgaatgtaccgtattggatgtttttcttaattaatatatctttttctcaactacaataaatgtttagatgtcagaaaaaaagctatcttaagctttaatctgtacacaaaggtacttgattttggtattggaggcatctttgactatccatatatttaattgctatattcttcagtttttacaatgctaatgccatgctgtggacactggacagtgctcgtaggtatatgatacatgcctagaaggtagatgtagctatggggagcaaaacgtttggctttttagggtgtgatgaagttgagattggtgtctacagtaagtgtatgcatgaacactactagaggcaggtgaagaaataatgtgttgtagatgctggtgtgtcaagttatatcaagtgtggtagttgtttattgaagtatcgtcaggctgctgcgttaagcattgtcattcatcagctaggcgttttaagtgtcattgtggggaccaacctcgattatatagcatgcaagccttgaactgtaatgatgttcagaaaagatattcaatagtcctatatgtgtgcttgaataaatttgttagcgagatgagaaagttcaaaatattggccacagctcctaaatacgtggaagttcgtgctacacagcacaaccaagatattgtagtcatattgtcacttcatttagatatttctatttggggtgataggaaattggcagagtggttaaggaaggttgttgacaaacaattttcctgttcgttacactgtcaataccgaaaaagctaaaagtttccagtcgcacttgatatggcttgacatatccgcaactagaacatataattttcttgacattcgctgacagttcatgcattatacttcctttagataccaactctgcttcatccaatatgtcctttctgttagagcagctttatacaaaagcactgatgcttcatcatatccatcattttaaaccacaagttgtgcatattgtctcgtctgccacctgccgagtacaaaaacataaacttcataatatcctgaaatgtggaagttctgaactatgtattgctccctttgcctaaacaaagccttttatatttgcatttttctcctgtgaccagtgtatttttgggggttagcttcctcctttagtacttctcttgatttgtggtttcattttgtcaggggcgtaatgcttgttgcagcaaatgttaatgaaacttttgttgactgtacacagccagacagacctgacgag

SEQ ID NO: 1830 - DNA, 1641 bp, Oryza sativa
  Intron number 1 from transcript LOC_Os01g41834.1 (locus LO C_Os01g41834) derived from phytozome v7.0 (chr-ID Chr1; po s 23689212 to 23690852 reverse strand)
gtggatctaaaggccaagtttacaaaaatatgtaagtaatactcaatatacatagactcgatccctccagctacaaatacaaatttcgtgaaaaacatcatacgagctaaacaacaaggattaggtaaatactacggatgagacatccgacgcatcccatatgattggctaaaaacgaatcacttttttttatcctatattgtagggtggatctcgaaagataggaaagatctcccaccaagatgtcgatatgacttttatcgaatacgactttacatagtattctatagggatctatgagaccgagtgtggaaatcagtttactcacttaaaatttattagtatccgcctccctccttttcctgtattttccatattcataccatcaagttcttaggtttcaaaatagtgtaataaaaaaagtgcttcgaatcattgctatttgacttggacctattctgaaaaagtcgaggtatttcaaattgtttgttgacacgaaccgagtaaggaaaaacctgaaagtaagccttctgcaatctagcttttggtttaaaaccaaaagaatatcctaagagtttccattactattaagccaaaagctaaattgaagaatttttttttatcttgtgtgatatagaggtatgactcactactacgaaatatatttttttgtggcggctaaattcagtctttcctagcggctaggctagctgcctgtgaccaaaagccaaagaaaatctaaggtcttcacaagcgggacttcaaccaccagtgacatccatttctgctagcggatatgctaagtcgaccatcagcaataataaattttggggcaaaacattgaaaacacccacatgcagctactctatcgccgccagcaaagatatgttttgaaaaacaaaaatgaaaatgcctgcattcttctaccccgcatttccaaatccacattctcaaatcccaaatccacataaactagcgcaaagtctacaaaaaatggtttggtcataatcacagagcacaaaaatcccacaaatccatatcacatagcacaaattctacaaagtccacatcacacatcgagcacaaaaaaattcacatcacatcatagagcacaaggggagggcacgtggaggttggcgagggagtgaggatggatttgtgttcctaagggagggcgtggctggccggtggcagatctgctcccctccgccccttgcccgcgcctcttccgaggcccgacggcggcagatccatcctccggagtctcaccaacgccggatccgctccccgccaccctccctcgtcgtcgtcatcgcctggatcgacccactccggccagctgaatccattaacggggaggccggggtggccagattcgaagcctccggcctccccgttggccgatgcaacggtggtggaggcgactgcagccggtagcagtggagagaggagggaggccgaagggaagagggagaaaggtgggagagaggagggaggccggagggaggtgggagagagactggggtaggtgggtggttataataattatgcaagcggtgcactttagctaccgccagtgaaaattgaagtggtctatgtaattcagccgccattgaagagtcactttcactagctgttctt

SEQ ID NO: 1831 - DNA, 7472 bp, Oryza sativa
  Intron number 2 from transcript LOC_Os06g04399.2 (locus LO C_Os06g04399) derived from phytozome v7.0 (chr-ID Chr6; po s 1879973 to 1887444)
gagcctaaagtgccgctcattttggtttataatcggtgagatcttcacattctatgtccttaaggtttctcaacatgggatatttcatatgatgtgattttattatgttgaattaatctgcaaacttgctgctttgttccattttttgtcctcaacattaatccacaagattagagtttgttggtatgtggaaacaatagtaatgctattctcattttggttgctcacgatcctattaagtcggttctccatttttgcgtaatgcttgctattcaaagtgcactgataggaaacaaattgtattttaaattctttcacaaccctactgcgggcttccgtaggaacaattccttcatgtctaacttctagtgtaactctggggtgatggggtgcgactgcccttcaaacttctggtgtaactctggggtaatgtgggtaacttctggtgttatatgatcttcgattgacaacaaactcctgcggaaaaaggcattactcttagcaaacggtcgataggaagtcagtatgaagaaaacaatagagtaccttaccctttttactgtattaatgatcagatgtttctgtcggtgttagcaggtcttcagatgactgtttctgtcggtgttagcaggttttcagatgactacaaactcttgtggaaaaaaacattagtgttagtagctggctggcaagcactaagtagtcattacaaatacaacaatagagtaatagtaatttgcccgtgctaacgctacggtatatttagtatgtttccccaaaacaaaataattcaaaaatagtatgtttttaaatttttgccaaagggagtagtaaatctagatggagcaactaattgcatcttacagatatgcgcaaaaaaaaggtaaattgtgaatatttgcaaatgtatcaattttgtaacatgaattgtctcatttctttcccaaaaggaaagatctaataatttttttacccacaaattgcacacattacatcttgtcaatctcaaattcctatccataaattttacaatcagaacttcacgtttaacgacctacaaatctctgcccatgtctctctgtcccagatccgcgcataacccatcaacacattttcctagaggatgtggatcactcccacaactcatcacccaagaagtgcacctaggtgacacgcatattgttatcctaggattgttgcagcaacatatttgatagtaacatggtaaatttaatgttatgtgcaacctcatttaacagctcaacttttataatattaacaaaaatcaatattttacggtacattacttattgacatgtttactcatttgtaaaataaatttaaaagcattgtacaatacaatcatgcatttcatcattgcacataatattttaatcagaaaattgcaccagaaagcaacgtacatgacaaagcacaaaaagtcatattattcattattggaccatttgctcaggtgatcaacagcatactaattagctagaaacaacaatagagtaacttacttgtctgacataccatttggtgttaatggtcagatgttcatgatggtgttatatgatcttcgaatgacaacaaaatcctgtggaaaaaggcattaactttagcaaacgctcgataggaagtcagtatgaatacaacaatagagtaccttactgtatttaatgttactgggtattaatgatcaaatgtttctgtcggtgttagcatgtcttcagctgactacaaacttttgtggaaaaaagtattagcgttagtcgccggctggtaagtactaagtagtcagtacaaatacaacaatagagtactactccgtccatttcaggttataagacattttgactttggtcaaagtcaaactgtttcaagtttgactaagtttatagacatattaatatttatagtactaaattagtttcataaaatcaataattgaatatattttcataataaatttgtcttgggttgaaaatgttactatttttttctacaaacataatcaaacttaaaacagtttgacttcgaccaaagtcgaaatgtcttataacctgaaacggagggagtagtaatttgcccgtgctaacgctacggtgataattagtatgttccccaaaacaaaataattcaaaaattgtatgtttttaaatttttgccaaagggagcagtaaatctagatggagcaattaattgcaacttacagatatgcgcaaaaaaggtaaattgtgaatatttgcaaatgtaccaatattataacatgaattgtctcatttctttcccaaaaaggaacatctaataatttttttatccacaaattgcatacattacatctggtcaatctcaaatttctatccgtaaattttacaatcagaacttcacatttaacgacctacaaatctctgcccatgtctctctgtcccagatccccgcataacccatcaacacattttctagaggatgtggatcactcccagaactcatcacccaataagtgcacctaggtttcatgcatattgttatcctaggattgttagtgcacctagttttcacgcatattgttatcctaggattgttgcagcaacatagttgataataacacggtaaatttaatgttatatgcaacctcatttaacggctcaacttttataatattaacaaaaatcaatatttaacggtacattacttattgacatgtttactcatttgtaaaataaatttaaaagcattgtacaatacaatcatgcatttcatcattgcacagaatatcttaatcagaaaattgcaccagaaagcaacgtacatgacaaagcacaaaaaggcatattattcattattggactatttgctcaggtgatcaacagcatactaattagctagaaacaacaatagagtaacttatatgtctggcatagcattgggtgttaatggtcagatgttcatgatggtgttatatgatctttgactgacaaaactcctgcggaaaaagaatttaccttagcaaacggtcgataggaagtttactgggtattggatgaacagatgtttctgtcagtgttagcaggtcttcagctgactacaaactcttgtggaaaaaagtattagcgttagtagctggctgttaagtactaagtagtcagtacaaatacaacaatagagtatgtagagtacgttaccatatttggctgttagattgtgttagctatcaggtgttccaattggtgctagcagattagcgactgtttcctctagtgtctttttaacaggggaactgtgcttgtttgggtattttttagcttgaggtttggctttcttcgcttcactgttggctttcttcgcggccttgctagcctccattgcctttttcgcttgtagttgttgtgctcgaaggcgaagcagattcatcctctctaaattctgtttgcggtgttgtttagcatgtgccttttcttgtacagatggtacccaatcgtcgatcccgcactccttgcagtacacgtactttaatccgtctctgttgtcagccatcctgcagttctgcaatatgtcaaattattgttgcatatctgctggcttctcgtctcacaagtctttaatactcattaatattaagaagttgattacaggttgcaaagatattaggtgccagaatgcttaaggctgtgtttagttcacgccaaaattggaagtttggttgaaattggaatgatgtgatggaaaagttggaagtttatgtgtgtagaaaagttttaatgtgatggaaaagttaaaagtttgaagaaaaactttaaaactaaacacggcctaagtaagcagtccagcaatgcggtatgcgaaattattcacccaagtcataatatagaaagtgacagaatgataagcagttcagcaatgcagtatgtcaaattattatgtcatccaagtcattacaaagaggttacagaatgcagagaaagatagtactaggtgacagattgataagatgttggtggcatatgcgcttataagctagggaattcaggaagcgcataatcgataccacacgttgataggtctgtatcaaatcagatacaggcatcgctgcagcctagtttaatggcatgtaggtagattgtttttttttttttttgacagagaggccacggtggaaaacacatgcgacccttaacaaaagaacatctgggatgcgacaattaagctagggtttgacaattttctaacgaagttgtaataatcccaaagcacgggcaaaatcagatctccacgcgacgccgacgcgaccagaccacgctagagaggcggtggcagcagccgtcgtaatcgaagacgagaggaggttgaactggagaatcatggtgcgggtgcgtggatcaggcgagcgtcgaggcggtggagaagtagggcgcttcgtacgcctcgcggagccgggtctccacctcgtcaaccctttggccggcgagtgcgtcgctggcgctctctctacccgcgtccaatccaatccctcgacgtccgtgtcgagaccaagaccaagaccaaaggtttcttcggcgcccgttcccttctcgataacgctgtctttttgttcgttttttttaactagcaaaaatacccgtgcgttgcaacgggtaaaaaaattctaataataatatacgtttttcatgtataatcatgtcaatgacaatgtttctattttaacgagcggcttgtttttttataaacagtgttttttttcttgcgcgattttctcaaaccatttttcagaaaaggcgcatttctttctaatagttttttcctaccatgttttttttgctttttcacttacgaagaaaaccatatttttctcctttttttgcttttcttttctcgtgtgttttttcttgttttctcccacgtttgtttgcttgtttttttcgaaggatcttttttgcttttttcaaatacaggagaatatatgacaaaataaagccacatagtagatggcaaaaaatcgatggatcctatccgactcaagcgtccatcaatttagcttttttctgacagttttttcagaacgattttttttaatagacggtgtttttttcttgcacggttttttaaaacaattttttagaaatggcgtgttttttcgacagttttttccttgcatgttttttttaaaatattttaccgacaatggaaataatttttctcgcgcgtctttttattttttttattgatgatggagaacctttttagcgtgtttttgcgcttttttctgacttttgcctcacacgttattttaaccgtttttattttctcatgcattttctctttttaaatagttagattagagatagagaagagatatatactggttagaaatcagattttgtttcgccctttccattttttctctcttgcattttttattttatacgaaccagctttttattttttacgaaccattttttcaccattttcttaggaaatcgaacgaacttttttagatgtttttttgcctttataggaatcagacttttattctgtttttaaaggattcgaatctagtttttttttgtcaccactttttttttgccttttatatgaatccgatttttttccgtcggatctacagtttttttggccactcaggaaaaaaaacttttgttgttgttgtttttctttattttcttttttgtgcagcttttcttttttccttttatgcacctatctgtctttgttctctttctcttttattattttttttagcaaaaacaacctcaagtagcttgttgcaagattatagggactcaaatgtaaatataaaaaatacagggactcaaatataaaagtacaaatctaaaaattaaaatcatataaaaatggaatgctctctacatgtagattccgtttttgctaacagatcttcaatccggcacattaatttttttcaccaatctgagtcagacttttttttttttgcttttctttttctttttatgcacctttctgcctttgttctctttctcttttattttttttaacaaaaacgacctcaagtagcttgttgcaagattatagggactcaaatgcaaatataaaaattacagggactcaaatataaaagtacaaatccaaaaattaaaatcatataaaaatggaatgctcttgacatgtagagtccgtttttacaaacagatcttcaatccggcagatcaatttttttcaccaatctgagtcagactttttttttggttgatataggagttggacttatttttttttatcggacaaacatggttttttcgccttttttctgtggatcggactctgtccggttttttttggtttttttcgccttttttttctgtatcggactctgtccgcttttttttggtttttttcgcccttttttctggatcggacttctttttccgttctggttttttattggataaacctggtttctacccggtttttttcacccggtttttttgacggacgatggaagcacctcttattttttaagtagtagagatagagattatagggtagcccctatacgtgttactacgctagatcgatccactaggaaggttcaatcccgctggtgagggatttattagttatcttatctggcgatctgctcttccgattctagatcagtaaaggtttctcggacctgacaagatcccatcatactggatgctagctttggtttctggattctctattgttgaagtttttagctgatgctattttggcatgtttccttgtatatggtgcgtaatgcatggccgaatggtcactggcagcgtattgtgcatgacagattgacaggttactgattcctactttaggcccctgcgtgcttgatccatcgtgtaggttcaatcctagccaggttgtttgaaatatttgtgaagtatcggtgctagattgtcttttaagccttgttcgtttaatccctctcgtgagaattgagagggatttgaatgggatttattcttcaatccccaccaattcctctgtcttcgggattaaacgtacaaggtctgtcttcggattaaatgaacaagaacttaagggaagtggtacatctaatgagctttaagtctgttgatgtctccatgacagtaaaagactgttccgtacttattgtatataaaactaaccctgagaaattaggtttacgaaaaagcatcattgactacatgaatgacttatttgagcagtgaatgttggtttttcttttccccattttctgagagattgttttggtaggctgtccatggtagcccaattaatcacgcattgtaactatgtgattgtctagatctagtgcttttcaatgaagtgaaatattattttcattgatggaacttactgtcatttcttgctttttttcgttacttgatggaacttcaatcttcttttcttctgcaggattagtctttgttcagctgatctgcgcaatccaa

SEQ ID NO: 1832 - DNA, 1601 bp, Oryza sativa
  Intron number 5 from transcript LOC_Os12g15314.1 (locus LO C_Os12g15314) derived from phytozome v7.0 (chr-ID Chr12; p os 8726817 to 8728417 reverse strand)
caaccttgagagggatcgaacgaactaatttggaggtaattatttgaaggtattaggatagtcacaaaatttatctacatatatatgaagcaagtaaagaaatattattcaaatgctagtttctctatttcttagcaactgaagtactcaatctatcccagaatagttttttacatggtctctaacatagaactttttccttttaatttattttccataagatattatgaatgctcttttaaatacgaatctaataatatcacatgcatggcacaaaacattgttagttattttacttattagtcaagggaaaatgttgattttcctaaattatattctgaaaaaatgtctcaattgttggtgatatagtacatgcagatacaacaaaatttcataaggacgttagattgttcgcatttcctgggacatgaaaaaatcgtatggatcttatttcaaaaaaaattgtatggagaggctatacgctataatattgtgcacatttaacaaaaagattgttggtagataaaaaatctattttccctagaagtgtaagagaatgtctaggtttaccattagggcagtattgttagttaaattaaaatcattctttttgtatcaactcaaaattataacattggataatactatcaactcagagaataatctgttaattgttgatgattttctccaaatctggactgctaaagaaattataaaaccagttaccattgttttatttttgtctggtaactgttttacttttcagattaacactacaacaaggcaatgtggacatatgtttaatatattcagtctcctaaactcaggaagaaattaatatttttttatattgtctgttattagaaatgagcatcattttggaacgttcaggtaaaatgttatccaggattgttttacaaattgtcctcaaggaaaagtttggactattttggtttgaagccctacaaaaaattttgtaatgccaaaatttaggcatgttttggcactaccaatttttttagttaaaattgtctagttaatgttccatttgctaccaatatgatgagaataaatttctagaatgtgaccgaatagagcatggccaacaacaattatttcacttcattccaagctatccctattactattcaagttgccaaaagattggtagagcatatattggcatcaatccaaaacggtcctttgtaaacattattatgtgtatcgtcaatgcaaatgagcaaatctgcagaaattcttagaacatcaggtgttcatactttgtaatattaaatgatagttgtgaactaaggctgtgtttagttcacatcaaaattagaagtttggttgaaattgaaacgatgtgacggaaaagttggaagtttgtgtgtgtaggaaagttttgatgtgatggaaaagttggaagtttgaagaattattttgaaactaaacatgacgcaaataaattgtagcaaaatccttaatcatccaggatattctttggattctatttaatgtaagttggcataatagttcaacaaatcgattctatcaccatggaaaaaaatgtgtgtttggttcacagggcattcttgcatttt

SEQ ID NO: 1833 - DNA, 3533 bp, Oryza sativa
  Intron number 13 from transcript LOC_Os07g08729.1 (locus L OC_Os07g08729) derived from phytozome v7.0 (chr-ID Chr7; p os 4489052 to 4492584)
cggcgtcttggaaggttaagtcgacttattatatttctgccataatttctttaattttgaaagggtttagaaactgacatagttataaatggacataatgtatgtcaagtcataaaatgtactgtggattaaattaattaacattactgctcattttttgggataattagtgaggggatgcaattgaaaggggatgttagttttgttgaaatatcactctatgcgatagttatctcaaattacagctcactagtaatatgcccgtgctaaatgctacggtccaattttatttgtctttaataattttcaaaacgtcatgttagccaaaaaataaaaataaattatatgatctgagctttacgtacatcaaacaattttcacacataacacatcagtctcctttagatgtagataactcaaaataaacacataacacattagtttcctttaaaaagaataggcaatcgaagaaccatataatatagatagaattccttgatatgccaaaggacaaaatagctgaaaaaatatatgttggctagcttatgaaatgccacaaaaacagaaatctaactttagaatcaattaaataaagtttgcatatagtttgagccagaaacatcaaatagtaatactcccgcaaatcctaagatatcatttgaaaaggatgtgctcgagtgaatagtgatacaggccgccctccgaaccttctaaatgaactcaacaaagcaaaattacttagtggtttcatatttaaccatacaaatagttaagccaaggcactgtcatgttctaatattcagattagcattcaagtgtccatataagccctaacaatttattccacttatacttaaatccaacccattcaactcacgttatacattggaaggaggaactacatagagtagagctctcagcgttggtgggagattacacaggaaaagataaagctaccaacaaaattcagcaaccttaggggattactgaaatgtgtcactctcgccatcctccggcatccaaaatctgctctgaaatcctctgaattagcttctaatagtgatctcctcatggaaaacccaccttttagaagcagaaaagagctatcaaagtgaaaagagtagtagttattatttctgtcaagtacagataaccaagaacatatttgttaaaattgtaagttttatccatcgagacagaacagaaacataaataactgaaaagttggactcttgtgcatctgtaagatttgagtgaataaacactaaggatggaccatagcagcaacttgcaaagcacaggcttttttagctagtttatgcaaaggtactcaagtgtccatagaagccctaatgatgcattccacttatacttaaaatggaaaatgtcaactaaaccaaaaccatcgccaattaatgtagtccattaattatccatgctaatccagttcttccataattatgcctactaacataagatgccataagtaattacaggaggcctcccatctggatgacagaagagatagattgcttttagcaagaaaactgaataatattttttaacacaaaaaatcgcaagatacaataaaccagtccaatcacttaacccaaatgagaaaactgtatgccagatggataccttgttggtctggccacaatatagaacactcaagaaatctagaacgctaaagatgtgctcaatgaaatgcgtctgtgctgccaacttcacggtcgcaccagagctgctcccctacatgaaaaaaagaacacaaaataaaaaaagaatcagaaaaaaggaggccacaatttccttcagcggatgccagcttagaacgaaagaggttccacactttgtatccaaccttagtttcactcttgttacgtgcatacacaaacaacattgccttgcacactgcaatatagaaataatagatgaagttctagaaatagatggatttcgttactgcttaaggcctcaacggacttggattcgccggggaccacgctccttgcccgcacttcttcagatcttgttgcagagaagactacctcctgacctcttccaccactctctccgcatcctgcatgaagcagagtatcatgtatgatggacaagatgataatggtgaataatatggttcttatatgcttaccatgtaagattaaatggagatgatgcgggagagagaggacactgggagcaacgtggtcacggtggattgcgaccggcgcccggcggggcgtggacgcggccgaggagagcttaccttgttgcctagatcgtgtcaccgctgtacgcctcccattcggcctccgcatccttgcctcgccgcttactaccgcccgcctgaccgaagaaaatccctcctacatctgccgttgtcgcgtccttggtcctataaccggccaccgcctctgctggcgcaagggcaacgacggcgctagtgttgagggggcgccggtgtgtggaagggctcgagggcgaggtggcacaccgaatccccaggaggcagatatattagcggcagctccagtcagccacggcctagatcagcgatgcgagcggtggtgacggcgacgtgatttgcgaagttcggcgtgatttttgcgcagggagggagggagggagcgcggtggggatgtagagagcggatctgggagatggagagagggtggcggagagccggagaggggttgtgctgggttctggcggcggagcgaatcgtcggcggggagggctgtgcgacggcgattttgcggagggaggcgcgggatgggggtgcgacgtgcgagggcgaggccgtgagggcggcggctggcgatttggcggagggcgaagggcggtgtgcgaaagaaaagggaaaggaaaccgagcggtgatcccgtgcgtgcgattttccgctggtgaccccgcctgctaagttgttgattctgatgcgtcagatctcagcgagataatctggaccgttccatgatgaatgaaagaatgaaagaatgagtaaaagtatttgttgaactatagggtagataatgtacaaagcggcacagagttgtttgaattgttaaatgacaatagaaaatgttttgggattttttgccaatcttgtcattgcaattcactgagtttttaagaaaatgagaaaaaggaagaaaacaggtgttattttatgatttgtaaagctatactgttgttgacatcagggaatatatttctttaagtcataggctcaaatggtttgtttatttggcacctttttctgaactgtaagtttccagtgatgtcacttaggctttccgtcctaatgcaagtcatgtatttgtgacactaagtgactgggaatatgtattccgtcctaatgcaagtcatgcataggcaaaggtcctctgtagcctagtacatgcttatactaaccatgcatatgatatttcatgtggtcattttatatggttacatggtgcatttgaaaacttacaattatgaattgtaccatttcaggtttgcacttgcattttacgggaatccaactcgcc

SEQ ID NO: 1834 - DNA, 1200 bp, Oryza sativa
  Intron number 5 from transcript LOC_Os01g61110.1 (locus LO C_Os01g61110) derived from phytozome v7.0 (chr-ID Chr1; po s 35373205 to 35374404 reverse strand)
atcttagtttttgttctctgaaatatttcagtctagtaagggccttgtgcttcaaattatagtgtataagcaggttgatgctctgatctagctttgggaatctatgagagcagaaagctatgctatgaagtaactgaatatttttggttattgccctgttacagatatgtttatcatgttaaattattttattgtggtatagttttgttgttttgtaaattttggtatatgttattttagcatttgaaacttgcagcatgtgcagaagtttgcatgtttgtgtggctgagtgttgatatacagatttgaaggatgcttgagtgtggcctgcttttgtgatattttgtttgactgtgtaggtctatcatttaaaaaaaatctgattgtattttagctatttgtagttttaagaattttggtagttttattaagtaggtaccatacttgtttttaaatggaccttttgtcaagggtgtggggtggtatttgcagttgctgtttgatttgcagtaggtgtcctgtgagtttaatttgttcctttagcaaaaagtatgcctacacatgaagcattatgcattattaatgttttttatatatattctgtagaactgtatttgatttggtgggaagtatttatttatagttctgaatgttcactgatgtaatatgattgcattttagtgatgtactagtttaaaccacttgatacgcagaattttgtagtcatttattgtttttttgtttttgccagatgatgatacatatgatttgaattaagcaaatcaaagttctgcacatcatcaggcaagaaaattattcattctaagtgaaaagaatgattaaatttcttgtctgatgatgtgcagagctttgaggtgttttttaaatatctgatggcattttattttttattgtatatttcttggaagtatgaatgataattaatatcttaatctgattcagatggttaattttgtttaatgcaaaaaagcacacaaagacctttggacttggtgaatcatttttttatttgatgcaaatatagtgtttttgatattttgtatgtcaagcatgatgcaagtgttctgtgttgatattatgtacaactataaatgaattggttggtattattatttatagtgttgaatgtttagtgatgtggattcaattcatcttttgtttttgttttataatatgtag

SEQ ID NO: 1835 - DNA, 3661 bp, Oryza sativa
  Intron number 2 from transcript LOC_Os03g29180.1 (locus LO C_Os03g29180) derived from phytozome v7.0 (chr-ID Chr3; po s 16579417 to 16583077)
gtgctttcccgaggaaggaggctgcgctcgttgaggtaactttgcttacggtggtgggactatcttgtgtatctttttcaatcggtggtgattcgcaatgttcttggcaagaaaagaatattctgggatgctagtacattgtactggagaggtaaggaggggacatagtgatagtgtactcgaggtatgatgatttggatatgcatctattgaatttggatcagaacctataggtagctaacacaacgaatgctgtcagtcattgcctcattggtatgataattgttgtgcacctaatggatgatgctcgtgatgaacatgagtgcttcaagtttgtgatgtgattcacgacttctattttgtgaactgatattagcacttgtagttgtagaatgtagataaaccttccaggcaagcgttgttgtactacatggataaaagcatgaataatttgtacctagaagctactagagtgttataactgtgatatatggattatttcacattcataatagggcttgtggtatctgttgagaatatcttagattattcttaaagttggttcatgactgaaatgaatagattttggattaaacttaattacgttcatatcttgattctgaaaatgctaatcaattgtaaataaggtgatcataaaagtcagacctgcttgatatccagacccactttaggtttgggaatgttgtggtgttgtttttgcttggaagtatagtgacatgtatttcgggaatacatagacaaatccctatctaaatttggtagtaggggtcctgtgcacttaaattgcacatttttattgttgaatatacatgctttgtgttctacaaaagaaaactgcatttcccccagtttctagtttcaacttctaattgaagcattgatttttctttacacttttggtattgacttggtatcactacaaattaaatattggcctctcctactaaagtgctcattttatgtgaagttatgaacagttcaatgttttctgagtgacaattttattgaattgttataaatgcatgaccatcatagcaggtaaaatctggggaaatattgatgaaatacaagcaatgtaacccatttctccatatgcacaaaccatggatctttttcggcaatagtgctattatattgtgttatgtttcatatttggttactagtgagcattgtttcatgaaagcattggcatgcagatgttttcattctgtctcatgctgtagctgggtcagtatggtggatgccagtcccatagggcaatatctgttagtcagctataatgagggaagtgcggggtcccattaatgagggaagtgagggatgggttagtcaactatgatgccagtcccatagggcaatatctgttagtcaactataatgagggatgggttactttatagtaagatgagatttggtatgtcttaggatgagggaagtggaacttatggaaccaagagctgggagcataccagatgcaacccatcattatgatgctatcattcaaccctgtttcagttgggggtaccaaatcaatctgaaaagctcacataagaatcaatgatataggctatggaaatctggcacttcaaaatttcagctgcgaactcaaagtgcctttgaagaaaacaaaaatacaggaacaataggatttacttaataaccttgatttattttacttgttactcttaattccacgaacttgaaatttatacataggtgacagagagtatacttgtcagtacattttcctggactatgacatgttgattgggtacctcaaaaaaactgagttgcatgattatactatgctaagttgtttaatggtcagcagctcagttttgagaaacactgtagaggaaaacatgtttttttttcccagaagactccttgatccttaaataaacactattcctctggctctgacacctttcctgcttcaccatggaaaacatcacaaattacatagggatgccccttgctcagccaatagtgctgcatcttccttcaagaattcataattctagttgtatattttcaatcactatgaatgtaactgtttaatttgaaaacctggttgttgtcacagctggccatgacaaacttgctacaattcttctcatcctcatcaattgtgaatcgtcaccagctgctatgcttgagcgaaacagcctagattgttaatctgacttcttagataagagttcagattgtgaaatgtttctgtgagaattaagtgcttccgtttgtgcagtaaggtcgatgtttatttgttaactttctcttaatcttaactaggggatatccccacgaaattttgcgtggactagttgaattgaattggatttaactatattttgtacacaccagatattagaagtcggatactcaaattggacttatacaactcttctcttctctttctatagatacaattgtactttctgtacagctattactaccaatttacaccgttataatttggtcccaccacgatctaatggcatagattttatactttttctccgattaatatggtaatctctaggcatacattgtatacaactattgctaccaatctacactgttataacttggtcccaccatgatctaatggcatagatttttctctctgattaatgtggtaatttctaggcctccagagcaaatgtggtgcctctttttagagttatcttcataatataatagatagatggatgccctgccaagtcttctgcgcattcccggagaaaacatagttgtgcatccttttctgtatgtgcatgtctgggcaacatagggtgctactcatcaattttttaaaaatagatgctctttgaaagagggcaacaaagaagagggaaaaggatagacaatttgtgggagtagccacagaatatgaaggaactcagcaagaaggaaaacgaatcacatgttgcattgttagtggctaatggttaatccacaatactttgactggtttgagtgacaagcagtagggttgggttaattacagctaccaaacgtttctagagttgaaatacttaaaaataaatctgagggtacattacaaagtctcctgtttaagagttgtgacagtatttggctgtaaatttatttatgcattgtttgtgactctctagtgaagcccttgctgttatcttgaagaaacaaagtagacaggtttcctatcaatactaagaatgttcgaattatatttatccttattttttcatttttattactatcaatgttgcaaaatagatgaagtaatttgagttcatctagtttttctctcctttttttgtaatggtgatttggtgcccaaaacaaattttcatgattgcgccttctattatggcttcttcccacgttcaaacatagtatgacctcttaacttaaacaggtctgccaggtaattgaactaaaatactcgataggaattctagggagatgtcttagtttacttagcctacaatatgttttgggatgttccaaaaccttctgaaaaacagtgacagtgtagcagactcatgacataaaaatagaagtagtaatcttttgcacgttaacagtgtatactatgaaacaaagcctcaatgagcctactctgaccgttctgtttacttatgtgcagtttttc

SEQ ID NO: 1836 - DNA, 1567 bp, Oryza sativa
  Intron number 2 from transcript LOC_Os03g53720.1 (locus LO C_Os03g53720) derived from phytozome v7.0 (chr-ID Chr3; po s 30797876 to 30799442)
aggtatgtctatttatttctttccaagacatttcatatctatacaaaacttaactcaaactatcacctgtcaacactttagcttaaaaaaataggagtctatcacaatagaaatttgagtgatcaagccaaatgacatctactggctacagcccaaaactccagtttggcatgtacctaggttttcttttgtgacaatacttaaaaggaacatcactctgaaatttgatatttgtcaacatctaattgtgccatgatctcataaccaaaagcaaataaaatgaaagctacaaagattgttttggagaaattatttcttaataaagcttgagcatttcgatgcatcttctgactcagatttgtgggattcggtaggaatctaaccaattattccagaaaaaaaatgataatcaaattttaaatattgtaaataagaacatttcgttttgaaggcgatcatgtttggacaatggtaaggttgatatacataaaacattgtggggtaccggcctgatacagctcatttcttgttcatgtttgcttactgtttcacaataattttgaacacatagtatattttcttttcatgcttagttatgagacctgacaaggcctccaaaccaaaccaaccaccaccaccatacacaattacacgacgcaccctctcttcctccttactcgtggaagaagtactgtagcacataagatgacaggagaaaactttgctatgccatgtgtttattcaatttgtagtgtacttggctattcgagtctgacactttccttttaaccatgaataacatgcacctatgcattagaaactcgctttgttcaagaaataaacgaagtttcggttattggcagtttggcatggtctctggcatacatactttactattataattgtgattttatcattttgaaaatctgtgaacgtactcgtctacatcacgtgttctacagaagctataacttgtagtctataagagagaaaaaaagagagaatgaaactaagtcataccaatgtgataaaagccacagttttcttctaaaaatgatcggcaacagatgaaaggtaatgttaaggactggtctaagctagttcttttcaggtatgtcatatggttatcttgattgaatgaattctgaatgtgattgataaatacatttcaagtttgtggtatatggtattggaacatatcattgactacatgaatgcatgatgccaattgcttttttttgtcaagttgcattataagctcaaaccttttattcagttgtcctagttgattgaccacttcatatttgtgggaaatcaactgctgaatttattcaaacttttcatttagcaatattactaattgaaaagttctctgagtaatctttttataattcttaaacacctgccattgtttggagatgctgtgtgaaatagatatgggcaagtagcaaaaccataatgatagatatgaaatctagttgtcttccctatagtacagaatgccatccctttccattggaagtttattctgatcaattcttgcttgaagcaggatcacctcgcgctg

SEQ ID NO: 1837 - DNA, 371 bp, Oryza sativa
  Intron number 4 from transcript LOC_Os06g50050.1 (locus LO C_Os06g50050) derived from phytozome v7.0 (chr-ID Chr6; po s 30334101 to 30334471)
ggcgaaaagcagatgtgagtattcattccttcttgttgcttactgtgttcactgctgattttttttagtattactaccaccattaattagttcattattacttcctttgggtaatgtttgtctacaccagttgaccttgcgaacggcaaacctcatgcatgaatccacttgtgccagcatagccgctgattctgtttaattggatttcatggtcaaatttcatttacagtttctagttggactttaatgatacagtaataactgaaacaacatcagattgattattgcccattacatgttggttctgactatcttgcctcctgattgctggttcagaaaccaagacccttgaggcaatcggatctggagaa

SEQ ID NO: 1838 - DNA, 2902 bp, Oryza sativa
  Intron number 1 from transcript LOC_Os02g36990.1 (locus LO C_Os02g36990) derived from phytozome v7.0 (chr-ID Chr2; po s 22334162 to 22337063 reverse strand)
tcgacagcaagcgcctcgccctcgccctcaagaaggtaaaaccatccgtctcgccattggctacagtttgttcaagctattcgagtacacgtagacagtggcacagtgcagtattggggtggtaaatttgtactccctccgtttcaaaatgtttgacgccgttgactttctagcacatgttagactttctagcacatgtttgaccgttcgtcttattcaaaaaatttaagtaattattaattcttttcatatcatttgattcattgttaaatatatttttatgtagacatataattttacatatttcacaaaagtttttgaataagacaaacgaccaaacatgtgctaaaaagtcaacggtgtcaaacatttcgaaacggagggagtagtaaagaatatggttgggggattgagaaatttgggcaagaaatatgggccaattccctacgtgcccatgtaatttcacccaatcccttctacgtccctgagatttgtttgatctcttatatgcccctgagtttttatttggatcccttacatacccattccgtagttgaccattagtttgaccgttagttattgtagaaattactttgttgtccttggtatattgttaaaagctagaaatgttttatgtgtaaattatttgagttgtgaaaaccaataaggaaaattactaaatatttgttatgaatttttaaaaataaaaaattatttcattaaaataaaaaagatttattgtaaaaaaagttctgcataaaatttcaaaattacttttcaacaaatatttagtgaaaaaagatttgttgcgaaaaaacaaaggggatgtaattagtttatcacaaattagaaaacaaatttaaaatttaaacctaaataacatttagtttttgctcttaattttctggtgaaactaatgtatggatttaatcataagttttaaaaaataaaaaataataagttttattttttaagttgggcattaaatgattatattgcttgtattttgtataagttaattttttcatatgaaaatttattaggtaggtaccattgtataggatgggtaatatagttattttaaaatatttaacggtcaactaatgatcaactaacggagatgggtatagaggagatcaaaatgaaaactcaggggtatataagggatgatgtcaaattcaggggtattgaagggattgagtaaattttcaggggtatattgggaattttctcaagaaatatatagcctcacaactcaagcaaggaggtggctagtgatgggaaccttaaaaacaggaaaatgggaaaaggaaaacgatgtctttgaggctagtttagcaaaaatagatagacaggtgcaatgccagcatctctattataaataactggaagggatatcttgaagaaagtgactatggttgaaaattttctgtttctgttagagatgtgttatcatttggtcccaacattggataggggaaaagctactttagaatcatataccagaaatgcaattgtgacagcttagcctaacacatgtgacatccagcatttgttagctgtgacccgtgaagctcagaagctggcttttgttttacccctgtgttgtaagattcattcttcgccattcccctaacagaatttcccattcatatatgttgttgttcacaccatctgatccttttgctttgtctgattttatattttagccggagtagctcattacctgagcattaaaatgtggaacagatcttctagaaatttgttgattacaagaatctgagagcaatctagacttctgtgtgctcaatggtagattaactaaatgcatcctctaaagaggtacgcaaattggttgcttaaaaaatggatgcatgccatctaggtacacaatattttgctttgtagttagatggttttcattcaaggtttcaattttgtgaatgagtgctatttgttagcattggtcgtcaacatatggctaaaacaatgtaataatggatggtaaagtgcattccttgtgtagaagcctgaataaaaaaaatactttgtctagaagaagtaacagtattttgcttttacttatgactactttgacagttcgacttagaggtctgcctatccttcttaataacctcaacgtgctaacttatcaacatcttaactcttacctgtggatgtggtgcaaaagaatatttctgtgtttacttcgtcatattctgcagtcttttttctgagaatacacaaatgatttgcgcatcattgtattaagaagaagagttacttacaaaattgcagccctatctgaagtcagaagaccgcttgacccaacaagattttctgcagtcttacaccttttgtaggaatgatacttttatagcaaacctcctatgttaaataaatactcatgcccaaaggcacctgctacttgaaataattttttcatcaggcatttatgtatcacatgaaaaaaaaaactatatgaaatttagatatccctgaaaggcagatgaaaattagggcacatttttttagtcctaattgccaatcatatttcccagcaccttccatcgaattctgttgttcagcttgttcaaggttcacacaaaaaagttcagagtgcatgtctgtaagctctgattctcagtgctcctaaactggctatgtacaagtggttctcatatggatggttggttactacagaatgctaatgctcagaatatcggttgcacttgcacggttgcaccttaggttaaagtttgtagcaacttccctactgtattattatttttccttttgaacactacgttttacattatttttcactgagccaactaggatgaaatgtcttagccattgttaatgtggtttttcattttcttgcaggaattcgacgcaacat

SEQ ID NO: 1839 - DNA, 515 bp, Oryza sativa
  Intron number 4 from transcript LOC_Os07g01880.1 (locus LO C_Os07g01880) derived from phytozome v7.0 (chr-ID Chr7; po s 530056 to 530570 reverse strand)
ttccacttaagcagccgccagctcaaccggacagagtgagttgactacccctttcgaaccatatatctttcagtctttgaccatacagcactgttatcttttctgacaagatgattatatattggcagacatcagttatctttgatggatatttattgcgttgctgtatatacaccagatttttatttgtcattctttgtatctgttactgtttaattgctgatattttgtgcttgttcgtaaatgttgttgtgcagaactgcacaattgactggtgcagtacaatgtcagaaataaagaacctgtgctgctatgaactccatgcttgtacttattatgtgacgttggccctttagtagttgaaatttcttttttatgtcatggtattattgaagagaactttgctgtcatgttataggcttgactaggaatattaatgattggtgcttaaatattttgtgcttttgcagctattcatagatttttttgttactgactgatttcttaacttgtag

SEQ ID NO: 1840 - DNA, 1435 bp, Oryza sativa
  Intron number 4 from transcript LOC_Os08g32090.1 (locus LO C_Os08g32090) derived from phytozome v7.0 (chr-ID Chr8; po s 19900767 to 19902201 reverse strand)
agccaaaggtaattattactcttagaaggacatatgcttctttctttaatggaatgccacacagatctcctgcgtgtttgagatgaaaggacatacgcttgtttgctctcattagacgtggcatgtttcggaccacaacttggatattttcctaagacacaagttaattggatataagtttattagatcatggaaactctagcagttaggtgtggcagttccagtcaggccatggcttacttaaggtctttaatcagacctgtactattttgtagtgatgtgtaatttatgtgagaagctaatctaaaatagctctctctatatatatcctatatagttggaaccaaaagctcaacatgcattgagccacatcatcctaaaaatcctgatcgctggagggttagaagaaggtcttagcttatgtgaaactgtagttagtactttaattctcctctattcgcatgcatctcatcgttgtaattgtggtacattcatacagctctatgttttagttggaagactgttgatctcctcggccatgcaactgaagagtttaagtcctttaattttattttgttcatcttttctttttccttagcttgcatatctttttaaagccatttatctgtacatagtcatcccacagcaacacgtggggtatcgtctagttattctagtaaatacgatcactacaaaatagagcaagtggagattgtatttctaacaaagctgactgatagaatttaccatgcatgttacaaactgcagaatatttcccacacatactattttgtatatatgacggccttgtgatgttatctactcacatctgatgtttacttctacctaccttgggagccagtaatgatcagtaaacagctaattctgtttgttgggaacttgggatgcttctattgggatgctcattagcttgagttgtttactactccaacttttttcagatgtgatattgtacttctgtattatatctatgcatgtgtggctgatgtttgtttagcaatatatgtttgtaaacattgttacatgaaagtatgtaacatcgcagatgtagatcaaccatgcatggtagtgattgttagcaattgatccttctgctgtttgttagtttctcatactcattcagctgcccacctaatgatatttgcaaccttgtatgactgtttatgtgttcaactgccctacagtgatggggagggcaaacagaatcttctgtttttcagattaatcgcttgttagattttagaatgtaaatggaaaaacatgacttgctaatatgaacacaaatatacttttttcctattttgcctgtgctacatttaatgtgatgcctttttttttcttattctttgaatactgattttgtgattttacttatgcaggaagaattggtagagaatatttcaaactgggagag

SEQ ID NO: 1841 - DNA, 1414 bp, Oryza sativa
  Intron number 1 from transcript LOC_Os06g12030.3 (locus LO C_Os06g12030) derived from phytozome v7.0 (chr-ID Chr6; po s 6444960 to 6446373 reverse strand)
tggttttgtgctgatctcggagatcccggctccaggtcgagtgatccattttttatttttttattttgttttttttgggtttcgctgggtttgtgccagtgtgttgttctcgtggatggtttgtttgttgggttccaccggatttttttttttttgggggggggggggggtggggcgctggagatggggggatttatggtagggtttatcgtctcgtctcgtgcgagtcggcccgtcggtgggtgggcgggatctcgcgattccgtgttgattagttcgtcttaagcggttcgggtgatttgatgctcgtacgtgctgatgaactgtttgggggcttgtagttttttttctctctctctcttttaaagtaatcccgagtttgccggggatttgaatatcggtttcgtgtgtgatttgctctagagggtatggtttaaggtagagaaatttgatactaacatatgccatccaatccgcgtgccttgtgtgttttgccactttgatccggatgtcttggttagccatggcgttcctgcttgagctcacatggctagaggttgcgcaagtagtacttgctccgtgcgaacgattcaccatctaatggaaatctggcggaagattggatgcatttgttaagtactgtgtgcaattagaatacgtttgcaatcgtgctgtaccagtgtctgccccccattatttatctgacagtctgacagagcgtcttcagatttgtgttaattgctcctgtggttgatgagtctttatagggtgcagcatctcaactttatttctttttaattgtgggaagggtgtactccgtatggctgacagatcgctggggagtaccttaatgaatactcacgaatttattattactagcacagtatgaagcctctgagttacttgagctgtgcataatctgggttgtgtatcgatcacaaggatcaaattggctaatatgtgtagttgtatattcataaaaatgatctagcatgtattatctgttcgtcactaaataaccaaaattgttgagatttcattttcatacccatctaagttatttgtctaaactgtgtgcgccttgtgattttgtgaaaattcttgtgtgctaaaaggaaaatgaagaccataattgcaaatttattatgcatataatttctttcgattgtttaaggcacatgggaataactgccaacatgccttaatcacactattttttttttaaaaaaatggataaggtagatgatcttgagtctgttagtctttgttctacttaccatttatattctgtgtatttgtcttgctaaaataaacttcactttccactatcctggatgttttctttcagttatttctaatatgtcttgttggccatgcaggctgtgcactgaagtactgaacgttcttttgtaga

SEQ ID NO: 1842 - DNA, 3456 bp, Oryza sativa
  Intron number 20 from transcript LOC_Os04g09860.3 (locus L OC_Os04g09860) derived from phytozome v7.0 (chr-ID Chr4; p os 5286889 to 5290344 reverse strand)
tgttactacaattcataacaggtatctctccaccctggtgagcgccatgtacttgtccctgtcgtcatttccatgctcagagcctcagttatgttatttcttggtcaattctgtagttataaacttataatctacatttgagctatcatgtaggaaattttaagtggaaattttagtctgcctttttaagggatagcatgattttgtttcacagttacatcatatatttctttataacaattggaggctctcctggaagcgaccacaaattttgaggccgaaaactagatatccccacattaatctgtaaaactaaaaatctatccatctatgacatctacaactgtatggtaaatgtactgattacaaatatacagtctttcctaacacatgaaccgatatacgactctagcatggtatcttggttagatttgattgttggaaccactaagttgttgagtcgattttgtagcatataaaggacactaaagaaattttagttaaaatatgcacgggttaaaggctaggctggtttttttttttaataaaacgcatgagagctgtgcttcatttcattaagaaggaaaaacaaatcacccatacaaccaagggctcgtgatcccttcccaaaacacatccgcaaatagtgccctttggttagtgacctacaaaggaaaacttggagcgcaagagctccagccaggcaccatagccttagcttctgttgacactgcctgcaacacctccatgatgtttggaattgatccgttgaaaacaaaagtcattacgctgtttccatatttcgcaagcaactagggtaatgaatgaagtcacccccttattttgctccttaggaacatccttgacagctttccacgactgtttagcaaaacgagttactgaaggttgaggggcagcaccggtcagcttcaagaaaatctaggtccaaacttgctgagagaagacgcatgagacaaggatgtgctcgatggtttcatcctcttgatcacatagtgggcaggttgtcaggtgcactagtccgtgtttggcaagacagtccgctagtatacagcttaaacgctaagctatataattcattttctaaacatggtatacagtgccaattttaaatcatttatcttaactaattaaaatattcttaattttcctttcgtcacctaattttcgtccgtatgcgcaatttttttcactcgtctgtgtgcgatcctctcccaaaattttggttcatcagtccgtgagattgagaccgcgtcgctcccgtccggtacgcgcatacaggagatcaaatccgatccgagccaagaagcatggaaacgagagaaactgaatcacaaaatcacaaatccaacaacaatgaatcaaaatcatcccaaaaaattaaatcacaagaattaaatcaccggggccactgcgtatccgaggccaagcatgccgctgccctcaggccgtcatggcttgtctgcgcgctgccgtgtgccacgaggagggtgcactcacagattcacagccgattcatcaaaattcaccgattcatcacagattcaatcacaaggaaggggaaaatcaaaaggaggaaaaaactgcaaaaaaaaatctcttaaaacattcatcacaaaaaggaaatcacaaggagggggatggaggagcgtgctcctcaccgccacccgcaaccacgctcgtcgccagggaagggggccgccacaacgaggaggacggggtggacctggtggccgaccggagcgcctcccccctccgatcgtcccaccatctccatcttcacctcccgctcagagctgctcccactgctcaccgacgccactgttcgctgctcgcaaaggacatgacgccaccgccgctcctgttgcctgttgctcgtggaggacgaggacaccgcacctgtttctcgccaacgccatcgctgctgttgctggcttgctgctcgccaaggccgaggacgccatcgctcctgcgtgttgtgagaagggagaaaggatagaagaaagaatggctgtggagtgtggatggtaggagataaggtagagagagaatagagaaggggtaagagagataagagtttttttttgacacgtggtagggaggagctgagataataaagcaggagttgtgttggtggatagacttgagataatttttgcttggctcctgttcttgttttctgtaccgattattttttacaaccggaatcaatgtttatctcatactcttatcagtccgttaacttgaattgcacatggggaagaaagaagagcgaggatagaagaaaatggaactgacatgtgagtcccacgtctggggtctgacggaaaactcgacggagtggcacaattctaatttccccaaattccagtggcatacagccgatatcatgaatagtagtgacatttatctaaaatgacatatttgtagtgacatattttaatcgcctctcgctcagactcagagagaagcacccgtagaagtagcggtaaaggaggtcgtcgcacatgggtgcggaatataggggaggcgactggagcgtcaaagaggctatcgccatcggatccacccgtgggaagccgtgggagggcgccgccaccgcctttgctcatggtgggggagggcgtcgctgttgctgtccgcggtggggtagggcgccgccaaatgggccgcacgtacctagcagaagccacaagtttgggccgggctaaaatcaatgttctctctctcagtaattttaagtttttttttattttcagaaatagtattagtaccattttaattgtttatgactacttattaatttaattctagctaaattgaaccaacgagaaatttggctagatgtttcttatgacatggatttattttccgatcaacgttgattataaatttgtatacatttcatttctgttcatgtttcttaattatttacgccaacagtgatataattcaagaattatttctgtttaactatgtaattagttgagacaacacaatgatgagatctcattatggtgattattgatagctacaagactagatcactagtaaatagctaggttgtgtcctgactgctgtgtgcagttgctcctcctgagatgggtcctcttgctcttttttgagcttgaatagatttgcttttactgactaaaatttccaaaccaatcttgagggcttcttttgaagccttctaattatttgcaaagatatgaccttcagaaattctcttgctgccactgtatttgtacaaaaccaatattaggtttataaaaatgcagaaattaacttcatgattttgtaggagatatttttgacaagtgctttttttagggatgacaagtttaaactgcgatatttttttataatatttttacaaccgaattcctaaccaatacaagatttacttatatttgttttttttcacaggtaattttt

SEQ ID NO: 1843 - DNA, 4194 bp, Oryza sativa
  Intron number 1 from transcript LOC_Os08g17294.2 (locus LO C_Os08g17294) derived from phytozome v7.0 (chr-ID Chr8; po s 10566728 to 10570921)
catcacagcaaccgagcattcgagcaactgcaacggtgagtcgccgagtcggtgaactgaagtgtattgattattttagcttcatagtttatgaatgactatctagattactagattaggatttaggaaccaccgaacctgtgctgcttttctagtttgctcaattgctctttgatattgttgtttgtaggtttgaaacatgaagagaaaaaaagggtcccatggttaatttaaagagttttttagaaaaagttgctaaaaaaaagaaatcaagaaccaactggttctttgctcgcggtttgtcaataagacgggacaaccagttgaacggtttcttggtcttggttttgtatgctcaataaattaacgcattcaatttatggtcaattctattcatttataactttatgaaaacatgtttatacctttacatattatacaactattagaccttgggtttgaaaattttctctctctcttacaatttcgaatacccaagttgaaaaacctgggcccgatctcgtcgcaactccggttcgtgtagttcggcgcatcgccatcgtcggcgggggcggcaggcacccactgccgtggaagatgtcgcagtctccacttacgagctgcccacgagccaaacaaggtagagccctacaaggagtacaattggaagcctgcgggtgcgcagtccatcaaaagattcaaaaccatggccatagcagccgcaacatccctcggcccatgtcatagcctcaaagagacaaatacgtgcgcatcaggaataagttcactttgtgaccctcaggagtgatcgaaatctaatccgtgaccctaaaccacaaaaccggatatctcgacccccaaactcttaaaaccaatacaaatttactccctcggcggttttgtagagcggtttcactgacgtggtgcctacgttgcgatattgaccgagtcttcgttccacgtggcattgacgtggcacttacgtggcattagaattaaaaaatatgcgtgggacctgtttgtcattcacacaaaaagaaatgtgggcccactaacatgtggggcccatatgtcagtcctcccttcttcctcctccctctctcccttctctctcgttctctcccttcttccccttcggcaggcggcggggcatgggccgcggtgtggtggcggcggcggtgggctggagctgatacgggttctggagcagggagctcatcctcccggtcgacggcgacggcgatgatgtagacaagggagcggatgaggctgggtagtcggtgccgcgatggggctgaggctgaggctgcggggggagctcgtccggcgggtctatggccgtggatctcggctcgatgaagaggcggtcgccacccccctctggcggtggtgccacggtccccggagtggagtcgacgatgctgaggccagcgctcggcgagatgggatctgcgtgttggacatcaggttggccaacgccggcaggtacgccggcaacatcctcacctgcagagacaaacaaggccatggcctctccctggttccaatcgaccatggatactgtcttcctgagagtgtaagcactgacgctgacagattttcttctagctaattgacttccattttgttcgttggtgatcatgcatcgatcacgcatgtgcagtttgaggattgcatattcgagtggttctactagccgcagtgtcgggagccattcagcgaggagacggtggagtacataaggtcactggacgccgaggaggacatcgccattctgaggttccatggctgggagatgccagccaagtgcgagcgcgtcctgcgcgtcaccaccatgctgctcaagaaaggcgtggacacgggcctcgccgcgttcgacgtggggagcatcgtgtgcagggatggggccaggcagtcccgggagtggaggagtcgacgatggcgaggccagcactcggcgagatggggtcagcgtcgtggaggaagtcgaccggcgggggttgtccttggcatcgtcgatggcccacgacggaggcggaggttgaaggcagcggcccacgcactagcctcgctcgccggccaacacggaggagccagtgtcgtccttgttcgccgccgccgctgccgctccggccctcgccaaatggaagaggggaggaagaagaaagagagatgagttagtgcgccccacaaatttttgtgtgtgaatgacaaacgggtcccacacatattttttaattctcatgccacgtaagtgccacgtcaacgccacatggaacaaagactcggtcaatatcgccatgtaggagccacatcagtgaaaccgtcctccaaaaccgctgagggagtcaaattgcactggttttagaagtttgggggtcgagatatccggttttgtggtttaggatcacaaattagatttcaatcacttttgagggtcacaaagtgaacttatttctgcgcatcaaccagcgcgagtgcgtgactgcgagagcccaagcagatcgcgaacgctctcatcaactagggccacatcgtgcagccaatgcccaccaagccctacgcctgccttaacatcttcacgacctagtgaagctgatttgcttcattcacttcgccttatttgcttcacttgattatctgtttgcttctgatttgctggtgcacatcgcttgattcacttctccccttcggcctcaccctcatgcaaggttgtcatatcatgatccatattctagtttcttacgatattatgatcctgtcaaattgtaacgataccgatcccgtctagtaccctatctttcatagtgtctcgatcctattgtttactttcacatgatcgtatgaaatcttaggtgctatcctgattctatggtgtctacgatcctataaattattatttaaaataaggtggattgataataatatgaataaatatgctcaagtttacaataaaaaccaattaaatttatcaaaatcattattatatgctttaatttatataatgtattattatattttatataaaaatacgtaatttctaaaatattatagtatctcgatcatcctatggtagtatcttataatactataatactacaaatcgaaaaattatcctacggctccattcgcttcttctgtaaatgaagattaaaagcgggtacgtaaaacaaggaaaccattaacatgtaattaattaagttttagttattacaaacttgagaaatggatttatctaatattttaaagcaacttctatatatataaagttttcgtataaaatatattgtttagcagtttgaaaaacgtgccaacgaaaaacgaggaaagatatgaatctttcattttaatgaaagttagaacggggcctatatctaaatactgattatcttgcccttacgtagctaaacgagcctagctcgttatgttggcacgagccaaccggagctggctcggctctactctactcgtttttgtttgagcgggaaagccgaaagaaacccgcgaagccaaaattccccaccgccgccgcggcggaaacaactccgatcttggacaccgacaccgcaccccgacggaaatccacgcggagaacggaaatcgcctccccccctcccctcctctttgatcctctctaagcacgactgcattgcacgaggttggttgttgcgagttctggcggcggggcgctgcccgcgtagtcggggcggctcgtgcagtcgcagttgagcggggcgagggcactggccgctggggcgagcaggaggcggctggcaacgggcggcgacgcgctgcgcctgtgcggatctggcgcgtggaagcaggcggtcggtggtgaggcaggaggttggggggagggcgtggcaggaggcgcgcttctccgcagagctggtctgctctctgctgcatgcattcttttgttgtattgttgaatttcaatgagattttattggatttatgagaaattgagccctatgtttcagagttttgatagatttgcaattggggaagaaaacaaaattggttatttgttttacaagcaattctagtaatactcacccaattgatgagggaacaaatcaaccaaatgtcattagctactttgagcccattccccttttttttggtcctggattcgtgcatttactgctgcttttcatcaatgtgcaacctatttatacagtgtagctgctt

SEQ ID NO: 1844 - DNA, 698 bp, Oryza sativa
  Intron number 1 from transcript LOC_Os03g43570.1 (locus LO C_Os03g43570) derived from phytozome v7.0 (chr-ID Chr3; po s 24340156 to 24340853)
aacagcagggggttaagaggccggttgatcaccaggtgaggcatgtgattcatcaattgcttgtttcagttactagtaagattatgtgccaatcaaatcaattcaaccgcgtttggctgctcctgatttgcctgttgtatgattttttgaacatactggtgccaaattctgtttcggcaagtacatggttgggctaaaattaattggtactagtagcttgaatagttgaatgtatcatacatacaaattgagacatatgttttgtactaatatctcatgggagtagaagggtagtgctccatccggtcagtattacttgtcgtttccgacaagaaaatactactaaatgggcgcaagtcaattccacactctgaaacgtcatatatatccatccgtagaatcagttatgaataaatagttcttgatgcctggttacatcttagtaaccgtcagcattaatagattttcttttactcaacatgttgcccctagtaattaatgtgagatcgctttcgtggtagtgccatcatgtgttgaagagtaaatattactcagtataactcaagttttaagcttataagactatctgcgcattaatgcgttctattctttctatctattttcgcgaaacggtggcttattgaaatgctatttcaaccacagattcgggtgttcttctctgttgctgcaagttctgt

SEQ ID NO: 1845 - DNA, 6665 bp, Oryza sativa
  Intron number 2 from transcript LOC_Os09g25934.2 (locus LO C_Os09g25934) derived from phytozome v7.0 (chr-ID Chr9; po s 15572407 to 15579071)
gaggtggcatccagagagaggtgagttgctctcttcaaataaaattcatgttggatgttttagttcgtttagattttctatttccttggttatcgttcaatgccaaatcaaatggttttatttgtcctgtctctggaacatggggtacaatttagcacaccaagctattttaatctgaaaaggaaaaggaaatttccaccagaggagagcctcctgatgtttgtataatattgtaagacctaagctttgagatactatgcaaaatgtttaaggggacaaaagcaatcttagctgaacttcattagatgaacctttaaacgatgaaagcaatcgcccattttccgtcaagccacctcaccaatcgataaactattccggatgtatgagttttcctgcgtttattaagaattccgctgtgctaaaatcgagccgaacctgagattggtactactcgtgctccagtagctctctcgcccctatgaatgacaatagatgcactgcgcttaaccgtgctgttttgcagattcatgttttgtttcccttttgctccagtttcttcttgttccttctcttcctcaattgtgtctgctttaaattcttgtggaaaatcttgctctgcatctccaattccagattgaacttgcttgtttttgtagaaataaataaccagagcgatcaaaagcgaagaagttgaggcaattccagtaagaatgaagagacccttaaaactttcaaaggttagactacccgaaatagtgacaggacccacatttcggcacttattttgatctccaatccatttattctctatctgaatgatagtgtctcccccagttatattgaggattgccttcgagatgtcaccacgtagaggggattccttttggaatgcctgtgaaagaaatgtagcctttttattagcttctatcaacatatccctgattattttgcacgtgttaggaagggtaaactaagccttttgactctcttaacccaggaataggttaaccccttaccttttctactactatcccaactaaatttagttgagcaccactactgctacctggagtaggttaatttgcaaacacaagatgtgtgttacgctaacctaagatgggttaatgatagccaaccgagttatcttaacccaaaccagactcaaccttaattaattaatttaaatatgctagcccatctcaacttggttgagactaaagaattgttgtattagtagactgaagttgttaacactatccttttctgttcataaatagcaaatggcatctagccatcctgttagtcaattaatcaatggcaggcaatggtcagctacctatatcctttaattaaaaaaaggaagacataaatcagaatactgctgtaagtactctgtttactttacacaatcaaaggtgaataataatattttatactcttatgactcaaacactgagagaagcacattagattcagattgttatatgagagtattaatgaatagaccagacttgaaatatgatggcactttgttgcttgtaaatcaatctatgcgcctatgcaaatatacaacaggaaagttaaacttacaaatccaaagcctgctgtcttataaattggtccaaccattgtgtacccctcacagtgctttgcaagaaatagtttgatgtatgggatttcgtccacaacggcggaaataccaccattgctgcttcccctagaaagtgcatctcgaaaaccgtcagtgctatcatattgcctgatcttcgatttgtcaaaaccaagttcatctaaaagatccttgacgtaggaaccaccctgataacctacatattctccattttttaggagttcatgtacatcggttacagttggctgaagctgttgtacagttagcattgatgtcaaacttgctgtgtaacttgatgttagtaccagaagaaaaaataaccatatgatcaacactatccgggacagaaggcgttccaccatctcctctgaaaagttacaagaaggagttgagctattttgaagtggaaaatatcaaacttaaatgttggcatgttgtacatcaataaatcacaaattgtgaaaagtccttcctttatatacgcttatgttgtccagctatatcatctattttgttttactgggtaacagacaaatagtagggaaatatctactattaatatcacaaaaatatataaaagttacaggtaaggaaataaatacataaaaggtggagaagaaaagctgcaaattgactgatactgtcttgttttttttttgggtggaacatcacttttgacctacaactgtacaaatctatattcccaagattgtccattatttggggcgtgtagtcatctaagctatgaaatatgagtcacacaccgcatttcaaggaattcctagaaactttagggacttgtttatcaatcttaagattgcaaaatattttccacacaaagatccacatctgccaagttgacctaacgccttacatatccagaatatatatatatatatatatatatatatatatatatatatatatatatatatatatatatatatataggacaaaatggcaagtatactcaactctttacaaacagggaaaaatatatcataaccatctgtttgggaattgggccacgaacagccttgttgttaccaagaaactccagcagccatacaacaacccctgtgtagataaagagtatgatgctcgcagaccacattccaaatgttagtggcttcaagaaaatccatgtcgtcgtgtttattctttttctgactggaacaaccattgctacgcctgattctgtgtatggcagactgaagtcggcatacgaagatcttttgtatgtgattgttatgtctgcaaccgctatatcatatttctgcatgtgcatcgaaataacttttggaaagtgcacaaagagaacttgaacgcaagttggtatgggtcctgaactacttagaaaaaaaacatggatatggtactaaagtaccatttgatgcataatattactacaaaatatattctggtagaaatttatttttagaacgtttaatacttcaattatcatgaatatggtttttgattgattttatggagcataaacaatttcttacatgactgattttgttagttaagaatgcaggacttatataaatttggaacaaaagtaatacatataagcagatgccttaaaatagtgaagcatgttgattatgcagtatgcactcatatgaacatataatggcagccatcttcatagctgcagcttactggcaatatataaaatgttggattttcttcatattttttgacatgactttggactaaaactaatatgaagtgggagagtgaaaaaaattaaacaattttgtaaacgccgaggttataatgttttacttgccttgagataaacttggtacacaaaatcatcatagctcgaacttatattctctgtagtgttgtagaatacatattcataagggagtgcataaggaagcctctttactgtctcttcaaacacttcaattgcaaggccacttgctttagtcatacccacgataagaggatccttctcagcgtatatatactctgggtatccatcacttgtgcatacaccaacctgaagcttctttccactcgttggaatttcccagcccctaggtatatttgtagattctcctggccaaatcacagggtttaggtcaggctttgtacttaaatatgtcccatttgatcttggtctggttaatcgctgtgaaaatccatcttgtgcagtccaaaacccaacatctctccatcctttcccaactatatttattatttgaaatgtggaaggctgcaattgcctgccagaaaggtcaaagtaaccactcaaacccctaaatttatactgcaaaattgcattgaggaacttgaggccattttcagtttctttggggactttcaagcttgtcatgctgtttgtcatatgctgtatctggactgtgtcttttgtagacttggccttttctactgcttgtgctactgcccagattgtatcatagccccataggccaaatatacttagtttcaacagtggatcatttgggttgtccattcggaatcttgtattccatcttacagtgaagttgtcaagttctgttgatttaggaacatagacccctacacccagggcaccattcatagcttccaaaactgatgggtttagtgatccaattaaactggccactccaaatgttacgatccatacatatcctttatccatcatccctacctcttttgcctttgtgaagagaacagaggccatgggagaggtcatatgtacaataaagaccctcgtttgcattgtcatcaacttgtatagttcctgggtgatttgctcacttgttgctgactgagggattatactctgataaggaacacgggcatcgttaccttggagtgcttcaagaaggtccggtataatacttctgccataatcagtgtctatgtagatcggaaccacctctctccatccatagtacttgattagagaggcaatgctattcacttgcgtggagtcatttattgttgcacgcaaaaaatatggattattgtcagaagtaagggatggacttgttgtggtgaaggatatgacaggtacttcacttatatttgcaatatctgtcatgaaaaatgcttctgaagatttctgagggccaatgatagctttcacattgtaattgttgagaaggtcaagagctgcaaaattgcataggcagcaaacagtagttataaattgtgcgtggatgcaaattaattttcttttagacaaaggaattaaggaagctttattgatcttagagaattacatcaagataatacaattactctaatacccactcccggcctctgcataactagtatgcttatcaagaactttcatgtgcttacagttgaaaattggaaaactgaaatactatcttaatcttctggtgcatgggatccggtttgcccatgcttcattgaaacataatttattgcagcaaaccttaacactgaggaagattggacatagaaaccccaacccattgatgtaacttggaatatatagtttagattttggactaatattataaataccacaataaataaatatatatatatatatatatatatatatatatatatatatatatatatatatatatatatatatcatacatctacctcagaagtttgcaaggagccaagaattcaaatttcgcctagtttcattcatcatctttggatgacatcattcattagtcccagctttgttgtttgcttcaaggcaatatggggtctcattctcttataacaatgcttgaaatgcattattatatcgccatgactacatttgtgtggaccaacttatacgcaattttggatttacttttgtactgtggaacatattgttattgatttgtgaacatgatcaacctaagtagaagactcaagacatcttattttttgatgactggatagctctaaatgaactgcaactggcaagtactttgaaaatggtgccatctgattgatttacctgttgccgattttttataaaataacctattattttctttcgtgaaatatttaacaggtcacttgacgcttccttatattatgatttttttgtttaatgcattatttaaatagcctctaacagatcctttcaaatcgatgtagtatttaatttaagtaattcaaaaaaaatgtcttttgttggaccgaatattttatcagctagagccttgaggggacttggttgtttgtacttttggttgcagtcttagttgtttaagcaactgctcccaatttgtttttctgaacggcgtgcaatatctcttgtctgtaagacaggaaatgaatagttctccaaactaaactctagctgactggtcaaaacttgtataatgatcccagcaaaacactatgatttagcacttgaaaaatggtagtaggtcactaacttatacgaggcttaaattatcggtgcaagttgaaaggttgatgccatcacctattattcgtgatgtgcactagccatctgattaaatatgagtgctctagatttgtctagttccacacagttatttgtttcagaattcagatgaccatacagccagcccagtgcaaggtggacacagaaagagagacggtggacgcagaacctatttggaatgcatgagtttgacataattagacttttctttcatttgtgtcagtcaggatgcaaactcaagaatctggctctgataacaatttatgatgtatgcatcaccaatgcaatccaaaatcttaaaccggtgaggaagagcgagcaattcacttattcttcgaacacaaggttttacccaggttttctttttcttttctgtctctgttttttttatcgaatctttctgtctcttattgacatcaaaatgactttctcggtctcccaacgaatatagtaaacaagacgctatatttcacgtgctatcttcctattgatatgtttcggcctcttttgtgttcctagccaggctaatgatgacggatatcacagttcacaatgtgttacaatactaatgcgatgcgttcttcattgtgcagaacatcgagcacgtacctgctg

SEQ ID NO: 1846 - DNA, 976 bp, Oryza sativa
  Intron number 4 from transcript LOC_Os08g20544.1 (locus LO C_Os08g20544) derived from phytozome v7.0 (chr-ID Chr8; po s 12333306 to 12334281 reverse strand)
ttcaaacaacacttggaatctcacttcctgtgcaggtaactcgtaatttttgtaacatgacctaaaacaatggttatatgtaaaactgctgtacaaaatatagtgtggaaacaatttttttgttatatttatttattagtgttctgttcttttgaacatcttagatagaaaaccacattcaacttcatctcctgtttgctttatgtttaactcaattaataagacagctgtttctgatattgtttttaatagtaactaaggtactgagtgagtgattaatacggggtactacactatcgtagaacatcatgattttatgatctacattttgcatgataaatgaacaacttttactattgtagagtatattggaactaaggatttgattaaacaaatttgttggtgatttatgttgggattttattgactagtttgcaattggtgaacaaatttgttactctgattcagtgatttactagttttgcatgtttcagttttcaaatttcctcttttgaaatatttcaacctacaaaaggagcttctgaataataactgtttcagcttctactccagttttagttgctcatttgttattttgagaatgtggagtgagaccattttatgttaaaaaaaaatatggttatgcctagaaaatgaattgtaaagaatctattttcatgtaatttcatttggctgtatgtagagacttttgtgtcaatttatgatctggataaggtaaacataattacctgaagagggtaattgaggcttcatttactattgtgtcatgttatacgtattttgtcatacaactagtgttccttagatcatgatgtatatgctatactaatcttgtcatatgactagttttccttagatcagtgtgtgaccatgtataaaattccaagagactaattttaaaatgtctgtcctatatttaggtgaaaaatattggattcacaggagtacttcgctt

SEQ ID NO: 1847 - DNA, 1073 bp, Oryza sativa
  Intron number 1 from transcript LOC_Os08g06010.1 (locus LO C_Os08g06010) derived from phytozome v7.0 (chr-ID Chr8; po s 3280281 to 3281353)
gcccggcgcggatcgtcgtccccttcgcggaggaggtgccaatccctgttcttgattttttttttaaaaaaaggaaaattgttctttgtactgtgtggagcggattttgggggtaatctggtgctttgtggtgttcgttgttagggaaagtttggttatttttgggtggatttttgtatgtcgtgctaaatgggtttagctttagggggagtttatggatttggtcaatgttttgagacaggagagtccagagttcagagttcagagacgagatgttcttattatgcgttttgttcgttgatttgggaagtttattaggtggattcaacgacaatattcagtagtaacgattatattgggttgaaactggaattgtttgggagttaaaggtttgcgtttgtggagcttgtgaaaaaaataattaattggtcatgagattgaggtcaattcgcctttttacttgtcctggttaatagttaaaaagatggtgttagagtcaaggaaaagtcggttgcctgctaagtgacgcatttgcaccaagatggaagctggaaaggcagcttttacctactttttgagaaaaaaaaaagaggacaatcttgtagtggtttgtgcatcagcaaggtctcaggtagcacgcatgatcttggtttgctctagagaagtaagagtacagaatatttcctttttttttcccactctggcccactggttgtattgccaagtaaatagatgggccaatttggttgtttcctgaaatactaaatttgagatgttcttagatcatcaaatttgcccatgtttacatgataactttttagacagtgatttataatgatggataacttgattggtggtactgtgtaaggctgaattttggattagtagcttcttgtcttttgaacagcatgatcgctttcttgatgcagtagtggttcataaatgtgtagctaagatcgtctatctaaacacaaattaatgcactcaatgtctcaattagtccattgtcttacttacatcctcctctgatggtttcaggtgttaatcattcttggaccaagaagtctgtctct

SEQ ID NO: 1848 - DNA, 1345 bp, Oryza sativa
  Intron number 1 from transcript LOC_Os04g43824.1 (locus LO C_Os04g43824) derived from phytozome v7.0 (chr-ID Chr4; po s 25760215 to 25761559 reverse strand)
ctcgattggtgggagcgctacctcttcagtatccttccactgcctgcttcctcttgtcccctgtactgatttccttgttccttcaaatctgctgcttgttcggtctagttttatctcctacttttgactctgaatctgagaagcccgcgcgggtgaaattattggattctgatatctgtccgtttcaccgcgtggtgtctgtgaaagaaaaaagaatagtcttgttatcgggaacgtatgatcttatcttttgaagccgttcggaatcttaggatcccctttgaggaattagtttggttttcaaattcgggattgtagaatctcttaggagtattaggtatggcaaaaactagtattagtattcggttttaaagctaagtacttgatggatttttggtcaactgttctgtaagttaagtctcgtttctcctgattttttttcttaaccaagggccaatatctactgccgctaacaacatagcatggacatccttgttggatgtagagaccgggtattgatctattatctaaaaataaactaactgcattacataagtgagctttccccacacaagtatctatactagctaaaatgttcatagtggtggtggtcgttctgccacaacctatcaccgacatttgggcctcacaatccaccctccaatgagtctcctgtttcattgctggctcttcccaaattttgaaatcacctatttgttcaatgaaaatcataaaaatactacttggactaaatatttgcttaattgacttaataagctaggaactatttttttttcgttgcaatgcacgggctcttggctagttgttgttgttttttttttaaaaaaaatctgaaatgtgtggatgacatgcatatttgcatgaaagaaagcaagacatggaatgcgaaatgaacgtgaaacaccaacagattcttgaaagcacatagaactaagctagggaaactctcctttgacactacaaaacaatgtattttcttttctagcaaccttttgttctgtaaactgtatgctattttaattgtcctacaaccaagatttttctgcttctttaatctgtttttcttgcaaaacttctttcgtaatctggagtgatctttttactttattgcactatcaactattctgtgggagttgagctttgggatgttctttattcgtatttcttggaaagaatgtttgaaatatctcttattcgaaacaaaagaatgaaatatctgtacttatactatttggcaaaccacatggtttgtctctaatctcagcaaactgaaaagagctttgagttattagtatgtaatcacttgactataacagatatattg

SEQ ID NO: 1849 - DNA, 1005 bp, Oryza sativa
  Intron number 1 from transcript LOC_Os01g13760.1 (locus LO C_Os01g13760) derived from phytozome v7.0 (chr-ID Chr1; po s 7711767 to 7712771)
aggccaagttcaagcagatctccgaggcctacgaggttgccctcacaccccccgcatctccccctcctcatattcctgcgaagattagtttttcgtggttcattgtagcggctcgatccgttatctcggcggtttgaagaatgatgttctttctttgcggaagaagtaatcaaggccattggaaacctacatcatcatcaatcttacaaagatcatattttgattcctccaggcaaatctagggtattaatatatctgacacgatcatacctcgtattggttgttacccttagtccgtatggaggggaagaatttctttgtcatgttattcgtgttggaatcgttctagcttcaatgtttactgcgatttagcgggcgctctaaagtttttcttatgtctaaataaggaatagaggcgaaccgaccttatttggcgcgctaaatttttcgatgagtaaatagcgaatactatatcccttttacaatacttagattatggccttgttcggccatcatttttgtagatgtggctaccgccagtagccacgtgtgcggggccgcagccagaaccactaggcgaagcggcagctgcatccgcaaaaatcgcagccaagcagagcctatggtgctaagggcatgtcatatactcatatcataatttatgttatacattctgaatgattctttatccacgttcgaaggtattggtatgaggctaatgctaggtacacaattatttcaagtaaagtaaaaaagatctgctgatccaaaatgtaacccagccattcggtatctttcattttccagaatacacattgttgagttgcgattctcattccatggttggtattttcttttagtgcaatataacagcttagtttatttcaatccagtccttgcagtgattgaaaattatccgtccgttgttgatattttttgatctgttattaatgctatttttttttaccttttaggtccttagtgatccccagaaacgcacaatct

SEQ ID NO: 1850 - DNA, 3420 bp, Oryza sativa
  Intron number 2 from transcript LOC_Os04g32404.1 (locus LO C_Os04g32404) derived from phytozome v7.0 (chr-ID Chr4; po s 19258158 to 19261577 reverse strand)
gtggaaagggaggtttccctggtggcgcagcttcagcacgagaacattgtcaagttcttgggccactgcttccggcacgacaaaatgttcctcgtctacgaatacctgagcaacgggactctgagccgctatttcaaatgtatgcattttagcttgttatccagttctcaaatacatgccgttgcattttcaaatctcaaaaatctaactcactaatatatgcaaaaacaaaatagatttgacatgtgaaaatgatattgctagatttgctatctgaaaacaacatcagttgacctgtcctgaaatatgtttgcactggaagtaattaattatatatttaatatatttgaggactaaaacaatgatcaaccatgcgtatggcaggtatgttgatgtttcaaatgacaagtaaaagataacggagtactacactatagatcaggagtactgcactataaatcaagcataagaccacaggggatgcaggtctgaatgaatttcatggtgattttgtaggttcagccgactgtcagaagctggactggccaaaatggcttaacatcatcagagggatcgctcgtggcctttcttatctccacagagattctgggaaggacatcgtccatcgtgatctcaaaccttccaatgtcctccttattccaacttcaatgcaaagattgctgactttgatcttgcaagaccatacgaccggaacaaaagccatgagagcactcaaaagagagcaggcacccagtatgttctagcaactctgtttaattctcatgagcatgcatgtgtgaagcacggtattcctttttttttttagtattacacccgctaatacgtccccttaacaaaaatgtgtgatcaattttttcattattgaaaaaagagataaaatcgctaatgttcctgaaatatttcgaatgtcatttgggcaattgggcaacacgtatagacttgagtaccaaccttcaattcattatatcctggctatctttgatctcatatttcttttattttttaaaatatgtttatgggttttcatcgtgtcacttgttgcacattttaattcggtgccttagtgatctgttaaatatcatgaccaattgacacgtgatttcagttcacgcacagtatgcaagtcaactatgttaacacaagagtaaaacaatgctagtctccagtgtgctacgcctctttctgaatttgcattttgtataccttagaaaaaatgtagatgtagggcatgttgattgttgatgttaaaattattttagaaaaaactgtaaaaatatgaccatatatacactggacaaaaaaaaaggcaagtatttttcctatccttgtgcaagttatttgtcttttgtacattagacaaagaatcctattcttcacaattttaccgtgcacaaacatactctaatactccctccatcccaaattgatcatcatatagtgttggtgtatcaagaccaagaataatttaaaccacatcgatcaagataccatgcacaatatgcacatattcttccacaatgcatgtattgattaaaaacacaatgcacaattacatccttagtatgcatacattttcccgtgctggatgtatccgtgcccatgcaattatatgataatcaatttgagaaaatttggttttcattatagatgatcaatttgaaaatgagggagtatgatatttgtgtacttattttattcataattttagagaaggggtagccagacctaacagcagctttaaccttgtcctgtttaacacaaagattgattttacaatcctgacctttcatgagcgtctaaacattaacttatacagtgagatttttgaccttgtcaaaatttaaagttgtttaggatggcgaggctttgatgttgtgatttgttctatggactatggctaaaaatatttttaattataaattagtagatatctttaaaacattattaaaaggaaaatatgttcgtattactgcctctgttctcaaaaggatgacattgtataatgcgtgtagtgaaatcttgatttgtcatgaccatacgataaaagggttaatttagggttcagcaccacgttaaacaaaactgctctaaatttgattcaaggttgagaagggcacaattttaagggttgatgtccactatatatgcgagtgtaactgtttcctttttttttcaaaaggaaaaaataccacaaggatttattggtttcactgtttctcactgaagtggatacatagctccagaactgtatgcgggaggggaatactctaccaaatcggatgtgtacagtttcggcgtgatgactctggagatcatagttggtcagagcaccagcaagttcgacaacgataactgcacgggcctcgtagaatatgtaagtaatatcatgatatttgtttcttcttctccttgatgctatctgaactgacatggcagcatctcgaagaatatgttaggggatggggaggctttaggatcaagtttcaaagaaacaaacataccctctctattccaaaatatagataaccagtactccctctgttttcggttataagacgttttaacgtcaaattgcttcaaatttgactaagtttgtagaaaaaaaaacagcattttcaactcaagacatattataaaaatatattcaattattgatttaataaaactaatttggtattataaatattactatatttgtctataaatgtagttaaacttaaagtagtttgattttgaccaaagttaaagacgttttatgactaaaaggaaggttgtacttacgaatctgattagaatactccagagtattctcgaggacaatgaaaagctgtaaaaactgactcatatattcaacaggcatggcaacactttgtgaggcgtacggttgaagacatgctggacggtgaccatctcggcctggtgaacgacgagcaggtgcagcaggcgtcacggtgcgtgcacgtcgcgctcctctgcgtccagagcaaccgctccgtgaggccctccatggacagggtccacggcgtgctcggcagcaaggaggagctggaggagccctccacccccggcttcgtcgcggcggcggcggccggcgtttcgccgtcggcttactctgtgaacagcgtgacgatcagcgtcatggagcctcgaccatgaatcaagaagccttttgaggtttccaagaggatttgtacaaagactgttttcagaagtttggatggatggaagcgtttgggaatgaaatcaatgtatgtatctctgacagttcggtgtggcttgccaggcagtttttgatcagtgcaatgccatttcaagcttcgaagaactagcctgtttacccttttcttctcttttcccctgtttcggtgcaatgcagataggcacaagactacagtagta

SEQ ID NO: 1851 - DNA, 672 bp, Oryza sativa
  Intron number 7 from transcript LOC_Os04g42010.1 (locus LO C_Os04g42010) derived from phytozome v7.0 (chr-ID Chr4; po s 24698926 to 24699597 reverse strand)
ttaaagaagaatttggcaaattcggcacagtgcgggtaacttttccaataattgatgatgtttgtttttcatattgattttgtttcaccaggagtaacctgaggttgtaaatctggtgtgcattgcataaaatatccagaatagataggttgcatatttcatttggccgactattgtttgctgtagatcgtgagactgttatgatgcatacaactgagcttagcttgttagttttttttttaatgaaaagtgcttgttggcttcaatgacggagtcatacagttatgtgatcacaatagcatgctgttatgttatatttattcatgctatttttgtaggatttggtaaatgatagcaacacttagttcaatgtcgatcatattacctttgtgctaattggacaaacctaatctagtcaaacgtgtagagctacagtgagatgatccaatagttcgtgttcttactcttactgccttttgtaagcacacatttgtctggagagaaagcaagagaaataatgcttcatcttgtaaagacatctacaccatgcttttatgcaattctgtatcttgctttctaatttctacaagtaaacataatctcttttatcagacaacttatgctgattcaaaactctttcttttttattgttccattttccccccttgaagt

SEQ ID NO: 1852 - DNA, 1739 bp, Oryza sativa
  Intron number 1 from transcript LOC_Os10g28340.1 (locus LO C_Os10g28340) derived from phytozome v7.0 (chr-ID Chr10; p os 14676555 to 14678293 reverse strand)
acttctccagcttcgtccggcagctcaacacctacgtgagcacccctaatcctaatcctaatccctttccttgtggagatagtactagctgttcttttaattttattcctcctgaaccggaaaaaaatacctgtctgatgatgtagattcgtaagtaatcttgggtagcactgtagttgttgtttactgaagtagtgcttaccgtttagtgtcattgtgatttgtgtggcaatggtatgcgcattctgatgattgtaaattacagatttctgatagttgtttacactgtttaggatttgcgtcattgtgatttgtgacattctctgcacactctgcaaaagctttgcttgtcttgagagatgttgaagcagagtcttctagtgtttgatcctctttgtagtcatgtttaggtgctagtttttttttcttttgccataacggtacaagtatatttgctactaggtatatatgtgttgatccaacttggaatgctactaaagcatttgtgcttagtagtgtaaaagaacatttcaaagaaccatgaattagattgtgaagggttggtttggtttgtggcctaaataggccttaccaaattttgtcagtgccaaaatttggctagttttgtcatgactaattttggtaaagcaaagttgtgtttggattgaagccaaaatagcctaagttcactattgaaatggcctattttcttaggcatgccaaaatatggcttcaaaccaaatagatagtaaacactattaaattaccaaatattggtaagcctaatttaggcctcgaaccaaaccagcccgaaaagttaacattaagaaaatgttgtgtgaaaagtgaaatagagaaccaaattgaagcgtcgggaagcagtggtatcaactatttagttgttaggtgatagttgcactgagcttggtatacataaataaatgtattgaaatgttacagaaacttcttactacagagtttgtggaagagcagtttcagagcagactagggctttatttgctactacctccgtttcatattataagactttctagcattgcccacattcatatatatgttatatcgtcacattcattaacatctatatgaatgtgggcaatgctagaaagtcatataatctgaaacggaggaagtactgtttagtgtttaaaatcacttcgctgccacaggctaactgacttaggtctttggcagatttagttttcaggacagcctataaaataaaatttgataatgtccatcctgattttttgatactcatcaaccaagttttgcaatcttcaatcctacttctgaaatattgaatttgtgtgatgcatgtataaatggcacctttagcatgcttatattcttaaaacaatgcatgctccaatgagcttcatctcacgttgaggttaggggattctgggagattaattctcccgcgcaagtgtatcatcctgacatgatttctcaaacttcttattgttgctagatggaacaagatactggatgaagtacaagaaccagattgtttttgttctagaagactcaactgatcaccttcaaatgatataatatactgatggtcattctttcactaaaaagctacagtctaaaatctagagcagttatcctaatctttcacgttggcatgtgcatctggccttacaatggtgatgtttgtctcattaaaatctacagggcttcagaaaggtcgatcctgataggtgggagtt

SEQ ID NO: 1853 - DNA, 15707 bp, Oryza sativa
  Intron number 9 from transcript LOC_Os11g04520.2 (locus LO C_Os11g04520) derived from phytozome v7.0 (chr-ID Chr11; p os 1897799 to 1913505)
tgttccatatgtatattataattgtgcatggtttccttctgccaatatatgggcaaccaagtaatgccagaaaagctgatttgagaagcaaacatacttgctcggtacaaggatgtcacactcgtcagccacgagcccaaagggtagatcacccaattgagcacgttggcttatctccatatttttctcaagattaaggtgtctccttgtcccatatttggtaatattcatgggtgattaagacgttgcgaaatgcttacggaacttcaagtagtcttacactttggtgggtttgcagggggcacgaagaagacaattatgtgatacaaaagccaaacaaatgacaaacccaacttatactgctaatcgacctgttattactcgaagcaggttgcaataatttgattcatagaattacagtacacatatccttcactcattttcatgaatacaacacatgtccggctgttcgcgtcaaacattagtacatgatagttccttctattctctttctacttgtaaaagctgtggatgaaacaacaagccagttcctttaaacttgatctcggtgatctcatcaatttttattgccatctccggtgtcagatagttcctccaatctccgactactccacaccggaagaatatgttgttcggtacgtctttctcgataaagtcagtgcccccgacagattcacatctaacctcgacgagctctccatggcacaaatctccacaatcttcctatccactccagcctcttgctcctcaaccgtgaacgggtgcccaacaaactcggccaaacgtctcaataggccaagcgtgtcagctgcaagctcctcgtaggtcaagaagaacacctggcttggcgtctcgacgtgccaccgccagtagccgaggacgtgctcccaaaacggcccgaaatgcgagatgccattgcagaattgccggacagccacatcaatgttccatgatacgaatctattacagaagtgccagagagagacaaaacaatccttgggatcccggcacaggtacaccaccttgctgccggaggcggcaatggagtccggcagcgattggccgggatgtgcgtcgtcaagagccttggttccgggagcgagctcagatcggggatgcggtcgttgacgaacaactgggactccagaaaagggacgctagctcgtgggcgtcgtggtggagagcagagtacataagcgccttgagccatgtggtgccggacttggggaaggtggcgatgaagacgtccgtggtgcgcgccatcagatgcctcttgatggccatggcgctcacaaccccccgcctggacatgtaccatccgtcagggtggcgacagtatggttggccgatgccgctgactgccgccgggaaggtctccacgacttgccggagttggtcatagatttccatgtgagacgttccgtcggccgcttcggcagttgaggaggaagccatgaagtgtgtgtagtcctacgaaaacaataatgagtcttagtcccgtgaacctgacaatatatgattgagatgtaacttgcaaacatacatctaagagaagagacaaatcccagcagagttctcaagctagctggtactgataatccaccattaattgattgttagagtctgtacatccgtacttatgtgacctatttttcattccttaattccctcctctcaaattatggtgttaggttgagaaatttcatgaacatgggggttaaactttaccttgcaaaaaaagttgttttttctgagggtcaaatttatcatggtgtctagtagtaagatcagctttaattaactatgcgcaccgaaacaagggtttggtagtgatgtaattgtgaattacagtctttcttttcagagatgaaatcatgcaaactactttctagactagaaggaaatggacaatcatctcaataaagtatatatacgacatactcctagttgctaagtgtaagatcagttcagctaactatagatgtgactcgaaaaaataatttggaggaaaacaaatggaagagcagattagcaggtccgtagcatatcatccttatagccttggacagttggactagaatcgcagtttctctttgcttgcctccctatgccaattgaggtagctcgttttactgctcttaaacaaattgttttggacattgaatggtccttcggttcaagtaataatcaatggtttaatgttttttgcttttttccctcagtatttttatttttatttctaatttattagagtgtcacatggtggtatagaaatgtttcggaggatgtttaataatctttagcatatcaagaaacagtgtggatcatttgaacgttattagtgaattttgatgaatgatctgaaaactgtatgacgatagttacgtacaccaaactaatccacaaagccaaacaacctaacaacccaactcacggctaaccggcaacattttattatattacttgcaatgatttgatttacaaatttccagtacatatatgtatttcttcactcgtgaatacgcaagagattgtatctctattaaacaccgaaaacggcacacaaactattttttgaaagaaaaaacatatactcctagtttgttttaatttattctctttttacttgtaaaaactgcggatgtaacaacaagccagatcctttaaacttgctctttgtaatctcatcaatcctccttgccatctctggcgtcaggtggtttctccaatctccgaccacgccacgccggaagaccgtgttgtttgggacagtgctatcgactatggtgatcgttcccgaccgattcacctctaatccggacatgttctccaatgcgcaggcctccacgatattcctatccacccgtgcttctgctcctccgtcgtgaatggacatccgacaaactcggcaaggcgtctcaactggccgagcgtgttggcgacgagctcctcgtaggtcaagaagagcacctggttcggcttctcgacgtgccacctccagtagccgaggatatgctcccagaacggcccaaactgcgagcgccatcgcagaattgccggtgcgcctcgtcgatgtcccacggcatgaacctgttccaaaagtgccagagcgagacgaagcagtccttggggtcccgacaaaggtacaccacattacagccggatgcagcgacggagtctggcagtgactgggatgggatgtgcgtcataaacaaccgcggcgaaggtaaggagctcaggtcagggatccggtcattggcgaacacctgggactcgaggaaagggacgagctggtgcgggctgtgcgccaccagctcgtcagttccgcggtggagagtcgagtacagaagcgccttgagccaagtggtgctggacttggggaaggtggtgaggaagatgtcggtggcgcgcgccgtcaggtgctccttgatcaccatggagctcacaaccccattcgtgaacgtgtaccacccgtccgggtggcgactgcacgggaggccgatgaggctgggagccgacggaaaggtctctgcgactcgtcggagttggtcgtatatctccttattatgagctgttgcttcgtcggccgactcgggtgcagaagagagccggaaggagggcgccatgaagaatgaatccagcagaacaccaatgaccaatgtattttttttgatccactgggagcatgaagtgcaaatatatagtactatctcggagaggagagtagtccggaagtaataataaagtattcaagttgacattaattagtattaacttgttattatgtctaggtgttagcatcttttttagatcattgaagatttcgttgaacaatagcatctctagttatgtagattaattttatctctttttgtttctttaatgcacgtgatgctcaacttgagattgaaaaaagttgttaatgcttcggagggttaaatttaccgtgacatatggatttagctcttagcggagggtattatcttgtccattgtataatttttttttagaaagttcaggggggagcgggggagtttccccacctgaattttataaaatgaaggaagacttgcagttacatgttaaattacagagttttgaaaagcagacgctagtgtttccttccacgaggaaacaatgcccctatcatccgaattgaaacgctctgctcaaagagttgcatcatctatacatttagttactagtctacgcaaggatgtttgcagccccctgaaaacaacatcatgcctgtggttccacagaacccaaaagcagagaaagaagaagactctgaagtgcttgatgggaatgccatctaggcggcctaaacttgcgagattggctgagcttgtcagtcctgggacaatctgaatggtcgaccagaacgcctgagcaaaagaacaatcaacacagaaatgaaaagcagtttcttctaaaacaccaaaagatcgcagttcgcggacgaaacaattttctttttttacaggttctgctttgtggggaggcgttctttggataataaccaaatgaagaactgaatcttcggaggagatttacttttccaaattattttccaattttggtcgtcttggcggtcttcatgcaagtactcgtagatttgcttggacttcaagatggtggcgtgtggagcattgagggctcccctttcgtccagttaatcaactagtacgaaatcactcaaagcgagaaggagatgttgtagctgagaaggagatcttgtccatgcagatggtggtattatcttgctcattgtattatgattgatgacaaatgtgagaacgatgtatatcaaaacacattcaatgttatatttaatgaaactaatttagtgtaattgctaattattattataggtagatttgataaaatgtcaaaacgattgataagatgaagcgaatggagtagttgctaagttagtgaaacctatataatcttggacatagtaaactatgacaaaatatgactggcaacctaacgcgtcgtattttactatgacattgatgagtggattagctcttagcaagatgcattatcttgcccattttatagtatatatgcactacactgatcagaagataccattaggatcttacgatgaaaattattgatcgaacatgataagacaagcgttatcaattatcaacctaaagcaccaaagtgtactgatcatttatagtttagcagtaggcttgtagacttctagtttggttagttacacccaccgatatgacagcgatataataactaggaattgcatagtgttgtatttcagatatacatcatgcaatactccataagatatacgaaaatagttgcgaagcgtaacagtaggtcagatcgatcgattattaattacacagaaagagatatctagtactccctccatactcgtaaaggaagtcgtttaggacagtgacacggtctccaaaacacaactttcacttcttatttctataaaaatatttattgaaaagtgatatatgtatacttttatgaaagtatttttcaagacaaatctatatatataatttttacatttttaaactcaacaacttgagagttattcatgatttatattcccaaggtttgacttaaacattgtcctaaacgactttctttatgagtatggagggagtatactttataaaccaaacttgaagaatagccgagtgtatctgcatgcttctaaacatgacatccacttagccaaattgcaaaggacggctgcaaattaaaggtgagatcatcaggctacattcattaattacctatcatagtagtcctggagaaatcatctttggtcggtcgcccaaaaactacaataatcccggttcaaataggaacggggactaaagtgtaataccccgtatattaaaaaaaatatttaggtttttttagtttgggttgacttgttaaaataaagatgttaatagaaatacataaaagaaaaatatctttagaagtgggccaacatgagaaggcccataaactcagcccattagttctcccctaaaacctagagagaggggaaccaaaccccacctccccttgtggtaccgccacccctctccttagccggcgcctccttcctcctctcctcctgtgttcgcatctctccccctcaacagcaaattgctctccctagatctccatcttcatagcttggatgaagaagcaaagtggaaaaacggaacgagtaggaggagaggagtagaagtaggggttagaccggagtctcccctattgtctcctcataagttctctaaaagaaccctaggtgaggcttatccccttgttgtatcagttgttctagggtgtttctagtggtttaattcgtggttgaggtgggttagagaagcgttttggacgttgtgattcggattggtagttctgggcgtgggccgatttatagcgcctctgttttacattaatttcatggtcaaaatgatttattctgatcaaagtgtccatataaaagttgtagataatgtttggatctatcttctgaccaaagggcgcgattttatctcaagtggtttaggagatatattttttttagtatgactgttgtttttgtgtcataatttggatagtagtagattgaactgtttttggaggggttaaacagtggaatcagccaggctgcctatagacaaaattgtagaggtttttcttagctttccatattggcaaagtacaccatgattgggcgagtagaactccagttatggttgtcttagtgtggacagtctgaaattctggacagattctgatgtctactttcaagcgcaaattagaccatttaaattgcagaataaaaatatgctttctacatcaaagttgtatttattgttctgtagattttcaaaatgtatatattttcagtcatagacttttcatatttcaagatataaatgtttgaagcagtagtcttgtgtatagtccaagcggcgttccttgttattgcgttttgatgggatggggcagtaggttcacttttttcattgttttatacgcatgtttgaatgtgtttgctgaggttttgtttatgattaggtggtggcctatcagatcgtgcatgataccaatccttcattggaggcaagtgcatgacgaactaattgtgtgattcatggattgtttgctctatctatttatttttgatatatttctatgtgacatgtgaccgattatattcatattgttattcacgccatttaggttttcatgtttatcctatgtttacgatgctattcttgttttaatattccggattttggttctaggtaaataattcaagttccatgcttgccatggatgtgcaatatggtttcaatttggttctttgattctggttttcaattattcaaggaccatgtgtagtcatgtgagtgcaatttggatctttattcatattcctgtgggtaagcgctgatcacgcttactcggctttgctggcaaatgctaggatgtattcactattgtccgggatggaaactactatttcaattcatgcctgcccgggatgggaactactatcttctttgacttggtgtttgaaaatgtgtttcctatcaaagaaagaaagccttatgttcatgctttattgccaatgttgtgtatatgtgttttctagttccatattatacttgctgagtaattttatactcactcgtgtgttttatttggttttaggtacatattgcgaccgatatgcatgggcgggaagtagcacccttatatacacatttatttgcacagtattaaactatattgcttaggtccataatgatacttaaactatattatggttcggtcttgtaataatcttttagatatctattagtttctttccatggaattataaggatggatcgaattgtgggaaggatgttgttattagtttaacttacatttgcctgtcgtggatgtccgtatttacagggaagattctgccgaaatttctaataattttgggagttagtggtttgagtgtattttgatgtggcactctaggtacgtggttacctggggtgttacataaagattattttttagtcctggttaaaatttttttgatctttagtttcgggagtaaagatttagtcctggtttaaaaagttgtcgggtcgaattcaggccccaattatctttagtcccggttggtataaacaaaaataatcttatccctccccattcccctctctctctctctctctactccctagctctcattaaacaacaagttctcagcctcctccggtcctcctcagatccgatctggctagtcttctcctctccccttcctccccttcccctctcctcccctaccccacctcctcctcctcccataccagagcgagcccaggcggctgagcccgggcggcggcggcggctggcatagagggtgccgcggtggcggctggcggcgggcggcggcgtggctgcgtggagggcgacagggagcgcggcggtggcgggagctgacgtgtcacgccccgaactagtaccgaccggaactagcctgtgacgctccaaattaacctgttaatcgataccagtcctaggaaacaatgctggtatcacaggaagacagaatatcacagcaacagaggtctctttattatagagtaggagtacaatcaagtcgggctgcggacagatcccgagctcacaactgcattacaaaagggaagcggaagccaggacttggaccaaacaacacaggcgcgacttgggaactaggccgaaaacctaaaactcatcgtagccggcttgctcctggaagaactcctcgtcagcgggattcgcttcatcttcttcagcaactgggggggattatttatgtagagcaagggtgagtacaggagtactcagcaagccatgggaaataagtgtttaatgcaggcttcaaggaaaggctgttgtttttgcaattgattttatttgaactcttttctgaaagcaactaagtgagtgcttctcaaacgacatggatgagacagtgcgtctcgtccggtcggagtatgtgcaaatgtatcagtctttagaattgatcaagattggcacccggccaacaactttcaaacggccacccgggccaacaactttcaaatggccacccgggcctagctgatcccatcagctgcagattttccaaataacgatccccttttcacaacagcaatttcacaaggcagtagtcaaacaacactacgctaggaatcacctcacatccgcccatgaccgtgggcacggctgttcgaacagtttgttaacctctgtagagggggcacactttacccacacgacattactaacccggatcacccagcccgtggggatcagccacgtcgggagacctccaagctttcatgacaaggcatttcgtatgccgacacaggtttaccatatgccgacgagaggggtcccagaccaacaacaggttaggtcccagaccatactgtgccaggaagcccaggggtcctccccgacaccaccccagtgaatccacatgtctctcggcatcaaggctcccctgataagctagttactcagccaggggtgtctcattccacctatgtggtcgtcttgtcttatgttcggatgaaattccaaggaaacggtccttaagtgcaagagcgggaaaccatacacccggtacgttccccggtccgcggttttggaaattcatttagttcgcaagcactgacccaggtgtcgggttttccaagccttttgtaaaacccaagttttacccaagaagtttttcagattttaagtttgaaggcgaccgtcgatactcgcacagggtgcacgaatatcgaggcgcaactagatggttacaaggggacatgatataacaattaacaaaggaatgatcaaatgcaacaaattaggtaggtccgccaatctgccttgcagacaggacaaacagattaagtgcaatcctatcaatgcataatatttttcaagcaacataattaaattcaaatataggctcaagatgttcaaaggtggcttgccttgctcgagatctggagcttgatcctcgaaatcctcgcactgcgggtcttcgggctccgaaactatacgcaaaacgggacaactcaacaaacggcgaaaataaagccctattaatgacctctaagcatgccattagatagatctcgagatttgaggaattttggaagttgaacggagtcaaacggacttacggttgggaagatattgaatttctaagattattggttttttggtctaaaagaaaaggatttattaaatccttttcgaaaaagaaaagaaaagaaaagaaaagagggagggaaattagacttccctcgggcggctagggcgtggcccgagagaaaagcggcggctcggctgagctaaatgggccgaccggcccaaggcacgcgcgcgcgggaggggaggagagagagagccggtggaccgggctcacctcgcgtggtcccgagtgggacccgcttgtcagcggctcggctcaccgtgcggagggagcacgcggcgcggcgctaggatgggggagagacgcggtgcacgcgcgcggttcgcggaggacgcggatgcggcgggcccacgcgcagcctcacggctcgcggtggaccgcgcgcacggggagggagcggctaaccggggtcgactcgacccggttttggccgagctggcgccgacgtggcgcctacgtggctgccacgcgggccggcgggaggtagacgaggacgccggccggaacggacggcggactacagcggcgagcggtggagtgaaccacggcgatacaggcaaaagcgagcacaccgggtggttgcacaggacgaggggagacgagccaacggctcggattcgccggaggatgcccgacggcggcgaattgcggcggcggcaaccggcggcgggagaagggggaaacggcgatgaggtcacgaggggccgattcccggcggcgagagcatctacgcggctacgggaatccgatgctagcgttggattgggcggagctgcgccgagcgaggccggcgacgagcggcgcttccgagctcgggcggcgacggcggcgagcacacggcgagcggcggcaacggtcggggcggcgccggctagctacagggaggctactcgtgctactacccgagtctaaggggaggagatggagcgagaagggagaacggggagatgcactaccgtgcgggcgggcgcagtgacgagaggctgacggcgcgggagtaatctctccggcctcgggctggggaagaggaaggagagggcgcgctcggagtccccttccgcgtccttgctcgtgccggctcctccgacatgcgcaacgacgaacggcgacggcgaacagagcacgggaggcggcggcaatggcgtggaggcgaatgggagaggaaaggaaagggggaagcttgggtttataggatggcaatgtcggtttgggaaccgacttagggcggtcaaaggagagggctagcgctcggcggtcacggccaaagcggcgacagggaggagggaggaggatgacgccggcgggaggaaaaaggggaaaagagggagagaaaaaggggcttgtccccttgcctcttcgggaaaaggaggagggagcgggggcgacgcggcagagggaggaggagctctgcctccgtcccttggcagcttgcgcgtggagtggcgggggccgggcgatgacgacgacgatgacggcggggcggtttggagcggggcgacgacatgggcggcaggcgcgggtaggcgcggcagaggctgacggcggcggcgaccaggcggtcggccaccacggcacgcgcgcgcgggaagcaacgggaggcgcggcggggcagcggggccgggcggcgcagacggcgcaggcgcggcatggcagcggccacgcgggcgcgcgcacgcgagggaggagggctcggctcggcgcggctcacgcgcacgcgcgagcggcgcgcgggcagagcggagaagagggagagagagagagagagagagagagagagatccggggagggaggggagatgggccgagagagattcggcccatcgaacccggggaggcaaattagacttttgcggaggaattgatttgggaaggatttggattcgggattgaactcggcgatagatcggggatttgagatctgagatggcacggacactagacaacaagcaaagaaacagatttcgcaaatagagttttaaagagataatttttccgctaggcgccacgacggaatgggcgctacatggcggccggcggcgccctcccttctaccggaggggaggcggcagcggaagcacaactttatttttttttccaaatttgtgatacatttggatctaagaacttgtggtttattggatctgtgatgtatttgatgtttggatctgtgatgtatttctttaagaatttgagttgtatttatttagaatttgtgatgtgaatgattcattgatttgggatgatactttgattcggggatatttagggagatttgggaaggagcaactcaatttggaaagaaacaatgaaaataaaaaaagagaaaaaaatggtgaccaactgggactggcgctgccatctttagtcccggttggtgttatcaaccaggattaaatatgtatttttagtcccggttatttcaatcgggactaaagatagtgatctttagtcccgcattcgtagtcccggtccaaccgggactacagaggggttaccaaccggaactacaaaccatctctccaccagtgccagcgcaacattttaggacatcatatcctatcttaccaaaaagttataacccactaatcctaaagctcaacatgcaaacatgccacctcatcatccactagcaataattacatacaaaatgtacctatgcaagcatgcaacatcgtatataattcattaaattctacaaatcaacatccaattatcttccttcacattatttttcacaatgtttttaatatatatgtatccatcatttttataactagaaaagaagcccacgcagatgcgtgggcattttgtttattgtttataagaaaatacaaaaagaaatatatagaccacggaaaagaccatagacttatatataataaatgacaaaaatgtttcctagattcaaacaaaaatactatttcccggttatatataaatttgcctaatgtcaccactacttattattattgaattttttatggatacttaatatcgttcttttgaaacctgagtgcttatttaatagatgaaactgtatttgtaccatcaaaataagcacaatacatcactaatcgactaaaaagtttatctccactacttacctaattgttcatgtcgatctaacttatttccaaacctatgaataaatattccaataatattttatcaaaaaaatatgttataacagtatcgcttatacgtgttaatagtataatactgttaaaattagatatgaatgcccatagccaaacatagctaccaaggctttattcctcgataccttgaaacatgggtcacatataggtgtagccgtatccgtcaagactatcgtggagagcagttttaacgcctaattcacaattagcacctttataaaggattgcattgttaagtaggaagttgagctctattgctaagggtgaccacccatggtggctcaactcagccagatgtatgcctttgctatatcatggcagcatagcaaggtttattatctatgcttggcacacttttgagaatggaaaaagagaagatggaggtgattaaaatattcattttgaaagttttgagttgtttttgtggtatataatagacacaatttgtttatagtgtaaatatcaatattactcaaatttcaataatacatatacaatattattatttgaaagagagtgaggttatcatgttagtgtagtgtatgacatacatccatcaactatgcccgacacattgaaattcctcaagtaaaagaaaatatatcatgggtagtttaatgcacatgttattagattatttatttgttgccaaaactatatgacaaacaaaaaacctacatatatgaccatagttctcatgatggactatggggttgtagtatagccatatcactcgctggaagtatttttaataagttttttcttgtctgtgtatcatgtgtgcttctcacttttcaaataccaataaaatagtcctgaaaaaaatcaaaaacatatttgagaatcttaatctcacacattaaaattagataagatctacttgaaaaaaatataactaaattcccttgtttcaatttttcatttttacatatgtagattcaaattatttgacaggtgatattttacaccataattatttaaaaaaatattatgacattaattattatgtgtcattatgtatttatcagttagcactaactactataggtcaataatagataggtatggctcacactatttttttaattgataataaaacatcaatacatggatttaaattattgatttatagttgtcaggaatataaagaactaaactgatcatagaaccaacatatagtttattagttttcaaaagttaatacatgcgtggagcccttcatgaagaggacactgaccgggataaccatgaaagtctatattcaattggagatataaatcaatgctgtttagattttattatgctttagatatctcaacaacctaaaaaaaggagagcatataatgtatatacgtgcttagccggctgtaagctgatggtacatggtagttggaatcaatattggttggtcgttttttcaatgatacgtattaatttctatggtttttatttcgatcgtacatacgcatagcttttgccttttatcgggatgaagatattaggagtgagagattaattttatagatctaataatctaatatagtggtctaaaataacaggtccattagtcattagtttaagtgaaaatcaatggttagatgttttattctcttagaatttttatgattttatgtaatttattatagcaccacgtgacaatgtagtagcgattgtagagtgacatgtggtgatctaaaagcgtttatagaaagtttaatggacaaatcactcaacaacctaaaaaaggagtgcagataatgcacatacgtgcttgagccgtgagctgattatgcatggttagttggaattaatcttggctggtcgttttttcaattatacgtattaatttctttggtttttatttcgatcgtacatacgtatagcttttgccttttctccggatgaataatacgcaaggattttctcttgtatgtgaacgggatattaggagcgagagattattatttttatatatctaataatctaatggtctaaaacaatagatacatcagtttaagtgaaaatcaacggttagatgttttattttctgttagaatttctataattttctctaatttattatagcaccacgtggtgacgtaggagcgtttggacgtgagagcgtttgtagaaaatttaacgaattataacaaaataaatgataattacatatttctttttatagtaaataaacatgttcaaacgtcatatattatgtatgtttcttaggtaaaaaaaaataataaaagaagggaaaa

SEQ ID NO: 1854 - DNA, 2172 bp, Oryza sativa
  Intron number 9 from transcript LOC_Os10g02980.1 (locus LO C_Os10g02980) derived from phytozome v7.0 (chr-ID Chr10; p os 1236330 to 1238501)
caaggtatgcacttggcagtgaggaagtgctattaacatatactgttgtgtgctgaagtttctcagtttttggtgtggagaatacctcaaaataattcaaagttggttagactttaatagtttctggtgaattgtgccacttgttatgcattcaaatatggtatgcatgatagtcataattttgttgttaatctctgcagttcgaataatttattcttgtacaaatttgagtttggcaccagtcgtgtcacataacttcctgtggtcaaaattattttgttacatattatctcggtctactgtaaaatattttaagatgatttagctatagatttgacaaagctcatatggatcaagtcatcaagcaattctggatttgtactattattttatatgaaagtatgcatgctcctggtctcctggggatacgtgagcgtgtagttaatgcattattaggcctcacaattggataattagtctacataatcgcttggttcccttaacaattgggtaccaggttaccatttttcagaaaaaaaaaactcacttgctatttgtgccacaaaggtttcgaagagctcttgtaggatacccccaattgttctcctagttggtaagaggactataaatctcagatgtagtttgattaagtatgtctcatgcttaatctaaactagaaacaaaaacatgagtctgggccatcaactggatggatgattcagatttcagagcataatttccttctatcctcttacagtggagggctgaaaattgagttggatcattaccccacataagcactagtatgcgaacaacaccaacttaaaagcaccggaggcaatttctttgcttaccctgtgcattgctcaattcaattatatcagaaaagacgtgttttacacttgtgcagttactactattacccatagactatatctactggctcccaaaccttttgaaaaggaacaaattttaattgtattatttacacttgggtagtacttgtgaaaagtggaattttgatcaattaataaaaaactacaaaagcatgaaactgagttttaagttttagattcagattctagttcgtttgatagatttgcatgttgcatatttccaactttgtcattaatggaaattatacaattttatatgcatgccagcatgtgttcataattgaaatgcatgcccctcaatccatgtaataagccatcccaagtaaaagtaatgtaattaattctttctatgtatgccatttcgatgaataggaaagtttgtttcttgtttcatgcttccattcctttcaaggaagctttggacgtattaacaacaatgtttttttttccgccgggaaggccgaaggaggccatccggatatattaagaaggaaaaaagtaacaacaatgtttttggtccttttcttttcattatcccatctaaatatgaacttatagaatattttcctttcaaaaaggtcaaagatgacctattacctcttaatgtgtaataggacacctatactagccaatagccatttgatcaagaattcaaaagaatcggcatccatcaaagtggagtaccatacggaaatattcagtggtaggctgttttccactaacaaacagagacactgagacagtgaaagcgtggtttatagaattttgggtgcatttgtctgacattgcaagttactgatttcaaacaagttaatgtgagtctaattgacgttattcaatcatcttgaaaagtcagttttctggggaagtccataacatcatggactcatggtatctttgcaacttgcaaggaccaacctggtttcctttttccatacactggcgctatttacacggacaacttttaagtgaactttcaaaatagttttccagtatagctattgctattcattcttttaacttttggtatgccattatagtgtagtacacacatacactggctgataaaggttcagttttagttctgcattttactctgcaagttcataaaagagtacctatcgtttaatccgttgcgtactataaagacttttgaactactattcagtcagttgccttgttgttagtattgtttgtttacacagtttagctaatttctttctatttctgttatatgctagcttctttctgagaaattgcctgagcttcttgattt

SEQ ID NO: 1855 - DNA, 2537 bp, Oryza sativa
  Intron number 2 from transcript LOC_Os03g49464.1 (locus LO C_Os03g49464) derived from phytozome v7.0 (chr-ID Chr3; po s 28148344 to 28150880)
ttgattggggaactgattcttctttaccggttgaggtaaactcgttcacatgaaagctttataattataaagtgatttactctgtattctttatttttacttatggattataaaaggattttgattgcacgccatagtactaataatgtttttcctctacgcgctggcttcgcagtttttagatttcaaaaaagtaatgtgcagtttaaccaaactagcatggtggcccgcgcagattgcgcggctagcatcattatattttctctcatataatagcatatatgttttctcattatattattcaaatatattaaaatgacaacataattttaaattttgtaataactttacaaaactactaatgtgtaatattcatattatattttatatacgtgctatttattaattatttttactatcaaattttagttatttgtaaattatatatatttctatatggactctagactcgtcttttaatatatttttttattctgaattttctgtaaattgtatttctatatagactctatgctcttcttccaatattatttatttttatttatgaatttttattatttctaattgtatttctatgtggactctaaactcatctttcaatattctttaatttttaatttcgaatttcatttacttctaaattgtattcctatattgaccttcacctcttcttcccatgtttttcttaatttcgaattttagttatttgtaaattgtatttttatacggactctaaactatacttttaattttattatgtttattccaaattttagttagttttaaattcctatatggactctatactctacttctaatattccttattttttaattctgaatttctattttttccttaattctatttctatatgggctctatactctacttctaatattccttatttttaattccaaatttatattatttgctaattgtattctatatggactctatactctacttctaatatttcttatttttaatttcgaatttcagttatttcctaattgtatttctatatggactctatactttacttctaatattccttatttttaattccgaatttcagttatttcctaattgtatttctatatgaactctatactctacttctaatattccttatttttaattccgaatttcagtatactctacttctaatattccttattttttaattccaaatttcaactatttcctaattgtatttctatatggactctatactctacttctaatatttattatttttaattccgaattttagtgatttcctaattttatttctatctctagtctcctcttctaatattccttatttttttaattccgaatttcaactatttctaaattgtatttctatatggactctagtcttctcttctaatattccttattttttaattccgaatttcagctatttctaaattgtatttctatatggactttgccttttctttttctccgattaatgtgaggatttctaggccatgagagcgaacgtggaggctcctttctttatttctttaataatataatagatagatgttttgtaacgaagggaaatcagctatttttacaaaagaaagaaaaccgtatatctccacccataaacattaacggcagcattagatgcacactagtcgccactccctctcagtctcaggaagtcagaacgaacctagcctgtcggtctgtcggactactgacgagcatagtgactgatacagaggctgtatttgaatccaaacttctaactttttctatcacatcaatctgtcgtacacacagtcagatcgtactaatttcaacccaaacttctaaacttggaaggaactaaacacagtcagaactcattatctgtttacatactactagactagtatcttcttttcagtttattcactatattattgtcacgaattttgctctaggcttctaaaaatatgatatataaaagaaattcagttgttataaattatttgttagttttatttcttaaaatacttaatttatccctataacaggtagataatactttctctgttttttaatagatgtcgccgttgatttttgaacccacgtttaaccattcgtcttattaaaaaaatttatgtgaatatataagatataaatcatgcttaaagtactttgagtaacaaaaataactcacaacaaaattaattataattacacaatttttttgaataagacgaatgatcaaatgtgtaataaaagaacaatgatgatatctattaaaatacagaggtagtacacgataataatctttgaaaagctaatacatactccatctatcccataatataacaatctagaatcggatggaacatttcatattagaacgaatctagatagatgcatgcccagatttattgtattataaattgtctcatctaattttagattgttatattattggacggtggagtattagtgcatgtggaccgtataaataacatcactttctttctgtgtgaaccctctcagg

SEQ ID NO: 1856 - DNA, 6074 bp, Oryza sativa
  Intron number 8 from transcript LOC_Os09g37840.1 (locus LO C_Os09g37840) derived from phytozome v7.0 (chr-ID Chr9; po s 21808357 to 21814430 reverse strand)
cacgatctacctcaggctcgccggtcttgacgcgggtaagcaccaatttaaattgagcaattttactgttcgtaaggaggtatttaaatttgataccttatgctacctaactactatgaggtaccaaatttttcactaaatttttgatacctgatggtatctcctcaaagactataaaattactcatttaaatttgtttatctttctactatgcatgattgttgtttttcttggagaagtacggattacaatttgaggtattttactgtttgaggtttatacttttagtccttgagttgagaaagtactaccagatacagcgaggtgctaatgaaatataactgtccatctatcaagtaggatcggtctaaatagtacgttgttccttgcctttcgttttgttcatgcaaagcggcgatccatgaaatttttgtacctggaaaaaaatcttggtacatgttggggggatggattctaatagctcgagtggacgtccacccatttattgcatgtcaactaaatggctatgaaaaatgttcaaaaaaatcggcaagataaatcaatatgtaatatatcactccacaaacatacaagttaaaattcaacttctataagttgtaacaaaaataacaaatttaactgtaaatatacatatagtaattttttgagttttgttggacatcggcatcggcgtcagcgtcagtgagaacatggcgctgataacataatatagcatcaccgtctactgccaatggccgctgcatgtagtaccaatatatgctatgtgcaccgcttgggtatattgacaagattagattgtgcctttgccagaggttgacgagattatagtaggaaaatttgctaacaccgagattcgccacccatttcaaagtgcaacgagtttcagttctataaatccaagggtacaaaatccacatataccaaataaaacatccaaaatttcagttcaatagaaatcgaggaggcctgtgagctaaaattcttgctccttgctaactcgcctgtgagctcgaggaggcctttccgccattgtcctcagccatatctggtacctcgatgtcgtggcgtttggaggtgtcccgtggagttcgaatcctgtcctctccaatataaaaaacgattagctttttaacacataattaattaagtattagctatttttttaaatagttaatataatttttgaaaacaacttttctataaagatatttttttgcaaaaaatagaagaacgcattagaaagcgtgctcataaaaaaaagagagagtagaagatgataagagggaatgccgaacacaacccaagtatctctcatgaccagacatgcgaaaataccattatactgtcttaatacctggtaggattgagtgatggtaccacaagaaccctcgtagtactagttggaggccgtctaggactctaggaggcccttcaagctactttttcttacaactagctgggtggcccgcgcaattgcgcggctagcacctaaacaaaatcatatatttttcagtatgattttacctaaaatttattaaatagctatccccgtatcatccccgtatttataattatatagtttttaaaagtcactctaccccttacttctgtcgtatccttttttatttacttgctcggtctatcactatttttattcattctcctttaaaccttaaaaaattggatcttatagttttttgagtttattatctcgttgggtttctttttataatttctcgaagtcccgtcaaacgctgccattatattcctctacggcccgtccaatgtcttttctctttattgtaattaggattttacaaatcgaacataattatcgtttgagttcattttttactttttataagtcccgccaaaccgtcagcggctttgccattgtactcctttattgctcgcccgctgcctcccttctttattgccattgagattttaaaatcgaacaggattatcattggttgtttttttactttttagaagttccgaacctttaaaaattggaccttatagtttttagaaattattgtcttgttgggtttcattttttataatttttagaagtcacatcaaacgatgccactatactcctctacgatccatccgtcgcctactctttattgtcattgggattctaaaaaccaaacataattatcgttggaatacattttttattttctagaagtctcgccaaccgtcagcggctctgcaactatactcctatataccccgcatgctgcttctcctttttattgtcattgagattttaaaaatcgaatatgattatcaatgtggtttattttttttactttctagaagtcacgtatagtgttcttttaatatttttattttttatttttgaatttcagttgtttcaaaatttgtattcctacttgaactctcttttaatttttctagttttagatatttttttatttttttattctgaattttaattaatctcatattgggttcttatataatttttttctttcaatactgcttatttttaattccgaatttcagttaattttaaattatattcctacttgaacttttctttttctttttgctattcagattttatttttatttttattccgaatattaactaatctcgtattgggttcttatatggactcttatctcaatattccttatttttaattccgaatttcagttatttttaaattatattcctacttggactccccttttgttttctaattttggatttttttttatttttatttcaaattttgattaatctcgtattgggttcttatatagacacttatttcaatattgcttatttttaattccgaatttcaactatttttgaattgtatttctatttagactctccttttctttttctccgattaatgtgggaatttctagcccccacagcgaacgtagtgcctcctttcaaagctgttttaataatataactagctgggtggcccacgcaattgcgcggctagcaccaaaataaaatcatatatttttagtatgattttacttaaaatttattaaatagctatatcattgtactaagacatcgaaagatcaaaccttatcattcccccatgtttttaattatatagttttttaaaaatcacaccagttgctaccccttatgtcatctccttctttatttgcttgctcgatctaccattatttctattcattctcctgcaacctttaaaaattggatcttatagtttgtagagtttattgtcatgttgggtttcgtttttataatttctagacgtcccgtcaaacattatcattataattctctatggcccgtccactatatcttctctttattgtcattgagattttaaaaattgaacataattatcgtttggattcatttttactttctagaagtcccaccaaaccgtcagcggcttttccattgtacttctctacggctcgcccgttgcctcccttctttattattattgagattttaaaatcgaacatgattatcattgttttttttactttttagaagttcttaacctttaaaaattggaccttgtagtttttagggtttattgtcttgttgggttttattttttataatttttagaagtctcgtcaaacgatgccactatgctcctctacagcccgtccgctgcctactctttatttcattgtgattctaaaaatcgaacataactatcgttggaattcattttttattttctaaaagtcccgccaaccgttgtgaccgtgcttcttaacggcctgtccgtcattcctcctcttaatcgtcattgggattctatttgggttttgtttataatttttagatgccctatcaaccatcaccatctactttataggcatgaccacgatcaaaaccttgagagcaaacgtagaggcttccttttacattactttgatgtattttatttatataaaactatactgatcaatataaaccgttaaaatctagatcctttaaatatttcactttttatgattaatgtggtaattttcgccgcttctcagctctgccccatcatcggagtatgagctataacatatggaccgtaaatatgtagaaaactattagggaatcttgttacttaggattgtttttaaaaaagaaaagcatactgctgcctctagagattatgcgatagtgcaaaacttgaatgtggttgaaggagtttggatgcccagctggtttgcctcccctgcacatgattttgtacaggacgtgtcaattgtgcctatatacgatttctaatttagctacacggacaggacatgattgtctcgtgtagtaaattaagtttcctaatccaattttgatttcaattgctattgcgtagcacacatcaaattctagtccatgctctttcacgtgtctgattcatgatctaactgtgtagattttttttcttcggttaatatgaaaatttctagaccccagagtgtacgtgatgtcttctttcaaagttgtcttaataattttgaagtatataaaaataccgatcatggtaatttggaactaattggtattattatgcatttgctctttcttatacggcttacgttgttgcaaaatttcatgtccaaattcaatctaataaaaaacatgtgatgtattcacattataatattttaatctatgtcattgctttaaaaaaagttttaatatgtttatacttgaattttaagctttcatgtaaatattgattatatgtatggcatgattaataaggaataataaatgacatctaggtattgcaaactataaatattaagctatgttatttgtcatgcttcaaaaactatagccgatgctcaaatcatcaaaattttggcttacccatagcttccgcttgttagctgatagcaggttagaaagctttcagtctggcagtccatcctttgcctggatcgttgaaagttctattgaatcggaccagtttttttcccccgaaactcaatgaagcggcttcttatccttatttctgtcctaatacatctagttttctttcctaatacgttttgattttttatatataaattgtgtcctatatattctatattttaagtcgtagacttttattagctttacaactctggtatcatctaatctgtgcatagatctcaaccataataataatataatagatttatttttaatttcagttgtttcaaaattgtatttctacttgaactctcttttaatttgtctaatttggatattattttatttttattctaaattttaattaatctcgtattgggttcttatatggattctgctttcaatattgtttatttttaatttcgaattttagctaattttaaattgtattcctacttgaactcttcttttattttttttttctaattttggattttatttttatttttattcccaattttaattaatcgcgctcatattgggttcttatatggactcttcttttaatattctttatttttaattctaaattttaactattttaaaattgttattcctacttggactatcattttcttttataattttggattttatttaatttttatttcgaattttgattaatctcatattgagttcttatatggaaacttctttcaatattgcttatttttaatcctgaatttcagctatttttaaattgtatttctactgggactcttttttttctaattttgaattttattttatttttatttcaaattttgattaatctcatattggttcttatatagaaacttctttcaatattgcttattttttaattccgaattttagctatttttagattgtatttctactcggactcttcttttcttttttttctttttcttcgattaatgtgggaatttctagcccccacagcgaacgtggtgcctcctttcaaagctgttttaataatataatagatagatagatagatagatagatttgctacttcctattttttaaaaatgtgtttactagttggattgtaaaagtttacacccttgtgtttgttgcacaggtcataggaggaagagca

SEQ ID NO: 1857 - DNA, 4937 bp, Oryza sativa
  Intron number 2 from transcript LOC_Os05g34854.1 (locus LO C_Os05g34854) derived from phytozome v7.0 (chr-ID Chr5; po s 20623212 to 20628148 reverse strand)
gcgcgttcgtcgtcaacatcggcgacaccttcgtatgtactctagtactcggccgggatatggatctcggatcgatcgatcgccgtgtcgtgtcgtcgtgtccggccatgatggtgtctcatcgcgacctcgacgtacgtcgtcgtctagctccattggctccacccgttttgctcgcgtccgccgtacggcaaaggacgagtagctatagcttagcatcctgaccacacgtaccaaatgctgagatctcacatcgatctcgctataatccgttcggttagtaaattggcatgtctttaatttggaagttaatcatcatatggaatatttgcggtaaaaaaccgtccaagtatgaaaagcaccaagattaattaatccgttgtccgaccgccaagtaaacaccgcaaaaaatatcatgagattcttgtagtgatggtttcgtagaaagaaataaggcatcttatattcattttttggggtttataaaaggaagacgtacacacacatcattatcaaatatcacatgcacaaactaacagtacccaacagcagacagatgtccctactactagcatgcatgtcacttactacaagttcagatcatcttgaaaaaaaaaattatatggttagaaaaaaaaaagcatcacacactcatttggctacacgcgcgtagtgcattttttttggagtaaagcaaccaatatatttcagcaaacttagattcggcaaggcgatcacacatagcatatcatacagtaatataatcacaaccatccgaaaggtcctagaaatgtaatcatagtcataatcataattataattaaaataatataggcatgtagtgatattagagatttatcattgaccaccgtctctaagcagtgttagagcctctcattcacaagtgtgtacgagtgcggtgtgcgtgcatggtggtgtggttgtgtcttttatgtgatcgtaaaaaaattaaaaagtcctaaaaatataatttagtcagtgtagcggctccgctctaatgtcggttcggtgtggttgttgcccaatctatcgtcccctgcgatatatctttatctatgttaatctataagattgatccatatatagttattagtaacaataaataatatttctaggtaaaatcacattgtctatttattttagccattaattagatacttgctataaattactgataggctattttggacgtgacgttcgcattttgctaccataacaaaacatggcgtctacccctagtataagctaacagttttggtattttatcactcacttaaaagtatcggtgacctaataaggttgcataatacatatagttatagtataactggcaggcatattgtaatagtgttttgtacgttgatcacctagggtttacgtttcgatatatctttttgcatggttgtgtagattagtttgtacatagatattttccaaaattataattatgtttaagttagactactctatatttaattatgtcggttctttaatactgatccatagaaaataatagaggaatgataggtattgcttaatacctaggtaccagtcgatacctatcaggtatcagctgataccttagacgtatcatttcgaccgaacagggtaccagcggatacctaccaggtatcaggtgatacctcagaggtattatcttgtccgaacgggatatcgttctatagcattctccaaaaataattaacaatagaataaatcatccaacgaccagatagtacactgctatacagtagtaaacctattccttccaaaaccacttctgaaggggcatacaacttaccgggaatggtttattgaaaacaaccgcgcgtcttcaatactgttgacaattaccgttgccatatactgtactccgtaccaacctttgtccgatccggcaaggaatatgtgtttgtagctgtttttttctctccaaacaatcgctaacagtactgtttttgtcagtcttttttgtcaaatattctcaaataatgtatcaacattcctaccgtgaacatttgctcctctcgtattattacgagagtaggacatgtagttcattacgcgagataaactattgtacaatataaacctaatattcaaatagtttaaaacaaatctaggtaatgttgatatataaagattttactaatcatacttttaaaagtgtggatctccatcccaaaataacttcatttttcatctatccatcccagacgtactaatataaaagcagaaagaatagaatgctctacactttatcaaatcccaaagtaatatctggttccaatattgtgtcagccattttcataaattctaatccaatgattatttaaaagctaaaattattttgcaatacataagatagtgaaaagtagagttattttaggacggagtcggtaaaaggaccggcaatcttaagattttcagctactcctatacaacagtggctctgtcctgtccgaggcttgaacttgttaggccaacctcaacccttcgtgttatctagtgtccatatcattaaatatattgccacataagtaaaaatctgatgtggcaaaagagttaacgagaagagaggtaaaaagatgaagaaatcatttctcatacaagaaaccatctctacacaagaaccaagaataaaaatgagatgataggtcgataaaaggagagagaaaaaagataattggattagaatttaatttgaagacgacatccattggatatatactttctatacatagtgtttatatggcatagtaattaagtatagaaccggagagtttctggcttaggatggccttaaagggcgtgcttattgggaatttaaccttttgcatagcctaacagtggctctgtgtcctgtccattggcctcatcagtaaacccttcgtctgctacgagatagtagtattcacctatccatcatctgtcctggcctgcctgacggcagagaggcaggcatggtacgtagtgcgaggcctctctcgtccgtcgtctcttttgcactgagagaaattaaagctacagagggctgtttctcttttccgccggtttggacgcttgtctattttggccggagccggagacgaaccgggcaggcaggcggtggtggccggtgggccccggccgcgcgcaacgccggtggtactatctttgttctaaattgttctaaagtgtaaagctacctagtatataatgtgatgtgatattatctagtattataaaactggatatagataatatcatatcctgctatactgtctccattctaaattagtagtcgctttaactttttttcttagaacgtttgacaattcgtcttaattaaaaaaatagtgcaaataaaaaaaatgataagtcatacttaaagtgcttttgataattaagcaagtcacaaacaaaataaataataattctataatttttaaaataagatgaatggtcaaaagttataaataaaaactcaaaacgataagtattttgggaaccttgtacaggataggacacatcatagtacaacgaatcttgacacactatagtacaataaatctagatatgatgtatcacatccaatataaattgctatattttaagactgagggtgaagtatttttgaaacggaggaagtgggacgcactagggggtacgtacgcacacgacgccgtcgttttccccgtttcggcgccaggctttgcggcagaacggggcggggaggaccggaggagtcgccctccgactcgacttcgcacgtccgcgtgctgcgccccgtacacacacaccacatagtactgtactgtgtgtgtcccaagagtccatccgtccatatctcgcaattgatcgcatatatcacagatgtctggatccggtcaagtcaagacaaacagcaatacggtggtagtagggtaaattttgtaaaactacaggaattttaattaaggctatgtttagatcagggtgaaaagttatgacatgtcacatcagatatacggacatatatttaaagtattaaatgtagactaataataaaacaaattacatattccgcctgtaaactgcgagacgaatttattaagtctaattaatctgtcattagcaaatattattgtagcaccacattgtcaaatcatgtagcaattaggcttaaaagattcgtctcacaattttcaagcaatctgtataattagttattttttcgtttatatttaatactccatgcatctacctaaacattcgatgcccctaaactatcgtaaaactttgagaatgcattataaaactatagatttgatataaaatttattataaaaatacatattttaagactaagtatggtaaaactacatttattatttaatcgttaagttatcttaaaatgaatatttttagtttaaatctccatcaataatgttacatttgaactataattattcatcttttgtgattaaatttatgttaaatctacagttttatgatacatttattattaaatctgcaatttacgatactttattttaagtatgtacttctattgtaaaataactacaatataaatttataggtttataatagtttagttaatatattcgttgttacgtgaaatttactcgataatgtaattttgagtttaggacaaaagattggaagatttatagtgtagcatatattacaacattccacaaacatacaaattaaaaactattcataattacacaacttaaatttaattaacatactactttttttcccaaatccaactcggacactagtactgtagttggctagttgtattcactttgctgtgcagctagctagtttgtgtaattgtgtctagtgaaaattgatgcaactgtttaattattattgatggtgattttgcaggcgctgacgaacggccggtacaagagctgcctgca

SEQ ID NO: 1858 - DNA, 2388 bp, Oryza sativa
  Intron number 13 from transcript LOC_Os08g21590.2 (locus L OC_Os08g21590) derived from phytozome v7.0 (chr-ID Chr8; p os 12856033 to 12858420 reverse strand)
tggttgagtttattccttcaatttctgttgcaaaggtaaccctattattcagcaattcatgataatatctctacaaaatctagcttcttcataagtagcctcatctttacaaatcactgtaattacagagcatgcatagctttgaagcttaaattttccatcttcaacactatgtcctgcatctcctttcactctataatgtgacaatgaaccacactgcagtccctcaaatccagtatatgttaaaatactaatcccttgcagaagaccacatgttctgttactgtaacttctttcaaactgtatccaacaagtcattgatattttaggacaggtaaggaagattgaagtgctggcttattaacaatttgcaaaagttgggatcacaaacactaacagtgcctgggttaaatgttaattgaatcatttctcttataggataaagtccatttagacactctattgttcagttctagaaatcatcctccatctgtggaaccagatggagtgccagctgattggatagtggccttcccattatcctgttaatatttactacatagatatgaattgaatttaatcattaagaatacataaatatgagtggaatagctactcaatttcatcaaattcgaacagatacaacttaaacaaagtcctctttcagatatgtgcatttaatttaatttgaattcgtgtaatataatgtttcagatgaaaaacctaaaacatgctcaaatccatacctttagttgaatttgaaatggggaaactgttaatctgatggggaaaaaatctaattcagattcatgtcctatcaaatacagtagtcaaaactttccattttgacacctgtacatgtaggtacttgatcccttccaacagtgggtatatcgctaatctcatgcccattcaataccgggttttaactgatgcaacacatatgtcaaatgttttcaatatgtggaattaggctcgcctgtctcccttcacctcttctgtccttcctcccctaagatttcatcatccccatggcatgcttagatggtaggtcggcaactatctcccttgctcattgcacccaagcatcagggtcacacacaaggcgcatggcacactgacgcgtgcagcctctgcttcttttgtattatttcttggtgtagttgaatttatagatcccatgtaaactagtatgtggcttctagatgtcataggaaaatcctttttataacaaatagtattattagtttctagttgatgactgctgctcagaagtaaggcttgtaagttctaggccagtaatggcaacacggtggagcagagcattcacgtgcttataggctgtcttggcctaggaaacaaggttctattaggcttgcagggctgctgctctttgaaagtggcatgcttgaccaggtggtaatgcattacagaggaactggcaagcttggtacagcacttgagagaagaggagaggaggaagaaggcacatgaagaggaagattagatgctcatatatatgggtcccaccattcttagttttatccgttgattatgatggattctgtgttatccaagaaccacctagggttaatgttacttgtagattaactgggaggaggggtggggatgactttataaccctcttttacactgaagtccttctgaatatttatcaatacagggcagcaaacacacaccacactcacaccacctcatgggcacagatgtgtgtatcctctacacactagtgtttccgggacacatgtgtctaaagcttatctagcatgtcgagttatcgactcatgcttatgcagggacatctgacagctctagcagtgtccgagctggaggaagggatgcgagagagagacaggctgcaaatcttcctcctggaaaatatcatagacacccaatgcctcaaaggaacatggccatgcggcatgcgcatacccattaaacagactcatgtcctaaaatttggatgggcatactgtctaggacttgaaccttgatgggctaagtgcacatctgcgctccaagccatcgggtcttctggcacagccaacttccaccgctttgaatttttgaagtcacatggttttgccttagtaacaatagcagtgtgaattttcatgaatgttttcttttatgaactactattattgtttttcctatcagaactttcccagaatgtttattaaaattgtcaactacaattttttttgctgctaatttttatttgtatgaactgtcaatcattaacgtttgcctcttattatcttttttacttaagttgaagcatatccagcaaggtatctattgttaataacaaattactgtttatttgcagattatacaaaaaacgggcagtatagaaagttacct

SEQ ID NO: 1859 - DNA, 10141 bp, Oryza sativa
  Intron number 1 from transcript LOC_Os02g30714.1 (locus LO C_Os02g30714) derived from phytozome v7.0 (chr-ID Chr2; po s 18290608 to 18300748)
tcctcatcaccggcgcctcctccggcatcggcgaggtacgtagtacatgtatatgcataataagctctctttaatctttgtcagattacatacaaacccaatgcatcttggatgcaatagcaaaggcagaagtataactgatccctcgatctgtcacaaaatacacaaagtacagctatttcttcttcatcgactctctcgcgtctcagttaagcactgtatcattacttatttaatttcttactcgtcctaattgataagaaaatcgtccctatttaatttcacatctttccttaattccctgaaaaacataatttcacatctttccgtagtattgtcggcaagttacgtggaaatgctactaatcgagctccgtctgaaaaatcaacgccgtagtctcgtgccagatagtcaaataagcgtgcatgtgtctgttatctttggagatagagaatcccggatatcgatcttatcgagttcagaagcgtacagggtgtgtgttgtgttgttaacttggtactagtggccaatcttatcttagcttgagagagttgacgctgcatcaaagtgtgacgagaaacgtctgggatttcccgtgaaaaaaaaaatgcggggtgactttggttagagcaagtttaatagtataggcaactactgcctccaaatcatctatacctaatctaatagctcatcttctatctattatatactaaaagtccattaaattaaactacctacaaacgctctcatgctgtcacgtggcactctacaaatactcctatgccgccacgtggcgctctaataaatttagagaaattaaaataaatctaaccgttagttttcatttaatctgatggacccatatttttaacattggatctctaaaagaaataaccaattatagatggcccacgtatatagaagcccacatacgtgcatgaacgcacgtacttcatgcaccggccccacgctcctcttttcttttttttttctttttcactcatatctattatatatactaaaatttcactaaatttcctacggaacctaattaactattctagcccatagatattattaattcagcctatctcttctctacattataaaaattgaagatgtttttgccatcgattacgtacgtcgtccgactcattaccatgtaagcttatttttctgtccgattttctttttcaccgcgcgcgtgtacttcgtgcccgtatttttttctttgtccgattctcttcccatgcattccaaatcgtgtggcgtctaggcccatgtcggagcctccgccgtctcctcgcttgcccacctcattggagcctctgtgaaaaaaacaattggaggccggttgcaacctctggatggtcgacgcgtggataaacagcccatccaacggctgggcaatcggctccagacagcccatccaacagctgggcgatcggctccaggcgagcgtgctattccgcgtaattcaccggatctccattgtcaacgtttttatcttgagttctgtggattcgatataattttaataaaaaaataaaagaagagattaaaggtatcaaaagccctctaattttggggatcgaaaaagattcgaaagattagattgattcactggttctctattgtcacctttttatcttgagttttgtggattcgctctaattttgataaaaacggaaagaagagtattgggagatcgagaaagattcgaaagattagattggatttgatgagaaggagcagatctgtatcttacaggcacgggactgtcttctggaggttgaagagagttgggcctacagcgggtcaaagagaggcagaccaagcagagggaggcaatgggctgggctggaattgaaaagtatataatgataaaaatgttttttacccgttgcaacgcatgggtttttttttggtatatgtaaaaatatatgtacgcaccagtaatatattatgggtattatttagtatgttgggtccggcgtccctccttttttttttgactcacatgaaataaacccaaattaataatttcaactcatagttgtaaaagtatatgttatttcatgttgtattctactagacatatgtcatcaaaatatccataaaaaatctaaataaataatatacattatatgtatatcacttaattacatgcgttgttaaattggacgtgtattttcaaaaaaaaaactccacttatgattagcattctaaaaaaattgcttactccctacttaaaagtactaatatattgaaatgagattagtaaaattataatgtattatgtgttttatttatttatatattattcaaaattaaaaatcaaatatattagtttgacaccgtgttgttgtcctttatctcctactttagacttcattcgatcaagctcatttggtgtgcttatccagggcactcggaatgatccaagtcattagcaaggattgattgaatactagaattaaaaatgaaaataaatttatttcattttttaaaaataacatatataaacactgtttacaagacacgcatcgcataatatatataccatttagcagtttgggaaacatgctcgacataaataaggaagtagccaatctgataatcactttagaacatagccttaaatgctttacttaggtactaaaacattaatacatattgtacagtatatttgtatacttggtcaatcgtagcctaaaatatcaaacatatgtcatcactgatccccatgtatgtaagttctatatacaagccactgtccactggtcgctaaataatattacttacgaggtatccatgcacaatgcacttaacaattaaccgatatccaatgagcacgtgtgttatccaacaccgaagataaatggtagaagatgcaaatgatagttgagtacaagtagattacaactatgagtaatgttattctcacacttttacaaatgcttctatgatgtcacgcctaataaattagagagaataaatgaaaaattatataaaaagataaacatcaatccatcaatttacacttaaattgatgatccatgattttcagccattaaattaaattatatacattaaagtaatccttctatcctaaaaaccatataatttatctctacataagtacacatctcctatataagtacgtacacaagagatataaaaagaaaaagaaggaagagtgtctaagatttttcctaaattgaggatatatgaacatagcgaccactcttagcgaggaggtaaaacaagccatgccacggcgctgcctcacgccacccattgcttcactctcttcccgtcaattttgttgaaagtatttttttaataacaatgtaaaaggcaatcatatgagctcataaaaatatgtgcagatgcacactatgaatacacattcatgcaccatatccctatgttagaaaaatatttgttctgaaaaaggaaaaaacaaatatatgtacaagagactactattcgctagaaaaagacatacatataactacattatatttatttttatgtcgttatcatccaaacattgttaacaaattagcacaaatttaaacacatattaacccccacgtacatgcatagctgaattagatgcataatacaagaaaaaaaagaatattaaaacttatattatcttgtaagttagcaaaggatctctgcatgaacaaatattttttatgtggtcctgatcactgaagctattagatagtcgaatgatcaaccctgctaattttttttaaaaaaacatttatatctacacctactaaaattagtactattgattaacatttatatctactctatacaatatatcaactcaagacacaaaaaaaacccttttttactacctccactttcactcattccctattgcaagtatggatctcaactggctatgttgtagtaattagttgtagtaattatacaggagtatgcattattcagttaaggtggtccgagtaagagtttaccgttgacaataaagcttaactggcctacttaccaataaaattatgctccatgctcgtcttgaggagcaatactatatcaatgcagggacccatgagtcaaggcattagagaaaaatccttagcggctatagtcagctttacccgatcattagaatagcattcatatataggtttaattgttttatcctattaattgtagaagtggtatttttaaatatgagataaaacggtgtggaatggacggaaccctaacggcgatggcatttttgggacaaaatcgcttgtacgatggtatttcttggaactcacacttgtcgatggtatttctgggacttgacgcttgtcaatggcattttatggattatctctttaaatatttatttatagatttggacacctgtgagacatggatatttgggtatgatgtggagattaactttttaggtattaatgatgtattgggtttatttttggatacagctgcaattccatctattaaaaagacactcatatttcaagataatgataataagttatagtgaatggtgaatttatatataaccgagataaagtgatttttggttggatatgataggcattatgatcattttgtatatatcaaaatctatggtctatttcttatagtgaatatggtgggatatggtttcttttagtattctttttatagataataaataaattgcccgcgcatctgcgcgggcttaactataaaaatatgctgcaccattaatacccggtcccacatcttatacacaaataacattttggagtccgtgttgcagctggctacaaatctatagcccgctttctctctctctttctcttttcttctcgatatgtggttatagttggcttatagtctgctattgtacctgctcttatcttgccactttgatacttcctccgtcccaaattagttatccttctaccattcaaattttgtcccacaatggctgtgtttagatccaaagtttggatccaaacttcagtccttttccatcacatcaacctgtcatacacacacaacttttcagtcacatcatctccaatttcaaccaaaatccaaactttgcgctgaactaaacacagccaatacttatcactcctagtaatacttgtcccatcaatcacatcacatttaaatttcttcctattttacccctcaaccacccttctatccttaaacataaattattttataagggtattgaagtcttttgtttcaaaccttatgatatactaaacgaccttaaaagataagtaatttgggatggaggtagtagtaaacactatacgttttaaaatatacttcctccatcttgtaatgatcgtcgtataaaaatatcaaaaactctaaattaatcatcgtgtaaccttggctcattcatttgacggtagtattattatatttgtacatgcaaattgagcttatatgtatgcatgcaagcttttggccgggtagtaaagctctcttgtttcttaggcataagaagagttaaagtctatatgaaaattgatttttcccctactacaaacttataataaataagggtgtttggtagagctacacgcctcacacaactccacacccattttaggtggagttaaaactgtttggttgggctttaactctcaagaatgtagagtttagagctggagctatatcatatagaccctaaaatacagagaagttaagattttattgatcttaatgagaaaatgatatgatgattaatataaaacagggagagtaacaattgagttcacaagtagtataaatgtagatatactctttatatatatatattcgtcgttgtttaatcgtttactagtttgatatattttaaaacatatgaagcagtagtttttggtatgacacgtattgaccgtcatttcggttccattcttgcgtagttcccagggcacatgggcgcgaaccggcccaattgcctttagttgtagaatcaagtaaagctactgtatctcgtaaactgtaatgctatctccttctaattagacatctggtctctcatcggtagtatgggttgaacacatgcgattaattaattgctgatgacgtcttctacactcacaaaatcgtgcatgcatggctgcgacccggtcaatgattaactaacgacaaagtgatccgatctggatctgtgcccacctgcagtaactcgttttaccgtagtgctggaccattaccgtcttactccctctgtcaaaaagtcctatacaaactatttcattatttcattttctgtttttttaatgagataggtatatttgtagtcttcatatattcaagacttaaatgaaaaaattatcttttatgttttatcgtgttaaacttaaattgttgatcggaacctgattgttgatttgttagataattttttcttagtcttgttgataaaagaaatgctatgccttacacttttagataaaagtgggagtattgtcgagaaaaatctttttacgactgcatgaacaatattaaattgttcttaaacgctctcgatcggaagtttatattaattaatagtttgctttaatgtttttgacagtcttgcatttaagaaacatggttacgcctatttcgttgaataaatatcgacatcatgaatttcatactaaagtgctctaagaaagaaaatgttcttgctataagcgtgggaaatcatatccaagttgtctgctccctgttcgagccatatcttatataaactctataagattaattggtcaaattattagtagtaccaaaagaattatgttttgttatattataccatacaatatatttttattgttgttaacaatataataagtgaacaaagactcgaaagaaacacaagtggaagggatactttatgtatttgcgtcatgctgatatcagcatgcgagaaaccttccaaaggtatcataccctagtaccgagcaccaggtctactccctccatcccaaaaaaagtaaaagcgaaccttaacatgaataggacactttgtaggacaagaatctggacatagctccatccataccaaggttggctttttttggacggagtgtccagattcgtgtcctagaaagtatctcatccatgccaaggttggcttttttagacagaaggagtaatacatatagatatcaggtatgatattatatgtacagagataaataggtccgcctgtagttacaaaacctcaatatcatggtaccactaacgtgatacattagatattacgaaagtattgctgggatatccacaaatttgtgtttcatgagaaaactcaagaaaaacaaaaaataatcaatttaaaaaatttaatcgaaacaacacccgaacaacaataaattaccccatggcaaaaaaaaaagttactgcatgttccattgccccataaaacaagcaacaaatgattagaaaaaagtgcccaaaatccttcaataaagctagataactcaaattaacgagcaaaattatcctgaaaatcatttctcaaaatgcttcaaaacaaaaaaaaaacacatcattcgattcaccacctctaatcaaagaagctcgttgtggatcacaatgagtcagcaaacgaagctactgcgaatccaaaaagcctcacgaattatccctccacctcgaatgaaggcggccttccataacaacacggagttggtggctattgaccatagattgacggctgcatagtgttctcggccattgagctatgagggtgggagagagagcactccttgagtttgggagagagagctcatgagggtgggacagaggagtggatctagtacacgaatattcacgtagcacgaacgcattagcaggacaaatactgacaagtccagccctcgagcgtgggtgcctttccccttttagccgctagctggcttagtcacttttgacccactaaatgcggcccattgtattttatcccaaataatttgtacgtataaagtttatatacatataatatatacatataaacttgcacatctaaactttataccatacaagttttatacatataaactttgcaccatagaaaatttcggtgtaggcattttatacagaaacatttagtataaaaatttatacacgcaactttatacatataagctttatatcgtagaaaaatttggtgtagcgattttacacataaatatttggtatataaatttatacatgcaaaataattggtatacaacttcatatagagatataataaaaatagggaaaaaaagcatgaatgcgtattttgggccgcatgggccatgatttcttgtctctgcttagagagccgtcacttgaattagctccaagcccataaaagaaaaaaaaggaaaatgcctccaaaaggaaacatgcttggcaaaaatgtaagcaatgacctgttcgctagcagccgcgcccgcgaacatgcgcacacaagtcatttcggggagagagagccatgtgggtgggagggaaagggggagaggatggagaatgcgcataaagtacaatagatgtttatatggttattaattgtctcgtctgaacaggatagagtcttctacatttctattaataatataaacataatataatattttattagaaaaagtacgaattacccccgaactatcacggtcgtccgaattacctcctgaaccacaaaaccggacattcttcacctcaaactatgtaaaccggacgaattaaccccctcgatctaatccgcagtagttttgatctaagtcgtatcccagttagcgttttctaataaaaaaattgtgggacccgtatgtcagtcttcactttcccccctctctcactcttcctctcttctctctcactctatctcactcttcactgattcactctatcggcggcggcgggagacacggaggagcgggcggcgggcggcggaaggcggcgcacgggggcggacggcggacggtggacggcgccgtcgcggcaaaggccgagcggaggcggcgcacgggggcggacggcggacggcggcgtcgcggcgacgcgcacgggggtgggcgacgaggtacctcaccgtgtaccgctccgcgcgtcccgtggcgaggtcgacagcgtcgacgaggcggagaggtaggcgggcggcgacggacaggtggacgaggcgggcgaggcgaacggcggcgaagaagcgggaggcggcggacaggcggacaaggcaggggaggcgagcggcggcggagaggcggacgaggcaggcgaggcgggcggcggcggagaggcggacgaggcgggcgaggcgagcggcggtggagaggcagacgaggatgcctctgcgccccgcgcggtcgccgctgttgctccctcccggacctcccccgcacccgcatccgtcgcgaggttcgctccgcgcgcggtggctcgtcgacgccgtcgacctcgccacgggacgcgcggagcggtacgtggagaggcacctcgtcgccggcagccgccgtccgccgcccgcccccgtgcgccgtgcccgcagctgcctccgctcggccgtcgccgcgacgccgccgtccgccgcccgcccccgtgcgccgcgcccgcagccgcctccgctcggccttcgccacgatgccgtcgtccgccgtccgcccccgtgcgccgctgcccgccgctcgctcctccgtgtttcccaccgccgccgatagagtgaatcaatgaagagtgagatagagtgagagagaagagaggaagagtgggagagaggggaaagtgaagactattacatgcgggtcccataattttttattagaaaacgctgactgggataccacgtatatgccacgtagactaaaaaccaccgcggattgggtcgaggggggtaattcgtccggtttacataattgggaggtgaagaatgtccggttttgtgattcagggggtaattcggacgaccgcgatagttgggggtaattcgtattttttctattttatttatactagtttacgtggcgttactcgaattatattttctctatcatgtgtcactatactgacaatacacgtggtggtgcttaacgtggctagctgctcttgtcattgtgcaggaactggcctaccagtacgcagcgcaaggtgcgtg

SEQ ID NO: 1860 - DNA, 1569 bp, Oryza sativa
  Intron number 1 from transcript LOC_Os10g31864.1 (locus LO C_Os10g31864) derived from phytozome v7.0 (chr-ID Chr10; p os 16669346 to 16670914 reverse strand)
gcccgggccctcgacctcgccccctacctgctccggtaaaaatgacggccgcttccccccctactgtatgctgttcgtgccatggttaggtggaatttaagttccgggcagtgtttgcagctgcatttagtacagaattggactcgtcattcatcaatctggtgcggaacaaatgccccttcttctaggcaccaagccttgataggctatgatgatcgatgagccttcatgctctgtagtcaatttaaatggattttatgtagttccaatatttgtgacaactgacaaaatccagttgaatttgagttcatctaagtttggggctatgtcgattaagcttgtttgattgttggggcagcattgcacgtctctttctctttgttatctttgatgaacactgccacgtatgggatgtatggtctggttcaacacagtcaaacaccatatttcccccgatcacaatttcacgtgtaacaaatgggaatatatcctatgcacacaagcttcccgtgcacactccgtggacaccaactagcaaatgtcacagaaaattatagaaaaaattgtacacatacttccagtagtattacacctacatggacccttaaaactgtcagtttttttcacttttttgttacggctaaaacataatgaatttgaatatgagctttgcagatatgtgtaatactattaggagtaaatgtccaattttttgtagaattttttgtgacatttgctagttggtgtgcacgggaagcttgtatgcataggatatgttcccataacaaacaggcatcacgaagcactaaaagttgtgcacttgtaaataacgagctgagtggagagctatgtgcctattccattttctaaggtgatgtataaccactcgaaagcccatttgtcaaaaggtaaagctaatgtactcaatctatagtataaagacgatgcatactggggacataatgaacaacaggtctgtttgtgttaaaagtctaatttgtcaagtgactgcactgaaggaaagccttgcctcctgtggagggttaagtttgctctcctgtgttcgcaattctggtgagctggaatcctcaaacaggcaacaggcaatttttatggatcagtaagaagctaacatgtgtttggacttaaaaaatccctcagtatcttaagctagcagctgatctatgtttagagcttactcattttatgcttcagtatgtcatgtactgaaagagtaatttaaaaagccactaccaggatcagtgacaaagaattgaaacaaaaacctgtacgtactggtttgtctgttttgtcgagtagcattttttttacacgtgctcacaaataatgaattagagtgcacatttggtttggagtttagataaattctatatcaaactgtacctaattattactatttctttcatctcttgaccatttcacttacgattctctatgcaactacagcatgcaagtggaaatatgccatatatataacagtgatctaacaactgtctgttgttatttgtggcaggcatttactaaactactttaagtttgctccaccac

SEQ ID NO: 1861 - DNA, 4843 bp, Oryza sativa
  Intron number 2 from transcript LOC_Os09g20684.1 (locus LO C_Os09g20684) derived from phytozome v7.0 (chr-ID Chr9; po s 12454415 to 12459257)
tacttcaccgatagcagcaccacgtaccggaggaggtaccccaaatcaaatcaatcattcaaccatgttcatactgcacagtgtgcatgcatgcatcatgcagttaatcgtgtgccatgctaggttgcctgcccgccctgcttcctgtctccggaaaatctgattatttttttttcgtttacatcacgaaggtatccgtaaatatcccaacagatatagatgattttgtattttatctaacctttgccacgaaccaaaatacatcctaacatacactcaatagacaggattagtagtaaaggttgctacgataattttatatgtgttacacttcttttttgaatggatatgtgttacactttattagttagtgtatggtttgctataacagtggtcgtgttgttttttaaaattctatttcctccatcctaaaatataaaaatatatttttagtataaatttgaactataaatgtagctatgtttttggacggggtatctggtttagtcgcaactcaatctaccaaataaataggcatgtcatatatattttgctttgggtagctgcaaatgtagttatgacacgcgggccaatataccagtaaagcatatcttaaatgtatatctcagattaaatatatacctaactaaacaaattgtgcgcaccttatcttgaaatggtaaattatggcaaccaatcaaactgacccttcaaccaatcaaactagcgcacctttcgtctttcgtctggcaccttagaattttgaaaccgtacattcaacctcccaaacttaacaatacaattcatataaccctctaaggtgatttttgttatctaatttatatatatattggatgagttttactacgtaacatacacattagacatatatgatagaatttccacttgaatatttcttcgccctatttactctcacttacaaactaccaacataatactagtttggcatcactataaagtataaatcgatgattgacgatatatatgttatttaaaaccgctcacttaaacgtccagatatacaaaaccactgttcaaaatcattttaagagtaatataaaagtttagggggttcagcgttcggatttaatgtattgggtattgatagactttcatctaaagtttatgtggacgtatggatttttttttctaatttagaaaccagcgtagtgcaacaggcacaataaccgctaaccacggctaaatttgtaatgaaaacagattttagcatacaaactattgttatcttggcatgcaaatcaagtaggtttatttatttattgctctagttgtttgttgaatatgagtcaatgtttttcatcgtacgcaattcgttactaccattaattaagtatcttttgtcctacaactgtgcgaggcaggccatgatgcagttttatcctgcgaattaattaagtagacagtaattaaaatccttggaacaaatgtttgatgaggtcttttttttatcagcaattaatgactggaaatcataggtaatagcttactattatcctctagccaaatactccctccatactcataaaggaggtcgtttaggacagggacacggtttacaaagaacaacttttgacttcttgtttctataaaaatatttattaaaaagtgatatatgtatacttttatgaaattatttttcaagacaaatctattcgtataatttttacattttcaaacttaacaacttgagagttatttatgatttatatttctaaggtttgacttaaacattgtcctagacgattttctttatgagtacggagggagtataaacttacgtggatgaaaaaggtataaaaaaaattaagggtgttggctctaatataagagctaactcaactcgtgctccaaaacaaatacattaaatgttataactaatatattatatatgttacctgcttttagttgaactaatatctaccggtgagctctactattatgaacttgttccaacgtatggccaccagttggctatggcatgacctattgacctttcccgacataatgcccgaaattcactaatgtatactccagattcctcaactgtatgccatcacatcacacataatcagacagatctcctgtctatgtatgcattaattcgtgagcttgattgatccaactagcaaccgaatctaactctaaaattactaaatgatgaaagaaaaacaacgatatatataacgtttttgtgtactgggaggaggtatattatatttcgatttatctctttgctactccatctgtcccaaaatataaacatttttagctataaatctgaacgactgtatgtctagattatttgtccagattcatagctaaaagttattagttttggaatggaggtggtatttaattaacttttgagcttctaaaagagtgtacctatattagcgcaaagttaatggaaacttaaaaaaaactctccagtaaaaaaatggagaaaattcatcttgtgcctctaaaatttcaccatgcccttgatatcacttatattttccataaccctaaaattttcttgatgcactatatgcccctgattttctttatctttatatatgccatttgttagtacgttgactatttattccttttgaattgatcctatattgcctttgacatataacaaaagcgcataatttcccatatacgggtttttggtttatgacatgaaaataagtgataattttaccaaaatcactaaagtttcaattatttggaaatttgaaaggtaaatatcaataaactggaacacttaaaattttatagaaccatatttttattaatttgttaaaatttgattttctttttttgcttttcaaatttgatacaattgtttttaaaaaaacttagtgatttgttcatttcagcacattctattaattatctcataattgaaaagtattctttagtttcttttttgttggggggggggggttatcactctcggtttatgaagtactccttctatcctcaataatactcaaaccatagcatccatgaagaatttaaggaggaagacaaaagattaaaatgcctctaattaatagaaaagttttatcggtaaatttgtaggtgatgggtactaaaagaataaaatttctcaattttgcggaccaatgataagttagaaggtaggagttaagccccgtttagatctcaccccaaaatttttcgccctgtcacatcaaacgtttaaacacatgtatgaagtattaaatataggctaaaaaataactaattgcacagattgcgactaatttgcgagacgaatctttaaagcctaatttctccatgatttgacaatgtggtgctaccgtaaaaatttgctaatgacagattaattaggcttaataaatttgtctcgtgatttactgacggattttataattattttcttattagtgcccgaacacccatgcgacagctatataatatccgaggtgacacgccaaaattttacactcttggatctaaacaccctcttagtttattcttggataaaactaaaactctaaaagttggtttattttgagacaaagggaataggaaacatgactattctaagaaagtttaaatggtgaaagttattcgagtggtgaactctaccaaaataaatatgaaatgatcaatataaaaacttaggagcatataatggattgaacaaaactttaataatagaactgattggatgaacaattaaggtattttaataaaatatgattaataaagtattaaaactattataacacttgaagaaaatgaatttgtttgattaatttaagaaacctttttatacataaccaatcgtttagtagttcgagaagaagcgtttaaacgagcgagtagatcagcttaatatgatcattcaaacacagtcatggtcggtgactccgtgtgaagccacatgggaattattacacctgcaactgaacacattgtctttacacacagacaagagcacaggctagatataagaaaagctgtaagaaattgacaaattgccagctcatttagaatatggaacactgcattcatccggcccgcatgtcgtgttatcagtagggaaactgatttcatctctcgagaaaatatcctctcgttttgtgcatgtcatctaaatagtcataaattttatttttataaaaattggcaacatagattaatatgaaatatatcactccacaaacatgtaagtttaaatttaacttttacaagttgtaaaaaaaataacaaatatagctgcgaatgtacaataactattttcagtttaatttgatctgtttgttgcagcttgtagaaattaaatttggtcttgcatgtttgtggagtaatttatttcatattaatatatattttcattttttttcaaattttttaatatctatttagatgacatgaaaacaacgaggggatatcccctcgagggataaaaatccacttccgttagcaatactactattaactaatcaatgggccatcccataattattgctccattcgttctaaaataaaaatatttttagcataatatcaaatcgaacattcctaactttaactattaatagcaaaaaaaaaagatcaataacgtaaaattaatgttgctagatttagcattaaataaagtatcataatataaaattctttttatttaaatcctcttatttttatagataattatttattaaagtagcatatcgaaatctaaaattatttatatttttggacggaaggagtagcaattaatcaatttaataatttgtaactgatggtctgcagccagtacctgctggtggtggcc

SEQ ID NO: 1862 - DNA, 8936 bp, Oryza sativa
  Intron number 1 from transcript LOC_Os11g18366.4 (locus LO C_Os11g18366) derived from phytozome v7.0 (chr-ID Chr11; p os 10361991 to 10370926 reverse strand)
caggaacgtatatactactatacgggttaacactgcgtgcatccatcagtttcagtttgtctctacttgctttctgttttctttaagagcactgctatgcgtaagacggattcgtactacctgcgtccgaccatatcatgtgcaccgatcaccgtctttagcttctctccaccaatgcaagcagcattcggatgcatgtcgtacgaatccgtcggacgcatagctattttctttctttaatttctcgggttggtgttaatatagagtgcagaccttaattataagcagtgaaaatataaaaactattgtatgatttaaaaagaggacatctgagatttatccgcgcaccatgagtcaaagcaattataaataattggagagtttatatgagttctcacgttagtcagaacatatgtcgacatttgatttgataggtcataatatcacagtcgttgttaatcatacacatgactgttgattagatatgtcataatatcaaagtcgtagatatatcaccacagggctagattaattagaatcctatacgatttaataaaaactaacagaaaatatctgaccgaataaacctacatgtgtataattggtcaagtgcgagccccaaaatatcgatgtggattctaagctaatcctgtcgaaaccatatctttgttcagagcatttagtcacgatgccaactataacttaattattgtcaatggcatgcaactataacaaattaatcgaccaaggtagcattgtgctttgtgcaaagcagtactttcgttttttttagtatttaaacaatcagaacgtacgtgtgtattcttcaataatatttggtttaaactttaaagtatctaaattaattaggatatctctatactaactactaaggaggcaccatacgttaatacattaatctaaaagatctgtcaattgattagtggaaaactcatagtaaaaaatacgtacagttgaaaaaactttgcatttcttcccctctgaaataaattgaagggccgttttaactacttttgacacgttttaggtttctaaactttagtaattggtacattgaaattaacaaatatcaacaaagtggactgacatgcatggtcttttgtagtctaaccaatgcattcacacacacgtataggacactcatatgggacaccatggtgcctgagcaccatggtatgaaatacataaattcgtccagatttttcaaaattttcaaattgtgagtatatacctagttataagtattcgattcatatatatacctagcaacaaaacaagtcaaatttaactttatttcacaatccaatattacatacttaactaattctatgtttggatgctatatacctagaaggaaaaaatacgaattacacccttgaactatcgcggtcgtccggattacccccctgaaccacaaaaccagacattcttcacccccaactatgcaaaccggacgaattaccccctctcaacccaatccgcggtggttttggtttacgtggcgtacgcgtggcagtccagtcaacattctatttattaaaaaactgtaggacccacatgtcttcctctctgtcactcttcctctctcttctctctctctcactctctgtctcactcttcctctctctctctcactcacgggtcggcggcggcggagaacacggagcggcggcggcgggtgatgaggaggacgacgacgaggatgttgacgaatgagtggtggacgacgatgaggacgacgctcaggcggcggtggcggccatggcggagaggcggccatacctcctcctcccctcctccctctctctctcaaacaggcacaaagcgcgcacggcggtcggcgtgcgggcggcggcggcggtcgtggaacggacgggcagtcgttggcgtgcggatgggccaacgacgagcacgaacttccccttgaacgcgccggccgaataccgttcggcggagtggacgaccttcccggggaacgtgtccatcccgggcaccaccctctcgtcgttctcgcccgcggcggcgacgaggtgcctcgccgcgtatcgctccgcgcatcccgtgacgaggtcgacggcgtcgacgagccactgcgcgcggccagcgtcgtagcgcgccgagcggacctcgcggcggaggcgggtgtgggggaggtagtcgggcgcgccggtggcggtgctagcgctggtccgcttcaaagaggacgtgctcgtcgggccggtgctgatggggcgcgccgtcggcgcgctggtcgcgtccgcgtccgccgcgccgctgaacgggctcgtggccgccatccgcagcccgctcggcgtcggtttcgacctgaacgtgccgctggagacgttcggccactactgcgccgtgctccagtccgagatgctctgcctggagctggagccgccgccttctccttcccctgctccggcggcaaggctgcattgcttcctgtccgaggacgatacaagcaccagcagcacacagcatcagttagctgcgtgaactgtcggtgatctgatgcagaagcagggtgcagggattgcttccaagcaagcaggtgaaacagagctggagtaatattgaaggcatgttcaggtcgaagccgacgcagacgcgcgcggcgagctccctcggcgcgtgcggcagcacgcagtggcgctccaggacgaggctcgtcgcccgctgccgccggcccgtctccgccgacctgtgtgagagagagaggggaagagtgagacacagagtgagagagagaaggggaagacaggtgggtcccacattttttaataaatagaatgctgactggactgccacgcgtacaccacgtagaccaaaaccaccgcggattggatcttggggggtaatttgtccggtttacatagttgagggtgaggaatgttcggttttgtggttcaggggataattcggacgaacgcgatagttcgaaggtgtaattcgtactttttactacgtagaatcaaaatctaacaaaaacatatttaaattcagttcgaacttgttctaaactagttagtaaagtagttaatgttaatacctaaacatttaaaaaaaatttatactcatttaaattgagtatatattcaatttaaattgagtatatattcaatttgaatcatggagcccgggctatatatatatatatatatatatatatataatataatataatcccctccttccggctgttccaacatcctatattgatgtcataattttttttcaaatgtaaaaatccctagttcatgtagttttcatgtttcttgcggatacactgatattgccattatttttctagacttgtattttatatgcgtggaccttttaatttcacatgtttgtccgagatttgtgattagctaaacggcatattctcttagtatgtttgatgaattaaacatggtagatttgtcattttgggactgcgtatctttttttgttcaatatgccagatataaacggtatagcatttgtctttttgggactgagtatcttttttttttggcaagatgccagatgtaaagttgaggaaaaaaatgtgcttagagatataaaatgcgtgtcatatatagatatcattgacaaatcctattgggtaatatgcacggtatgagtcaaaaggaaacaatcatgttatctcttggtcgttaagaaaaactgtacatcatatctaccaataaataaattgttaaatacttagtgcatgacagtcaaataaaaagggggtgttaaaaacagtattatgagaacaagtatatatggactatggggtgcaaatttgtgaaaacaatattatggaaacatattgattttgtgctttatgaaccgttttagttagcaatcggttgacaagctaaccatgtttgcatggaaaaatataattaaatcagcattgagaagaaaagatagtgttgactttttttaatgagaacaaaaatctagctaggggtagacttggaaagctgaaaaaaatctgagatatcagcatcggtgaagctttataaaaaaaacaatggctatgtttctcagctttatttatatatatatatatatatatatatattaactaattaaaagattcatatttttccaatcgtcacccctccgtgcggtgattttcgtcggtcacaccccccggcacaaatcccagtcggaattccgtcatcacacaaatagaatcccacatttatctcgaaatctcaaatcatcacaatccaaatcaaacacaaaatcccactccaaatctaaatcggaatcatcaaaaaaaaaacatccaaaatattaacacgagatgccgagaggagagggaggggcgagcgcgctgctcctcaccacctcgccgtcggcccgccggatctggcgagagagcggtgcggcggccaccgcctgacgaggagagaaggagccggcggtggggagaagaagcggcgccaccatcgccgcgccgccgccgccgctcgccgcgagggcagggcgccgctgccgccgtcaccgccgctcacggaaggaagggcgccgtcgccgctgccgctgctcggtggggaaggccggggggcgttgagaggcgtcgccggttggggaggggcgcggagaggtgcgccggtgggggagtggcgcggccgccgccgatggggagagaggcggcctgcgtggaggggaggaaggggagcgacggaggagaggggagcggcgccaggggttggggaggatatggagagcgtcgccagactcgcacagcagaggagaaagcgggcgggtggaggggatgagataatgggagcgggcggaggaatcgaggggaggagataaggcgtgctgctctctccgctctgaccatccgtttttttttgtgtttagatacgtgtttccatccggtttagatacgttgatctgtgtttagatacgtgctctctacgctcagaccatccgctctagccgttgatctgtgtttagatacgtgcttccatccggtttttttttctcgcgaagagtcctaccttcctgcatgcagctatctgaagtccggcaaaaccgactgcagctgcacctaatattgtgctcctacatgcatcatgcatgctaatctagcactagccggtcttttatactcatgatttgtttggcttaaattacagcataattatactatatagctactcctactacatagttacagtagtgtaattacatatttatatataataacttggcataattacatcataataatactatatttatatatgtaactttgatgtaaattttatagatgttgacagtaaaagattgaaatttgacttaaacatgtttatataaattcctatgtctttttcagatgtattagtacgcgcgtgcggtagactcaactttcaaagaagtcttaactaattaaaaattaattagtattttttcattcatcaccttgaacgtacgccaatttttctccgtcgcaaccccctctcctaaaatcccaatcggaatcgagccctccattcccacacgcgccatacatcgcatgcaaaatccaaccggacgtagaatgtagaggaagagaaattgaacgagaagaataataaaaaccgcacaaatccgtctaagtccgcagcaaagcgttcccgagcacctaatatacgatttagaatgataaattaagggattcccattgcatcgtacgaacattttttttctatcttaataataataataattaaatgattagtaattttccgatcgtcacatgtcagtttcgttcgtgtgttccaggattccagattcatctaatccaatcaaaaataaatataaatcatcaggattttgttttccagtccaaaaataaaaataaatcatcaaatttttctttctaccatgttccaggattccagatccatctaatccaatccaaaaataaaaataaatcattgtatgtcctcgaatcgagccaatgctcataatcttaatcttaagattggtaattttccgttcgtcataagacgtacgaagtccgcctttgtccatcgcggtgcaccttcacacgctcgcaccccctaccccccgaatcccaatcactcttagaatcggataaaaaaaatcaaccactttttgtcccaaaaatcaaccaaaatcaacctcgatcatcacaaatccacacataatcatgcaagaacatcatacatacatcacgcctaccgctggatccgccctcggccgtcacaaccgtcgccgacgccaccaccgccgccggagggagaagagaggtggtggagggagccgccgctgccggatccgcccgcggtcgccgccaccgccgacggatccacccgcggacgccgccgacgctgccaccctagccgggtctgccgcaggaggaagccaagaggggacggagggagctgccgccgccgaatccgcccgcggccgccgccaccatcgctggatccacctgcggctgccgctgacgccgctgccaccggcagatctgtcgcgcgagggaggcgagatggggcagagggagtgtccgccggcgagggaggcgagatagggcggagggatccgccggcatggatcgaggatcgagagagagaggggacgagagtgagagagggactggataaggctcggctcgttttttttttgttttctagacacttatattatattataggtaccggtttttaatttttttttaaaaaatattggaaaaagaatctagaatccatatagaaatataatttataaataactaaaattctgaatttaaaaataaagaatattgaaatatgagtttagagttcatataaaattactattagaaataacaaaaatccagaattaaaaataagaaatgctgaaataataacagcacggagtgatggtacccgctgtcgcggaaggaaagcggatggctagacacgattgctacctaccatgctccgtcgattggtctaaggttgctcgctgattccctggttgatcgtgcttttgagccacccgtagatctgcccatatcttcagagtccatgttgactcacaccgtgtaaaggtgaaaatcaaaccagctttgtcttttctatctccctttattcgaaattattcttaaatagtaatttattatgagctactgtatttctctctatcagttgagacattttctagcgagtaaaagtaccaaagcagtgtgaaaataattgcagttaaaaacaccgtagcgaagcatgggcatatatatatatatatatatatatatatatatatatatatatatatatatatatatatatgctccaaacaccctccaaccgccttaggggagaaatccgagccatccacgtgaaagcagatggcgggaggcgccaggaagggttcggctgaacccaaaaaccgtcctctcagcctctcctttggtcggtaagtcgcttaatggcccccaacagcctgcactattttttggcccaattctaaattgttttcattgacttattgggcctccaatccgtggaaacgcgtcctgaatgcgtggaggtgtattttgtcgcatgagggatatgttttctcctcaaatcacctacatacacatatttcaccaacactagtagaaatgattagtaataaaccctaccaccacgttggataccatattttatttcattatatgcaggtattgacggtcaaatattatgatttaaggagcgtcaatagacatataaaagtaaattcaataaagcctaaaagtaatttgcatatattataaaagtaacttaaagcaaaacgaaagtaactttgtcacgacattagaagtgtacgacattagaagtaaattttttgtagggataaaaatatgaatctatctagaaattaaatttaatcagcacagatcaacacacgtaagtttaacaatttttaaaagtaacttcaatattaattggaagtaacttttgcatggttcaaaataactctataaatctgtttaatcatcaatagttttttcctttcatttttttcatctagaatgagaaaagaagataaaacctttaatggaatgtaaataacattgatggaataactaataagaatcaaccatgtataagatgtaacagttacttcctaataacatggaagttactttctaacatgcatgtaataaattacttttaaattaataaaatgtttgaatatattcaatatgaatctcgttttgtcatatattttgagtgggggtacagtgatgcaaatagatcttaaaaacaacatgtgatttaaaagatacatactattacatttttcaagttaaaaggaaatattagatggagtacaaactagctaccactagctgtgtagttgcgtccaatgaaaaaaggcattcattaaagttgctttctttttgttataagttacttctataattaatatatgtaaattacttttagactttattgaatttacttttatatgtctaagaagtaatttagtgaaatctaaaagtaatttagatatattattaaagtaatttatatttttttcatcaaaatataatcatgtgagatcttgttataaagatttaattattacgaatacaacggtgtaatcggatcgtagatcggatgagtagtttaagagaaaattgtatttgaagtataagtggatggtatctctcatagatggagtggtagctggtttgtctaaatcatgcaggtgttcaaacgttcgatatgatagtgtgaaaaattttggggtgggacctaaacagggtcttactattgttcactttttgcttactgtcccattgatcgatgaaatgtactgtttataactctttaaactcctacaaaagtgtttccaatctagtcttaccaatatatcattcttgcagtttgcaaaagagaaccaagtttacagtaaac

SEQ ID NO: 1863 - DNA, 1700 bp, Oryza sativa
  Intron number 1 from transcript LOC_Os03g15880.5 (locus LO C_Os03g15880) derived from phytozome v7.0 (chr-ID Chr3; po s 8760835 to 8762534)
atcgtgatcaggtttgtagccagccaaatcttaattcataagaatgcaagatattcatgccttgacatgtgatttctttatttgtctatccttttcaggtatcggaattctctttatttataactacaatgcaatcgctcattttacccgtaacaattaccaagagcttgtttagttgacaatagagatatcaagtcaaataaggttgtttgtgttacacaagataccgatgaattttgtagtgttgcccttctattgggaattcataaatgttgccttgatgagatactacagtaccaataagttttttttaatgcctagaggttaatgaaacgtatagcatatggtccgcaaggctaaccaacagtggatcatcccaaacgaaaaaaaaaaactatgcatgtctctcccacgcgcattatttttcaaggtaacatacatgagccttttatgcacaagtgcatagaattgcaactataagatttttttataatagctttgatatatttaaaattttattacacatgtcctatgctaagtttcaaatgtaagttgaaaaagttggtagataaattcatggcctaataatgatacctacatgaagaggaacacttctacaagcgtcatcaatgttatatctagctatctgcaagttgagggttttcgtcaaagtatggcatcactcaagtcacacctacttaattcaagcatggcgaaccaatgaaataggactaaaaccataaatgctagataaatcatgctagaaactcctatcataatatattgctactaaatcacttattaccatcattagaaagagaatatcattggtactagctattaagagccatgtcagccaagtcacgttctacttgtgacggggcaatgaaggacaagtataaaggtgtgtgtgttgtgtgtgtttggggggttgggggggggggcaatggaccaacatccggtacttttacatgtaaaaactaataaatatttcatattagtgttagctatgtccgatctcattcgagacaacttgttgatacttgctaccccaagtctacatatagattgttgacatgtcagatcaaaactatcattattaaaagctcttctaaatgcaatttgagcttaactcagtttttttcagcctattccttttatccctcatgcctaaaattgtacaatggttagccctactgcaaacgaccttgcacaataaaaaaatcatgcataattgcatattcgagtgtaaattctttttgcatatgtcttttggacagtacacctgatatgtactcactccatttttaagaaagactaatttttaactataaatatggatataaactatctttagatttgtgttaaatggtgtgaagttaaaaataaatgtggcatcctaaatcgatccatacacactattttgtctattggatgtgcacttctgattttttttcttaaaagtttaacttgtctagtactatcgtaaaactatgttgttaaaagttaccattgtatatacattaaataacttgccctcacgtctttacaatgatgcttttgtagctttccctcatttttaagattgaaggtttttatgttggattaattttgccatcggatatcaattgacagcgtattacattgatgcaatttttcttttagctatttcttatcataccctacaggtaattctcaaa

SEQ ID NO: 1864 - DNA, 790 bp, Oryza sativa
  Intron number 1 from transcript LOC_Os07g33660.1 (locus LO C_Os07g33660) derived from phytozome v7.0 (chr-ID Chr7; po s 20112825 to 20113614)
gcagggacgacttcgaccgcgacgacgtcgagcaggtgagccagcttctcgttcttcctcctccccatgttgccttaggtgttccttgattgctccagtccatggggaatgtgctgacgaatgactgagatgctaccttaccactgctatattacttggtggattggtaattctgatcctaatgtgagacatacgaagtagttgattgctatacttgctagtttggtttgaggacaaatgatgcagcatttgatttgagttgaattaaggcatgtctttttccttatgcttatacttatcaaccaacatttgaattttaaatttggagttgatttagaggttttttcattgaagtatatttttcagcatttgcttttaaatctctaagaatatacatataaaagttttatttacaaattactttttatttgcaaatattccgtttcgcttgcttcgcttattccgcgaataagcaaaacgatggctcgtatcatagccagcagtagcaaagaggaagagaagaaaagaaaaaaacaacaatcacctcgcaatttagtctttgtagtttcatggacaaaatgcaaattgcagctgcagggtatctgaaattctgaatatgctaatcaagaattcaagatagctgtagactagcacattcagattgaagaacagcacctgaacatggaaagctctagtgacaagaaagattcagaatagtaactttgattcctgagatgagattctgaatgtatctgaatctttctgtctgcgcttgtagtacttcaactac

SEQ ID NO: 1865 - DNA, 962 bp, Oryza sativa
  Intron number 1 from transcript LOC_Os07g32380.1 (locus LO C_Os07g32380) derived from phytozome v7.0 (chr-ID Chr7; po s 19245472 to 19246433 reverse strand)
aaggacaaggtactgagtaatggaggactggaggatggggattcttgtttgttcttcctttggcctccatttccctttcatgtttattgtttttttttatttttttgctattcctgtgctatttttggggtaatatttaggtgcaccgttgtgtcgaatcttttccttttcatattagcttgaggggatcttgaaatggcgaaggctagaagtctgaacatgtcttaaaaatcttggaatgatgctaggctatggtgtctatttatttattttgggccaaatctgttgcttaattacgacaatccaatggtttgtggttctataaacataatgagtcccgatgccatgaaactccgtgttgacgttagattcttggagttatcatgtttctcgttcctactagcagaagcaggaaacatgtatcagtggagaaaataactactgaggaaacaaaacataactcgtctagaccagtagagagacaagcatttcaatatgttggttatgggaatctggtccatttcaccataaaacttcaagaacacgatctccggcttttgccggttaagcatgaattttattttatgcttagatttttttggatattcttttttatgaaagcttttggaactcaagaactcgtttgattgacgttgttccttgggagttttagagtttgcagcctggaaactagaagttatcttgaaatgttatactctactcaatgtagaatacacacatcactaaatccagactaaattcattttggtagactaccttatgcaccttctttgtgtttattcttgctgtgatgcaaccaatgtcaaaaaagcgaaaactgtttttttgctccattgtgctggatgttttccgcaagcttatatatttgctttgcttagtgttgtactattagcaacttaacatgcttgacgaacgattatgttttgtttaacaggtgaaag

SEQ ID NO: 1866 - DNA, 747 bp, Oryza sativa
  Intron number 1 from transcript LOC_Os05g48040.2 (locus LO C_Os05g48040) derived from phytozome v7.0 (chr-ID Chr5; po s 27479837 to 27480583)
cctccctcgccagcgtctccggcttcagcctcctcgtacgtcgtcatcgcatatcctgatttccccactcgttcacgcgtcctcgatttgcttatatccatatttgttgcctgcgtgatttggtctcattggattaactgtttagcactttagccagagaggcacgtttcacggtttcagatattgttcaatgtggcgttcaaatttagcagtaggaggacaggcaaaaagtttagccgtacaagcggctggttagtttggaagggggattttgattggaacagtgcctaaaatttttgctggaatactgtttgaacatttggcgtgttccaaacattctgaaataaatcatggatatagcatagtaagtagcagattttttttttttgggtatacaagtagcagtttgcaaacctacaaaatttaaaatcaacgttctcctaaatatagagataaataacaagttacactactagtctactactccacgctgaatgcttttctaggatgaattttaaattgcctgcacagatggtgagctagtcaattgtcacgatttcaactagctttcagaatctgcgaagtgtgtacagcctagaggactacttcgatactctggcgaaatattctgtaggattttttttttttacttttctcttcagttgtacacggattgcctttttagtttgtgatcttaattttgaaaccacccataatttgaattttgaacttgtaaaacaggttgga

SEQ ID NO: 1867 - DNA, 3094 bp, Oryza sativa
  Intron number 1 from transcript LOC_Os05g13390.1 (locus LO C_Os05g13390) derived from phytozome v7.0 (chr-ID Chr5; po s 7432971 to 7436064)
aaggcgaaagcgaaggctttgatcctaatccagaggtgagcactattaaaattccccgactctttgtactatcttgtcgtgtttgctcaagtatgcatttgactataatttagggacttaagatgcagtctgagattgtaggctgcataaaaacaattcacgtttcttcttgccaaatatgtccagtagagtgagaatcaatagatgaatggtgacgagtttgtgggagatgtaacttagtcatttgaatttggagctagtgctatgaacatgacaggtcttgattgtagtatcttgaaactggtacattttcataatggtactagacattttgcgcgccctatcaagagtccaatgaacttttaccaataagaatattacgagaataaaattaaagatctataatctccctgatagagacaaaaatcatgaatttctatggtaaatagagtgagcatcgtgttgtagttacgcaaacatttttttccccaaaacacagagttggtatatctacacaaaattaacatgaacaccatataacagcttgaaccatctatgcatgggcttaaaccatcacgtaggctaaatataaatcacatagtgcatatcataattcatcaattcagcttgttttcatcaaatcctattgaagatggtacaagtcattaagtacataatatacatcgatacttaggaagtgtaatatttatacatgtcatagtcagaaaacaaagtaaaccatatgttagaaaacaaagtaaaccatactggggttaaaaactatatctcacgaatttaagctagataacatttgtcaagtacctgaagaccatgtgtacaataaatgatttattcacgtgcattagatatgctcagcagcagccagctgcaagctatagaaagaaaatattgcattgttcatacttctttgaaggccataactacgatatttgtaacagatagcagatgttcactcactaaatcaacagtatgtagaaaaaaaaacatagctaactaacttcttgaaacaactgtttccaaaggaaaactacaactgagcactgagacgatagctactaaacacaaaaggaaaacaaactctagttaaaatcatggaatacttatcacacatccataatgcatttttttaatagtgccactgctaaattccttcctatttcattcgacctgagaactcaataaactgatgctgaaatagttaacattccacaaatcaggcattcaaattcctgcaaaatgaaaattgctcaaggcaaatgatggaaactgctatgttattttatgaatatccagacagtgtgttgcaatgagacattaaaaatgctatgcagattcagagttaccataattagtatgtttgttctccctggcaagacctcgtcaagcaaaaaccaatcaacatgagctttcaatcagcaatgttagaagcagttgtgttcgcctaattactctgaagatcaatcttgttatctgttagagagtaacaatagtcccccactaatttaaatagcagttaaggacacaaataataaattcagagagaaatgactactcccatctaactctgcttaccttgcttgcacaatccaattattcattgaatcctaaacctacagcaggacactacttatgtagtttaaatcattagtactttgttcactggaaattatgcaaaatcatagatggattattgatatttattgaactgaaagcatgatacataacattcttgaacttgggtccacattcaacatgaattcctgtcacagaaaaaggagaaaaacagagtatgcattctgatgtggctgctttgccttgccatctaatgcattctgatctttctgcattgcctgacaccaatcaatgggaaccatgacactaagacagagaagaccatctcttaccgacaagaagaaaccatatcggggattgcgatttctctgttcatctcgaattgcagcggaggagttgcaggtgaatatggcagcgactatgccattgccgtggtccatccgagatctcatcgaacttagtctttgtgcttctgcacctgccatccctaatcggtggaggagatagagcttagctgctcaggaggcgtcagcaacgatgaggaggcagccgacagagggacagacgccggcgatggtccactgatccggcgaagcggctgaccgctcgaggggatggaatgtcagcgccgggcttgctggtggtgatggagctgagcgtggtgcttggcgccgtggtcacgcttcttggacccatcaacctttcctccaccagcgagcggtgctcggccggacactggcagtttaggagggtggggtgaggggtgggcgccgagcggtagggctgtttgtttttacaaaaaggcctctcatttgttgttattcaaagcgcggcctatttttcgttttttttctcttcttagcataaaatatttcaggtcttggaggtccttaaagtaagaatacagagcacataaatgtaagacaagagatttatcacaaattatcaataacatcaagggttttttttgcaaaacgaccagagtcaatgcggcctctcgctcgctcgtggaatctggctgcctggagcatcgaggccgacgtggatagcacgggaaacggccacgcctatgcaaaacgctgtggaggcgccaacccaaggcaggttttaatataaccgatggtacttctgcctgcctagatgttttaggcagtgtcataggaggctgaaatttctttgcttgcaatgaagaatcaagcttgaagatgcattaaacaaatttggttgtcatgtttgaatactagatacatctggattgcttctgaacactgattcgattgaatacatttgcactgtttttttgtcgagattctgtctgtgtcaagttcttttgtgaaagcatgaatgcaatttagtaaccataaatactgtatggatatgattcattgcctaaacttgcgagctctgtattttgtgttttctatgttttagccctggttatttgcttgccctaatttccattaagacctttttttacacctgttttaggggagttgtcttg

SEQ ID NO: 1868 - DNA, 7443 bp, Oryza sativa
  Intron number 1 from transcript LOC_Os09g10054.1 (locus LO C_Os09g10054) derived from phytozome v7.0 (chr-ID Chr9; po s 5482586 to 5490028 reverse strand)
actgttcagtttacaggtccccttgactgttacaggtatgcatcgtttcatcaaatttgtacatatgattttcttatttacctcaagcctcaaggtgtgttatacaacacaattcctagattttctatatgcatatgtccacagaaaagataatactggtcatatgtttgttttttacgtctggttaaacaaacaatcctagaaaaactattattataggcggtcaataattcatttgcacaagtttagctaaccagcatgtagaaattaaataatttgtattggaggattccacaacggtatgtggatatcaatttccagttctattaagaacccacccacggaaatgaattttcaactttttgttaatgtaggcgaaagaaaaacacattttaccaggcaactatacactgtcactggtcgcaaatacgaagtcacagtgatttcttacacgaaatatgcattttatcaaaagtcacaggtcgcaaatcagaagtcactaatacctatttcatattacaaatattttaaaatggaattatcaccaataacaaagttgttgatctcggccagctctttagtttttaatatagggcatatctcccgctgaggctgtttgaaaactttttttaaaaaaacatttttagagttgtttctatttctagacacggtttgttaggttagccgtcagcactaatcatttattccgttagtttttcagaggttctcccgtggaaacaagttgctttaaaatattaaataaatctatttttcaagtttcatataattaaaacttacttaatccagtgctaatgattttctcgtttttgttcgcacttctctccggatcaaacgtagctaatagtgtagacagttagttacagggtctgcctgtcaaaaccgttactcattatttgaaaatgccaaaactttgaaaattgatagaaatttgattttaagtccagtattagtgaatcaaagttctagctctcaacaagatctatctctttgagactgtatagagtccaaatattcgttataagctcttagatctatatttggaaacaaatttatgaattttttgaatgcccttaaatggagatgtgttctgtaatatgtattgaatttgtaaagctcgatgagattctacaactttataactttactggtgataattttttatttgatgtcatttatcctcccaaatatgctaaatgacatgaggtaaggttatgagaggtaatcctctttaccgcccatgtgcatgcttcacgtgaaaaattgcgtgactcgttgttttgtgaaatgtgaattattttattggtttttttttcatacaacatttaaaaactagaaatacatttttctcacgtgactggaatttatctgtacaaaatcgttgatttctacttgtcttagtcataggcggttggctaaacgcctgtaggaataatgggttaccgtcttaccgacctcctatacaatttttttatgtaccaatcattatttcgactattcttcctgaactggagctaggttatactaaaatgataatttatttaacagaaaatagtagtcactataaattgatatgttccaagttgataaaactacattcatttttgttttttattaaattatactccttgtatcccaaataaggtttaaccactttttacttatgtctcatcatataagacaggcaggcatgcatacattaattatcacctcttagttctttaaatttggtttactttaaattctccaccattaaacccccaatcacattgtttgcatgtatggatgtgatccaatcaaggaggtgattaaattctttcttgttctttgtggtagtagtggttgagccttatacttttagatggagagaataaatatatactataggcaccattagtttttttttgtctgtactatgttccacatttttctgtaactctatggaccgaatcgtcttcacgcttgagtcgatatgaacccggccgagtaacttcagagatgatgaaaggtccctcccataagggagataacttatgtcgaccccgtgtagtttaaatcttcctcaagaccatatctccgactagaaatgcacgtgatatgacattgcgattatgataacgactgaattaatgttgcctcacgagcttcttccaattggttgagatcatccactcggtcttcctcgtagcgttcctctttaacattgcgaaatctcatggactcaaactccacttcgcttggcaacattgcttctactccgtaaactaagaaaaacggcgactagcccgtagcccgactgggcgtagtgcgcaaagaccaaagtactgacggcagctgctcaacccatttgccagcatagggacgcagtcggttaaaaaaccgtgccttgatgccttgaagtaccacaccattggcgtgttcaacttgaccattgctcataggatgcgctacagaagcataacatatcttgatactaaagtcttcacaaaaatctttaaaaactccaccagtgaattgggtaccattatctgtaatgattcgattcggcaccccaaaccgatgcacaatgttgataaagaagtctcgagctttgttggctgtaatagttacaactggtttggcttcaatccatttggagaacttatcaacagccacaaaaagttgattaaatcctccggtagcccttttgaaaggaccaaccatgtcaagcccccaaaccgcaaatggccaggaaagagggatggtttgcaactcttggtccggcaaatgaatttgcctagcaaaaaattgacaactttcacacgttcgcacaaccttctcggcatcagacaccgctgtaggccagaaaaaaccctgtcgatatgctttgccgactatcgttcgtgctgccgcatgatttccacaaatgacagaatgaatatcttacaacaattgcctaccttcttctagagaaatatagcaatgtaggattccagatggactctttttgtataaatcggcctcaatcatgacataaagcttgttgtgtcgagaaatccgctcggcttcattcttgtcttgaggcaactcttgctgagttagaaatttgatgattggctctctccagtcggcatcaattactcctacttcattagcctctccatctccgactttatcctttcttgatactgtcagctcatagagatgctcgacaaaaatatcagaaggagctgcttctcgttttgacccaaaattagctaatctatcggctgcttcattgttgtgtctaagcacatgagttaactctcgaccatcaaatttatcttccaatttgcggacttcttgtcgatatgcaaccatattgtcgtcgagacaggaccaatctttcatgacttgattgacaaccaactatgaatcaccacgaaccactagatgtcagatccctagggatacaacaatcttcagcacatggagtaacgtctcatactctgccacattgtgggatgcagaaaagtgtatccacagcacgtagcttaacctttctccagtcggaaaaatcaaaacgacccctgctccggtgcccgatagtctctttgacccgtcaaaatgcatagtccaatactccaatttctccacaggtgtgtcttcttgacactcggtccactcggcaacaaaatctgctagtgcttgagatttgattgaagttcgcagcttgaaagataaatccaaagacatcaactccaaggcccacttcgcaatacgtccagttgcctctcgattatgaagtatgtcaccaagtggaaaagatgtgagcaccgtgatcgagtgactctgaaaataatgggataatttcctgacggtaattaagacaccatataataatttatgtacctggggatatcttattttggagtcggccaagacctcgctaacgaagtaaattggtcgttgaactttttgaacatggccgtcctcttctcgcttgacaaccaaaaccgtgcttaccacttgcgatgttgctgacacataaaacaacaatggctcttgcgggtgtggtgacgctaggattggtggagttgagagaaatcttttgaaatcattgaaggcttgctgagcttcgggtccccattgtaaattgtcagtcttcttgagcagtttgaagaagggcatccctcgctcgtcaagtcttgaaataaaccgactgagcgccgccatgcatccagttagcttctgaacgtctttctaggaactaggcggtttcatgttgaggatggcattgattttctccgggttggcttgtatgcccctatgggacatcataaagccaagcagcttccctgacggtactccgaaggtacacttttcagggttcaacttcatcctgaaagcacggatgctagcaaaggtttcctccaaatcagcaattaagtcatccttctgcttggtcttgatgactacatcatcaactacatcatctgagttgaaaaacatctctggattatgtgttgataagttgctctagcattcttcaatcaaaacggcatggtaatgtagcagtaagctccaaatggtgtgatgaatgaggtcttcgagcagttggattccttcaacctgatctggcggtatcccgagtagcaatccaaaaatctgagtaactcgcagccggttgttgagtcaactacctggtcaatgcgaggtaacccaaaagaatctgtaggatatgatttgttgagatctgtatagtcaacacacatgcactattgttctattttcttccgaactaagactgggtttgccagccattcgggatgtaagacttctttgatgaagcctgccgctaacagcttggttaattcttccttgattgcatccttcctatcctgagcgaatcggcggagtcgttgcttaataggtttagcatcgtctttgacatttaaagagtgctcaatcacctctctaggaatactaggcatatcagatggtttccacgcaaaaatatctttattagcttaaaaaaaggtgatgagcgcgctttcctatttacaatctaactcggcgcttattacagcaattttagatggattagatggatcaagggggatctttttggtcttggcatcgccttctccggaaaagcttgaaggttcatcactgacagatagcaagagattgctacaatcgacaggtcgacaactagaagtaggcatctcttgatcacctgaaggcaactggtgagagatcgctacaaccgctggtcgacaactagtagtaggcatccctcgatcacataaaaacaaccgaaaggtggcgagagatcgctacaatcggctggtcgtcaatcaggagtaggcatctgtcgatcacttgaaggcaactgataggtggcaagagatccctacaatcggctagttgacaaccatgagtaggcatctctcgaccacctgaaagggtgctagtgttggctattatatgtgcatctcatgtagccagcatgactcacatacccaacttatagcatacccggatgtccgttcgcaatcatgtcaggtgatcaagccgacaacgtttgcgaggaattatccgttaacaacctattctcaaatagtgcagccgtggcctgcactatacgtgagataagtcgttaatctttgctggtaggattggtccgacaactccgcatttgtcgagaatgttctcgataatgagttgtactcgaccacaacctactctagtgctcaattgtttctgaaaaatattttctataagaaaagacatatatggcagagaatatcgagtacgtactaaaaaaaactgcatgaatcttctagtattatcaggatataactggcagattcagattaaatatcgcgtactatgtaaacgtaaacaagcatgacttataacatgaacatagcgagcccccaatattagaccatagttagtctagtataggaaacactcgcacaatagatatcgtataaaaaacatgctctaggtaaacagaataagttatggatctgacaatatcgcatcgaactgaaaaataggtacattaaattgtttataaaatattacgtacctttgtagataattgccatatgtatctacgaaattagtagattaatttaaaaaatcaatctaccaattaccttgatgcgtaatcgttcgacatcatatatatttgaaatcttctggtacggtgcgtgcctaggacctttggatgatctcgatagatcaaatggttggcgatgacgattccgagctagttggggggcgtactctggccgggtcagatctcccaaggtgaaagtcgttgaagtatccctcgttgaaaaatccacggtggcaatgacttgatgaagctttaggtgacgagggtcctgatacgtcatagaacacacttcgttcgggtcgtatacccctacagccaaagtcgtcgagtaatttattgtcggagaatccatctcttgaacctatctcgccgaaaccttgaagcaccaaaatcccctacctggcgcgccactgtcgatgttgtagatcacgactacggtatttgcatagtatggggatcgttggtgccagattgtgcgcgagattgaggtaaaagatacgaagacaaggatttttatacaggtccgggccccttaactaacaggtaatagccctacttctgttggttgaagccagtgttgctcttatccatcagagtcacacaagtataatatttgggatagcctatccagttgtcgtcaactcggcggcatgaaccaacactcttagtcgacgacagggtagtcttcctcctcgaatatggacttggcgagattagagatagtgctagatctcacttgatagcccccgcagcaacatattgggtttgtctaggttcatcttcgatgtcgttatctggcggcgtgtatttgtgtctattctggctgagcgtgttgatctgtcttggcttgtcttggtccgtgtcctctctctcctcctaggggtcttgtatttatacccacagatattctcttgtccaagtagtactagaaagacaaatatggatgcgatccaagtagtccctgtagtttccatgtagaactatgcttctcctctcttatccggagcacattccgtatgcgaggcatgattccgtatatgacttgctacatagtgagtcctgccgagcataacccaagactattgggtatgtcttacccataacactgtagttttgtacgaagttattttcatgttttttcaacctgctaaggctacttcattgatacttatgtaagggaaatcttattttctttatagtttatagaaagatacttttctggagcagaactgcaatgcactgcaaactcattgtttaggaatctgagtatacatatgttgcccagagtgacttaccttggaacatgttatatctgcaggtgtgcataattaaaa

SEQ ID NO: 1869 - DNA, 2183 bp, Oryza sativa
  Intron number 13 from transcript LOC_Os04g21110.1 (locus L OC_Os04g21110) derived from phytozome v7.0 (chr-ID Chr4; p os 11866779 to 11868961)
ggagaacaaaggatttcctgtcattgttgggattggtaataacatctttaccgttaataaagtagcagtagttttgtgtttactaagaccaagcatctgcttgctgtgaatgataaataactaaaacaactcactctactttgctggggcaacttaaaatcatttagtcagacatctgcaccagatatcccttgtgacaagtctcacttgcaatgactaccagtttcattaaagtgatatcagagcatctatatctccaaatttcacatgatccagtttttaatgtgctataatggtatgcttgctgtgcaaaaaagagtgcctgataggttgtgcctaatctattcctatacacctgttattttaggattaacttgtattacaattctctgtgggtttgttgtaccagttgctggggctacatgtcatgccttttttgtaatatatttaagttatggggcaattgcacgtttgacgctgttttgaaagctaactaccagtttgactattttctcaactttgcttatttgaccccgcttttcaaaaatgaacattagctatgaccctattctatcaggccaacctaacggtgttaacttaggggccaaatgccgtttatacccctgctcattttgagtatactctctgagtttttatttatttggcttagttttgtgtactcggtgtatgtgatgaaagttttaataaatttgacttggaattgacaaattgtgtgtgaatttgagttagatttgataacttaagcaaagatgactgaattttaataaaactttggaaatatattatccatccaattgcacgctgaagaaagaaaagcatatatgctatttcacatccaacaattgccccaagcaaatcacgaagctcaaatttgtgtcgaccccaaagcaaaaaaaaaaaaaagtgtgaaattaatacatgtaaaacaagagagattattcaatcagatcagcaaaacaagagcaaagcaacttccagatctagtagaacaaggtatagagaggaggtgtgggtagagcaagagcgagcaaggatgtgggccacatgagcgcctcacgcaggacctgtgcctccggctgagccaggcaagcgttgcacgcttccgtccacacggccacgcactccatccacacagcaagcgccggcccgcgcgtttccccatcagcgccgcaccatccgctgcttatccacgcatcgccaccaccgcctctacacgcgcccgcgccgctgctcctcttccctctgtgcgccggcgtcgccgctcctccttccgcgcgccggagctggccctccctcccttcctccctccacacggcagcagccgtcgccgcccatccctcctccctccacgcggcaacagccggcgccagctccgctgctcctcctgccacgtgctggagccgtccctccctcagcgcggcaaaagccggcgcgctgctcctccgcgaacaggcgccgccgcctgtccgcgcgccggcgctgcccctcccttcctctctctgtgcggcagaagccgccgccgctgctcctccatacgctggcgcccactgccgtccctctctttgcttgccagcaccgctgctcacctgctcctggtccctccacgcgccggccagccacgcccaatgtgggataaaggttgggatgaggggtattttggtcagttcatgcgagtaaaattatttttttttctttttctaactgaaaccctaacggactagtaaaaacagggtcagatggtggcttcgcttttgaaaaacagggtcaaatgagcaaacctgaaaaagtagggtcaatttggtagttcggcttctaaatataagcaattgtcccttatttatggcgaacaaccatctattgtgaaaatgtgtgctaaagcagacaataaacataaatgggccttctggcagattactgagcgattatttgcgccccatctgtttttttactagtccatgtatgtgaatacaagaattcttctaagaattttatattgtatggaatagattgattctgtaataataattctgttaaacttgtgcaaaaatgatatgacccacacacccagcaaattacatttactgactatgctgtcgctgtttaagttgatacactgtttatttgtaggtggccctagtggatcaggcaagacaagtttagct

SEQ ID NO: 1870 - DNA, 3419 bp, Oryza sativa
  Intron number 2 from transcript LOC_Os08g42700.1 (locus LO C_Os08g42700) derived from phytozome v7.0 (chr-ID Chr8; po s 26989414 to 26992832)
ctcttgagctattcttaactaaggtaaatgctcccacatttttttttgactaaatcactgttgtgtgtgtgtgggggggggggggggggagagcttccccacctgaattttgtcattgccataaattaggaggtttacacatagagttacaatgaatttagatttcgaagggggaagagaatatttccttccacatggagattacagttttatcttcagtttttaagatttcagaccatattgccgcttcactgacgcaccgtcttaagcacaattgtatcgacggtgcactccttctgaaaaccacatcgtgtctatggttccacaaagcccagaaacataggaggtagaaaactctgaaatgaggcatcggaattttctgcactggctttagttcgtgcaatcttgccacctcctgaactgtaggtgtaacctgaatcttttcccaaaaactttgagcgaaagggcagaggataaatgctcccacatacatagtactagcttgtttttgcccactatgctatatccttcatagatgttagtttcaaatttttatatttgaaatatatccttcgggctcgatgtagtcgtacaaaccgtctcctcctggcgcggagatttcactcgctccgactacaggaccaacgtcggcgttttctatttatgctacaatcattaccacaataaataacagaaaaacaaagataaccaaaacaaatagtatcataacgtgcaacaatggatgaaaaggattaaagaaataattttagagatttttcgaattttgacaaatggcgaaccctaggccaaaattagggtttcgtcaacgggtgctcagattgcaatgaaactggcacatatgggtttggaataaatctaggagtttggagtaggtctcggattttgatggccaacttgataggaaaagaaaaagggaattttctgatttatttttcaattggaaaatccggtttttctcttcttctctctctctacacagaagccggccgaaatcctcacgacgccggcggtggaggactcggttttggacaagggggcgccggttttgtgatctaggggtcaaggtgattctgttcccgcggtcggcggcgaggctggcggcagcggccagagacaggaggcggaggcagccatggcagcggcggttccagtgatctccagcgagggcgacgggcttggtgagcatcagtgaggcgaggagagtccaaggggggcggcagctcgagctagcgcggctgggagcggtggcgcgccatgcggccggcggcagccgaatagagtagcagcgtcggtggcgttccggcgacagattggattggaaaagagaggggaaagggactactcggcatggagaatttgttttaccttcaatttcagaggattagcaatgtgtgcgacgaattttagagctctgtgaatgacgccgaagtaggggttttggggatttttccctccggaggttggggcggatttgagagggtggaagaggtcgaagttgcggttcttttgcctccggtattgagatttctagtggaaggacgaaagagatatgatggcgggaagctggagatgttgcggcggcatttgtccgtcggtcgtcctcgtgcaagcgtgtgtgagcgtttggcgtgcttggtgcaagcatgagcaagcgtggtgcgaggcagcacggctggctcggccaggtcgagtagagaaaagaaaagaaaacagagaaagggaaggagaaagaagaaaatagaaaaggaaaaaaaataaatagatggaaaaagagaattaaggtaaaagtagagaaggaaaatatggagaaaaattaaaatggataggatttgaattagtgtgaaatttaggtggttcgactttcgggataaaattaaattggatcaaaggaattatttgaaggatgatatgaactttgtgacaattaaacaagaaagaaacatcgaaaataaacattgaaaataataatttaaataaactactaactcgacggttatatttttagagaatcaaagcaaactaaatcggttttaaaaaattatcaaattttagggctgttacataaattctagaagtagaagttaatttggtatacaactcttagtttttgtttccataaatataattatattatttttgtggttgagatataattatattatgtatgcagctatatcaatcaatctacactgctatgatctaatattaccatgatctaacaatcaatatctttttcttcaattattgtaagaatctgcaaacctccaaaacaactttcaggttttttaagctatatttataaaaaaggtagttaaattgtcttctcttgttgtaatgcatgagcatcttgctagttaataatataatcaatagtcctagacacatacaaattccaacttcctccattccaaaatataaggcacaaccactcttaacccaaaaaccaagaaacaattattatcacctcctagttttgatcaccataataaatataatgcatgcacccaatagaattagagatcttgaaggtggaggatttaaatgataataatttagtggagaggaggtgctagttaattacatgcatgcatgccttgcattgtattatgaaacatctaaaaaaaactagttatgccttatattatggaattgagggagtattagttaaacctaaattttgtaattgttaaatcttgaagaaattaaaattgagatcgcaaacagagtactactttatattggagtgcacaccagctggaacttgctaattattaaattataattttaataattgttaaattgagaaaacaatatatttggattctataacaagtacaattcattacttattaatttcaaatttcagaaattttaaatcataaaaaaaactataattgagactcctaaccatgtataactttgtatatacttattaatttcgtatttcagaaatgttgaattaagacaatagaataaatagaataaagtattagagtgaattcttgatacaattttgtaagtactaatttaagttttttgaagtattaataaaaaagaattagtttacatgcatacaaactatgtaatataaatagtccatgtgaatgcacatgttaccgactagtataaaataactgattgccatgtctatgtcatccatgtgtatacatccttgtgaggtagattgatttgttatgtatcatgtcgattttcgccttttacatttttttcccttttaaaattaatgaaacaaaattttcagacaactaagattttcaaattttccattgggattttattattagaaaaaactagagcacacttccttgtgagtgagacagaaatctttagatatttcaagtatttagcttgttaagtgacatttgctgtaggtacgc

SEQ ID NO: 1871 - DNA, 1602 bp, Oryza sativa
  Intron number 1 from transcript LOC_Os01g65080.3 (locus LO C_Os01g65080) derived from phytozome v7.0 (chr-ID Chr1; po s 37773016 to 37774617)
ttttgctgccctgtggagcctcaaattctactcgcgtaagtccatcttttttttttactgagtatattacacgcttcacacgaatttctcttttttttaaactaaacgaatttctcaatcttgttaatttcatccgtgctatactggaacaactgtaacaattttgggggcagagaattttggggggagggaatcaatcttgcaccagttggtctcctttagaatctggatatggttctttagattctttctgatgtttttgttagaggatggtgtgatggtgcctttctttttagtgtttgtttgatctggaggggcattagaggtggtgtttttgggttagatggggatcttgaagtgtgtgacgataatcatttgggggtagttttagatctgccggttttgtgtttgtgttcttggggttgattgtttccagattgttggtgtgcttatagggcctaggggtgagaattgagataagaagggaaggtgatatgctgaaattatgtttgatttatctctgatttgtactagaccatcaactttgctacagtactttatttgattaatagttaggctgtgaatccatgaaaatatgcatcatttggatttgtcaatattttttttgcatgtatgcttcaggttcttttgcatcttcagctccacatcaggagtgatccctgttacttggtgccaccactttctctgctaagtgattctttatttgtgataatttaaaattaaaatacaaaacactatttttttactacaagaaatatgtagatgcatgcacagaaaaacaatcacagttgcctagccatatgaactaaaattttagcatatcactacttataacaaaagtacgttggcacatatatatatatgaggaggcgtttccagtagaaattttgattgggtcatagatttgttgttagactcttttctttgagcgtcgtgaattggagtaggaatttacatatgttgtgattttctttggaattaaagtggattacttttaaagtttgattttaaagaataattttagatagacttttatatgtgttctaagaaattattaaaatagaactagacaaacaaagtggtaaagaaaacccttgaaataaatttagaattaagtcaacttcgattatatatattcgtagttcaaccagcattcatcatgcaataaagtaatgattttatttataccctgagtaagttttttttaaaataatttatcacccatataaaggaggcaattctcgctctcactaacatattgaactatttttgtcactaaatgtggactgggatagcaaattgtatccaacttaagaatgtcatattaccaaatgtcccagttataaaataataattatatttacacaccatgactttgtaaaataaaatactgtaccttttttttaagatgacttgtcattttcttttcatgcagccttattagattatgttgtactatcaaccaaaactaatgtcttgccttgtactgtttccacgttcatggctgatggcctcatgggccaatgaccttgggggttgctaaaagtcagaggagcctgatcccaatatctcatattccca

SEQ ID NO: 1872 - DNA, 5348 bp, Oryza sativa
  Intron number 1 from transcript LOC_Os12g03899.1 (locus LO C_Os12g03899) derived from phytozome v7.0 (chr-ID Chr12; p os 1610017 to 1615364 reverse strand)
cttcctctttgtctggattgtcacgctctgcacaggtaatagcctcccttcatttattctctcttccacccacacccacatgcatcatcaatcgcgctctcatcgatctgcagctgcagctgattccgttcctctctttctcatttgatctccatattttagcgagttttatcatgatgagtctgcttaattagtttctcctatatatatatatatatatatatatatatattctccattgatcatgcagccacattggagagctatatatatacatacagtcccttcaattaatcaaaatcatcaaattaataattactaattttatgatttgttttaagatttgtgcacctcatacaaccgttcaattttagcaatggcttattcgaggggtttctgaatagctgtagcttcttatgataatcagaagctcttcaagcgatttaacttttcgttcgtactctaataagttatagttgttgaattaacaaaataaaatagaagtagaaagctagaaaaccaattttttagctctaagaaataactaccaaggctgtgtgtttagttaccttcatacttttaacttttctatcaaatcaaatatttgaacacatgcatggagcattaaatatggaagaaaaaaaccaattgtacagtttgcatgtaaattgtgagacgaatattttgagcctaattacgccatgatttaacaatttgatgctatagtaaacatttgctaataatatattaattaggcttaatagatttgtctcgcagtttataggcggaatctgtaatttgttttgttattagtgtatacttaaaaaaattttggacggggaactaaacgcagcccaaattagctgattattactactccgtcccataatataacaactttttgttgtctagatttatagctaaaaatgcttatattttgggacggagggatacaattttaagcttttttttttacagtccatagattagatttctagaggttgaaacttgaaaccgccaatggcagggtgcgtgtgcatgtgtagcagacggtcgcacactcgcacatgacctgacctgctgagattaaattcgtgagcttaatggttcattcattgcttttgtactacctatattctcgtttcttgattagcacaagccaaccattgctccatgcatgattagcgcttactcagacttcacttcatccacgttaccttctgtaaatttgttttttactttattaacctggccgtatggtttttcataatgtctcccatattttgaaagaaaaacaagatagcggctcatacgatatttcaatttgtattatactcgtataagtagctaacggtaatagagacagtagcggtggagttcacgcggccgcccaacccgttcgggaagtgcctccgccgttggctgcatgtgtgcaacaataaaatgagttgtttaataaacttgctatattaagggaattgtatactagtttatataaccggctcatgatcgaattgagaacaaaagcatatccagtggagttaaaatttttaagtagaccatcaagttttaagtgaagtctacgtaagatgatatctctactacttaaaaagcgaaccggttcgtttgcactcttttcgtacgtccttacatgtgtgtataagcactatctctttaagaaaaacccactaacatgtgatttctcactgcccacaccctaaagcctgttcgcccataatttcaatcatgttctatgataaaggtgcacttttcgatcggttaaacaccatgacttttacaaaagtctcctatatagaaattccatgatatactttctataatctgttttatcactttttaacatctaattattggtttgtgcccttaaataattattttcacttttcgtggtataatgtgagtttatagcattgcatgctaattccaaatatgcatggagctatatgtgacgtggagctccaaccacccaagtcggatagagtttttgtcgctttgtccaactgttggtggctcatgtgaactttggcgtgtatcacgtactccctccgtattttaatgtatgacgtcattgactttttaaccaacgtttgatcactcgttttattcaaattttgtttgaaaatatgaaaatatttatgtcatgcttaaagaataattgttgatgaatcaagtcacaataaaataaataataattacgtatttttttaaataagacgaatgatcaaacgttcgataaaaagtcaacagtgttatacattaaaatatggagatggtacaatatacgaacccatatgtacatgcatgtgttaagttcgctttcatcaaatatttactattgctcgatctctgaatattctgagtcttgaaatccacagaaaatatttgaagatgattgtgacggtactgtttgtacatgtctgggagacgtaaggatctgaatgtgttcgtgaaaaagttgaaggaaaaaaattcaagtctaaaaaatatgttcaaaattcgaacatacaataggaacatacacagatttgagtatagtgtacatatataggcataagtagtacaaattgaaacacgaaaaatgccaagtccaaaaaaaatattaaatttgaatatttagaaagtttcagaacgagtatgaagttcggaatatgaaaaatgcacaaattccacatcaagccagtgtgaggttgcaaatcttttgttttcttctcatgctgatgtgctgatggaacataataaatgagttgcaaatctgttgttctcttgtgctgatgtgctagtaatcctaatactagtattaataaatgacttccacttccacccacctccatggagctaaacatattcttgtgtgtggcaatgcgcgccgtggaattttagcgacgaccacggcttcgttttggcttcctcttccacctcttcttgttgctggctttccttgttgggttggccattggccctctccttgtttgcctcctcctctcctctcaatctcaggccctccctccctcgccgccgagcttctcctcttttgccgattgatagccgagggtgagggtgagcctccctgtttgttctgggggggtcgcattgcccttgccgggcgggagaggaggggatggaagaggaggtgccgttgctcaagggggactaccaccaaggttgccccggctgtgcctacgatcgcaagaaggaggtctacaggggattgccttacaaggaattcctctatctctggatgatctgcctcaccgccggtatgtatggaacattccccccctttttgcaacctgtgacattcagggtgtgtttggatccttggctaaagattttctaaccagtcttggtttttggtacaagtaaaatatcctagctttcaggagcaagctagccttgatgggctagaaaaaccttgctcagcaggacagccgaattggctctctctctctctctctctctctctctctctctctctctctctcaacagcaacaagcgcatgcgtgaggggaaaaaaaaatctggcaactgtttctcattgtggggtaaaagcaaggaaaccaaatgtggtgcttgggcaagagcagcatagctgaaatgagctagtttgcacatttcagctatagctcaacctagctgaacatccaaacgtaccctcattatgcagaaagttcttgtttttttttttaactcatggttttctaggatttttctttttctagtgtagtacgaatgagttgactgaatatcgccaacaaagagaatcttggtaccacgtaggaacatgacagcatgtcaacattggggatcttggtacctgtaggaacatgtcttctttcttgcaaatgctacatgttactgcaatgtccatgtgcagttccatatgggtttggtcggtgttcagtcatgtcaatgattcctgttcctgtggggaaatcgctgattctctataatagtagattaacaggaccaagttagttaagccaattgcctcaacaagatttctataatagggggatgttgacatgttgttgctgtttttactacgcacttctccatatttgctttcagtgctgcttacaaccgttaattacaatgtgctgtgatgctccgactcatactacacacgacgaccgtttacaccggtcattacgttgtccatggtgttacagttgcaaactagtaatgccacgtcctggttcatgtgatgtgggttagctggggggtctattatgttaactagaaaatttattgtttgagggagatcactgtgcgaacaatattagatacgcaattaattcctgttatgtcatagtgccagtcatccaaaccttattgggcacataattaattcctgtaatctttcattgcaccaatagcaacttcattgataggatctccaatgatgggactgtaggtgatgctgattcagaccttgtagatctttaggttcttcgttgtgtttgtgatcttttttacctacctcggttgctgaaattttcacaacactacatggcatctatgtcaacagtcagcagaagcatacactgaaatgtcctactccgtgttagatacatagcattcagtctgcaatgcaatattgatatgcgaaaatgccttttaactgattttccttaatgatgtaatgttttttaacagatttttttatactgctccaaatcgtgataaaggtcatttatgtaaactgtaaacttggaactgatgcatgacttgtttcccacgtgtcctatataagcatatgtaattgtgcatatttttaggggtgaagttccatgtgctgttctggtgttctgcatgagctccttcatcatggttgcattgaacagtagtctttctcttttacaatagtggaacatgaaattaatttgtctacttgaacactgtgtcctatctgatgttgaggatactgagtgctatcttgtttccttgagagtattgcttaaaaaaatgtgagtggaacagtcaaaatctgagaagcatctagcacttcaaattttcttcatttcaagtgcaactagctctatatctagccataataccttcttttattatccctgttctcaccagcatcatgtagttgtttttagagaagttctcaagtagtcccctgatatcatcatctaagtaataatataataaatattgttatcaccatttgtatctacaaaagttttaaatgtatttatcgtaaccacatatcccatctattcttttttttacataaattttcagtgcatactcaagatttctaattctgtccctgtccttttcagctttaccaatatcatcattgttccccttcttgtac

SEQ ID NO: 1873 - DNA, 17881 bp, Oryza sativa
  Intron number 1 from transcript LOC_Os01g05900.1 (locus LO C_Os01g05900) derived from phytozome v7.0 (chr-ID Chr1; po s 2819593 to 2837473 reverse strand)
agaagcccgcggaggaggagcccgcggcggagaaggccgagaaggccccggcggggaagaagcccaaggcggagaagcgcctccccgccggcaagggcgagaagggcagcggcgaggggaagaaggcggggcggaagaaggcgaagaagagcgtcgagacctacaagatctacatcttcaaggtgctcaagcaggtccaccccgacatcggcatctcctccaaggccatgtccatcatgaactccttcatcaatgatatcttcgagaagctcgccggagagtccgccaagctcgcgcgctacaacaagaagcccaccatcacctcccgggagatccagaccgccgtccgcctcgtcctccccggcgagctcgccaagcacgccgtctccgagggcaccaaggccgttaccaagttcacttcctcctaggctgtacgcctgcatctagtcctagtagtaatagtagtttttatatgtttatgtggtatattgtttaagtgatatccaagattggaaatggatgttaaattgttggtttggtagtcattggctgtaagaagaatggctttgggttgcttttgggaaacacttgcttcacggatcgggcataagtaaccatgcttttataacatgcgaatgtgtgctttctcttgtgccatcattgataagaatttaccttgtgccagtgttggtgatgccttcgtttaatgttgtggaattacatggttgctagtattttgtctcgtaaatttcttttcatgtcattggaatttgatttctgcagcatgtacattggtgttaggtactgctcttttgcgtgtgcctcttttgcgtgtgcctcatgtattgtttagagattttagaagcacacactttgggacaataccaaattgtttttagcctgacaagaaatttagtttcgtgctgtctgcatttgaaacaaaaagtttgtacacattgtttggtgcactagtacatgatataatctgtcctccattgctgttttattctgagattagaacttcgacaagtaagtttttcttcagcttttgtcaggtactgattttcaaagaaatatagcgacaaggaaatggtaactgaaacatcacattacaattattgatttttaagattatgttgtgcccgcatgttttctcattccgttctgaatttctgagtgctgctagcttatgagctaactgttaggtatgcatcttataccaaagttttcagtcaggctattgctctattcaagatatgcattgccttaaggcatatgtgttaagattagaccaaactcttgttgattctacttattgtaataatgtgtcttgtcctttgattcactctccagttaggtgattctccctccagcgaagttggaggtgaataagttacatccaaggttctacgtggaatattgtcctgaatttcggttgggcttgttccataatacattcgctgtcaaataactctaatttttatgacagcataaggattaatatggatgtatcataatttttactcatggaataatttcagttgctattatgaatttgcagtggttggaataacatgcccatattttgagagcaaatcccttggttctatctggttattggtttgagcacttgttcttttcttttcagacaacatgaattattattgatttggtattcagtgttagatctatttagatgcaacctatgttgatgctatgtttatgtgggtgggaatcgtggaactttgttttcttatggttgcaagggtatccctatcaggtaggactgtaggagtagttggttatattttttttattatggatcatggatgcgtagaagtttctgttggaagttgctaccatggtttcgtgtgtaagaagccatatggtcagctcttcagtattatttgatcagcatgattacattgacattctgtatacgtctttgcaatgacatgcatctgagctttatttgataaatataaatcatgcagccttgtattccaacgattatttctagtacaattaattgacactacatacatgtcttatccaacatttagttcaatgccaaccatccaagacctgagatattcatctctgatggcatgaatctctgatacagcatctgctaagagcactcggtctctgggttgttgctttgagcaggatatgccaagcctaagaacagccactaaacactgttgaataattcttctttttgtgcttgcatttgtcacatctgtctcatttgcttcttcatgcagccagattgtctgatcagctgtctaaggctctatcaagaaaagaagctgcaataaacttgtgcaaatccattgaatccctgaaaatgtcatcatagggcttcttccggtgaacatctcgagcaacaatattcctaaactgtaagtatcacccgctctggttactgcagaaccctccccatattctacaagatatgcagtcaaaattagtttctaactgtaccattagcatgtaagatatacaaagtgcacaatccgaccccacccatgagggaggaggtgggaggacttgtgggaataaatacaaaaataaaacttttaactacctggtgcaatatagccaatggagcctctgattccaattgagctttttgaattttgaagagttttagttgtgctgtttgggaggatttttgatatacctaaatctccaacttttgcactcttgtcttctgcaagaagaatattacttggtttcaggtcacaatggacgattggtggctgacagtggttgtgaagataatccagtgcatccaagatatcaacagcaatgctgagtctctgcggaaggctgagtgtattgctagtgagattgcttgacttgggatgatttcagccatccaagctaccattgggcatgaactcaaacaccagtgccttgaactcttgaccctgttggtcaatactcgaacaacaagtgatgatctttatgagacaacgatggcgtactcttctcaaagcctcacattcagcctcaaagctccttgaagatcctgacatttgaaggttgaacattttcacagccgtggttacacttgcaccctcatcttctaaagcacatctattaacagaaccataatcttcctttgccaagcaggttagcctctgagaattcattacttcctcttgataatgcatggtacgaagctctgatattgttcatcaataattagggatgtcgctcggctattttgtcttcatttgagcttccggtggagtaaacaatagaagcacaacaactgaaactaataccaagactgctcccgttgttgttagagccagtgtaagagacttaggccaccgattctttttctttcttacatcaaggattgggcatggagccaagtgaagctgaggcattccgctgcacaacttgtcatccccagcaattgatgcataagtcaagttcctgaaaacaccccattgagcatgtttccgatgttagaaggaatggtgccattgaacatgtttatatccaccgtgagcatgatcagtgatgacagattatacagcgacaccgggagtttgccggagaggtagtttctgttgaagagaagataccttaaacctgcgatgctgccgatgcctggcgggatcatcccctccaggtggttgccgttgatggcaatgcctgaagcggcgacaggttggctagcgacgcaggaattgaccctatgaaggtgttgttcgccagcgcgagcgtgggagccgtgtcagcgtgttgccaagctcaccgggaatgcggtcgccgagctggttgtattggaggtacacggttgtcaatctgacgcaggtggtgaggttggtggggaactcgccggagaaggcgttgtggtccatgtcgagcacccggagtcgccggagccggctgacgctctgggggatctcgctgtggagatcgttggagctcaggttgagccgccggaggaaggtgaggtttccgatggctggtgagagcgtgccggcgagatcgctggacggcaggtccagcgccaccacggacgtcggcctccgccggtgactgcacgtgacgccctcccagctgcagaagctgttggcgctgctgttccatgaccatgaagcggcgctgccaacctgccggagctagccaccagcgcagccgccgctgcgtgtgatagagatcctaacctgcagaggtcatcaggctacggaggaccagagcggggggctggagatccaccccactgtgtgcaccgccatctcctcctattcttcattggtgatttctgcaggaccagcaccacaaccatcgtgtaatcaaatagcgcatccacccaaaccaaataaatcaaggtacaagcctgctctgattccagtgcatttgattaacactaacgtttctgtttgcaatgctgaaccaagcaacatctatgttagttgatcctatgtctgtgtgggagcctgagaactttggtgcctcatagctgcatcggtatctatatcagatagatggaaattttgctagtaaatatggttcatggttgcataggaatgtgttgaaatctgctagtaccatatatggtttcatgtgtttttctgaagtaaaaactacagcagttcaatattatttaacaaaccgattacattctctgtgtacatatcgagaaatttgatcaaattcctcgtatgtattttacaacggctaactgggtccttgttatggctttcaatagaagccgggtcttttgaccttctctaaaaaaaaaaatctgggaccttgtttacctccgattattccaggcaaaatgattgacactacatatgtatattatctagcatttagctctagtgctctattgctcgttgcccaaccacccgggacttgaaatattcatctctgatcgcatggatctttgacacggcatctgctaacaccattcgctctctgggttgttgctttgagcaggatatgccgagcccaaagagagacaccaaactctgttgaataattcctcttgtcatgcttgcatctgtagcatctgtataatttgtttcatgcagccagattgtttgatcagctatttccagggctctgtcaggaaaagcagcggtagcaaattcgtgcagattaagcgaatccttgaacatgtcatcagtagggcttgttcccgtaaacatctcaagcaatattatgcctaagctgtaaatgtcacctagtttggaggcagcagaaccttcaccgtactctgcaatatttgcaacacacacagttaaactttaagtgtaccttcaagacaaaaaaaaatacgaatacccctaattctacttctatctattagaagaggagggaaatgaaggaaataaggacagaattacaattttttttagctacctggagcaatatagccaatagaacctctgattccaattgagctttttgaatttagatgaattttagttatgcttttggggaggatttttgatatgccaaaatctccaaccttagcattcatgtcttctgcaaggagaatattgcttggcttcatatcacaatggatgattgatggctgacagtggttatggagataatccattgcttcaaagatatcaataacaatgttgagtctctgtgaaaagctgagtgtgttgctaggactgcatttgctcgatttgggatgaatccaaccatccaagctaccattaggcatgaactccaaaaccagtgccttgaactcctgaccctgtggatcaatactcgagcaacaagtgatgatctttatgaggcagcggtggcgtactcttctcaaagcctcacattcagcctcaaagctctttgaagatcctaattgttgaaggtcgaacacttttacggccactagtgcatcctcattgtctaaagtacatctataaacagaaccatatcttcctttgccgagcaggttggcttctgaaaaatcattacttcctcttgacaatgcataatatgaaaccctttgatactgttcctcaataaccagtgatgttgcttgtctgttttgtcttcgtttgagcttcctgttgtgtaacagaataagaacaataactgaaaccaacaccaacattgcacctgttgttggcagggctattgcaagagactttagatgctggttcttgttcttgcttacatcaagaatgggacatggaggcaagtgaagctggggtattccaccgcacaagttatcattccccacaaccgatgaaaaggtcaggtttctgaaaacacctttaactggtacttccccttgcaaattgttgaacgacacatctaattgcttcaatagtgtaaaattttgtagggctgctggtattggtcctgaaaaattgttatgtgctagacacaggtattgcagattgccaatgttactaatggcattggggatcctaccagataacttgttcacggttaggtttagtacgttgagccctttcagattggtcaaagattgaggcatgtctcctccgaatgagttattatctagcaagaggaattccaacacttcacaatttcctatactgtttggtatttggccagaaagctggtttcctgacagaattaactggtttaggttagctaaagtaccaacttctgatggaaggtgtccagagagggagttgtatgacaggtccaagatccaagctagagaaggcagctctagaatttccctgggaattgaaccgtttaggcgattgaatgacaaatccagattaaacagattttttagcctcccaatggttgctggaattggcccttccaaattggtgtggaatgcaagcagcctattcagtttggtaagatttccaatggttgacggtatgaggcctgacagaccagtgttgtatagggcaaggtcaaccaagtttgttagcttcccaatactttctggaattactccagatatgggattgaaccccaggtcgagtaatctcaagccaatcaaattgctaatgtcgtgagggatggtcccagagaagctgttattctctaaatcgagcatctgtaacgtcattgacagattcacaatcgatcttggcagctgcccaccaaagaagttgtgagagagcatcaattcttgcagctggctgcagtttgctagagaagttacaaattccgaaccctttccgttatctgcctcaagctggtttgttccgatgtatagatacttaagagaatgcaacatccccaaggtgggaggcacaaatccagtgaagttgttatctgcgaggtacaaatctgtgagccttgaaagattggacagagaagatggtatggccccatgaaaacgattctcatgcaatccaaagaagcgcatggcaggaaacttgtcaccaatgttggcaggaatgctcccttgtagcatgttgagccctactccgatcaccctcagtgccgacagattccatagagagtgggggaattcgccggtgagcatgtttgcttccaagctaagctcatgcagaactgggaagttgccgaggcatggtgggatcaggccctccaggtggttgtagtccaagtataggtcctggagcaatgataggttggctagcgagggcgggatcggtccgatgatgctattgttggtcagtagaagcatctgaagctgtgtcaacgtgtttcctagctccaccgggataatcccgcccagctggttatagtcgaggtccaggattttcagactgatgcaggaggtgaggttgacagggaacgcaccagagaaggagttgtagctcaggttgagccattgcaggcgtcggaggcgaccaatgctggtggggatctcgccgtagaggccgttggagctcaggtttagccttcgcgggaaggtgaggttcccgatggctggggagagcgtgccggcgagattgctggatggcaggctcagcgacgccacccgcgtcggcctccggcgactgcaggtgacgccctcccagttgcagaagctggcgccgctgctgttccatgaggcgagcgcgcttgaattactcccggtgagccccgccttgaaagcaagcagcgatgcctcatcgctgcttgacgcagcagcgatcgtcaggaggacggggaggaggggcagtccaagccgcctcatgagacgtatcgccatgtggatttttatttggtaagcgtctttggagcaaagtttagtttcaggctggagatatatcgctgctttctgattccatttttccccccggcccccttgttgtaagagttcacttgacctcattgacttcaagtcaccgggcaggaccagtgtaattgtagtactaggagcagtgtgttccacttccacctacttccttcttgtgataaaaaaaccaatctaatatgggatgttccgattcgttgcaatagaatgtgttatatccagttttatatatatatatatatatatatatatatatatatatatagtaaatttgttaggggcaccatggtgcccgggctccatagccatccaccgtccaaatgctttaagatccgtgcaacacactagaggatgctatcacacattaacgggtctaacccgataagagttgcatgcatatactttccttagaacatgcatgcaggtatttccatttttactgtgcatgtatttacaaatttgcgccctctaatcatgcatacacattatgattagcactttccattttctatatcacatttccatatatacaacgtttgcatgcagatacttaccttttgaatcacgattcgtttttgaaaaatgacgccattccactaattgcgattattgccatctattttcaagattacattccattttcaagatgcacatataaccggctactgtattcctttttttgatttttcttttccacactgtttcacggtccaagagctagctatccacatcgtcttcaccgagttacctcgccgggattgctcgccatgccgtgaagagggccgacgtccgtggttttcgtcaccgacgacgttcgtccacaagcctcttgctggaaaccagaactcctcaaccatttttgtcaagccattacagcgcctgatgtccaagtgccttttcgctgccgtcgctggttgttcgtgagcttcggaacagacattattcaccagcgagctgcattacctgaaaggtatggatctcagtgtttatcactcacacatcttacattcacatgcagtccctgttatgtatagatgatttgccattcctcttctttttatctactaaactgagcacatgatgaatcacctggaacctaaatttatagattttttgttgaaatgcagttgaatttagattgttttaggtatataacatgcccgttcgaatatctttaattgcatccagtgaataaaatttaggtaggtagtgaaacagcagcaatgtctcttttacgtggacatctcaattataatctttgtaaatatagatttaattaattttaaattgaagtatatgacccgaagagaatcatattgcttgttttaataatggtagtttttaatagcatgccgcggcttccaaagtgtgcgagcgtgagaagaaatgtgaagcgtcgttccattcatgatgatgatgactttgtcactccacctacaaggaagaaggctgttcgtgttaaattcgtggcaccggtttcgcgttgtgtaccatcttccatcacacctatcatacagagatttagtgctgaaaagaaagagctggtagctgagatgggttttgaggggctgctgcatatgcccctcataacaaaccatcgtgacttcagctactggcttttgtcacgggtatccccaacacgttcggctatcgaactagaaagtggtgaggttttgccactgtctcctgaggatgttaagaaggtgcttgggattccttgcgtaggggaggagctgcaagcacccaatgttgagtttgtttctcatgtcaagaggttaattgctgaaagaatgaaagttgctagttttaaggacgttaacaaggaggtattggaggatgtattagataaacaccatagagggcaaatgtcaaaggctgagaaagaaagtttcaaaacagcattcctaatgcttgttatgatgaaatttcttgcgccacaatcaaatatggacaataaatgtccaagatatttttctgcactacttgaccccaatgaaatagcaaagttcaattggtctgggtatgtgttgaacgagatattggacgcagcggcaactgttcaaaagaagcacgctgatggcactaaatgtggttatatcactggttgctctatttatttgcaggtatatagactttttcccaatgcagtacatacactaaatgttataattatataatgatagtgagtacactaataaaatttttcatgcaaaggtccattatttggataacgtggactttggaggtgatctaaacttggagcataatatatttcctcgaattgcattatatgatcgtgatacaataaaggaaagatatcagctggacatcagcgaaaggaactattaccaggcaacacagtttggaaaattaaaggtactttacaaaaaaataattcatagtttatattgttctaacccttcacatgtctgatatacttgcactttatatcgatccagctacggcccaaaaatgaagtctgctacaaaagaacgtgcgaaagaacatctgtcactgacagcgggggaaatgaaaatgttcagattgagtctcaggtaagttattaaaaaaatttctaccaaacatgtttatttagtaaatatctagagatataaacttttaatatcaacatgcaacacagcatgctgctgaattaatacagaaggcccaagaattgaaaagtttttggatttcctgcattggcaaccttgataaggcaacagagagtctagttaaggtgacagaagcttcgaagaacatgcccagcgtgaccataccaatcagcgatgaagttgatgtttctaaaggttatacatgcacaactgtcaacgatgatgctgagaatggaatagaggtcaaccaaacaccatctttaggaaatgatgtagaagatgtgagtgcagctgctgccaattgtacaccgatggttcatactcacaacttgaaagaagaatcaatcgacttgaatcgcactgttccacacaggacttatactggtctggacttcgatcctccatcatttgatctaaatattgactactcaccatcaaataacacaggttattttcctacacgtatatgtttgctgcctgattttcatgtttcacatagtaagtacccttattgttcctttttttttccatggctggttgtgcatgctgacagtgaggcgagagaatcatggagtaagttgtcattcaaagttcaggtagacaaagatgaagaagattacaaatgtgtttgcaagttgtttgagcacatgggcatactgtgttgccacgttatcaaggtacgccagctttattttggtccttgtacttacatttttttacctctagagcatgcctctttcttcttaaattgttttacccatctaccataaatttgggtaagcgtatatgttgataagttaattcttgattcgattcatattctgtcagctttaatccagtgtatacatctgtagaaaaccatagttaccctaaaaaaaattagttttgatgtataagcagtttagtttatcatttccgtttttcattgttcatgtaggtaatgacacacataggctgcagaagcatcccagataagtacattctaagaagatggagtattagtgccagagaaggatctggcagcaaccttgagagcttcaggaatgacaaagatgctgcctcttccaggacacaccgccacacactgctctaccatgcatgtatagacttgtccaaacaaggtgacatatcggttgatgctttccaccttgctatgaaacatataactgacgcactggatgagattaaactagtggccggtaccaacgaatctcccatggggtacactgatcccccaaatgatgaacctgctggaccggatcaaggaggtgaacaaaatgaagaccccgcggctcatcaggccgtacaaagcttgccactgccacctgatcgtcgggcaaagcgtggccgacctaggtccaccaggctgaagtccccagtagatggtggagtccgaaaaaagcgcatttgttcgaactgtcatctgaaggggcactatagaactggatgccccacaaatccggagaacacatcgaagaacaaagtgatcaaggtgtgcacgaaatgcaagttagctggtcactatgcatcaacgtgtggtgttggtgtatagaagcaagtctatcgttgtttttaaatacaatcttgtaaaaatattcccatatcttgcgtgttgcacttggacaagtttttaattaaattcggatatgttttctatttcataattatgtcattcatcttgtgggatatacatgtatacgtgttcgctctgtcactcataaacctatgtgtacatgtacacctgtaaaagtacagattatgtcattaatcttgtggtattcagacgtgcattttttcactctctctctatcccgttgactatggccaattagtaccgaaatcactcgttggttactaaattaatcaattgatacccaattctgactggatcgatccatgttgacggtaacaaattatattatgtaacctatcggtcgtaatagctataaatattaccataaataagatctttatacttggtaatgatattaattttttcattccttccaacggagacacaattgcaacatataaagagcagaacaatacgactctgctcacttctggtgctctctctggttctcgccaacaacacatttctgttccaggtatggctccaacttatctgtacgtatatgtacttctcatatatgttgacctcttcttagtattctgaaatttatacttatattgccagtagctatggacaagatgaacactggtgcctggagcgataagatcgatcagtcgctgcagaagtatgatcacccacgctgccgttggcacatattatttggtacgaagtcagaactacacaacttatatcatgcacgcacagcaagtgattttgaagatacttggacggccctagtcaatgagtatggtcttcaagaggagaatgcatatctccaaaaggcgcagatgttaatagacgatgaaacgaagcccaatgattcacaggtaatttattttaatatatttttggttcacgttcagctccagttctggatttgtcactcctgctcttaacattttccacttgtttttttttcgtaggagatagatacagaccgtaaagatgtcaagagggaggtggaggctcctaagttgatcatttctcgtcatagtgatgataaattctcatcctagtgatgagaaatgtgactcgcccaccgtctgaatagcaaacatgaggcaacatgcaagtaccagccgaaaatcaactctctgatggtgtgatatggttgccagccatcggtcaaataagcagccattcggtgtttttacatttatgaatcacaatcgtactgtaataataaactagttacatctatatttatagatcgtttttactttaattagcatatgtttcatttatattatgctaaactcctatgatatgtggatgagccaattcaccgatattttgtttcctttcagacttcacttaagagatctactctttcaattcagcatattaaacttctaaaagcgcatctaaaacactgtggaaagaaattgaatttaatctaaatcggcacatatggaaaaacatggtggaaataataatacacagtacacacatttaaattttagatatacttaaaatccatggtacaaaaatatacttggatttatttatattaaattttaattttagatatacttaaaatccatggtacaaaaatatacttggatttatttatattaaattttacatccggacgtaacgacttaaaatatacttgcttccaaatttaattaggaaataatgtactgtcagcctaggtaggcgagttttaaattctaataatctacagtacacagatttgaaatatagatatacttagaaaccatggtatttctatttacaacaatataagatgacaatcaattaacatataccgtgtacacaaattgtaaatttatatacgcttggattcataatataattaaattaacgtaatttaaaactttgtatacttaacaagttagctaagtatatagaaaaaataacccgtgtatacatagccattacattacataaatgagtaaacattttctgaatctggaaattgcaaaacgcactaatttagctaggtgtacataagcataccatatacttagcctccatatatacttatattccaattacatcgtccatggtgtacttagggtacctcggtttccttatataattattttcaaaataacagcaggataacatttccatatatactacatcgtagaagtatacttagattttcatataccctaataaaccgcattatatttgttgccaaataaaccgcaaatccatgattatggtgacaaatatttagaaaccaaataacggccgtgaactgttgatggaaaggtattaaatacgctaaattaatactcctaaatattttgcatgcatgcacacgctgtcaattaccaaacctaggtattaaagacgttactaaatattttgcatgcatgcacacgctgtcaatttccaaatcaaatgtacttaacgggtgaacccgttaatcaaatatacatgtaccgatcaactagatgagaatgtgatccaacggcagatgtcagtggtgcccgggcaccatggagtcctatctgggcgtcctatatatatatatatatatatatattccatcaaatgcaagtggtcagtcaagtgccagcatatgccgtcccgtgagaatcattgccgacagacaagatgtagcgtgcattgcagtgattgtggcgacaaagaaaggggttcacggggacgatgagtaagacatggtggcaaaattaaggtccgttcttttcttcgataagagttaaatgaagattaaaatttttgtggcacgttttttaaactgttaaacgatacgtttcgtgcgaaaactttctatatgaaagttgctttaaaatatcacattaatctatttttcaagtttgtaataattaaaactcaatcaatcatacgttaataccacatcgttttgcgtaaaaaacttaaatcttcattttcatattcaggataaaagaacaccacttaagctcacataagttttatttatcaattatcaggggcatgtctgaagagcagggtttcacttattgcgctgattatcacgcttaccgcggggtacggtaggggaaattggcgattgatttggatggattttgaccaaattcaaacttttggagaaaaaatgaaaaaaaaacatggatgtagttcttgatttataattgccaatggtgaagattttttaaaaaatagagtaaactaaattcaaatttgagggtaaaataaaaaatagtttacaaattgaaaaaaggaagacaatattgggccttaagtatcctacatattctttcaattattctcaatttctagttttctacacatattcaaccgtattttttattttttccctatttatttttcatttacatgatttcaactatacagaccgcaataaccgtgcaaatatcgcggttatcacggtaaaccgtgcggtaaccgcggtgaaaccgcgaaactgccgagttttgaattcgaatttttgaatgtgatttctgtacgattttagacaattatcgcggttatcgtgctaccgcgaggtggcggtaacctcggcccaaactctgttgaagatctttatttatcggcagaaataccttcttaagtgacagcttctaagcataaaccactacaatgacgtgcatctaagctttatttaagataaaataatgaatagtatcaactaagcaaccttgtattcctccaattattcctggtacaatcatgaacactacatatgtatcttgcgcaacgcttagctcacagtgctatgttcttcatggccaagcatccaagacctgagatattcatctctgatacagcttctgataacactattcgttctctggttgttgctttgagcacgatgtgccgagcctaaaaacagacaccaagcactgttgaataattattgtttttatgcttgtgtgtttaacatctgaatcattttcttcttcttgcagccagattgttggatcagctattctagggggaattgagatcaatcccagccctttatttattgatccaatggtccaaattgtgagctacagtaaaattagagctgtacattttcttcttcatgcagctagattgttggatcagctattctagggggaattgagatctagtgcagttacacaatcccaaccctttatttattgatccaatggtttaaattgtgagatacagtaaaattagagctgcacattttttcattaaaaaacgctacactaatttgctacagtactaaagaggcatctaggccatccgttttaaatccaatgatactcttgtgactgcttaacttgacagtggccactgcactggaaccgaatccgtctaggggtcggtcaagaacacaagctacaacaaacttgtgcagatccattgaatccctgaaaatgtcattcgggtgaacatctcaagcaataatatacctaagctgtaagtatcacccaccttcgtgactacagaaccttccccgtactctgcaacatttgtagccaaaattagtatttaaccctaccctcaacatgtaaaaaatgaagcaccctcagtctgataggaaggggagagattaagggaataattgcccggacacctctcggtttgaccgccgcccattgtctggtctgaccggccactcagtgctgcactgttcactgacagaaaatattaattactatattttcaataaacactcgcatttaataattgctcatcacaaaaattgaccatcacatgattctagaggtgtgactccatctaatttgggaaaaaaagaaatagaggttcatgcgactggttcaattgctttatgctgtgataatgctattgacaaacaacaggtgttataccattttagcgattcaccgtggaaggccggacggttgatgaggtcatacgctaagacattaacatgtttgtatagactttagagcaaaaagaaatagtagtagctcgattagcccagaaacaagtaaacaggccactctcgtgggcctcgaatcgggaatagcccagtttccaagcctgcgacttttactgggccatgagctaaactctacgaaagaaagcccaactgcccaaccatgaaaactcgtaatccccgcgcgcgcgacggaaaccgcctactcctcccgttcccgcgtacactttccgcgccgaaacgcatctcagccgtccataggaaaacaacaccaatcgtgcgccacatgctcctccacgtcatcgatccgcggcgcaccccctccgccaatcagcgcccacctctcccctcctttaataccatcgccgccgcctccccttcaactccacaactcgcaaccgaattcccccaaattttcgtctcccctttcccttccccgagaagaagagagcggcatccatggcgcccaaggcggagaagaagccggcggcgaagaagcccgcggaggaggagcccgcggcggagaaggccgagaaggccctggcggggaagaagcccaaggc

SEQ ID NO: 1874 - DNA, 795 bp, Oryza sativa
  Intron number 2 from transcript 13113.m00177 (locus 13113. t00050) derived from phytozome v7.0 (chr-ID ChrUn; pos 145 304 to 146098 reverse strand)
catcggatacatctaccgaaggtcaaagtgatgtatccatggatgcatttcgtgatgacctagccggtcgtatcacaggatgatacattcacaggatgatgcattttgtggtcttttggtctatgtttcgatgacaatgctaccagttattatttctaaacatttgtattattacatatatgtcatgcaacaacttgaacgttctcaattttattttaattaatatttaaccttccatacttatggtgttcaaatcattaagaaaaaataacaattattaatcctacatcaaataaaaaaaaacaacaagggtagtgttgtccatctccccccctatcctctctttcaagatttttggagctgagcaggctagccaaacactttcaggggtacctccagctccaacaggagctagctcccactagagctagagtttggagctaggatttaggagttggagcactaccaaacagggccttaatttaaggagtttgacctaggacgaaccgatttagatgaacctacgtacaatacattctgatctatgtctatgttatttaaatagttatgtagcactataatatggatttaaaaattagggcatgatttattttagtcaatttgacctcggacaaaccgatttagatgaacatatgtagaatatgtccttatgtatgtatacatttctttgcgtagaattttgtttaatatagaatttaacttaggcacagattgatctaggcaacatattcgtagtatgaagtaaattaagtttgaacctgtttatcaggcata

SEQ ID NO: 1875 - DNA, 3615 bp, Oryza sativa
  Intron number 1 from transcript LOC_Os03g37470.1 (locus LO C_Os03g37470) derived from phytozome v7.0 (chr-ID Chr3; po s 20777445 to 20781059 reverse strand)
gcgacgacggcggcagcagcacgaggaggagggaaggggcggcggcgggtggtggtggtgggcatgcggcgagtgccgagctggagcgcatcctggcggacgagtcggtgccgtccgcggcgcggctggcgcgcgcggcgcccgtggagctgcggctgctggtggcgctcgcggcgccggccgtggcggtgtacatgatcaactacgccatgtcgatgtcgacgcggatcatctgcggccagctcggcacgctggagctcgccgccgcctcgctcggcaacgtcggcatccaggtcttcgcctacggcctcatggtacgccatgctaactactatacgtagtagtacatatatattttcagtagttgcatgatcctcctatcatggaagaataacgtaatattggtcgattggggtcagattttatcagattgaatatcaaatcaaatcaaataagaataaagagtaggcccgaacctgaaaaccggcctttatattacaaaaattgattctttcaatttggatttgtattggtgttgccttacacaattttttcttgactttattacctttttatttttgcgattggctttcacaaagtataaaacgtataacgtataactcatagtatcaaatgtttggatatctatttacaagggggttgcataggtgctttgataattcgattagtatgcataataatataactcatatttttaaccactagagcaaatcaacaagctctcaattagacacacatcatgtggctgattcgagaaatgactgattaatattccctccgttttatactataaatcgctttagttcttgaaagtttgaccaaacttataaaaaaaatataacaatatttatagcactagattaattttattaaatataaaattgaatatattttgataacttctttattttatgttgaaaatattgctatatttcttttataaaactaaatcaaagttaaaaaagtttgatttagaaaaaagttaaaaaaaacttatgaaatagagatagtatatttgaatatcgacaaattaaattactagttatttctttcggtgcgaataagatcaaggagtgtcggaagtaaaattttattaaattatcttcacatcaaactgttccttgtattgtgttgttcggttcttgttcctattttgcaagggaccgagaagagagattcctatgggtgcaaccggaataatgctttgcatttaattaacttcttttagccgtcagaccaaattaatgcgaacggataatagcgatcgctgtattagagcaagtttagggccggttcactttaatgctattttcaatcataccattttttaaaaagttataaaaaatgtgacgtttaatttgttaccaaaattggtaaatacataagaaatcatgcttaaattttggcaatattacaatcttgccaaaatttaggcattgacaaaatttggtaaggtttattttagctactatctgaacatgcccttaataatataatgaattactagctccaaaaaatagtaaatcatttataactaacttaatagcctataaatacaatagttaactataaatctgtagaccgcttttcctctctacctcttctctttcctccatataagagcaaggctaataatatagccagctgcttactttatagatctttatagcctatctcttagccaactcatatagtggttagctctcttaactattaatatatggtccacctgtcactctcacagatttttttggttcctgtgccaaagccagctataagcttaccacccgcttttcctttttctcctctcctctctcatccacctcagcattaagccttcttatctcatccacctcagcattaagccttcttatagccttcctcagcattaagccttcttatagccttctattatacttgctctaagcacaaatataacgtggtaacatcaataacctgcttaatgatatcatcttattgtacttgttcttaatattctatctgtaagttaacaacgcggttaacacaacagtatacccaacaaataatactatcaatacagtaaagtggatgcagctctctgctttactactagggctatgtttagatccaaagtttggatccaaacttcagtccttttccatcacatcaacatgtcatacacacacaacttttcagtcacatcatcttcaatttcaaccagaatccaaactttgcgctgaactaaacatagtctacacattattgtcatgagaagggaatatatatacctcccttgaagggacaggttggaaagaaaaaaaaattcctttacactagacccaatcatttaattttttttctagacactacaaatataatatatctcagaatatgagaaaaacataggggaacttctacaagtaagaaacaataaaatcaagaaattaccattaaaatttgcctaaactgaatataatagatggcaatgaaactcagctataaggttttgccagttataaggtgacaacagaagaaaaggaaaacagttaaaaaaatccgcaaagccatcctagtattaataagttcattttaagtttttcttttcttaaatacccttaccaaccctcacctactcactcaataatattattttcctattaataatgggcacattggtttttcgctccatcttgttttcaacatctaaggtacaaggtcaaagattaagttaatttaagacatttgtaacataaaacaaaagaagtcatatggtacacagtattatcacttgaaacttgatggagaaacatgtcatgcgtgaggatcaagggcactcaaagatggagcgagagaatcagacaacaagaagcgtacatattgtcatattgatatgaccagctacagagagcgccacttttctcgttttcagatgcctgcgcagaattctgtttcttgctacagctagccatatataccttacctgttttcagatgcctacgcagaattctgtttcttgctaactatttagatcgtgcatacacgtgaaataaaacgccactcaaaagtcaagtgctctctgttgctaattaagtggtgctaactgctaagcaccatgcatgcacacacataagcttctccatgttctaactttatgcaacaaagtttcaaaaagaaaaactttacataaaaagcgattttagagtccttaagaagtctacggtgacaaagcctagataccaattgccgtcaaaagaaaaaaaaagcctagataccaacctttgtgttataatacatggtatcgatctctttgagttttaagagctggagttgataaatattttactagtaattcaattattttaatataagttttaaaaaaaattatccaataaacaatgcgctgcagcttggcatgggaagcgcggtggagacgctgtgtgggcaggcgtacggagcgcacaagtacgacatgctcggcgtgtacatgcagcgttccaccgtgctgctcaccgccaccgccgtcccgctcgccgtcatctacgtcttctccaaggagatactcatcctcctcggcgagtccccggagatcgccggtgccgcccgcctctacgt

SEQ ID NO: 1876 - DNA, 3586 bp, Oryza sativa
  Intron number 4 from transcript LOC_Os11g45390.1 (locus LO C_Os11g45390) derived from phytozome v7.0 (chr-ID Chr11; p os 26997051 to 27000636 reverse strand)
atataaagaattcaagtgcttataacaactttcaggtattttgaaaccggacagtacttaattttattttaacacccagaatttgatattttaaagtacaaattcgttttgatgcatttcagtttctttccgtactactagtttttgtagaacttttattggtagcgaattcaaataacggactgctacagaacggtatcccgtccggactagatacttgataatgtcgtatcaacaccaatgttaatgtcactatatacgtacagttcggtaccatgcatatgtggtacctattagtaccgaacatgatacctaagtaccatgtctgatatcctagataacacgtcaatgatgccatcactatatacgtccgtggtaccatgtgtaatacctattagtacagaacatgatacctaagtactatgtctgatattctagataacacgtcaatgatgccatcactatatacgtctgtggtaccatgtgtaatacctattggtatcgaacatgatacctgtatactaggtctggtattttataggtaccaagtacgatatatacctctatgtaccagccataatatttcgctactagattgatacctataggtactagattcaagacctatatgtaccaaagtatcatgatacaactaaaatatcattgcaataagaacaacaaatcatatgatcatcaagagagagctaaaaaaaatcaattccaggaaaaagttgctatggatgtagaaacacccatagaacatgtagaacaccccataatcaaactccaaaacaaacaatgcaagagcacagggtcacaagcccagatctggatgtaggatccgcaccttgagaagccttgtccttgatgacggtgaccttatcgacgatggccacctcctatagaaaatggcaagcagctctgtgttccatcatgtgcttgggcacctgccacacaaacaactccacactctcctcctctactccacccacacctccaccatcaccaccagcggcgcctgtgacggtggctccttccacgcccaacacaccaccggcaatggctgcgccggatgaaccacccacacggccagccatcattgttacctccgtgctcatggggatggtagtcagagagagagaggtagagagaatagagtaaatctgtagagcgctagatatttttaattagggtaattttactattcttgagaattatatttagaggtaccacattttctaatataaaatttggtacctcaaggtaccaaaattttttttcaagtcctataaaattcctctttagttatcccgtccagatggttgcccgtcttgtagtatttatgatataaccaaacaaaaatattcgaattcacgagcagttcaaatggccggtataaagtttgcatctttaaccgtaccggagcattaatttcttgtatggatgcatatgcttaaatttagatagggtaattatggaccttggtgatttcctttttgctgtgatcgatttattgatccgaaattaaaaaataatattttttatgggactatctatacaacattcgactaaaaattagtctaaaaatctgtcaaatgtaactgtaacataattacaatgtaattttcataattaaactatatttatactataattacgtatgtaattttcataattacactatatttgcactataattacatatataacttgcatgtaactcgcatgtaattatagtataagtaagatataagttcaaactggatcataaaaatatagtagcccaatggggcagtcacgtcttcatcctatgaggttacaggatcgatccctaaatatgattttgtttttcttcctaaaagcacatatcttgatgcgtattaaactgttaacatgaatctaggacacatccaacggtttagaaagtgaaagatttagccatcaaaaatctgtcaacaaatatttagcaattccgattttttattggtgaaacaaatgaaaattcaattgtttgctcttaccaccctataggtcagaagaccttaattaaaacaattttcatttctacagtatatctttatctttctatacaccagtaacatgcccacacattaattgcaacgggtctatatgattaggatggactatacttgcctatataattgggtatgggttgataagaataggattgaaaataaagatgagggaaggactataccggcctatattactgggtatgggttaagaatagagttggagagcaagatgagggaagaagaatatagatctaaccacttatggccgatgggattaagaagaggaaaaaagacaattccgaatattagcttgatcatatatattattctaaccgtattagaggatattctccctcaaccagttgttttgctggtctttttgtgggaaccctctttctgggctttctgtttctagtttagaatctgtaagacaattatgccgttccattaatggaaaggggggctttgtgccctagttcttaaaaaaaaaccgtattagaggatatgcacaatgataaaaaaaacggagctgctaaaaaaatggctccatattttgtggaaagaatatgtcgattcataatccatacggtatatgttaagattcgtgcaatacataaaacaaaaagaatcagagatccaagagacgagcagaattatactcatgccctgagcattacaaaccaagacgcttaccatgcgagcaactaactcattttgtctaacttacccatcacttccatatgatttacatatgtaattttaggacttacatttttaatacactaaaatacatatgtaattttaggacctacattgttaataagctaaaattacatatgtaatttatatgaatttacaatgtaaatatatggtgactattttttggtaaaaaatatagcgccataaatatagctactactaaaaaaatagagatttcttagagttgttaagagggtaagtttgcttacatggaaaagagagaaagataatggcgacatcgactcatagcaatttataaaaggaaactatttgttgaaggaaacttagcattctccgtagccatattttaatcggctatttctcaatcctttaaagatgagttactcgtgaaggattgtggatgtctgaatctgtagtagcgactactactcatagctagcttgctgagtactgactagtataggcctgtttagttcccacataaaaacttttcatcctgccacattgaatgtttggacacatggagtattaaatataaaaaaaggtgtaaaatacaagacgaatcttttaagcctaattacgccataatttaacaatgtggtgctacagtaaacatttgctaatgatggattaattagtcttaataaattcatctcgcaatttatagacagaatttgtaatttgttttgttattagactacgtttaataatttaaatgtgtatgtgtccatatatatgatgtgatatgccaaaacttttcatctctggatgtaaaattgtaaacacagccatatacaatgtgtcgttgcctgcatgcacgcagatcctgg

SEQ ID NO: 1877 - DNA, 856 bp, Oryza sativa
  Intron number 2 from transcript LOC_Os01g50680.1 (locus LO C_Os01g50680) derived from phytozome v7.0 (chr-ID Chr1; po s 29104337 to 29105192)
cggggtggacgctatcatcggcaacgtcgacacaggtaccactacttgaaaaatgatattcgagacgatcaaaatggatttcacgagcgactggtacaaccgctagcaaccaaaaactaatgaaaatcgaattttttaaattaatttttcaatggatttttttttaaaaaaaacgcactaagagcacccacaatagtaaagtaaggtgctctctataaaaatgtacatctcagcaatagactagattgatagtaaaccacctcaatagtatgtctacatgggtatctgtagctctctcatccattgcctcgtttttctctataaactatctccagtttagtagatagatttactctctctctcttcatttaatctgttccaagtagaaaaatatgctgacatggatctcttgtagagagtctatagataaccattgcgggtgccctagaatatgaggaagtgaaattgagaaacacagccccaaataatgaacacagaacgatcggagcgaatcagttattccgtgcatcggtacatgcttcccgatgagatacatgcgcgagataacttaaaataatcaccccaagatgacatgaggttaacagaatcaaatcccaagaatacgggaactaaaaagtcaattcaaacctcgcaaaatggtagcgtcgccatgggcgcagtgcgcctgtgcctctgttggattacgggatccctggtggcctggttcagatgtgctgtcgtcctatctgctgtactgaagtgctgtgcagttagccatagccggaacctgttctgattcctgaactcctgattcttattttctgtgcgtgcacgtactccctacaaatgaaggtgt

SEQ ID NO: 1878 - DNA, 595 bp, Brachypodium distachyon
  Intron number 10 from transcript Bradi1g45830.1 (locus Bra di1g45830) derived from phytozome v7.0 (chr-ID Bd1; pos 44 107080 to 44107674 reverse strand)
ctgtagaggtatgtactatcttggactccttttttctgaaagaagataagtagttaaataccacccctcgaatggaaatgggttatgataaaatggcgaaggattgtctgtcctagtttgctagttttcaatgtcacattgtaagaggtttagtgagttgccctggttgccaatctcttcagtttgtttacaactttacgtacaggttaactaatcatcactctctgggtttatgctgagtcatcaggatttggggcattacctttatgttttgcattttgtcttgtgtggaatcttagctgatttgtgatagtaatgaatattaaaaacacgtaatgggctcactgcttcctaagcataacaaatcccaaaacctcagctatataacctgtgttcctttctatgaggtcggcagcctcaaagctgataagaccctcagatgcaacaacaaccccattatcttccaaagaatcctggattaccttgcggatgacacccctcaactaaacgttccttatccaagtttagcttaagcgagactaacatgtatatatgtgcagtcactacaagaagatcctgatcctgtccctgatcc

SEQ ID NO: 1879 - DNA, 2246 bp, Brachypodium distachyon
  Intron number 1 from transcript Bradi1g70290.1 (locus Brad i1g70290) derived from phytozome v7.0 (chr-ID Bd1; pos 686 76807 to 68679052)
gctcgaggccggcggcagcaagtgctcctctatcggtaagatcgatggcctgcgatctcgccgcgttttggggtttggttgcggtggcctgagtcgttgattcggtgcttttggggcggcaaagctcggatcccagtgccattgaccgtacgattttgcagcatcgatgggaatgcggagaatatggatatggttccttcctagatttcgtgctgaaagtatgcgatgtgttcgttgatggtaggctcactcgttgagctggagaatcgcgtgtcaggtttcgcgatctcattcgttagatgtcgtgattcggagtgaaactgagagagttagcaatttgggtttatcattaggctttcggttagtttaatattggatcccgaccacattattttctgttatttgccaaaatgcaggatcgtgactcttaagttttgaaccatcatttgggttagatttgggcgctggattagtgctatcagccacactgttggatttgggattaattgtgttatcctggttttgaacaacttgcaaaactggagtgcaaaggacatcctgaaatttgctatcagctttccgtgcacctcaaatccactgcaagagttgcagctgtctacttgttagctgaaccgcaagctttttgtctatcatcaataattgtgatacggagaacaaatgtctaagccaggaaggcattgccccccatgcaccttgctgatctactcattgaagttaaataatgtgctttacttcagggtcatgggcagcatgcttactgggcactctgctctcatctgattagattcacaccttgagtcactcaatatcattggttctcttccactctttcagcaaaccctgagcctattctgacctagtaatcactttatgcgatcttttggtttgaatttaaaatctgctttcttttgccgggactttcagttctctgttttgagtggagagaattttttttccagataaacagaactgcatgttggtttgtctcctcagagctgactagacaggcttattgctctataatttgaagcatcggactagtactgttgcttccattttgagatgaaatgttgtaaattaaggttacaacagtatattatgtttttaaactatatacactcaagttttaatccatctgataatttttattgcaattcctaaacaagggagagcacctgccagcattcaggttgtaaaatggctttcaaaaagtccaaattagtagatttattactcgaactgagtgaaaaagttaaagactctccttttcccccttcctattaatgtgataatttatagatctgaatgcacatgactcctttggttccacccatcattatcaattatcatattacaggtctatatatttttggtaaacgcgcctagcttttgagttggagaaagagcagttgaagtttatatatagtagctcaatagatcaaatccagggtttgttagaagctatataggagccatagccaggttttgtacaaaaaggtgaagtgtctgttttggttctccaagtaccagtgtctccatatgcttgggacatttgtcctaaagcttaaacgaaacaaagtaggtctgcctcttactcaaggttccagcttaatggtaaaatggagaaaattcttctagtgcaatcgcaaacagatctagataggaaaatgcattggacgatgacatgttagtgacatgtagatggtatatttcaacttttgatttttcattttcacgacagtactgacaaatatggtcctaaaaaaatctgacatgtttggataagatcaagtgattcaagagttaccacttactgcccagattcctttattgatccaggcctcccctggagataaaccacattttgactcttgagcttctctaaagtagtgtcttgagatattggccaagtaaattccaagggttgtcaatttttgtgtatggatgggatctcaaattctttgtttggattttcgtgttgcaacttgcaagttatctagttgggatgttctgcaaggagcagatttggaagagtggattgtgtgattaagttttttcactatgtatggtagatatattttttgttgcatggcatgtttttcttatgattagctgtcttgttctatgaaatgtactctacattaatgagcttggtgcatgtagtgtaactgttgcgatcttgttttgcagattgcttggggaggcgaataggtcctagtttgctt

SEQ ID NO: 1880 - DNA, 1463 bp, Brachypodium distachyon
  Intron number 9 from transcript Bradi1g36240.1 (locus Brad i1g36240) derived from phytozome v7.0 (chr-ID Bd1; pos 318 99157 to 31900619 reverse strand)
tcgggttaggtcgaggcgtcgagccgacctcgggtttgacatttttgcaaacctagctttgatctatcacgtgttagtcctaaccaacctaaccaccttccttcttgagctgtcagtatatcactgcctcaccctcacttggttagcccaaggcaaagcaatccagatcaagcaacaagacaagaaattcaaaaaaagaaaaaagaaaaacaggccacacagaagtcagaaggacaacctgagcccatcaaaatctctcttcccacttcccagcctcccaggaggaacaggcggagaaagaagaatctcccagtctacgggaaccaccgggtccggcttcgcgcgagccctcgggtgcagccgtgaaggaacctccctggattccccacctcgcggctggtccgagccctccgtcgagctattctgcggaggggtttcttgatttgggtgcgtggtctcattccttgctgtgttcttcgtaaatttccttggtctcattcctgtttttctggtagcaggtaggctttgttaggttaagtttgcctgctttaggatctgtagtctagtgtagctgtcaaattgctcccaagaaccaagcttgttgtagctgcaaatgagtgcggcatttgggatgatattctatcgagtatcgagtaaacgtgacattgtgacatcgtggggactgagcggggctaatgtctagtcgcgactagtcggaagggcgggataggaagatcgtgccttgtgcgggagaacattgagcaaccacaaggatgaaatgttgtggaattggacaaaatgtagatgtcaacctggcctctttttttcgcaaactgcgagggtacatgcactttacatgctttatcatcactaccaagtgtgttttcttatcttgtttatgtgcagtatttcatcgtggctgaaaggttcaatgttgtatcgaatacatttgtcaataagggggcaatgccccactaccaactctagttcatttttatggacaaagttggccacggtgatggagctggaagacaatgccccactaccaattctagttcattttttggaccacagtggcctagctggcatataaccaaatgaacccaatgaaatcaaataaatccttcactaattcagcttttgtcttgcacatcaaacaaaggaaccgaaccaacgatctggttttctaatttcgccactggttggccaactatggacaagcaaaacctcaaccaatattttggcaaccaaatctttggcaagcaatttgtgggctcaaaccaaacaacccctaaatatgaggtttgtagtgcttatcttttacatgtactttactctgcttttatgtatattctactttttgaagtggaaactcaatataataagatgctttcttaataactcttctcgtctcctgtaaattcgcaggtgcgctaacccttttgacatactcctttttcaga

SEQ ID NO: 1881 - DNA, 8043 bp, Brachypodium distachyon
  Intron number 2 from transcript Bradi2g36560.1 (locus Brad i2g36560) derived from phytozome v7.0 (chr-ID Bd2; pos 368 77832 to 36885874)
gaagcccataagactaccatattgggatcatctaggtagatatctttgataccttctaagccaacatccaaattgtaacattataacaattttgggctttattttttccatgtggcttcattagactgagaggtgttgctatgccaagttttagttcattttgatgaaaattgaattttatggaattaaattagcaccaaagccacacataatcacagaagtttatatgaaatactatgaattaatgtctaaaacttgtattgggaacaaacaatattattatacacccaaaaatacaactgctataatttttgggaacgcagagaatataataggattataatagcgcattctgaaattattaccagttgcggatttcatacaactcaccgccactggtgagttggacaagatttgggaaatccctaagtcctgtagcactcaccagtggcgggtttcaggaaaatcaccgccactggtgccagcttccggtggcgggttcctctgacgtcaccgccacgggtggccttctgcgggctgccgaatattccactcgcttgtctcccatcagcttctgaatattccactcgcctgtctcttgtgctcctcgcctggcccgtgggcccggtacttgtactgttctttttgggctcggattacagccccgtgggcccggtctgctctggcctagtaggtagtaggctactcccgggttcgcctagctgggcccgaacccaaaacgctcagttgacccgggcaggcttaaaaactttttttttctcctttataaagaaaataacatgtaataaaattttaaaaaaaatccatatctcttaattgttttcgaaatcgaaacaagcaaataaaatatgcattcacagtagaaaaatattgcaaacaaatttacggcatttgttttcaaatttgaacaagttaagattcgaacctcgttagaattcaaattacattgaaaatcatcatcgaacaaatttacggcatttgtctggatcgtccgtcttgccacctcttcttcttgcctggtcgtgggatcggggaaactttcatagtcttgttgtgaagttacttcgtcgaccccaaaaatgctccttttacctctcctcacgactacgcagtttttcgctatcaggtcttctatgaagaagacttgtttgcatttggaagcaaactgacatggttcaagcagtgccgagattcttttgacgttcacctgatgacggggaacctcttttggcagaatcattgttgtgaacctatgatcttcatgcctgacatcgcgtgcccgtctgatgcgaaacatggcgatggtggtgaaggtgtagtcaagctcccagatctcttcaaccatgccgtagtacgcttcagtctggccttcactgtcggtccccgtctcagctacgagcactataccgctattttggtacgtactcttacggtcttgagccttggtgtagtacgtatacccattcattgcgtacgactggtatgtcacgacgtcgcggtcgggaagccgtgacaacttctagacaatcttctcatcttcattcgccgcagcccttggataccaaagatccttgtggcacatggtgaatgtagaattgtgttttcgttggatccaatcatcattcctcttagggttgaggtttcgaagttcttcgatgtgcatgtcgatgaacggctcgacctctggcgtgagttgcagcaccattgtgtgtgctcttataaaggcgtccattctttggcgggcatgcacatcaagatccttccgaccaagcccaccttcaccttctagcttccccttatgtcgtgattcggggacccctttgggtttgcggcccgccaaccaatcagtgcagaactcaacgcactcttctgcatgatagcctttcatgatgcttcctttgggacgccctctgttacgaacatatcgcttcagcacctcgttgtatcgttcggcccaaacatgttgtgcaggaacgatggccctaacaacaagatctcatcggcgatgtggaccatcagatggaccataatgtcgaagaacgttgggggaaagaacatctcacattcgcataatatctgtatcattgcgtccctcagttgcaggcaacggtccaccatgatggacttctggctgatcgtgtcgaagaagtcacagagcttcatgaccgtctctctcacccatggctccatgcagcctcttattgcaaccggaagtagctgcgtgagaatcacgtggcagtcatgagacttcatgccaaccagcttgtggctcttcatgtcaacgagttccttgcttcagtttgttgaactccttcatcctcaggcttagcactcccgcggggatatgggcggtgcggaaagcatcctggaacatctcccaagtgacatccttaatcgggttagtgattaggtagttctcccaccaaaatgcggctggtccctccaacaagtttgctggaaaccttactttctcagtgtttgtgcagcccacagtcactaagttcttgttcactgaacgcagccagtcatctgctaccatgggttcagtggaggtggtgaaagtaggtgggtgcaacttcagaaatcttgtaagcatatccacctgtggtggtgggttggggtgttggttattctggtcaatgttctggtggctggtcatctgctgggttatcaactggaaaaattgagttttggctgccagcagagtctgcatgttaactgaactgttgttaccttcctcatggttgtcactgttgctggtggtgtgtgatctgttgttgttggaggtacgtcttggaggcatctgtttaggatagcatagatgagaagatagacagatggggtctaaaagaagcttaacccaacaacaggcaagtaaggcataacaatcaccaaccaagtaagatccagcaagcaaatgacatagttcaggcatccaagcccaagaaaaaaggttttaaaagcaaacgaacaaagtttttgttatccaaaataatttactattattatttgtggccatcaataaatccaaaagtgacagctcacaaattacgtcaaccgtgactaagtttgatggtttcgatgtttgaaaaccttcaaagttggatgagagagtgaaagaactggacgaggatagaatatgagagttttcaaaaataattttagtttggtaaataggtacctaataaggtaattccaatctaagggtcacgaacctacaggcaacacaatgctctgataccatctgaagcgaccgccccgtacagggttcgatctctgtgcttactgtgctagtccctggatcgactcgctagcacacacagttttcaagatgtaatattaagatacaaaggtcaaaagtatattacatcgccttgatccagaatttagtagtaacttacatattgcataacctcatgggttatctcaaagaaaataaaatcttgcaacggaaagcagaagatgcaggagtcccataacaactccaaagtcgaaacatgttggaatgtaaactcgcaaccctaacatttcgtacctcactcttcacctggttcacctgcaacatttaaacgttgcagccactaggaggttaatacattgaatgtattggcaagttcaccaaagggttatagcagacctaacaagtatatgcattatttggcaaggtaggggtttggctatttgcataaaagcatcaacgtttcatcctatcatttttaaacaaatagttttatcactattggacacggggtagaaacacccatgctcctattaacctagagcacattgagtagatacatcaagtgctcctaccctgttcaaaccattcattttatttaagaaattggaatgagtgagactttccttacagcccccatatctagttgctcaaaattgtccgtaaccggggacacggctaagtacttagtttgacactctcgagaggttgtacacattccccacaaaaatcgtagtgttaatcccttgctgtcctcagggtagaatagcaacggcatcgattacaggaattttcagaccataatcacccagaccacccgagggacctacgttcccacctacatggctacatctgcacaatccctcggatccaggatcatatgtcttacatccatcctagcagagcccatattaccatgtggttgtactggaagctactaaataggaaaactagtccagcctctgataccccaggtggcattccacatttgcgacgcaagcgtcccccgaatccacggaagagacgtccatggacgatccattcccgaatccacgagaactcgactcagagggacccatagagatggagctgacgttgcataacatctcaaatcctcaaagccgtccacccatgatgattccttggggttgttttgccaagtttctaaaatgctccacatcatctgattcatggtaattgagattctctcacacgtatactaacatagcatagcaattcaactacttgcgatggcaattggtggaaatgtaatagcaggggcaatctatactactaggaattcatagctagcgtaaatatagtaatagtcctatccatgcaactaataaaacatctagtgcatagtaaaataataggtgaatgatcaaagtgaacttgcctttgtcacagttgtttgagttacactcttcacaacacacacgttgctctccggataatctaaacgaggcaaacatacacacatataaacacacaatccacatcacaacaaaagaaggtatgcggtgatgcaatgtaagcatgtgacatgatttggtttattttatttgggtgatcaactgatcctaaacattggtaattaaaacaattgcattagggtttttaaacaaaaggcaaaaacaattgattaaaaccctaaattatagtttcattggcatcagccaaataatttaattcaaaagttttatctctctgtcccaaatggacagaggacattaatataaaattttgggcactggtttcaattaaaaaggatttctaaataattagttatgaattaaatggcattaaacaccattctgtaaattgactgtggttaagttattcaaatttacatttaaacagtgccaaaagtttctactggttgagagatttccaaaaaggagtttgtcaaatttggccaaagtgtttaaaagttacaagcatttgaacttacaggggtgtttctgcaaaagtgccatttaattaaaccgggggattaaaattacattttctattttttctattgaagtgccacgtgtcagctcctcattggtcggtaccggttcgtttaaaattaaaacacgagatctaatctcggccgttgatcaagatccaacggacgagaggcatcgggctcacctctagcgacctagggttccagcgaggggctccggcggcggcagggagcggcggcaggtggttgcggtgaagcgggcggctcgaggaagcgggcgtcgggtgcggctcggcctggcgacgtcgatggcggtgggggcactccccggggacgtcggacgccatgcctaggacggctcgaacgcgacggcaggcggcggagccttcgggtccggtcgtcagggtgccgcggtggccaaaacgcgagatgcggcacgtcagtagatgcacggaggcgagggggagaggaagaagcaggcgcgggcggcgctcgacctgtgagcttgccggcggcgaccaatttgtgcggcggcgtccggtgagctccgacgaggaatcgcggcggcgtgggcgcaccgtcgaggcggcgagaagggggaaaagagagggggaagcatgggcttttaaaggatgcgggcgggcaatttcgggaaggccgaaatcaccggggacggcgatggcggcgagatcggcgcggcggcgaacatggcaggcgcgcgcgtgtgattccgggaagaagatgctgacagctgggccacacctgtcagtgtctcagcgcgcgcgtgtgcgggcgggcgactgggttggcagggctgcgggcgcgcgcgtggtgttgggccggttcggcccaattcggccgggccggtccgtttcccccttttttttctgttagccttttcttttttttcttctttcttatttctttgatatcttttgattttgaactccaaattgatccaaataaattccagaaaatttgtaaaatcatgttttatcatgattcaacttttgggaataatttcccctcaaaataaaatatatcaaaatacatttgccctataaattcctttagggctttataactatttaaataaaatagtttttcaactccaaataaatatccaaaaattatgggatagcttatttatgcaataaaccccttttttagttaaaccctattggtttgaatatccaaagctcaaatgggtgaaaccctagggtttaaaatgaaataaaacctttttaaagccttttgagattcaaatttgaattcaaatatgcaattgtggcatgatgctcatggatgcaatgcacatgtaagaatttgaaattttgggatgttacaataaagctcgtcccacgagccgacttcacccttcggcagactcgccagccatgtgcgagcgtgccccttgagttgcaactgcaagcactgcatagccgtgttcttcgtttctccctgcagtcgtaccatggtgatgtaatcttccaaccacgctcacggttcctgagatccgtcaaacttaatcgcactcgccgaaactgaaaagttgttgggcatcttcaaattgtgaacgcgacggctaaagcaggccgcgccgcaaggttcatcctcttcttctgtgatgcggtcagcacaggctgatcgctcacgatcgattctctgctgagtaataatgtcacgagcatctcctatcacgagggtgttgcggcggcgattaggctgttcttctagttcccttcgtggagtagtcgtgcgattattttgccggtgggcgccgtcgtccctatgccgccgggcctccgtctggttcgggttggggcccatgagggcattcccaatgaggcctaagccggccaagacttgcttgtgaattgctgccctcgggtcgtcatccggtggcatagtggataggaggtacgtgtttgtcaagccaatcttcgaagagctggaagatgggcgtttctcaagccaatcttcacgtgttttctttgtggtgatcagcatacgatagcaagaccgcacactaaacattcttctcaaagtgtcaggcccaaaaatcaccatagttgactatgctattacctagattagctggcgggctgtggcctgagaaagagctggtgggctatgaaaaaaataataaaaagctaaacgggccgtgccgtgctggcccgcgggctggaggttgaggcccaggcacggcccaagagggtcgcagcccggcacggcccgtttaaatccgtgccgggccaggcccgggccgggcacatcgtgcggcggggctttttcaagttgttcaagttacttccccctcgtcggtcgtcaccgtttcggcatgcacagccgcctcctccatttaaccccccaaaaaattatttctcaaaaaaaaaccccaaaaaattgcccatctacagtcccaaaccctagttctcggagaagaaggtggccgcagtgcctgagactgagaaggaggccatggcgatagtgcccgcggccaagaggcgcggatccggcggagcttcccagcgcaggccacggaaatgggcaccggaggatacctgcgacggcgaagacctcatcagcgacctccccgatgccatcctcgccaccatcgtctccctcctccccaccaacgacggtgcccacacgcagatcctcgcccgccggtggcgtcctctttggcacgccgcgcctctcaacctcgactccttgaacctccgccgccgcacattttcgacaaaaaggtacctcggcttaaaccaattcaagaccttctccgtcgtttccaggatcctcgccgaccaccctggccccgtccgccgct

SEQ ID NO: 1882 - DNA, 1034 bp, Brachypodium distachyon
  Intron number 3 from transcript Bradi1g71820.1 (locus Brad i1g71820) derived from phytozome v7.0 (chr-ID Bd1; pos 697 49317 to 69750350)
tgcctttcatctgcacagattttgtaagttccattccagaattctttgcatttttttgttacattagttgtatatatatgtcaatgtcactactttatgttcgtatagagactgcttagcaactgcatactctgattgtagtgaacagagttatttgggtctgatgaccatatatccacatcttgaaactaatatagcatggatatatattttggtgtactcatttttgtaatgtcaagtttatatagaaaaatgggccaaataccagtatgcctaaccattttaattgatttctggaaatgttgtattagcacatggcactatggaaatagtatgaacattttttcctgaaatgtaaacatttcattaccttatttctgacacataaggctaatttgttaacaaaggatagctataccactcttcagtggaatttaaaatgctgttactgaaatgccatctgcattttattaatgtcataagcaatgcctataagcctaaaaggcaatgcctcatctttcatgtcattcactcttgtctcatcaaaatctaaaattctcttctgtcagtacttttattttccgataatgggcaatatatcatgctgataccatcaactctaaacgaacagagcacagaaaaaaacagagaacattttgatcataggtaagcccacatatcaatgctggggtcatatttaaaaaaatatgtaaatggagtgtgttctttttactttaaattgattttagtccagacatttgagtcatggaatcatagagtgcattgttggggctggaatgtgaatgtcaaatgtgagatgtttgtagatgcaagggcatttgccttattatattgttatgaaataacttcaattattttgttacatcattacaagatatgcatcatgcacgggtaatttgttgtggtttatgtattttctggtatatatttggtagcatgtgggaatagtgattttagtctatactattcattctgcagatctgcgtacattctaaatcaggacagtttgcctt

SEQ ID NO: 1883 - DNA, 1405 bp, Brachypodium distachyon
  Intron number 2 from transcript Bradi1g71820.1 (locus Brad i1g71820) derived from phytozome v7.0 (chr-ID Bd1; pos 697 47742 to 69749146)
gacgagtgcatcgcggccctttgggggcgcaagaggtcagttatctgataccctgcagttgaaacagttccccctcttcttatttatatttgcaagagtggaaacatacaaacttctatacaaagggctgtgggctttagcgagccgtgctgtgaatttgcatgtagcaaagatggtgggcgactcatttggtgatgattcgagcaaatactccagttgacattggcgttacttagttaaatatacagacagtatctgagcaaacacttaccgggcaaaaagacagcagtatagcttttgaggaggtgcactttgatgtggaccagttagttgtattgtcataaaaaaattttgttgttcgctggcactgtgagttgaaagcaaagattgttgattttggtcaggacctgagctcaaccttttgcatttgcaacttgcaacaactatcagtgtggatatggtgctttcttttttgctagttttgattagattagtggtgtactgtttgcattggttcgtctaagaggagtttgtggacggctctttaagagagaaaaaaaaggaatctcctgctactttcagagtcacattcaaaggtaacaccgtggtaagtaggggtgttcaaaatcaggttgccaatcacctagttcatttgccttcagtaattggaacctcatctctgaagacagtaccaaaataaataaatgaataaatgaactgatggttttgaagggttgacgtagtcgttgcaccttttcctttcgtgaatagttatgaatggggatcaagaacttgtaattcagcagtaataagctgttaccatgtcaaaacaaatcagtaacctataatttgtagttctgtggtaatatgtcaaaaccgatctgtaatagttggttcctaacgttggacatccatagtccattgatactaggggaatattaagtggtgcagcttctgcatgatcaggagatattgtttgttggctaacccaaaataaggtcctaagaaccaccttatggcaatctgctaagttgtttggatgattttaggtctcaaaacttcatgggatactgcatagtacaaactagaacttgcaaacttcatttgcagagcactggttcacaaacttcacttgcagagcactgcaaactaaaactcacaaactttgcctcatgttttacaataactagaaaacaaataagaatctgtatatttgtaacgataacttatggttatgtcgttttgtatttgcttcttctcggagttataccacagaatatgtgttgttttctgttccgctgtctttcatgatatccttgtgcaacatcggtgtctgttttgataataacccaatattcttgttgcttcagaacagcaaggtggaggtcattattatctgggttaa

SEQ ID NO: 1884 - DNA, 5142 bp, Brachypodium distachyon
  Intron number 10 from transcript Bradi3g36490.2 (locus Bra di3g36490) derived from phytozome v7.0 (chr-ID Bd3; pos 38 835182 to 38840323 reverse strand)
gacgaatattttctgtaagtagaattttcttttcagctgcttagcatgtactacctgctgtatcttttgtaggttttaggtacaataagtatacgattgcccagtccttttgaccattttcactatttttggtaaatattaccaacagctatgcaaaataatcataattttaaagtagtttaaattgaatcagaatcagcactaacgattgttcttcaaatgtacatttatcttctctagagtagcttgaactaacaccccagtgaaaccctcaaaatttggtattttgttgccgtttctgagtctcactgcaaacatattttttctgttgaaaaacctacttgtaattattggaaacattatgatccttgtgatatcaagaattgctgatctgggaatatcagctgtacgagtttcactagttagtactgttcaggttttttttattttctttcattggccattttttttttcttgatcttccgtcctcaacatcaattggatgcctgcatccctttgatttttgaaacatgtttagtcatagaccctattttgaatttgctagcaccaaaatctcatagtggtgagtggtgacagcaacaaataatgtgtgctgatagttccccttcttgtactgatatttgaagtgtaattgaccttttgtaattagtggatttcttcctcctaaaaaatcatggatagcttttcagaccttcacttatttgtatcatgtttcccttgccatgttcgcagtacgggaggggcgatcatggccgtctaggctacggtaggaaggtgacaacgggtcacccaatggaagtgcccctaaacttgccaccgccgaagactagcgccggccctgacgggctatggcaggccaattttgtggcctgtggcgggcggcacacgctggccattgtgacatggactgatatgtaaccaccaggcagcatggtcgcttagtgtattaatcgaagttgaggttataataacggagaataagaacagatactttgcggagatacggaacgagcttctcctttggtggttgctgagttgggttgcctgcggtgtctgaatgaatcacatttcaggcttccatagaatgttctgattaccaaattttgccaagagttttctgtgagctgtgttctctctttggctgacatggccagctatttcgatatttggatcatctttactggagtctggggaaaaagattgtatgaacatgtgagctggcagatgagaacactgaaagttggaatgaacaaatggacatgaacatttgcctcacatggaagtggcaatatgtagacagtgaaatcttaaaagaaagactgatatttgagcaggcctaaaaaaaagagactgatatttgagcactgctttttctatgcaatagaagatacatgaatgcattgcatagaaatttatcaacttcgatactattgaatgatagaaaaagtcattgaaggaaaactgcaaaatatacaagaaaatcatacaatccaaagtggcgttcaacaattggtcctacgtgactactttgaggcgttttttccccttcaaaaggggcaagcaccaccagccttgcaatttgtctaagaaaaaacttactccctcggtctcatacaagtgactcaaatttgtacaaatatgagtctagatacatgtaatagaaagtcatttaatatgagacgtagtgaatacatgtcaaagacggtttagaattttgtttataccaatttacgtgcttgtcataagataacttattcactcatcttctatctcagcctctatctcagggactacagtctctacttctccagacgttctgtgagcgtagttcttgtccctgtgtgtattttctaacacacaacttgtgtgacaaggatgacaattgaggagttcaaaaaaaaaaaagatgacaattgagcacaagcgttcttccggaaactaaccccgataattcagggtttcttcggcaaaaatcccgtgcccagcggccccagccccggttgccgccgccgcaaccgttctcgccggggtccgggagcggtctcgcagttttcgcggtgcagtggtaatctgattctgaagctccaaacccaaaccctaaccgatatccacagtgagccctgcaatttgaccgtagcggcaatgtcgggatggtggccgccggtgtctcttgtccgccgatcagtcgctcttctccgatttcctatgctaccggatgccgcccgcttgccccggcctttacgacgccctcccctcgccgcgaaggtactgctaactggctctcaccatgtaacattccatcgacaagctcgtgtgcttcgaatctgcattggttgagcttatcccagcggatcctagtggtttcaacctagatttctccttgtatacttatgatcccaaatggtgtgtgatatttcatcggcgatgcgagctactccctccgtttcatgaaggttagaacggagggagtaattgtgtgggctactggttggaactaatagaatcatcccgaggtagacaaattataactacggagtataaaatttgaggataagagcttatggaactggattaatagctatggagtgttcagtttttcctgtaaatactgctgtagacacacctgcctcaaagacttgggcattaaaggggtggtgaagtttaaatgtttttttttctgcgggcaagtaccaatcagagacaccattgtcttcctgggctggtgtgaacgaacaacttcagtcctatcactagccagagtctcatccttgaaggatgcttgtttttgtggtagcacatactatggattcagtttttcaaggtgttagttgtggtcttggatttcatattcaactattttgttggtctttctctgtcaagttgctgtcattagtgttggcaagaataatgatgcaaaatggggtttgttggtggaactcctggaaactaaggcatgtatctgtaactcgtgttttaaaaatcagtctctttatatttgatacttcctgaaagaaatcatgagaatactgatcttcagatgaacatttccatgtttacctagatttcaagaagtaacatggtaaagttttgctgtgtattttgcttaagttttgctgtctatctcaagctttatagcgaaaccaatgtttttgtaccatcactgcaatcgctttgtaatatttgttggagtttgttgacataaaagaaaccacaaacattttcagttcatcactgtttgccacaagaagcagtgtcttaagttatgtcctcttttagatattcagtgctccctccatccaaaaatacaggactaatttgagaattgagggaactgagaaaaagattctcccgagaaggacgctgaagtctgagttttactcccgaggaaattccccactaggccaactgcagtgcagcattgagtagaggtgcaattaagaatcaatttggaaacgagtaatgtggacatatggacttgtgatgggagctcaagcatcaatttgtccttgtatatttggatttctcagattaggatctgtccttgtatttttggatggagggagtacccttataaggtaacgaaattcaaacgatgaactagcatttgctactctaactcttgtttgaacctggtagatggtcaatcgtaaagttgaaactgtccatcagacaagaaccaaattcactatgccccatcccatccttgtttctcgttcttggttttgtcaggtccaggctgtacatgataggtctgcacttggaatttgggagaagtggtgcacctcatatctaccaggctccccatagtatggtttacgatcaattataatattggtacaaaggctatatcgaaagccatgtgaacaataggctgaagcaacgtttgtttgacttttttaattccgcttatatttcttctctcatattagttgctcaccaagtaattcttaaaattgctctctaagttaatttttaaatttctcactaccaattcagaagtatttattagttaagttggtacctcaagacataagtaaactagatacctgcattgatgtacacgtgcagttctataaagataataattatgctatgttgcactggaggtaagtgaaccatttatatgtaattttccatgatcttattttcaatctgtcatagaaaccaaatatatatgttaaaagtttctttcttacaccagcctgagaggacaaagagcttctgctctatctagaagcatgagagtacgaaaataattgataagtctgaaatcaagttcccaaatcacaacatagtctacccctactaacagctaattttgaaactgcattcacatgcaattaaagctttaaaagtagcctttagagtacactactgcagaaggttccaatccacccaagtgcttaaattgtatgccaccgtgcagctaccctgcatgactgtgctctcaggagcttaggtaatgacactgtattttttgttcggtgatggaaccgtgtttagatgtgattcatcattaatttgttaggttcaggggtcaaatcattactaacttcaacaatgtctggttaaggaatagtgctaagagaaaggaattgtgaatggctcaatgcattacaaaaggtgttaggtgtatactttttcattgaggactgtctgtcactgctgcgccatcttttaaatctgattagtgagtagtgcatgaccatgcgaacagcattactccttctattggagcctttatatgactacatagatctcattgataccaattaccaaataagtagatcttgccatatgtatttcagtttgtttttggatcacagataatttggatataaaaccttctaaaagtaaatctgatcaggtgaacagtataataccattactcataaatgtgatttgatgaatcatgtgtattcttcagttaggaacttaaagaaatggggggcataatttttgcaggatttttactgtgatatggttggcaaaattgtgtgtcaaatcatccagtatctggttaacgaccaccctccactgtatgtgaactgaggaagttaagaaatatactgctattttttaacagattccctgaacatatctcagttccattaagagcta

SEQ ID NO: 1885 - DNA, 808 bp, Brachypodium distachyon
  Intron number 8 from transcript Bradi4g17380.1 (locus Brad i4g17380) derived from phytozome v7.0 (chr-ID Bd4; pos 185 45439 to 18546246)
gcttacattgcaaacactattattttcatactgaggtatccacattttcagcactcctggcaaaaatattgtcagatcttatgttttcctggctaagccagactatgcttttctttgggttggtatatatcttctttactttatgattttcttacatgtttattgccctcagtggggttgcaattgcagatggtgtactacaagataataaccactttcagaggcatggtattcatcttcctctttctcattctagaaaaaataatccaaagcattgtacttggtcattcaaaaatcaaaattctttatgtccgttgcctgctcaactttttcctttattattattattagatgatgatgcaccatttgttcgtagttttcatgatatagcattacatcatgtctttgctggtgtgataagttttctatatgtacatcacgataactagccatgactagttgtcaacacagtcattgtactaaatcttctaataacacactttttttgtcatgtttattgatttttgctgtcaaatggtttatctgctgaattgtgtaagcagtttctctgcaattgcagtcaacagatcacgtggataaacacatcttagttatcaaatagatctatttagatgtcttgttttaagctatatcttgggcagcacaattggtgtttggtatctttccatttttgtttcctacttttttttccaaatgactgcaaagatgtagcagggttccattaaagagaatcgttttttttaaacacaaaagctttgcgtctcgatgcattggtagaaagaaggtt

SEQ ID NO: 1886 - DNA, 1073 bp, Brachypodium distachyon
  Intron number 2 from transcript Bradi4g41090.1 (locus Brad i4g41090) derived from phytozome v7.0 (chr-ID Bd4; pos 453 01563 to 45302635 reverse strand)
tacctggatcttctccaggccgattacaccgaggggtaatattttcgtgcattttggttcctgtgttgcagtttgctatggatatgaaatagttggttatcgtagttgttttgccttcaatcgtgttgtgttgtttgagagaggcctgcatttgcaacgttggcttgttgtatgttcgattttgttagttaggacgaaacatattcacttagttccagcacatcatcgcttctacatctttatgcgaggaagttgtgcacacaagatccattgtacatgtggacaatggtagttgtgtgatccatgtgatgattgaatcgaactagtattgaattcagcttgtggacggtagggatgtgagagtggtatgctgaaaatgtcttgatccataatgaatctcaggggagctgagttatctcttctagcactagtggctgtgtcatgcagtttttgatgctatgcttggtctctgatcctttatttgactgctatttttaactgctttaacagattttgtactccatatacttgcactgcatgtagtagtatttaagcatttaactgaactgttggatgagggttgctattttcgcaccctattgctattctgtgcttttttttgtgtattttcttggggtacgaaatagttatgtactttgaatataccagtcttcgcaaaattatctgcatcagattagctatatctttctgtactctgcatggcatccgacaatgatattgtgtttctattaaatggacactaaaaaaataacagtgttgagtgtgactgagattcttgagttctgaaacactggagtcgatatcacgtagtgcagcaccctggacatctgtatctatgttttcccctgtaccaaagacctagatactgactattgaggctttaacttatgcacttagtctatatgcattccagttggcacatttgtttatttacctacacaggtcctttatggcttattttgatgattgttactgtcccaaatcctatttaaaacttgtatgtacagatttaattgtatccatcttttttatgatgtttaatgtttttaggg

SEQ ID NO: 1887 - DNA, 1667 bp, Brachypodium distachyon
  Intron number 2 from transcript Bradi3g55830.1 (locus Brad i3g55830) derived from phytozome v7.0 (chr-ID Bd3; pos 559 25812 to 55927478)
agccggttcgttcttaccccggcaccctcttcgtatgttgtgaattttaccgtccgtgttgatgatttggttggatcgtttaggttgcttgtgtcgatgattacgttattcccacagggggttcatgattgcttaatacataattgattcatcaatgatcacgcatcacgctgtaacccagtcgagaactgagggtcgctcagttggctagaggtccagcctactgttttcaaggcctggtataccaggcggtgcttatggttgtcctactaaaaaaaaatgccacaggtgctaggcctactgattgatttaggctttgattgtatagttgcatcgctgagtagattattggtgaattagatgagaaacttatgttacaaattaccgcgtagatgatttctgtctttttccatcgaggctcggtagaattatttcatttaggacgggaaggaaatgttacaaactagttgtgtgcattgagatggtagttacatgctatcagatcagtgagggtaagcttgcttgagtgcttcttcttcactaagtcgacttgcaaataatattggtgaatggtgacattgtggaacatatgcgtgaaagtttcagcacttcccctttcaacgcaacaaatatgtaatcaagtttcccccctgctctagacttctctgggagctgcaataagctctcttcagaaaattatttatatgactcctacatttgatatgtaagactgccatttttgtcctcagcactgaaaacatgcatggaaatggggttatggtcgctgtaaaaaatgtgagaaaccctcagaaaataagggaatagtcgaaacagtctgtttgaattcttcagagaaccagagaggacaaatatattctctcttagctggccatatgccaccagctattctttcttttttaatccctggccttagttactagttttttagtacatggcctgctgtttaggcattgatcctgttatttttgtttgcttccatcttacagttttgtctgttcatgaaagataaggaaatgtggtacgctcatgattgctactctccaggtcttttagtttggatcattatgaaacaaattagcatccatagattatccacgctatgcagaagaaagtttgttacaataacagctgatgaagtgatgaactgatgattgctgacggagatctctcggtggcgaagccagaattttgaccgtgtagctgcgtaaataataaaaatatttagggtcctttctacaatcttgtttcgatacgtaatttcgtattactcatgtggttccatttctaccgttttctgggttaaatgcagcctaactaacatgataatgtcctttttttgtcttccgtcaacgtaaatgtgtgtcatgtttcatattgttgtctgtttctaccgaagtcttgtattattatcgattatacggaggagctgaggcagatcactaattatagaatgtatatgcttgagaaaagtgcacttgcactgatcacacgtgggcattttaatctcttcaattcgtactcgtaaaggttcctagtttatttatgaacttcttttaaccgttatcttgtgcaagattgcacaggatgacaagggcgagtggtgtttctgtattaacaagtgttgttattcatttgcagagaaggaa

SEQ ID NO: 1888 - DNA, 1533 bp, Brachypodium distachyon
  Intron number 32 from transcript Bradi1g24950.1 (locus Bra di1g24950) derived from phytozome v7.0 (chr-ID Bd1; pos 20 169032 to 20170564 reverse strand)
ataacaagcaagacaagccgtagagaggttgaccagtaagtttagtaaatattagactcgtgaaattagtattgcacacctttctataatttacatttcacttgcagtgtgttctttatatcttagatgtgttgtgagccacacaatcaaggatcaattttgtattgaaaagtcgtaaaatcatcagtttaaaattctttcctaaaagttcctatgtctggcacatacaaaactacaaactgtcattttctttgacatcttttagcatgcaccagccgcttccttagttgaaagttaatatttagtcaagaaaagaattttggtcccttgtttgttaggcaggtaaagagtgttgaaaaatccatcattcttcctttaaaccgtgtggcgccacacacttaacgtggcactggtaatgctggcaacaaaccacttattctgagctagtgctattgcgcaagtttgcctcaaagccttgagactcgctaggctagtcacgactattcgcgaaactactctgagtctcacatcatggtttaacaactgaaagtgaaaaatagaagtactcatgggcagtatgaattagtgggaaatacgcaactactccctctgtcccataattcttgtcgctgttttagtaattatgggacggagggagtaaataattgttgtttttgttagaatgtacaaatgccccatgtataaacagctaaatggggtatgtattgcaccgttgccaagaattggcagttattcaaattcgacgtttccattgatagagaagattgagatttatgatccacttaatcatcatgggtgacgccttgttatatactccctccatcccatattaagtgactccaatttgcccaaatatggatgtatctatacctaagaagtgtctacattcatgtcatattttgtcacttaatatgggacggagggagtactagccaccatgttacatcagtgaatggtgtatccagaattgattatgctctctattttacttctgtaagagttatcttaaaagaagtaagcattgaaaacttacaaaagaggatgctcagttggcaaggtggtgttgagaccacccagcctgcgtgcgttcgaggcttgcctctgtgattattcaggtggattttttccccttggtgaccctaaaaaacttagttatcttggagcttattttagcagcatcagcatcattctgtgggttcttagttacgtgttaccataattgtgttgatcctcatattggtgcatgtagtttgagcttttcgtaataaattggcaagctacataacaaaacagaaaaatcccatggaaatgagtagttagactcgcatcttacgttaaatatgttgcagtcataaagtatattagaaatctgcagaaatatgattggtagtatgattttctttctagttttgtgcaacagttgctataacgtaacatctgatgcagccacaattttggtaaaattccatttctctaacagcctttgtaaaatcgcagaacgctcgagagaga

SEQ ID NO: 1889 - DNA, 4061 bp, Brachypodium distachyon
  Intron number 4 from transcript Bradi1g24850.1 (locus Brad i1g24850) derived from phytozome v7.0 (chr-ID Bd1; pos 200 98945 to 20103005 reverse strand)
caccagaattggtttgtgctcttttctttctaagcttttactttcctgcatgcctgttaattctagtaagtttggaggagaacattttgcagttgacaacatatatctacatgtattattcttattggaatgaagttagtcccgttaaaagtcaaaatctaaatgacattatgcttcatctatatttccaatgaaaggaaccttcctgcatattccgtttgatcaattcttgtctaattgatggaagaatggaggatggcaacccaggggtgaggcctgtagttatcacaagatattgcttaggtggggatgtctcttggttgatatcaacagaggtctggcagggaattttttttcacagatgggagagttttgctaactgttaaatagcgagctcatgtggtagccagagcctaggtggtccgacatgataaatgtgttactgattctccaaatcaactctgccacagcctgagacacagagagggaagtagattggtgccagtgtacatcttgcgtcgaattagctaggcaggaagctcattttcaatcatatgagtactaaaggccagtggtggagctacgaaggaattcatgggcgggccaggctaaaaaagaacacgaaatttttcttttcaagcaagggcaaaaggatcagttgttgctttcataggatcttcttcaactctacaatccaatcagtgccatgttatgaaattgacaaattgcaaactacagatttggggaaaaaaaacatactacttcaatagagaaattgaggaagaagagggcagcgggcagtggcagtctgctgggaggcggcgtgcggggcgagcgcggcggagaagcagcagccacgcgatggcaggtgcatggctgcgggcacgcgaggcggcggcaggcactggagcgagcagcggcggcgtgcagggcatgcgcgcggcagcggtagcagggcggcgggcacggcgaggcggcgcggggcagcgggcgcggtgagccggtgcagaccagtggggcgagcatcgacggcgtggagggtggccctgcctgcctgcttccgtccgttgtcctcgggggcgaaggtgccctagctaccggccatgtgagggcgacccaggcaggcagctgcacaaaggggagcaccggagcaggccgggcaatgggcatctgctgggctgggcctctgattagtagtatagacttcttttttgcaaaaaacctgggcgggccatggcccggtttggcttgtacatagctccgccggtgctaaaggccccgccactctaatgggctaacggattttgcggctggggacagttaaggttgattagggttatgaagtcagaattaaggggcattcctgacaacctctgcattttcattgtaacctacaaggtccctatgataaaaaaagataacggtccctatgataattttatagcgaactaggctgtgcattcattccaagtccatatcaccaccctaccattagtttatatgctaaatctcatgagaaaataggcaaaccccacaattcagcgtcattcagatgtatatggagatggcaaagatcaaaactcaactccaacaccgacagactgactttccttcatgaggggatatgaacataacacctaagcttttgctgcctccataatccatattgggagtataaacagctgcacactcaccacatagcactagagaaactagaggttcaggagaaggtctgattccagtttgggtgctcttgcatgatcttgatcaaggagacaatcaaagggcaaagggttaaaacacgtccgtatgcacgtccaatttgacccatgtgttcttggccccaagctctttgatttgcacttttggatttaggattggtttgttggagcgccatatatggggattttgttagtgtggtatgtagtgatttcagaactgtatatggatgcctagtttgagtcgtgaaactttgcatggatttactgatatttcaacttgttggaaactcagggatcaacatgtacgcccagttcctaaaatctatggtttgctatatagcttaaaactgatgaagacagaagcttgaactctttctttttctgaatctcatgcaatgtaacaagctatccaatagatggttccttcaccttcttactaagatctgcagttgatttgtgatgttctacaattgactccaatttcgtggcctatatttctcaattgttcagtgactactttctgcacaacaggatggatgtaacattctgtgcaattatgaataacactgaatgcacatacaaattccacctgctccaacacaccaccaccacaccagattgccgaaatccccatttgtctctcctccagcttgcgaccatgccagaaaatgagcgacatgacggcatgccacttgtccattcatcctcctcagttcctgtacttcaccgagatgggagtagggaggagctgcggggatcattttttggcatcagggcctgcaggggcacatgggaagagagggtgtggctacataatagatcgcgttagttactgtgggaccaggggcggagctacatagtccctccctggtgcacaggcaccaggttccaatttttttttattagcaattaggacaaaaagtaaccatgtgcaccaggttagatcaagaaaagtgcaccatgtcttgaaaattcatttcatttgcatacaacaatgcattattgtgcaccaggtcattcttttctctagctccgcccctgtgtgggaccaaggaaacgtatttaagtaaagagctcttttaagatgctccaacttacctaatagagtaataggtggtaagagcaccaaatcagtgtggactattaattcttgttcttgtaatagatgggaccagactattggcatatgcactattaaccggctaaagttggtcgccactccaccgtaaatatatccccagattatcctccacaaagctccaatctcaaatcccggttttcttaccctctgcctgccaatgagttcacataccaaatattttggctgttgctgatctttgccagcagccggccactatggcagctgagatgatgcctgtgtcagaattaattacgtctgtaactatccgatttgcaaatcacttttcaatttcttaaatcttctgtttgaaatttgcatatgtgttaatttcatttgtcttggcatgtgagaatatttaggcaaggatgagactgtttgatctttaattttgccgtgtgtagaagtcaactggaaatcatgattataagatttaaggcctataaatatgaatccataaaatgttatttccaaaaagatggcactagtgttagcatttgcttatcgtaaagaagttcaaggatatatgactcatgtcgctgtgcatatttgtttgtcacaagtcacacacacattgaatccaaccacttctcactcagtatggtagcattatgcagcaataatttttatcagtttgtacatttcaaatgtattatttccttttatgctatatatctggatataaaagcctaaaagccaatattacgtaacagtcataggaggtaacagttcactttttcaatatagtcctttggaatttggatcaaaagaaatttatggcacacaatagtttggcatcatcttaacatttctcttaagtaacaactaatcgtccaatggaatattttctcgaaaaggatccgacttcgatattttcttggtccttggtaggctaaacgttggagtaatcctagtgctaggtggcgttgctattgtaatacatttgccccggtctgcttttagtagtttagttggatgggaggcaatgttcttgctgctgatcctgcatccaaggtatgatttgaaagatttgaaagatgtgtttgttgtctaagagtgtagggttatggtcttacagaatgtttatgttgttggcaacgtggttaaaaccttgttttagtttcatatgttcagtagcatgcttgtggttcacagaatatttgctgtttggaagaatgacttcttttgttggttacagtttg

SEQ ID NO: 1890 - DNA, 586 bp, Brachypodium distachyon
  Intron number 1 from transcript Bradi3g56060.2 (locus Brad i3g56060) derived from phytozome v7.0 (chr-ID Bd3; pos 560 75010 to 56075595)
tcgtcgcccagggcaaggtcaagaagtatcgccaggtcagtcggtcggtcaatcgggcttccgttcccctccatttttcaatcctcctcctggagctagtttctgcagacattcgcctgtatatgctggaagaactgccaatcggttgaacagtagtaggaatgcttcacagacgcttgaattagttgctcctggtgatatatttttcttagaaaaatttcctggtggtaatttcacacttgattaacagtagttgtatactgcacacgctccccattgtaaaaaataaatctaaagaattactggtggtagttttacacctttagggcttgcctattgtccttcaggcgaaagtcgttctgacttctgacaccgattttgttacatgccctggcaatggcctgcttgcacaatgatttgggggagggaatgccttttaatctggcaattgcaactgcattgtgcaaaggactttgccctgcctgactattatagtactgtattgtggctttccatattgtgtagcatcacatgtgtgattctgtattttgtatgctcttttcctggttctgtgtaggtcatactg

SEQ ID NO: 1891 - DNA, 2182 bp, Brachypodium distachyon
  Intron number 1 from transcript Bradi4g34510.1 (locus Brad i4g34510) derived from phytozome v7.0 (chr-ID Bd4; pos 401 09508 to 40111689 reverse strand)
gtcctcggcgtcgcctggtcttgtgtcaccaacaggtgcgcgctcttgctcttcgatctcggcttcgttcttacatgtagtatgtaggtacaccactgcgagcactaggtgcggaagaagtaacaactgagatgacggagctgctaggtgccacgtagtgtttttgggttggctgagggacaacaaacgtacgttttgtttaattgatcatagataatggtaatcttattgccagatcatcttctgtctattttaattttttttagctaaccaacttttttctcggctcataagttttcggttttgctatatctaaatcccttgatttttagttagagataggttgatttttcagctgttggatgtgatttgtgctttaagatttgaaacggatgaagaaaaaagatggataaaataagatctagatattaatccaacaactctaattcatcaacttagatttaaaccttttacttaaaaatatatagccacagccaagttcattgtagctagaaacaagtccatgcacggtggtgcaattgtaaaaatctaatagcctttatttacagaaaaatctgctccctccgtccctttattaactgacgtggatttgtatagattccacgtcagttaatttgaaatggagagagtaattacctttgtctagggcctgtgagtggaaccctgccttttgtcatatggagaaaagtacaatccaacaaccgccacttagctataatatcgccgaccaaagtgagcatttgtagtaaagattgaccaatatgagcataatgcaaggaattcacggtgacggctgtaggttgtagctatcaaaatattttgtcatcctttttcatactccatatcgtgtcatattaattgtcacgactttgtgtagatatacgtgtatctagacgcgttttagtgtttagatacatgcgtatgtaaataaagttgcacacttaatatgagacggaaggagtatgagtttaactagattttgagtgaaccagtccggtttattggagttagaaagtcttagtttcaaaactctcagcagacacagtatttacaaaatatatgtccagcctacatcgaccttatgtccaaatcccaaggagtctagacgtgagagagtaacaagcagcaaagaggagtaacaagcagcaacaaccaaatgcaaaaataataatgtctcgacttaccattaagagatcgaagtatcataatctcgtttgtctgactatcttttacactctgtccaaaaaaacatgacaaatttgagggttgaagaaaccaaggaaaaaaattctcctatgaacgaaattgctgagagagaaatgcaattaagaatcaatttggaaaggagtaacttggacataaattgctgttatgggagctcaaggatcaatttgtccttatatattttgatttttcatattagtagatactccttccgatcaatattaattgtctcaaatttgttcaaatataaatgtatctattcataaaaaacgtctagatacatgtaatattccaacaattaatatgtatcggatggagtagttgtcttgtcacgatatttttttggatgaagaggacacctttaaagctaccgaacagttcgtggctatatttttctacatcaaaacgtacacacaccgttgaattctgtccctagtaattacactagttaatcaagtgagtaggtttcttaattgtattccaatcaagtcagggcggatatgtgctccatgtcaagtgttaaagcaagatgaggtgattcgcactataaatgatcattgaagcagaacaaataccatgttagtggaagggacgaataaataattaaacatactttgaggtaaagtagattgatttactaatagcatccggtgcattcggcgacgttagtgcaaccaaataaaaaaaaacacattgcgctagttggagtatagcccggtcgggaacattaggagaacaactttagtatgcagaattatcggcatggatcgagttcttttggtctgattcaaactgggagaatatatgtctggttgccataatctggtgacgatctttctagacacaatgatactatactgacattcccctgttatcaatttatcatgcatgcgtgcgtacaggtggcatatcgagacgccaagcatcatcgagggct

SEQ ID NO: 1892 - DNA, 7206 bp, Brachypodium distachyon
  Intron number 37 from transcript Bradi1g39310.1 (locus Bra di1g39310) derived from phytozome v7.0 (chr-ID Bd1; pos 35 988191 to 35995396)
gaattcagtcattattggtctcgtcaaaggtacagaagtatcttgatgaagtttggacactgattcttcaggcaacagctcttgatgcagctcctgtggagttcggcacggatgatgaagatgtgcatgcacatacatttattgctggatttagtatggtcaaactggaaagaagtgaatttcagtttctctggggactatcggtccttgtgctatttcatgcacggaaatcaatggtgaatagttctgtaaagatgaagcttgatcatagcaaagagaaaaagtttggggatattattttccatggactacataatccaagaccatgtgatcaggtcttacctgtgttattgtccctcacaactgaagtctttttcagcaaggatttcctttcagtggatatttgccaggaacttctccaggtcagtgcactctgctgttaccttaatgtttaacacctgtttccccatgttaacataagatatttgctgaaatttgtgactagaatccaaatgtaatgttaatgcgtacatacttgagaagtgcatttacaagctgtcacatatgattaggagtaaaatgcaccataggtcctaaaactatttggagtatgtcaagtgagtcctaattctatcaaagttcatatttggaccctaattctttgtaagttgttcatctgttgtcctaatcgagaccgagccgctgctgaccagccaggtggcaagttgactgccaccatgtaggccaagttctttgggcgggagttttcccgccattcctgtggtctggaactttgcagaaacccccttataaacaatggagactgcagttggcaaattttctctcattcttgtggaacaaggcctcacctagggctgagggcttatggattttgctggtctgtggtgtggcggctgctgttcttggggaggacgggagagagagcaggaagaaaaccctttgtctacttaatgggccttgggccagcatgggccaactatattcaacactcccactcaagatgggtgatatatatctatcattcccatcttgtcacatgcaagattgcaatccttagttcccaatccttttgttaggcaatctgcaagttgctgtcctgaacagacatgttctatctcgataattccagcatcaagcttctcctttataaagaatttgtcaatttcgatatgctttgttctgtcatgctgaacaggattatttgcaatacttagtgctgatttgttatcacaccacagatttaaacatccattcttcaaaatctttagctcactcaatagatgtctgacccatagcatttcactcaacccttgtgacatagctcgatattcagcctctgctattgacttggataccgctggctgtttcttgctcctccatgacactaaatttcctccaacaaagacacaatagcctgaggtagatcttctgtcatctaaaacagcttgccgaatctgcatcgctatagccatttatattcaagtgcccgttgcttctgaaccacaacccctttcctggtgttcccttcaaatatcttaagattctatgaacagcctccatatgtccactccttggttcatgcatatattgactcacgacacttacatcataagctatatctggccgtgtatgacagaggtacaataaccttccaaccaacttctgatatgactccttgtccactagttctccagattgagctgtcaccttatgattttgatcaatcggagttgatgcagctctacatcccaacatgcccatatcaccgagaagatctagtgtatacttcctttgcgatagagctattccctttgacgatctaaccacttctatgccaaggaaatatttaagttgtccaaggcccttgacctcgaaagtcttactcaagctcctcttcagtcttgttatctcagcttcatcgtctcccgtaatgattatatcatcgacatagacagctagaattgtaatcttctgctcggaatgcctgcagaacagtgtggtcccattgcattgaccatatcccatgtcacaaacagcctgcctgaatctatcaaaccatgctctaggcgattgcttcaaatcataaagagactttttcaatctgcatactttgtcggcagttccaaactctatgagaccaggtggtacctccatatagacttcctcctgcaagtccccatgcaagaatgcatttttggcatcaactagttgatgcaatgaccacccaaagttggccgcaaaagatattagaattctcactgtgttcatcttcgctacaggtgcaaaggtctcatcataatcgataccatacgtctggctataccctcttgccacaagtcttgccttgtatctttcaattttaccatcagaattctgctttaccgtgtgaatccatttacagtccactgccttctttccatctggaagatttgtcaactcccaggtcctattcttccttaaagcctctagctcttccctcattgctgcgcaccacttaggatcctgccgtgctactctccaatcagtgggagtggacactaattggagagaggctacaaatgctcgataagagggtgacaaggactcatatgacacataattgcttatatcattttcaaagccataccgttgcataccattgtataggtttgtttaccacagcacgtgtacccttcctcaaggtgatgggcaagtcctttgtcgtctctgaatcagttctggactctccagaaataccatcattgcctcgtgtctcattctgaacctctgcttgttgctccccctggatctgctgctctcccctggatctgctgctccccctgaactttccttcttgtatacactcgaagattttgttcctcgtgtggcctaggccaccttctctgcgcctcagctggtgccgtagagatagaatctggtgccacagagatacaaatgtgcatctctctgacggacaccaacatcggtaaccctgctggccagatggatacccaatgaagatgcattttacagccctcggatccaactttcccactgatggcctgtgatccctgacaaaacaaatgcatccaaatagtctcgggggtactacaaatttgttctcccccaacagcatttcacaaggagacttcatacccaatactcttgatggttgatcaaatatgtagcggtcatcacagcttcactccaaaggaattttggaacattcatggtgaacatcaatgaccgagctacctctagtatgtgtctattttttctctctgctacaccattctgaggcggagtgtctggatatgatgtctggtgtagaatcccatgctctgacaagaaggtcccaaagacttggttcacatattcagtaccgttatcggtctgtatcacttgcacctgcaccttgaactgattcttcacataggcataattttttttgaaacattggaagacttcatcctggtgcttcattagataaatccaagtcatgcgtgagtaacagtcaataaaggtcacaaagtacttcatgttgctaatagacacaacaggacatgtccacacatctgaatgaacaagcatgaaaggtgtgatgctcctcaatcccttactcacataagacaccctggtgtgctttgcccactcacaggcatcacacttcaacttattcttatccactcctttcatcatatcaggaaacaccttgtacatcttctcaaatgatatatgccccattctacagtggtgtgtcattgctgttgtttccttttctccaaacgttgctactaacatcgagttgtccatctggccgagtccctcacaatccatgtaccacaatcctctatgtctggttccagtcccaatcttctagcctgtcacaccatctcggatcacacatctagctctattcagaagtatctcgcagtcctgctggtctataagagcactcaatgacacaaggttcacgggaaatgcagggatgtacaagactgaagacaatctgattttttgtctacatttcactgatccaatccctttgataggccgagcagtgccatcagcagtttgtatcgtttcctcgtgtgtgggagaatatgaactatatagttcaaactcctttgaatttccagttacgtgtttagatgccccagagtctaacactcactctgaattggtgccatgaacagctacggatgccctttcagcaacaacttcacttgcatacaaacaaacttgtttgtcctcctcactgacttgcttgatctcatcctgcaagaacgatgctttgtccatcttcattaccatcatctggagcttctccaacagctgcctacatttcttttctccacagccactgcatgccacaacctccaatatctctgcaactaacgacaacacttgtagattcttcgtgttgacattcgctcccattgaatgcgatctctgaacttccatcaatttcccttcaatcttctcctccttcccagttgcagccactgcctccacttccttgacctggagcagctcaaccacgcccctctgtttcttcccggcagcctcatcatgccatgtctggaccttccccctgcattccatctcctgcactgtccttgccctcgctgcctcgagagagtccttggcagaataaaggggcgtgcactgcaccatctcctcctccacgctgctagttacggtcacccttgctgcgccgctgtacatcacctcaccactgcgccatgcttccttgctgcttggcgccgcccccgcgcctgcacactcgtccgcacctcgtcctgtgcctcccagcgccgccgctgcagcctgcacgcgccgacaagacccatactggctgcaccagactcacgcacaggaaatcgtgggggtcgcctcaggaaccggcgccgccggtggctctgataccatgtggaacaaggcctcacctagggctgagggcttatggattttggtggtctgtggtgtggcggctgctgttcttggggaggacgggagagagagcaggaagaaaaccctttgtctacttaatgggccttgggccagcatgggccaactatattcaacacttctctttctttctcccgctgcttgagcagctcacgccgccgcccctagcctcatcgctggcccccttcaaagctcgccgaagtggcaaccctagaatcgcccgccatgtcaccactgctccgagcggggtggggagaaccggggaaaggaccgcgaaatgagtaaacggaaattttgggcctattttcaattttcagtgacccggcagttagccagcatggcagtcaacttgccacctgttcggtcagcagcggctcaggctcgattgggaccacgcgtgaacaacttacaaagaattagggcccaaatatgcactttgatagaattaggactcacttgacacaccccgaatggtgttaggacctgcggtgcattttactctataattagcttgatggctctttagtttaattgctctaaaagtatatctctgtcaaccttgaattagtcgagcctataaatatccatgcaattcttagtgctagggaacaacattggtcattgtatgcttaactagtagggagtatgatattacaagtgtttaccaggatgaatttttaggccaaatcaagtcatatttttctaatcactggtgaatcatcctctatgttgtcatgattcttgataactgtttttgtgtttttgagaactattaaatcgttgagttcttccttaactatagttcatctttaacacttgttctactgcacctttcctataaataaattggaatccacaacaattgtgcattgaaaagatttgactaaattaaaattgcttgatggttcatactagatgttccattctacaatttgtgaggagaaacataaatatttaattttaaatatccatggtaaccattgttaatgtgaggaaatatgcaacctgtatttcctggaagccaagggccagtataaatatgcaggaaaccccttatacaatgggtaaaatacatagtaaatacatggaaaatatatacaactcttaacacctcgcgtcctcgcccccctccctctcaaactcatggtgggtcagcagcactgcgtttttggtgtatgtagcttcttcgaatgccttttttggtgttgctctccattgccacgtgtcaggccgcatacatgtgcttgatcaccgccgataatcggctggaagacatgggaaatcaaggcatgcacgacaagatttcaatgatgacgtcgaggtctagttggcagcagtcttactaaagacagatctgatcgaagaagacttgatagtggattcccctagcgttgcccctaggagatcatactagatcgaatccactctcaggtgcacttgattagtgtccactagagttttctagtagggtaaagttcatgcctgcattaaaatttgagtgattacaaacccttatgttttacaaggaaaattattcgaagaggtgcgtggctgcaagttgagccagctaggatcaagttagctaccaaataaagtcggatatagagattttttttttacggaaagatactagtttagttaggaagttaaaatgggatcagtttttttaggaacttaatccctgggaagtattgttacacactgttagttgattgaggaaatgaagtctgtagtatgtcttcactctcaacacctacttcagtgaggttgagtagttgcagtataccaatatatcattctggaaagatatctatgcttggtgtaatatcaatatgtaactattcccagatttggtacgtcgcttgtctgtatgcatgtcgacttaacatatattgtgaaacagaagtcattactcctgtggattattgagccaatatgcaggagtgcaagtacaagtacacataaatctaggaacaaaacatgggactaaatataatagcacagctagagcctacagcttaacattatgtactcattatttaacacaagtatttcaatgctcaactgtaatactcactatgccatctgaagagtgattaccatctagactttcatagaataccaagacatgtgtaactgttctattttgttgtatgtttggcttcatgaattgtgttgtacccttctcaagactatccttacattgacaatttgtggtaatgcaggttctcacat

SEQ ID NO: 1893 - DNA, 1014 bp, Brachypodium distachyon
  Intron number 1 from transcript Bradi4g08880.1 (locus Brad i4g08880) derived from phytozome v7.0 (chr-ID Bd4; pos 802 5571 to 8026584)
aggtgcaatactcgtgggtggcacagtacttcttgtttgtctcccgttgttcagttgcattccgaaatggttgttacctgaaggaattggcagtgatggttgttaatctcaagtgaccgctaggttgcccgccgtgtttaggttatttctttttcaatgaaatagtttcttgtagatttctaataactaatttaatgctaatcatcattattcattagagaagaattacatgattgaaattatcaatatatttatctttcggataaatatgtcatactgaaccactaagtagtggggatctgatagaatctcctgatggacacttatttattgaaatagtctagtttaggtgcaccaggagccaaaaggattagagtaatttttttgtggttacaaatgaaagttcttaatcaataattgataagcacctggaatagtactttctagtcatcagacgataaggtcccctttaaagagggttaggtaaatctagtggaatgaagtgtcagaaaatatactcgacttgattgacgatgtaaatgcattctcatgagacttggagtgattcagggcttcatgttgtaacagacgaatacagtcatattttttctctgtaaacgggaatgtggtgttgtgtttgctgatatctagtattttgctggagcatctataatctaacagttaggtgtattcccttcgaacggactattctaagtatgaattcccaaccatttttatacatatctttgacgttgtgccataaagaaatgttttatttagcttctattccttacgtatctttcgtgttcacagtaattcagtagttgtcaacttattatttgtttatgtcattgcaacaattctggtgatttttttctgtcattgcatcattaggtgaaattaatttacatcatatgataaagtataatttgccaaccaataattgcaatgtttttttttcccttttgtccttgaccaggtccgaatccacaaatttctagagaagacaaagaa

SEQ ID NO: 1894 - DNA, 8889 bp, Brachypodium distachyon
  Intron number 2 from transcript Bradi2g11560.1 (locus Brad i2g11560) derived from phytozome v7.0 (chr-ID Bd2; pos 984 1994 to 9850882)
cggtatctccggaaaaatcttgcagtatgttcctcatacttctcacttcctgataattgctcagaatgacaattttctataaggttgggcataatgcatatcatgttgggggcaattttcacttcacagtttgagaaaaaaattgcaatagctagcaccgagcgtcggtttaccatgcttatgagtaaattgcattggggatatgatacaacaacttttttttttagataaaaggcttttcgccctgttccatttccatagaaacgaaacaatattttgtccagtttaagctccggttgcaagcaccaagtgctgaactgcagaaactcgaaagagtaaagtctaccacccacacataagaggaaaaaataggaactacttgtcgctagtttgcccccagctcgattatctcttgcatcagtacatcttcagagtacccttggacctccagaaggttgagtgttccaggctccatcacatctgtttggcgtttctgagcctccgttgctttgcattccattactagcagacattggtcccagatcaggttgtctctctttgggcaaagtggttgccagcgctttaataagcgaagtaatttcatccataggacctgtatattcaaccagatatgtcggccaaacagaagatcgttatgaaatttccagattgtccaagtaaaagcagaagtaatcatattcacaacaccatttcgtttattgcacagccaataagtggccaaatgttgataggatgtaatagcaggtttctgaatgatgtccactaaatcctgtagaattgttttcgctaccacacactcaaaaaagaggtggtgaatcgattctagctcattacagaaaagacatgttttgtcatttaattcctgtcttttacccagattgtctctagtgagtaatctattgttgcttaacagccataagaacatatggattttcgggggaatggtgatgttccacaaagctggcacataaacaggggacacacctctgaagttaactacaacatacagagattgtgaagaataaataccagaggtattaagcttccagaacatttggtctttctctgtggtgaattcaacgctagtcaagatctgagaaagaagttcccattgttccagcaacctaggtccaaaattccttctaaaagacaatttaatctctatcccatcccaaacagcatctagagttgctagtttttcattacaaatgacatataagtcccataattgtatagccaggctagagcctccaaaccactgatcttcccaaaaacgaatggatttaccatcacctacaatccattggtatcctagttgggcagcatagctggcccacattataccttcccaaaaagtagatcccacctctgtcacaggcaaagatattggggtttgaaacatcatatttaaaatcaacaatttgtttccatagtctattggagtcaaggttatatctatgaatccaggaagcaagcaaagaaacattaaggtctcttaagttagggattccaaggcccccatattctttttttgtggccatcatttcccaatttgccagatgatacttgaagtgtccttcatagttgtcccatagacagtgtgccatttgagagtttatgggctggatggcccaacttgggaatttaataaaagacaataggtaaataggaatacttgctaaacaagccctaatcaacacaagtctccctccataggagagcaacctacccctccaaccagctactgttttaatgaccttatcaaccacaggttgaaggtcctctttcctcaatttactatgatgtaaaggaaccccaagataagtaatgggaagttcacttgtcttacaaccaaatacttgagagagtgagttgatttccatctcctctagactcataggaattaagtcagatttatgatagttaattttcatcccagagatctgttcatatagggtgagtatccatttcaaattctgtgcaatcagcatatcatttttgagaaaaattaaggtgtcatgtgcatattgcaggctaataatgccaccagggcagaaagtagatagaaggccagtaaccagggaatggtcagctgcttttctgagcatcctagtgaacacatcagcaacaaggttgaacaggagaggggatagggggtctccctgtctcaaacctttaccagttacaaagtaactactttcagcatcattcaatctaattccaatggagcctccatgagttagggtttttaatttagttctccaattcaggctaaagcctctttgcaaaagcatctggtctaaaaaatcccagttgactcgatcataagccttctcatagtccagtttgagtaggataaccttttcattttcatgaataatttcatgaataatttcatgtgctgtgaccacgctatctagaatatatcttccttttataaatgcagtttgattaatggaaattaacctatctgcgcagcaccccatcttggtggtgcaagccttagcaaagattttaaagctgcaatttgtgagggctatgggcctgaactttttgagggaagttgcatcaggttccttgggagttaatgtaagcatagcaaaatttaacctataaaggtcagtattattattatcaaaatctttaaacagattcaaaagatcacacttgatagtgtcccagaacttctgatagaataagaaaggaaatccatcaggtcctggggcaacttcagcataagatgagaaaacagctgctttaatctcttccttagtgaaaatctggtccaggtaattattttcctcttctgtcatcaagtcttctggtctccaaaattcattatcaagattgatgttcattctagtcttgctaccaaaaaggtttttgtaaaagtccactcaatctgcagcatggaaggggtatcatgaactagaccagtaggtccctctagtgaaacaatctttttttcttctcctttgatttgcaacagcatgaaaataagctgtgtttttgtccccttctagtatatctttttctctagctctttgtctagctttaatttcctccattgcccaaatcttattaagttcagacctaatggccttcaatctttcctgctcttctaagagcaaaggttgggattcagataatatatctagacaatcatattctgcaatcagggatttcttatgctttttttgtgcagcttcaatgttcatactccagtctttaagtagttttcttaaccttctgattttgaactgccaaatatccatagcattttgataggggcagggaaggttccaactattagtaattagctctacacaactttcaatttctaaccaccacttctcaaatctaaagattttcttggatgggggggtggccccaccacaatccaaccaaagagtgtgatcactgccaagtctggcaagggtggagaggagggaggagggaaaatgagcttcccaacaggcagagacaattttttttatcaatggccgccataataggtgtgtcttgattgttagaccaagtgaatcttctatttgtaggttttaattccattagagcagctgcattaacccagttgttgaacttatcagcccaagactggttaatgtttctagaactcttctcagctgctagtctaatgaggttaaagtcaccacccactaaaatgggtatggaacaagaggcacagatggagttaagttcatctaagaagtcttgtttaagttcctcataggcagggccataaacagccacaaacctccaacaaaaattatcaattttattcctaatatcacaagagatgtaaaaacaaccagagtttttaccagaaatggcaaatatatccaggtcaacacccatcagaattccaccagcagtcccaacagcagggagatggtgccagcagaaattgccatagttgactaaactgtccaagaaagatggactaaagtccattttcttggtttctgataaagcaagtatagcaggatgatgaactctgatgagttcagaaacttttttaaccttaatggggtcattcggacccctaacattccatataaggaactgcatcttgaaaatttgaaaggaattttttgctttgcaacttctatccttttttagcttaaatgagacatgaaccacatcatcctgctcatggtcatgctcattatcactaatacgggaagcataattatctaaaagagaatcagattcataatcatgttgttcaagtatatcatctagagtgacatcaatatcagtaggtagaaaaatagaaggttcatcactagcaagttgttgtaacctagcatgcttgttttgtttcagttgatcaatctgtttatgaatagcattaggtgttgatcccaaacagatattaagttttttagcagtagaagctaattcagaattgcaaatattagcaaaagagtgtttgaatttacctttataggaaggcttctccaagttcttctgagaaatgatatcttgagctctgctgagaatagatttcccatcctgagctatcttgcactttgtctagttggcactactagcccccaccttttctttttgtttttcttcttgtttgcctcagctggtgtaggaaattcaaccttgtcaactgtttcaatggtgttatccatctccatttcagtattcagttcctcccccagaatggtctgaatagtctcagtttcagttggtgcctcagtactttgcaaggtagcatcagatgcaactgtcaacttgtgagtatctgtcaggttctcctcaagaggttgcatacagggattgtcctctatttccacagggatatgttcatcatcagaatcaagaagacttgcagaagctaacacatgaaaactattcattgaaccagcttttggaggtgtagagtgtgaggctcctagaggaggtttatgagaggtttgtttctcctgattctgttgctttgagtctttgttctttgtcagatcttgtagctcatcttccataagattatcttcttcataatcctcatcctcatcatagtctctgtcatctaaagccataaccttgtccatatctactccatcccattccattgttaatttcaggagatagaactttttcctaatgaccaccatcctctcagatggaatttttgctggattcctcacagccagtttgactctcacagttttgtacatagacttgaagatttcattccaatctacatcaagcagcagtccaaaggactttgaaatctgtgtaataactttccatgtgcatcttttaggaggaatcccctcaatctgcacccaaacctcagtaagttcacccatatcagtgagatctccatcccatggtaagattttgatagttactctatccttatcagccccttcagttaagttgattgaaggtaagtcaatcaggtcttccactttcttgcttggtgggaacctgaccaggaagcttttctcttcaagctatctgagttgccatggccaattgttatcccaagtttcagtcattcttgccactagatctttttctgagatgtctccatgcataacagcaatgataccacagttcttcatgttcagccatttattggattctttatcatcaatgcttatgtgaaagaatcccagtccaccattggcactccccacaaattgtgccattggaatctcctttccccaagctggacagttgtccatatgatgcccggagttactacaaatgaagcaaatcttaggttttacacaattccccacatagtgtcccgggccaccacaattgtagcagatcaggtccttgtgtcttggatccaaaggttggatacggtcctcccccaatttttgtttgccaaatcgaccaccttgctatgagatgttctgttgaagctgttgttgttgcacacctattggtttagctggttgttcctgtgtctgtctagtattgtcgttcagctgggtctgtttgtcctgtactgcagattgttgagcttgagcagttggagcaggcataacccctgacccctgcagctgttgaaccagttgcgatccctgtgtattgtggtttggaagtcggtagtcagccaggctctgtcccaattggcttgtctgaacaccttgcacttggttctgttgctgtaactgagtagattgaggatggagctggaattgcatttgctcttaaatgtgtcatctgagctgtttgaggtggaaccacttgttggccctgcaacggcccttgcggtgagaagttaaactgttgtggtggctgcccttgcccaagagtctgatggaacacaggaaattgtgctccgaattgctggccgaaacgaaattgctgttgagggaattgctgaccataggagaattgtagcggctgaccaattgtctgctgtgtaacatttggagagatagctgcgcctgattccccatctgcgcttgttgaaactgaagaggaatctgctggttctgcgattgcgcctggattgaactttgcggctgttgtgtctgagattgtagggactccgtcatctgtccttgcgggagttgagggtgattctgttgcatgctcttctcctgattctgtacctgtgcctgaggttgagaagggggcggcgcttgctgagctcgattgtactgataggggttgcgaaatccccccttcttctgaaatctacggcctcttcctccccgggttcctccttgatttccaccacgaccactttccatcggatttctacgaagaatgtccgcgaaagtcgcgtgaccgtggattcggctccagaaatccttggcaaagcggaaggtcttcggcacgcaagcgaagcgatccgagtgtcgtgcaacgaagcagtctgcagcggtgaaagttttcgctacaaacaggtctcgccggatccagacgagagtggtggcggacgagggatcctggtctagaaccctagatgaggttcgctctgcagggagggcccaaagctgcccatagtattcctccagagctttgtcctcaccacgtgctgggtccctgtcgtcagccgccctccttctccacgaggggcgagtggtggggatgccgccaggtgtcgaggatctgggctcccgtgtttcaaaattggagtcgcgccttggggagagctctcgaacagccggggaatcgccctgtgcctgcggcgggatgcgagaagcatcgccggcggtgagggagggaatctcgtcggtggtagcggccggaaaaaggtggtaggtgggggcgggggtgggagcgagagctcctgggagagacatattccctttaggaaccatttggcgcggcggattcttccttaattcgattacccggcgagcgttcacgacgccacgtatgctgggtcaagtcatggaacttaacatatgcttgttttggtggcacaacttgatcactgggtgcagtcttcgtcaattaggcaccacctaaactagttcagcttactcagcatcctaagtgtcaagtatcaagtgcatgcctcttggcattgtgcaaaatatcacctcctcaacttttctctatcctcccccttttctgcaccttcaatctcctgcgagaggggttaatactgaggatggtggcgtaagtggacaattgtccaaggcggtctgtatccttcccatttcccgcaccctcatctcgtgcgactggggctaacactaatgatgtcggcctaagtggacaatcgtccaagatggtggcctttgctcaccaatctcctgtgagacgcttacagcaccaactccaagtgatgccttttctgcactccaagtgttccaactcataagtctgacgtgagaggtcagaagcgcacatgaggtcgttttcggagagaacaccggaccatggttgatcctggttacaaactcagccctgccgcagataagtagaacctaataagtagccttactttgcatgtgtctcacatgtcatggtggtgttgtagccgaggtcgcagatgtgaggcagcagtgagttgactttgtagaggagggtgcggctcgcctggtccgtaggtaagtttgcttttcgagagcgtaaagcaatctaacctccatcagttgccgatccttggtgtcgccgtgtcggcagccaagtgttctccatctataaggccactgcctgttcatttttgtccattttcacaagaatgtgacatggagggaacagggaggaggaagaaaatgttatggctaggtgcaatggagtacttgctaaattccaacaggccaacaaatagcacttgactcaacagatccttgctaagcaagattagcccaggtggcatcctattggctttttatgcacatactaatcaagttttgtgatgaagcaattgacgtttttttaacttatcagcaactatcaagttcaatgaattgattgcagctaccgcactattagttgtacctgcagtgcaagttactttttattgatttttagatactttgttttgtatacctgtatcttcaggtctccccacttataatattatactattaattttctgcaactgcttttgcaagatgatggtgctcttttattgatgtgtttggatggtcgttgggtagtggtacaactagcagtcctccgtcttgagaaaactaagcagcactgtgttattgccttactggaactgcatcatgctctggaacttgctatttattgtttatgaaatggaaactagtcttaacacaacttgttaaaaacacgccccccccccttatatttaaataattaacgtgaaaatttcgatgatcttactttgtacggtgtacacaatgttttgcagttatatccataccatcttgctgactatat

SEQ ID NO: 1895 - DNA, 3316 bp, Brachypodium distachyon
  Intron number 1 from transcript Bradi5g09290.1 (locus Brad i5g09290) derived from phytozome v7.0 (chr-ID Bd5; pos 125 19239 to 12522554)
gaagcggcctccggtgccggcgccggcctcccgtggtacgcacccgcgcatacttcctttcgttctcgttaatttgtgccttgtttacgcgtatgcttgggcagttttgctggtttctatcatctatgtggtgctgtggtgcgatgtgatcggcgatttgcttggtgccttggttgctttcgtccttggttctcggttccgcgggtatggctggatttgctcgtgcgtgcatgtgctacacggttagcggcgtgatttgcgaggctgttcgatgataggtccacctctgctcgtggcttccggctgcgtcgcggtacctccacacctcgtgccttcagctagaatagaagccttactgtcacgcccgttccggtagtcagttctcacttctcgaccagtagcaaaactcaacttcttgtttcaaattcgtcacttttctccgggacaagaaatctcttcaccaagcaatttgtttgcatattagtacagctatataaatacaaaatagatgatgaaaccgtcctggattccctgtaaaatatgtacttgcatcccggaggaataaaataattgggtactttcctatgacccaataagggatattgcttttctagatgacgatgacccaataaggtacttgcgtcaatctgtggcttcattctagatgataatgacccagtaaggattttatttttctttagagaatgattccgtggtatcacaaaaaagaaagaatgctttgattattcaagagcctgcggaaattactgaaagaatatttatgtattattggtcagaactcccgctgttagatttatgggagtattagtattctttgcacatcaaacccccgctgtcatgatcttctgtccccagatggagtaggtgttaatatatagcaacaaactatttatctcaaaagacctatttaatagaaagagaagatatcgtacacttaacagtaaagaccgacttgattgtttgttgaagtgatgaacgttagcttgaaagtgacactccaatatgatatgcagttttatatcttttgaaatggaatgatcaacacctcctctcatacccgacatgagtgtgaataaatgaatagggaatgtggggacagagacttgaacccaagacctcaagcatagtactccctccgtcccataatatgaggtacgcacgcatgcttagatccttaatttgatcaattaaatatccatgtttcttaacaaaaagtacattattagatttgttaccgaaagaactttctaatgatatgattttttaattatttaatttatatttagttagctaaattaatgatctaggaatacgtgcgtgcctcatgttatgggacggagggagtaccatcttaagatataagatacaactcgtgagcctgaggagttattcggcctgtcgtttctccatggaggcgtgtctgcaatttttttctcgatgtggatgggtttcctggcagcaggacgaggacggttgcatgggtgttgattggccactgcttgtgggccggtgtcgttcccttgggccccgcgtgagtgtgtgcgtgtggggtgcgtgcgagttggccggcgggtttctgggcggtttgtggggggcggtggcctaggtgttgtttatatttggtcgctgcctgtgggccggcgttgggccactgtcagtgtggtggtgcgtgcgggctggcgggctggcggtgtcatgggcggtttgcgggatgaagtggtcgagcatgcacgtcggtacgtatcccgtgacacgtgcgctggctgcgtagagctttccagaataggtgtgctggcagttccgggtcggtaaggtttgttcttgtctcttcttctcgtagctacaaactatctatcccataaaaccgattagataggaaaagttgatatggtacacttaacaatagggaccgagttgatttttgacgaagtgttgaatgttggcttgaaagtgacactccacgatgatatgtagttgtatatcttttgctttcagcttcttggctgataaatatgcacctggtgtaattatttttatttaggaacttttcagctgtggtgatgctttcagatttactaatctgcaaatgtttagaatattttcccttgttagaatattcaaagttacttacccctcctgctttcaatgctcatatttatttaccatccaatctttcttttttcgaaaaggttatagaatttcatatactgcaacatttctttccctgtcggttgtactgtagaagtttgcttgaaaaggtatctcccttttcaattttgcatcccaaatttcctgcaaaagtagctttgtgttgtttcccagggggagaaaagaattccgtttctcgataaaagagtcgccgaagtgttcgttgagtgtgtttcttgactaacatagatggctcatgaggaggggctgcctgagcttgcaagggagttatatacctggtgtactacagagatagacatattattttatttttattgatgatagcgaagtgctacttgtaagtcataggaagcgatcacgtgctaacttttgtacctttcttcgttcaataaaaaattgttgggatttaagcccttctattcagaaaaaaaaatagcatatagctggatccataaagtacacgttgaagatcagatcttgatttgttttttatggcatatcaaagtttcaaatctctgttatttatttctatgtgggtaataggatcgagttgacggtcgaggaacgtactcttgaaaatgacagtacaaaatgccttttttttttgtctttggctttatctccttggctgatagatgcaacttgcatacttaattgcttcttcggaccttaatctgtacgtatcagaccttttagtttactttttttttcttccgaaacggttcagtaggctatggcttcagatttaatctgccaagtaatgtttgggagaatttaccttggtagaatggtttcagacgaacgcctggtgcgctattatgtcaagatgatctatcaatgataattaaaatggcaatgataatcgatcaaattggtcaagatcggtccaatatcttctatatggaaaacgctgatgtcacgttagacctgtaacaatccttgtagaattttttgccgttccaacttggtgcatgttcaaatcctccatctcttatttgggtcaaaggctaagtggaaacggtctcttgcgccagaataccttctgccagtatttaaacagagtggagatgtttaaattgcgaggacaaagtaccgagatcagtgtttatcgtgtcatttcacaggt

SEQ ID NO: 1896 - DNA, 1482 bp, Brachypodium distachyon
  Intron number 1 from transcript Bradi1g47560.1 (locus Brad i1g47560) derived from phytozome v7.0 (chr-ID Bd1; pos 462 08627 to 46210108 reverse strand)
cttggtgaggattctattatggccatccatatgtattcggtgcagcattgtattggattggattcagagaagaagtattgtgattaagtgggatttttaaaagttgcccgcatgtttatgtttttgccttttgattccagaagggtggatggagagagaatccctgtcttctaggagtatcttaaactgaaactgcttagaatttggtcaatcagaagtttcaactggagatagaagctctaaatattttgttattttgccatgatagtgaagctagatattgtgttgtactccctctgttccataattattgtcaaaatattacatgtatctggacgcattttagggatatacatgcatttttgggcaaatttgagacaagaattatggcttacattcaacagcaactaaaattcatgtgtaaacatcatgcactcttggtagtttcttgcaggtggtaggctataatttcatattaaggctgttttgttttcatgttagaaacattgcctctctgcactgtcgtgttatgatttgagcctcacttgctttacatgtggcaatgctttagtttatggaaatagaatagcatcgggattttcttctgttttttattattcgaaaaaggaaagccggacaagaatttaggggacatgttcatctagcttagggacttaaatggacagaatgttatatttgtaactgttaggagttgaatatgttccacaagactgggccatttaggtgttggctgcaaggatggataaggcagttgatatcaatggtaaagaagtaaataatgaggcagtgaattgtagaacatctggcacagccagaacccaaaggtgttcaaggaatggtctccttcctcttgtgcggtggtccacgccatcgctgaggacctcctgctctggcgctggcgttgctctcgctcgcatgcctgccctaggcggtcgctttttttcggtgctcccttttctgtatgaactcctttgccttgggccccttttataattgatatcgttcagttgggccttcctcccctatggtgctttaaaaaaagatccatgaaggttttgtttgtagatcctctttctgcaactttctttacattatagatcaatctatatcatatatgtccttagtacttactttcaagtctttttagtttcctagtaaaattaattgttgccccacacttcattagtttccagtacattttgcttgaactacagttttgtttccagttgattttgtgcatttattattatttatgcaccttggtatagtagtttaggattcctgtttgttgggcctgttcctgtctgcgcagcactcctatgtttcaaatggcagctggaattattttatgctagtgcattcagatcctattgtgtacaagattgttatctgtcaataattgatgacacaataatggaacttacagctggggaagaaagagctcgtgaaattttgagcaga

SEQ ID NO: 1897 - DNA, 2403 bp, Brachypodium distachyon
  Intron number 2 from transcript Bradi2g50070.1 (locus Brad i2g50070) derived from phytozome v7.0 (chr-ID Bd2; pos 500 27680 to 50030082 reverse strand)
tgccgactcctgctactgccgtgttccacgatcaggtagtacaagttgctatgagtagcttgctgaaggaaagtttcaatctctatgccaactttgtggaattaatctatcctgtgaggaaacctgtggtcgtgttttctaggccacgaaggtgcgcttgctagatttccaaggagttaggcttcatggttgagtgtgaatgtgtgattgttagatttctctgtattttgtgtgcttttagttagttgtacttgtatatatggtctgacctgcacgcaactttgcagtcatttggtctggatttgtgcatttcttatgaacatactccttgtgcatcgatatggggctctctaccatgatcagtttattagaatcagcaatattcagttttgaattgacatggaaatccgtaattgttgtgcatatcaatctaggtgtgttcagtccagaaataaagttaagggctttaatactcacatcagcctatcttgctaatggaagattggaagagatcagttgccacatcttctgataagttcagtacatatgttttcatgtgcatgagctagcctgccttgtttgatttctgtttgttgccaaaggtgctaattggatgccatccagggaagataagtataatgggtgattagaatccacatatattttagtctcagataatcactatatgctcagtaattaaatattttcattatataacacaaatagagtcatgcagcctgcagactgtggcataagtctggtcctatgttctgtgcaccatttggtgtgactgcagcctccaggtggctgaaacatttgtgtctggcataaaagtgaactcagggacatgcttgtttgtatctcaaaagaaactattctttgctgttcctggatgttgattaaggaactggtcaggaattgcagttctagagttaagaaactacctgatatcctcaatggttgcttcttgtagttgggatctatatcttggtcaggtaagatgatttataatgtactttactcgctgtacaaagacacggggaaaaaaacaaaggcctcctgatggtgtacatgaatactttgattttgtattggaatggcatacttatgtcattaccttcttcattataattagatctaaaatcatccattagttcagctgattactagtgtatttggtggggtatgagcaattagtttttttaagccgattcattgtcatttggagaagacaatggaagccttattttcttgttctttcttatggtgcacatggatgatttgtttttatttttaagttaagatatcacctattttggttcctttttcttcatgtttctgtacctcctgggcattatgaaatggtcatgtgatactcctgctgatgtttttcttcttttgccgtgtactgctctgtactaaatttttgcaacagcatgcatgcaataagcacagacacagctcaaagtttttgtagaactagtggtggtagctatttcattttgttagggatagaaagaggcctgcaaaccaataacaaagagaaggtctacaagggacacgaagacagggaccgtcctcagcccttgagcaacattgggcctacagctgctgcctctagtaggcaatcaaaatcaaatcaccatcaggctacatttcagaggcaaaggtgcctgccgccttcctgctttctgcctcctcacttatgcactctgtaagatcttgcacggaaggtttcctttcttaaaaaatccttcaatttttttctgtccaaatctcccagattgtgaggatcgccatactttccatttttggacctcctttgtatgcttcttagttttgctagcatcatgaaccacaagaggatcgaagccggctactcccagtcccagatgttcagattgaaaccagatttaaaaccacatgaagtacacaaaggccttctgatggcttcctgatgtggttgtatggttgcgattttgtttgtacttgtcacaccacacattcttatctctctgcctggagtagtcaggattttactactgctaccggctccgtgatgtaaatgaccacacagtcttgtctctctgccctggaattagtcaggactgtgctacttctacctacaggcatagaacagcgagtgcctggaaaaggggtcatccctaagatcatcaagccatcttccattgtggagaatagcttcttgctacatcaaatctgtgtacgctcggtgccaggtccttggggcctttgccatgcgacctatgttcattcctgaagctgtctgtgtcgccatcaatgttgcttcttgatttttatctttgtgtcacttgcatttcttgagtttttattttgactgaattgagctaattttaacaagctttcgccatctccttccag

SEQ ID NO: 1898 - DNA, 1635 bp, Brachypodium distachyon
  Intron number 10 from transcript Bradi3g37080.2 (locus Bra di3g37080) derived from phytozome v7.0 (chr-ID Bd3; pos 39 414727 to 39416361 reverse strand)
aggagctgttgcaggcatcttgaaggtttcatttggtcagcttagttttttcttgtgctgacttgtgtatgttattctgcaaaataacatttaaagagaaatatattctttaaagtatgcttaatgccacttagatcttgtttggctcccaccatttgggcctggaatcctggaattcattttggattctaagaagtaagaacaaacttttagctggcacacagaattgggtataggaattcaatccgaaattccgtggaatcgcacctatacctaaccccaattcttctcttaaacgcattattcatctggatttgcctctcattttacatatccatgtgacaacaaacatgatttttgaatccgaaattcaaattcaatcaaatgatatcctgtaaaaaatttgaaatcatttcatttctaccaaatgaaatgaaatgaaggctgccaaccaagttgttagagttcacgtgccactgaaatgatctggttgttttgtttttcttttcagtccggaagttcagcatttttctctgttgtgaatttaaaactaaatttctatcccctgcaaaaaaaaactaaatttctaggatatgatgacttcttccaaggcaatgcgaaaatgggaattccaacagcttattatgtgattatcagatgtactttatggcttaggttacatacatttcagttctaaagagaaccagtggggaagctagagcagagaactattgggttcagctttactgcttagggtgtaatcttgcactaacaaataatggataagctaatttaatgaaggattcggtgaaatttattgggttcacctgcacccattgcttatacaccagcgtcgcccctgaagagaacgtggcatcacgtttcatcaagggtgcaaagtttctagggaactacataaaacaactagaactgtatcggttagcagtagagatatactatttgagtagtgtttctatgctcttcgcaaaactaccacagatcttaaagcactatgattggttatggagcatttggtgcttgcaatttgccagtcagacggtcgagtttttgaagagcttcacattttgcagagcatgaagcactacccgttaaccgtggtgcttgcagcatctccacaatctttgataattgtacattttataaatttttagaatcataacttttttttggaacgaaaagaatcataactcactggattcttgttctaccttcctagttccatgaattttgtagtgtgctgaacttttatgtttatggaggattttctaatagaatatattcctgaccgatgtaaagaatctgatccctgtcattcttggtcaaccttactagttccatgaatttgtagcgtgctgaagttttatgtttatggaggattttctaatagaatatactcctgaccgatgtaaagaatctgatccctgtcattcttggtcaaccttactagttccatgaattttgtagcgtgctgaacttttatgtttatgagattttctaatagaatatactccagaccgatgtaaagaatctgatccctgtcattgttactctacatgaactagatgagaaccatcttcctgatatgttgtccatttgttacagattttgtcctcc

SEQ ID NO: 1899 - DNA, 3312 bp, Brachypodium distachyon
  Intron number 7 from transcript Bradi2g14990.1 (locus Brad i2g14990) derived from phytozome v7.0 (chr-ID Bd2; pos 134 45610 to 13448921 reverse strand)
aagagtaagtttattaccttgttgattgttcatggagatctttgaatattgctaaaatgttaatttgtgtactaggttactgatgtctatactgtatatttctttgtaacacaaccattttacttactcacatctaatacctgtgtgtgtcttactgttctacaatttctccccatctcttggtttagatgttacctgtttttgtagtttacatgatcaacattttggtaatttatataaggtatatcctattcttctgcttcatgttttccctttgctactattttgagtgtggaatgtagtagaattgattggcactctatgtatcgtctctattttgagagtggaatgtggcacatgctttctgtttgtggagtactcttgctaggtcaggatcttataacatttatgttatctctgttcatgcgtgtctagcaatactttgcatggctgtatcatttttttgtatctttggaggaacattaactcccatggtattctctgtaaatgaaaaatcatggtcatcactaagcatccgtgcctgtatactcttgttcatttgtctagtttttagtatccataatctataccaatatattaatttggagttggtgatgttacggttgccgccgtaggttaacttcgttaaaactacaatcaatatgccactgattgttattttcttttcctccagtttttttcacgatttctcctactccgtcttacaaccaacgccaccacacccgcatgccgacctcaacggcgccatgatttgcctacacagaaaataaaaataaatagtttgtgattttgttgacccgtagcaacgtgcgggcgcacctgctagttattattttacagatttgctacctcttagctagctgaattttattaaactctagtcagtttttttgcccgtcaattcattatctgcatgaatcttgttgtgtctgacccgcgtgctgtgtttttgctgccatggctaacctgcggcgcgggctatttttttgttacgtggcgtttcactttttgggccctaatttttggatttgggtctgtgtgctgtttgcttttttcttttcttatttttgtgttcaccgtccgcgtgtgtctggatggttacgagtgtttcgtctgaaagagatatggctagaaagctcgagacggggcagagccataggcaaagcggagcttttcaggccccatggcgggagggggcgctgcttggaggaatggggcggtgacttcccatctgtccgggggtggtgtgtttcctaggtgaacccctgtggttggcatggtgagagtgaatggcaagtgtttgcttggtttgtgtttcctgtccccagatgttagtttttactctgctgctttttttatgggttgtgtgtgctgctatagctctgctgtttgttgcttgagaaggggtgggaggtgcgcttcattgttgcttctacggtggtggaatggtgggtatgtgctaaccacttgtagatttatgagcaccctctgcttgcgcagcaagctaatggagtggtggggggaacaagactggtgcactgagccagggatgttgtgcttttgtttagtggatttccatccctggagttagggagttgtctgtgggccgggagctttgtgtttttgtattggttggcgaagagggctagcagttggggagggggaagccaggtttactggatgacattagataagtacaatgcattgtgtagtagtcttctgttatttttttaagacaagtttgagtgaagagaaagtaaagcacaatacagcgttcttgttttgtcgcgcctctatacaagtgtattcctttatttagttgatcgataatatagatagataatatttcagttagtttcagaaagtattttctgccagttcctgagcaccttattgtttgtttcagaaagctagtagtatgtcaggtcagtttgatagatttctttgtcctgagcatactattgtgatatatattatttttccagcccatgactgtaaggtcaaggattttttttgtttttgctagtgcagggttcgttattatcagtattctgtcacttcattactgtcagttttttattagctgtactaaactctccacaagtctcagctaaaactaggatcaaaacttaggggtcgtatcgtacctgtccatcatcttatctcatttcagtttcagttttaccaaattcacagatagggtttgacgttcagtttgaatttatccttcaggttcactttaagtttaagttttttcagtttcacaccatgcctaactgtctattatatatcttagtaagttttagtttcaggctcagtttgatttttagttccagtttaagtattttgttagtattctcaggcctaacctgatttcttattgtcagttttgctctttttttttctttttcattcatcagtttagccattattgtcagtatccgtatctgcattagttaattgtcagtatcagttagtttagatgtactcttcatttcagccttgccattattctcagtctccgtatgagcgttggttaagtaattttttaacctgatttcttagtctcggtgtattttcggtgtgttttaattgtctgagaaatatacatggcaggtagttacttctctgtttaacagatttttttagtatcagccatgttcggtaccaccctgttaggtcattgttgtaggcttattttatgcctcagtttttgacttattttcttttcgatttatcatctttttactatcagccatgtcttaatatatgtctcagtccattagtcgtcatgccttagtcttagattttatcatcttgtagtcattttcttgtacctcagttttggtattcattttcttgtagtcattttgattctcagttcatgtcagggtttttgagcttatattttcatagtagcagctgcagatgagtctcgttgtagtgtcaatatagccttggctgtttagtttagtgttattacatgagcagattttgagtaacttaccggttgtaataatcaaaatatgctatgtctgtcctaggtaatgattcagtgaaactatgaaatctagaatgctttttagtgatgtgcataccataagtactcgtactggtactgagtagtgaagctacgtctcctaagtttgtcagcggttttctgaatttctaagaagtttttaatttgtatgcttttgttctgagaattgtcaaatcaatgctactctttgctaagcagctctgtatattcttccagatagacattcagagacggtaacctaacaactactg

SEQ ID NO: 1900 - DNA, 14152 bp, Brachypodium distachyon
  Intron number 1 from transcript Bradi2g59120.1 (locus Brad i2g59120) derived from phytozome v7.0 (chr-ID Bd2; pos 568 65915 to 56880066)
gccggcaagctctacgagtactcctcctccttaaggtgcgtctccgccctttctgatctgccaattgctccaattactcttctgtatatgctcgaattattcgctccagtaggtaggatcgatttgcctcgatcccaatgtttaaaatccgttcttcccttcgattctggcaatggctgcactaggctgctctgcgcgcgcacgccacatgctcgagagaaccccccagaggcacacggcatgccaccaccttgcatggccctgtttaggatcttggtccctatagtctctgcacgcttctagtaccagcaccatcaccgtgcccgagatgagcttggttgagatggtgttttacttcctcgtggcttcgtcgtggttccgcgcagcgcgctcaggcttgctaatggcgcgccgcgccgcgccggagtcgcggacgttctttctggtactgttccgcactgtattggactagtggtagcataggagacgagactggaggagcgcgcgcctgtgcgtggggtttggtttgatcccagcgcgtagccccatgttgattataagttaatttctttttgtcatccccttgagagtgggagagggatacggttttcacggttccccgaatctcaagcaggatcagaaaaggctgcaaaccgtgcacaagtgtctcctggtcctggctactagcgtcgtgttcaagttccgagcagagaacgatgtgtgcattttaaaatttgagtctaaacgcgttgttaatgctccacccccagttgtatccaaagaaacacaagtggtcaaaaagttgctgtgacctgtgaggtttggccgggactccccgacagaaatattttaaaggtgtgtctgtatgcatggttgtgatctgtaagcaaaagctttaaatctcgttccttcggaacatccgataaaaaatctttcaatctcaatcaacgcatcagagccgttggattaagatctggatgtcattcaaactttctcatcttccacgtgttactattggattaagatccaatggatccaatggacaatcacgtcgacttatctctaattaaaaaacaggcaccttctccttagcaaaaccgatattctaatccatcgcgattaacgtcaaattgataagaaaaaacctaaagcttactatgagacagtggagtccacaaagcaagtacttgctacaaaagcctaaacagttcttgcgggagtaacggttccttccacttttctctctcctcttcatgtcatcagaaagctcttgaggcatggtcttcttaacaagtgatgtgtactattggagatatcgtaaggaagaaaaagagatagcctatcttcattgaaacaactattgtggaggaagccaagatacttctgttttttctctttcacaaaatgtatcaagtgatgtctgttttagacaatagcaagagcaactccaacgagttcaacatccgcaaaagcaaaatggctcccataaaccatgtgccaattattgttttggtttggcaaatccctgagctagttcaacatggccgtatagcaatggttgagttggttctcctctcctgcgtcatctcgaaactttcaaggtgagcccattcttttctctttaccctgctcgccataacgccacccgtcgcaaggttttgctgttgggctagacatgcggctggattcgcttgtcgtcgccttgtggagctcgaagatgaggtttggtggttggaggtgtcgttggttgtggtttcacgggggaaggggtgatcaacgattttgtcagccgacaaggcggagaaggaagagcaagaagaggtggttcgcaggtggaggcatagcaggaggtggcggtggctgtcaacgatggctgtcgggggatgaccccgggtagggtcatggcgacacaactctaaccgagatgacggaggcaaagccggcatagttgtatatgccggcatcgtaaagtcaaaactaacactaaaccgtcatcccgggcgtatgccggcatgactattttgtcttatgagtttgcaggataaggatgagcaccttgatggccgagatctctcgacggtcttatcctgaccacacggtgcaaagtaaagcagagccatcatcatctcagaaaagcagtcagcgcctgcgtaccggcgtcaggcgactgtagagaggaagcaccgaaagagaatctctgacggaagccggcagaggatagcggtactttctgcagggagacagggaaaagtaaagttgtcttgtcccctgcggtgctaccgggagggaatcaagtcgcgtgcccggcggggcccaaggaagatggcgttagacttggcccgcatgtcagtgtgacatgggcggcctataaatagaaccttacccctctgtaagaaaggaggacggtgcacttagacaactagggtttccccttcttcttcttcctcaagaatacagctcaaggaacgccattgttgagcttgtctatctcggctaatacaacaaagcaggagtaggagtcttacctcagcaagagggctccaaacctgggtagatccgtgtgtgcttgtgtgatttgtgcgtgtttcccttcacatcctccctcctccggttcctccttcgtccatcgcccccaagttaagccatcctacggcatctgccgtggcaccaccacgacaatggcgacagagtagaaggcgacgactgtgatatttgacgaggagatgtgtcgcgccgagagacggcagacaggaagtcaatggaggtggtggcccaatgcatgcagtctatgcttcccaacattccaaggaaatctcttgccgctcccttagcatgtaatctagcagtatcttcaccagttggagatttcaggcactcatccccaaatgcttcaacaataactctcaccaacattttaaaactatagtacaaagtccaccatcctctggtactccgtaagttaacattctaaatgccgaggtaatatttcacaaagaagatttacaaggtgtccaacaccatcctaatatgaaaaatttatagacatatgttggaagtagggccgtaggcatgagtctttgacaagtgatcttggtgtagcctagcatgcccaacttctcttccacgattaagtacctgttgtccaggcacagaaccgcgtgagcgttgagtattcccaaggtcatattggatgcctactttgcgagtttcttctaaaatgagttcgtcgtcttcatcataatgacaacaactgactccagagataatctctcacatcccaacggtagaggaagaataaggtgaatgacttcgcgttggaagaacaatcaagtgaatgagcttgcatatagacactataagtatagttgttaggaatggttgttagttgtggttatgtggagatcaaccgtctctaatataatctctcacatcccaacggtagaagaagaataaggtgaatgacttcgcgttggaggaacaatcaagtgaatgagcttgcatatagacactataagtatagttgttaggaatggctgttagttgtggttatgtggagatcaaccgtctctgattattttgccacataattgagcagtgggcccaaccagtcaattttcttggcaaaggcctcaaatagttgtggttatgtggaaacaaatcgattgtgtgtttcaaacgactattctgaagattctccgcatctttgtatcatctaagcttgtattgtatccacaccaaccttgttccttcaaagtgtagacttaagacttgtcacaagatctaaataggatggatgcatctcttcaaactcgacattacttgtcgtttgattcatgatccactaaacctaccaacatgtaacatttaagactacataacctatcaatattgaaaatgtgactttaatcacccaacatggcatatatgtttgttacaatattcataatcgtttgacatgaatccaatagatggtactacattcaagaaattaccattatgtcctactatttgttaggacctaataatgcgttgaatcgtccatgagccagttatttagtagagtttgatcgtacaaccttaaccaattgatcgaaattttaagactccgttctttaactcccacaatcttgtttgagcatgggtctgtctcaagctactatcaatttccacatggccagcaaattgtctccagcgaagcataattctatacattgcaaaagtattctagaaatatttcactacagtttgaagtatttattaaacttaagtattactccctccgtccctaaattcttatcgtggttttagttgaaatttgatagttatgaatgcaaagaatactattactaagtgacttgtcttgctcaaaatcatattcacatgggacacataaaatggctgatttaagaagtagcaataatatggtatgcatgtatattagtgaggcacagacaaaaaatattagggtttgtttgtatatgaagagaataacgttaaatgcaacatttatgtaagggttaattggatctatgccactctctattccaccggttggagatatgccattacaaaaacttgactttgagaaatgccactcaaactttcttatacctctatcaatgccattctgtccacttaagaccaataagtgttcataaaatacatgtatttcctcatgtacaacagtatttaccataatacccctatttacaacgttcaacggtacgttcgagtcttccaggcgccataaaggttcaaaaaaaattcaaatttggcccaaaattcaatcttctcagaaaaatctataaaaattatagaaaataaaaaacagtaatatgagtccactgttggggacgggatctgaggaacgcgtggggaataagaggaataaaactgtttgagttgggatggaattttttttgttcatatagagctatgtctatacgtatttagacagtatacatgctggtattggacaaaatggcatgaatagaggtataaaaaagttaagagtggcatttttccagctcaagtttttgtaatgtcatatctccaaccggtggaatagagtggcatagatccaattaaccctttatgtaatgccctgattgattactaggaagtggtcgattaccgcccaatcagccttattcatagtttcgtgaagattgttgcgaagctgcttgctaatagattggcaccgttgctgaacgacttggtctctgtcaatcaaagtgcttttattaaaagaaggtgcatccatgacgatttatgcacgtccagaatcacatcagggagctccattcggcgcatgttccttccattttcctcaagcttgatatatcaaaagcttttgattcgattagttggccttacctcttggaatgcttagaagcactttgttttggtcaaaaatggagggattggatctacgtgctgtttgcttcctcgtcctcccgcgttcttttgaatggcaagccgggacctccctttcagcatgctctcgggctgcgacggggagatccactcttgaagcttgccttggattgtggggttctacgagctttcgataattttgccgcttctctcagggtatctctttatgcggatgctgctgcaatttcgcgcacccggatgctttttgaagatcttcggagatccttctggtctccacatcaatttggaaaaaacccacctcttaacaaagcgatgtgagaacatggatattgatcctcttcctcattcctttccggcaatcttgagctccttcccatgcaaatatcttggcttgccgctgcatttgaggacgccaagaagagtcgacttccaacctcttctcaacaaggtggctgggaggcttcggggatggacgtcgaagatgctgttgccagcgaggaggcttactctggtgaaatccagttcatattctatctccacctaccacctgactgttttcaacttacctaaatgggtggacaaatggctggataaaatcagaggggctttcttatgaaaggtgaacaacgatgatttcaattgcaaaggaaaagctctggttaattggaagacggtttgtcagcctaaggatcttggcggcttgggaatctctgacattgaacgctttggtcgggccttgtgtatgcgttggccttggttggagtggaaggcacccaaccggccttgggttgggtccaagctcccctgcgatgacaaagacttggagttcttcagagcttcaactcgtgtgaccttgggcaatggggagaaagctttattttggcatgatagttggttcaacgccacaaacctcaaatccatcttccctaatctttttaaagtagccactcgtaaaaagaggactattcaaaaggagctgcgccaagataactggattcgcgcgcttgtcagaatttccaccttcgagcagcttgttgagttcgcttgcctcgctgagattattgatggcagtcagctgcaacctcttgtggcagacataatctcatggaagtggacagctaagggagaatacatggcggcttcaacttatcaagcgcagtttgcaggaacttttctaggttttttgatgcctccaaaatctagaaggcgcgtgcggagcctaagtgcaaattcttcgcgtggaccatgctccatggaaaaattctcacggcggatgatcttgcggcaagaggatgggagcacgagttatgtatgctttgcaaaaaggcacctgagaccatcgaccacctgtgcagaatctgtcctttcaccaggaaggtctgggatttggtgaggcgctggtttggcgatcccccggccagtattgaagtcacctcatccgtcgacgaacggtgggagaaggatagagccttgcacaatgaaaccacaagtcttgacttcgacggcctgatcatttgtacatgtcggagcgtgtggaaggagataaacgtcgaatttttcagcaccaagacagagatgaggaggatgttgcttttagttgtcacgaggagttcaggcgttcaggattgccatgaggccatctgtgatcaatttttgtgagagtagtccatattttgttgggtatttttctagctttggccttcttaacaaaagctagatgtcgtcttcttcttcttaattgaacggcagagctcctgcctttatcctcaaaaaattactaggaagtgggtgggcccatcgagctcgatactctatcctattatgctatgactttaggatgataagcagagctcttgaaaatcaagacctattattggtaaataatgaatccttttcaaggttggggcgactctatccacatgatttctcatggtacttgttagtacaaaaggaagtcaaagtatttaaatactactccctccgttcctaaattcaaatatgaactaaaacaatgacaggaatttagaaacggatggagtataatactaattaagtaaatttattttagttcctagtgtgttaacttgatgtcatatgcacgattatatgaagaagttttaatattatcatgtcactgtaatcaaatctaagttagttgatcgttgatgctgcatttttttgttagaatttgcattcgatggtttgattttatttttcacaatttgcttgttggggctacaatatcatttgaatttttgatctaacatggttaaaaaaaatacaagtaattcaacttcaacagccattcagaaatggtaattgatgcaacgaaaggatttaattggatttttttttcaaatggtgatgatggtgcctacgatgaagtatacaaattcttatgtctcattaatacaattatttatatatatttttattttatatgaatcattcatatggcttttttaatttgtgctccactcctattctacactttggactactttgggagatgtactaataagatttaggttatcctgatatggttgacaacattagcttcaccttactttcttactcttataataagctggcaatacgcaagatttatagttttattactattcataaagtaaatatattctatgtgtcgttagaggaattaaacttcatagtaaacacatcatgttgtgttaatacaaattttactttacaaaaaaattgtatagagaaaataaggtgaagttggatttgtagaagtagatttcgatgtgtaaataatccttgtatgttcattatacatatataaaattaatacatagaatgtattattaggattatttggttgttcactatacaaggctttttaatggatcttattttaaatttttagtaatgttctaaactgtttgagtaaaataccttgatttgcatcccaactttattaagtctatgctaggtcatttctctatcctcttggtttactttatgtccggtcatgatttactttatggaaagatcatctatatcttaacatttaacttgcacacacaactcgttgaaatttttatcctacatatcaccttactacataatttagggtcccaaagatgtatattttgtttgccggtcctcttatatgtaccaaccatccacaacgctgcgaggtatttatagaatcgtgtaggtgtagaccattatacaatctgagctagaaaacatgctacggtaaccgtaaagtattggagttcactgcaacttcacatcgggtttgaagtgacaatggctaggaaattccataaagattggttgcatgacctattgctagcccctatgctctttagtttttgcataagccttttggggagtttttttttccgctcttcccttctaatggaggcaggtgaatttgccttgcaggatcaacttcatgaggatgtaccatatttctgtttttatcttaatgttgtttgcttccattggccatgtccctccactcctcagaagcgtcactttgtcgaagtgtggtccttcaaccaatttatcttgatcactcaccaagcctaaaagaacctcccaatcacatcacatggtccttcgagtggctttgtctacgtgggacttcactatagatcttgggtagtgcatattgttttttcatacacaccctctgatatcccaaaaaagtgttgataaattttagcatggtccttcaagcggtttctcgtaggagggccttcaacattaattaagggcagtagacagtttcatgtattttgaggttctggtatcatcatgctttggcatgggtgagaaccatcggcggagtgtactcattgtagttgcaacgaatgaacttgtctggatttggttgtatacaagaacaccttgggccactctgccctcctttgcatcatagactaaacgacagaaatatgtactcactttagagacgtcaaaaatatactggagtcgggatatccaataggagtcatgtaagaaaagtcaaggctctattttagcttcatggcaatcttttgaagagttgtgacatttcacattatgtggaaccacctcaattttgaatgtcgacggacgtgtagcttcatgattctgtgaaccttcttaaaccatttagttactacccacaattttttctgacatgttacccttctaatctttttttggaagctcacccttgatagcatgtaattgatgatgatgatgatgatgatgatgctttcatcccatagtagtacacctaggagtctttaatgtttctacatcaacatcaacttcgaggttcagtactctgcatcttgcttttgtgaaagaccatgcaagagactggggaagttgcaagaaaaacctctcttgcatgatggaagataatgaagagcttttagaaacctagtggtattgttgctagtaccgctagtgcctttgttgccattttgcatgggccctcctatcctaccaggtggtgtggtggtcttttgtgctaccttgaagctacataatttgtttggacaaaggatcatttctagtgcggtgatgattatttcgacttgcaatatcacctgaagctatcggtagtggttgctggccacaataacgacgcatagaacctcctatgccctggttagctatactagtctttggttatgccgggtgcctgcacctcctaagaaatcaagggttccagagggagtatggtcgcaaggctcgtaaggttcctttgggaccttctcagaaatcaaggttccgaaggacgtaatgctcaagggacatagcttatagcggaggcgtctgaaggcgcattagagcaaactctaggcatcaccccaaatggaaaatgaggtgttcaactcctacaaaggcctcttgctaccaaccccgtgaagtgtttgaggtgacttaggcaaatggagtccatagtggatgattagtgtattgtatgctcctagcgactacttgaccttaggcttggacatgatctccccttgaacggggatctaagagaaggtccaggtgcctcgagacaaggcttcttacaaaagaaggctaggccacagaaggtcgagaaccatgttttgacatggcaaagagttgctagggcactagggggcttctctttgaggagggcctcagagtccttgggtgagggcttctctttgtagaaggcctttgagtgattgcgagagggcttcattttactaagggaaacaacacttttgggggtaaatattgatcccacaacaacatattgtgttgctttgcaaactcttttagagaagtgcgagctaatcttttaaatcacactaacctgaaatggaaactgaagaatctaaccaaaattgttcagatgttagttatagcctctagtacgaaatattgtcatcactacaagctatttattactccctccgatcctaaattgttgtcgaaatattacatgtatctacacgctttttaaaaatagatacatccatatttgggcaaatttgagtcaagaatttaggatcagagggagtagtcaataagattcactagaaatattagatgccattttttttcttagtctacgataggagaaatgaaataaaccgaaaaatgacttctaaacgaatttaagaaaccaaacttaaaatggttttgatatgacgtataccttgagtggtgcaaagaaaaacattgagttactctttgattcgcaggattttggaagaaaaaaacccgtaggaatatgataggaatgaacgggtaatagagtctagttgatgggtggtgtatgttaggctcttggcgtctacctgaccttagtcttggactttatttcccctcaaaccgagatctaaaagaagacatcgggtctcatgagactttcttgcaaaagaaggctccgccacaaaggctggcaccagttttgacaaggcaaagaattatcgggcccctagttggggtctctctttaaggagggcctcagtgtctttgggagagggcttctccatgaagaaggccttttgagtccctgggggagagcttcattttatcaagggaattgacacttcagtcatccgttttcggggtaaatattatgttgctttgcaaactcttttcaagaactgacatgctaatctctggaaccaccaaaacccaaaatgaaaattgaagaatctaccaaaactgttgagatgttatgttgtagcctcatttgcaagtatttcttgctccataaatgtcgtttaccttgagtattccaaagaaaaaacatcaagggactcttcgattcacaggattttgaaaacctagaactagatgaacataggaataggataagaatgaatgggtaatggagtccatggctgacatgtagtttctgctaggctcccagctactgcctgaccttaggctcagacttgatttccccttgaaacgagatctaagacaaggcttcttgcaaacaaaggcttggccatgaatgcaggtactatgtcttgactaggcaaagagtttcaggcccctcccctaggaggagctttcctttgaggagggcctccgagtctttgggagaggacttctctgaagaagacttttgaatccttgggagggtatttatttaaataaggaaatcaacactggcgttctaatctttcaaaccaccaaaacctaaaatgaaaattgaagaatctaaccaaaatgttgagattatgttgttgcctctagtatgaaatattttcatcaatacacgttacttaatagatgataagattcactagccatattaaatgccgttctttcttagtccacgttaggagaaatgaaataaaccaaaaatgaattttatacaaatttaacaaatcaaacttaaaatggttttgatattatctgaagacaatatattataataagatgctcattggcaagtatttattcctccatatatgatgtttaccttgagtagtgcaaagaaaaacattgaggaacccttaaaagatggaaatagcataggaatgaatgtgcgaaacatcagattaacaatgcagaaatttatagatttggtgtttacttcaaaggaattggaaaagctcaaggattctaataaagataatcaaattaaagtctaaactgcaagcaaaagtgaagtgtaatgttgttcttcctaccttgcacagtgcaaagtaaggtggggcatatgatcaagtatgcctatatattggagattttgactacttgtccatatctttcctacttataaagtttggagttggtggtcgtcaattcacttcttcctaacccttctcttgtcacccgtttggagttggtggtcctcatttcacttcttcctaacccttatcttgtcacccctgacaagtagattgacccatgagttaaaacatcaagtcataatccttccttacatagtctctactgctgcctttcctctccaatttccatgagtttgggtgcagagttcaaattcagcaaagccgatcatcaggcattatggcattggttcatacgttgactatcatgttgtctttagttgtaaattttcttttttgccgattccgtagcaaagcacgggcacaaagctagtataagtatataacccatttagtggtttatgggcagctagcttgcaattttcggagatttggcttgattttatgggatatactatctcttgcaatttatttccagttgacataaccaatgccctaccaagaaagtgaggtgattaattttaggctcaaaaacacaaaatttgtggagtaaatactaacagtacgaaaagttatatgcttgtagaaacctataccataaggcttatattttcatgctctagaaaactggtaccatggtaagatctctatttgaatatgatctttaaaaattcttatcatctggagatacagtatattcaaattctggagcacaggtccaacaacccctccgttagtcttgatggtgcttgcaatatatcggcacatttaagaaaacttaaacagaaacttctttcaaaagtttgttttgatgtatttgaatattcatttctacttgtacttaacaaagctttatagaacaatctattccttgataaatcatttatccctcttggctatgtttctaatatcctgatgcatactataggtgggttttcctactgactacggaaatatttcgatgatctttgcagggaacgacataaaaaagataaagatatatagttttcatatttgtgcattcaagatatcatttccaacctaggatcttgatcctgctgaaagggacaaaatcatgtgtgtgttttattttgatagcattttttcttgacagtgcgatgtcagtttcgagtccactagcatatgtggaacgcaaggaacataagcaggctaaggaaaatgcatatggatatgtcaagtctaatacggaatttttactttggggttcctttatataataatagttgcccaaagcagccagttttagatagagaaaaagacactgtgatataaaagatgttaacacagagtagatattcttcgtgcagatatagataacattttgaatatttatacaggtcttcaccaaattacaagagaaaatacctgagctactgttcaattttccctattattaagttgttgtttttttgtaaactgccgcaacagtattgaacttgaaattcagatttttcgaaatgttattttaagacaatgtccaattcatttcattttcagcattgaaggcacat

SEQ ID NO: 1901 - DNA, 10789 bp, Brachypodium distachyon
  Intron number 9 from transcript Bradi4g37860.2 (locus Brad i4g37860) derived from phytozome v7.0 (chr-ID Bd4; pos 428 89040 to 42899828)
ccttcttcaaagggtaagatccatttcttcttgtgttccacaaaattactgcaccttttatgttcgtcattttggacaccagaacaaactgcaataacctcattttaccactaatttgtctattttctatgttatcgttagaccttgaacacacaaatcaaagggggcactagtaaatatgactcttattagggtttggacaaactaatgagtagaatggggtcatattgcaactatactataatctctacatttgattcccgtcaactgatacttatttatactaattcatttacaaaaagtgatgctgatttctttcatcaaattcattgtaatgtatatatgctgatccagttctctttgatgttcttgtgtctaaagctttgatgacacgaacttgacaaggttgcggaaggatgtaaagatgtgcggtagtgatggcagcatatttaactttgatcccaaatctatggactggcactcgtatctcttaaatgtccacgtcccagctgtgctgaagtatggccggaaaaagaagggaagtgtatagagaagaacggaatcttcctatccttgagataaaggataagcatctttgtccaacaaatgtatatcacactgccacacattataatttatatgagcgagcacatgcaagaatatgatctctctgtatgcatctataatatatgaataaataaatattcatagacccaagtgtcgtttgtatgtgataacatgtgtcaatcagttcaattttgtttaacagttagtcattttggctgaaaggcactaacctgttagaccttagccggatacgaaaagttgttcttgtccatagatgcatccaccacaggtttcttcttcgatttcctactccagcgaaggtgtgtgttgtaatggagcaagtacatgctgagcaagttagcttcttcccctatgttatgtgggcccagaggaccgctcttttgctgtgccattttgtgatgtctttgccgatttcttttgatcgtattcttcctgatctgtgacctgtcatctgccgccatatgtgatgctccatcactcaaatttgaaattctgtgtaaaaataataatcagaaagtcgagatctcacacaccaaattcaacacagaaaagcaggtctgtggaatcttgaacagaccaaggtgacattgtagatcatgcttggcatcactgctaagtttctattgtatcacagcagttattactatattgacaatgctggtgatccttttgtaataaagcaatgacaatgactgtctcaccattaattgttggaggaagttgtaaatcttgtagcgtattacaatgatgcagcctttctaaaacaaggcagcaaaccttgatctacatgatcgaacaagcgggcagcggcaaaagaagtacaggaccaagatattgttgcatgaaggagcacggggacatggacacagaattgtggacaacagagattgaaggaatgagaaattgccaagtcctggtctgctgtatgtggaggggcaagttataaagatctacagaatattcaaagtaagggaaggatccaatctcatccgggtgttctatggaaaagcatgacctgtgtcttagcgtacaagtatgtgaatagggtgtcacatgtatgttttagccgaacaggctccggcagagcagctgtgcagagtgtacaagtgcctgctttttttacttaacaaaaccagtgaagggactaaaagtgatttgttttgaaattaagagggacaaatgaacctatgagcagagtgacaaaacatgttcactacaaaaaaatagaaattatttcctcaacaaaacagattaaatagacaaacaaaataagacacatcatagtatcacacataactaaaccatgttattcttcctattatataaacaaacaaccaaaactcaaatcactacaaatattatattgcagataaatcccaaatccagaatgcatgctcatccatgccctattcctctggctggaaaaaaggacagttgataaaaaagacatgtctattgtccaggtacacgccaataaccagtcttgtcagtcttgatgtagggatagttctggtcgaacaccataagctgcagctaatatctagtcttttccccgaaaagaggggaagcaaacgtataatcaccagttcaccgcaaactttctaaaattcagtagaactaccgagtctacttgcgatcttcttaagataaagctagatcgcgaggcactatacgtcattatgctatcccgcagggcgcagactaccagagtccagagcaacataccaaatcaaaatgcggatgaagagcatgcggaagcgggggcggccgaggggaaatcgtccgcggagggagaggtaggaggcgtccaaggaggcatggccctcggcgtcatcagcgaccgcaccgtggagaccattgcttcgccggctggccatctccgccgcctcagcctcagcgacgaggcggaaccgagccgtccttttttctttttacttttagaatataattgggaaacttgcgtgggctgtgttgttggcggacctgtgctttagatgggccgtgggcctgcccactagcgcattaataaagaacaaaagaatcaaaaaatcatctcaactatgtcagaaaaaaccctctaaaaaaaactatggcagaaaaaactttcggtttatccgaaatcttcgtcgttgttttagctttttcgatcagttgtactatgttcatttaataaataaaaccagatcgttgttctaaaaaaactaagtcagatttttttctaaaaaaaagaaaaactatgtcagattcttgctctaaaaaactacgtcagattttttctaagaaaaatcaaaactacgtcaaaaagagaaatacttcctcgtcccaaaatgtaagttgtataagttttagttatctaaagtgtgatcaacctgataataaacttctttcctaaaaaaccctgatgataagcctaactatcaacttttatgatccaaaatcaagaaccattgtaaaatagactatcaaaaaattatatgttctatattttggaaagaagagagtaatcgccaaacagcactagagagtgacggtctagtaggatatgctggaataacacgttgggattatgtgtgcagatttttccagaagatttttttcccatacggtcatgatcggattccactatcagagataacgaaataacaacagttcaccccacacagcgctcaacaccaagaacacacccaaatcctaagaactagaggttcaaactgcacgagcagtggaagtattagctacagacgactccaaggtcgccaaaagagttctgactccgagtcatgaaccagcccaaaacaaacaaacttcttttctcaccaacaagctctttgtgacgagaaattgcttcagatgtccttcttgtccttcactttgtcctagatgtacttcatgtccatagcatcttgtgcgggatgatgcttcatggctcaattttgtttgtgttctccttccgtttacaaaatttgtttgtcacaatttgcattctttgcatgatacgatcgtattgcaacgaagaggtacaagcaaatgccggcgtcgaagaacacgccttttgtgctccaacattgttgaaaatggcttgcacatagtgctccaacgaagagggatcaagaaatacctttggagtaagggccattcgttgaattggataacgatagtaatgcgcggcgccaaagggaggaagaaacaaggagaagtttgattgaaggaattaagaaggagaagctcaagaggcaagccgaggctgcaagtttgaggaacaagcttgatgaaaaattggtcaagtataaagaagtcaccgcttccaaaaaattggaaggaaagttggccacggcgagaagaagcaagaacacaagttgctaaagtggcaagcaatctgggaagttgaagaccgcaagaccgccattgaggagaggaaaatccaactcgaggctcgcaagaccgccattggggagaacaaagtgatgtcgaaattgcttgccgaggaaaacaaggcgatgatgatggattcaagtggacttagaccaattgacaagagagtggtgagagatgagacgagctgagatcttgtaacgagacatcaagctatggctgcagctactttggccggtcgtggtgctgccgtgctggtgcctcggctgctggtgttggtagtggtgcttccggcgactcgactggctcggccggtcgtgctgccactcggctgctggtgatggtgttttggccggtggtgcaggcggcaagcttgtcgacgacggcgtttctacatgataggtctcatcgtggtgttcattgcgtattctttcgattatgtttgattgattttattgcgcatattttgggatgtactaagctcttgtgatgtcgaactatcgaactattgaaatctattgcaaaatcctgaatttacggaacagattccagaatcctgaatttacggaatagattccatatacccgatccgtaaaaagtttatgcgccgagttcatgagacctgttcctccaaagacaaatcgtaaaacagttttgagttatacattactatgttaagggctggttttttacggcaacatgcgagagatgctcagagagggcgacagccatgtgcattaaaccggcagtcttctcgcaataaaaagagcattaaaccggcagtcaaacacacgtgtctgccaaccgtctctagccgatcctgtggattcagtggtgtgcaactgtcaggaggcaccggctgatataaaccccagtgctaggatctgggaacaccagtgttttcgatattgatggatcgcgatgggtattaaaatgccaaagaaagtgttttttcttcttttggagcaaaacgctatttgccccgttccattgcagagatgaaacatgagagttttaagctcatccttacacgagtaaaaacggaaagaacaacagtaacaactgaaaaccgaaagaattcaccagccccaggaccctgtcagcttccctcctgcagcttcagaccacgtcacagatgatcctgcacttcttcgcctctggcttccatttgtatcagacatcgatccagcggcttcagaataccacctgggcatagacagttgtcagtatttttcatcagtatttgcatgtgttgcaatccacagttatatccattatgatcccctcctcgccccctttaccccgaacgtaatgttgataccaacctgtaataatatactccgtaatttggaaatgaagctaactatagcaagctagatcgtcttgggaagcccgaccaattggacgctccccaagatgtcatctcttataaccatacattcaatggttgagagatagatctggctggagagggagaattaaagagagaaaataggagtataaccataccgttgaacactcttcaaaattcgtctactccaatgcaaacttctctttgtacataggtgtttcgtgattttattttctgctgatccgtgttagtaacatacataagcacatgttaattgagcaggggtgaaatatattaaaaaaggggcaaaaaaatactacctccgatcctaaattgttgtcgaagtattacatgtatctagacactttttatgaatagatacatccatatttgggcaaatttgagacaagtatttaggatcggagggagtacactatatacaagaatttacaaggggcaaagaccccaagacaaaaacacagaccacacacacccagtggccaaaggagaagggagaaagcacaaaaggcactaagtggccctatcaagccaagtaagcgaatctagaatagcgatcctaactccctctgaaaccacaacaagaattatggaacggagacagtacctccttgaccctatgactacaaccacgacaagaattatggaagtacctccttgaccctatgaggctatgactatgagcaagtaactcctgcctgaagtttacgaaccactgatgaacccctacttaccataaggagcaagaggagaaaaaccagctcattttactagctagggatctcttggagatcaacaaccatttgctataatcaagtcgagtacaagacaaacaaccttccgtattaggaggcattcatgtactcactcatctcaatagtgacataaactggcctgtctatcgctcaaccaatcatgctaattaatattcatcgattataagtatcatgcatccacacgaaccaaaacacaagtccacggatatctaatatacgtcctgcagctggtcgactccagcttaaattcttccaggagaaacgggaaatactcttattcaggttgggtgagcatactctgtagctgcaggcgatggatgccactgcagtggctgggtgcttccgggacaagatcatcctcgtcactggctcaactggcttccttggaaaatgtatgtatgcatattatatactagcattctattatactccctccgatccatattacttgtcgaaatattacatgtatctagacgctttttaaacatagatacatccatatttgggcaaatttgagacaagtaatatggatcagagggagtactatattatattgaactaaaaccacgagaagaattgaggatcggaaggagtacaatattatgtacatgcatagatcatttacctgtaccgatatgaacatgcagtgctggtggagaagatactgagggttcagtccgatgtgaagaagctctacctgctggtgtgtgcaccggacgctgcctccgctgagcagcgtatcctgtcccaggtaagcgataaaaaaagatatgtcattgttattctcgattaccattaccgcagctacctacgcatgcatgctgtgctggctatggacaaggtctaatcttacgtgcgtcgatcgcctccttgggaaactaccggcgctgaatttgtcttgtcttgattggtttcctggcctggtgcaggttcttgggaaggatctgttcaataccctgcgggaaaagcatgggcttgctggcttccagaagctttttaaggaaaagatagttcctctggcgggagacatcggggatcgcaacttcgggctcaacagctccagagctgacgccctgtgtaaggagatcgatgttatcgtcaatggggctgcaacgactagcttttacgaaaggtatatacacattagacaggaaaataaatcaatagttgttagcttaattgccagagatatacatagacgtatttcagagggttttttctataagaactactgacagaaaaatacataatacagtttagatttatcattgtaaactacagattgtttatcccaagcaattatttatctttatacttatttcttctatcggtttatcttgggaaccgtgtccttatccagtacggcaagtaaaatgaccaggtgcaatctagtaagtactacacagtcaatatatacatctgtagtactgttcggcatgtatacggacagacatgtttcagtaagatctggctgatatttttactaagaatcaatcaccttttgccccatgcagtttgactttcctgagaatagtcttaccaagacagaaagggaaggtgggtgaacttgcaaaagacatagaaaaaataaagctaatatttaataatttcgaaaactgcacattacctagcaattgaattaacttgtgtggaacatgcaccggcgagtctattatgttcattcatgtgtgggccaaactcatctatctcttggaatggaagtaggagtacaaaaataacagagaaaatagtgcaggggttagtatatgagcatacatatgtatcaagagcagagctcagatctgaattttggaggcgcacagcactgaacttgtccctgcagcaacctggtgaacaccattgcatatcttgaaatatattcaccagatgtccgttttcacatgataggttgattatcttgcctacatacatgatgtctctttaaaagacatagcaagttaggtgctggaaggatagagctcaaacaattttattatttcagttttagtattttggcatgttccttgaattttattgcatgtacaggtacgatgtttctttggcatctaatgcattaggagccaaatatgcatgtgaatttgcaaagaagtgcacgaatctgaaattattgcttcatgtttccactggtacgtacgtgcttatatatacccatttgtccataaaatgaataattcatcgcaaataaagcataactttacactaagttttgaatacatgtgtttaatcaactataatgatcatgcttttttgtttgtctttcttagcttttgtagctggtacccaaggacgtttattggagaaaacactccagatgggtgaaacactacggcaaggttactacttggacattgaagccgagttgcagttagctgaaaaggtcaagactgaactcaaaacgtctaagagtggtagctcagaccaattggagaagacagccatgaaagaacttggcctaaagaggtctgaccaatttaaatatgttactttatttatttaataatgtatatgagcttatggacactggtgtgttcttttacatgcaaatttgaaaactactttttcatgaatatgctggtaaaagatataaaaaatgccgtatttggaaaataggttcaatgaaaagtctaagggtaccatttccgcatgaccaatgtaaataatagcatatcaaagttatgtgttaatattaccttataaataatagtcatgttctcaaaacacgttcaacgaaaattctaatggtgcattttatgtgttaatagtcaaagttaggcatttgaccaagtgctttctaaacaactaatatttctgatgcagtgagtatatttagcgcaaaccaaattttagatcaaactactgagatagctatgtcattcataaaacatctgtcatatcaaacgttgccacctctagactctggtttggagcatttaagatcatgacacgtgccaacttaaaatagttggtctaagggttgaccggttgaaggtgctttgtagaatttttttagctttatggaataaaaatcttacaaatatgaacctactattgctggttgaaggtgctttgtagaatttttttagctttatggaataaaaatcttacaaatatgaacctactattgctaacctgtaacatccactatacttatatcatcatatggtcaatgtagacatgccttacctttatcttttatttgtaaagttaaagaacattgtttcattggtaaactgaggggaatcacgtatgagtatgacaaacttgacactacttaaattttgaagggcttgccattttggatggccaaacgtatatacatttaccaaggctatgggggagatgttacttgcggagcagtggggagaccttcctgtcgtcataattcggcccaacatggtgaccagcacatatcaagacccatttcctgggtggatagaaggggcaaggtatgaacagatctataacgagcaacttgcatatcaatgttgtgcaatcgttcgctgctgtacaagtaactgcactacatatatatcctagctggacaacaccatactagcaaatgagttttgctaccattttgtctccaggacaattgatgctctaattgttgcctatgatgagcaagcattcccatgtttcgtaggtgatcgcaaagacataatggatgtggtgagcaatacacagagaaattatatgtactagctattagggatgtagacagattaatagcaacctggttaactggactagatcttcaaattgatagatactgacagtctgtatatataggttcctgcagacatggtggtaaatgcaaccctggtagccatggttgttcactggaaccagaaagggaaagttgtttaccacgtgagctcagggctccagaatccattgactggttacgttcttgaggacgcatgtttggattacttctccatccatcctcgtgtactagagaacgggaaaaccctccaaaacagaaggccatacttattcaagagatttgcttacttccgtgcatatctgatcctggtgtataagctaccacttgaggtacataatcatatgtgattcacaaatgcacacatgccaatacaatgttcttatgatttagtgactcatattttgtctatcatatctttaattccaccgaacagatactgcatgcagtgagcctattatcatgtgggttattttcaaaatattataataagcacaaccgaagatacggtttcttgatgctcttggtcaagctgtatacaccatatgccttcttcgaaggatggtaagatccattttgttcttgtgttccacaaattactgcactttttaagttgtcattttggataacagcacagtctgcaataaccttgtttcaccactaatttgtctagtttttatgttactgttagaccttgaatgcacggattaaggggccactagtacatatgcctcttattagggtttggacaaactaaagagtagtatactagtatgtggtcgtgttgcatatatactctaagatctatatttgattaccatcaattgatacttagttattcatgtcaaaaagattagtgatgttgttttctttcatctactcattgtaattatatatgctgatccagttctcttcgatgttcttgtgtttaaagctttg

SEQ ID NO: 1902 - DNA, 2250 bp, Brachypodium distachyon
  Intron number 1 from transcript Bradi5g13700.1 (locus Brad i5g13700) derived from phytozome v7.0 (chr-ID Bd5; pos 172 06999 to 17209248 reverse strand)
ccgccatctcccacaccaccacgccgctaagaaaggtgattgcttgatcactatggttttctctataagcatctatgtgctttgtatactccgtagcgctaaattatgttttgctgtgcctgtgagaatcattttgggaattgggagagcgggctagaatcgcaggggagtggagatgttcagatttgttattgctgggtgtatggcgtatagatcataaatttgatggtggcaagtttggtgatgggatccagttggtcttagggtttcctgttgctatgcatgcctgatggattagcttgtctattggaagtacattttttttatcaagtatgtctattggaagtacattttttttatcaagtatgatgattgtttaatgtctgtcaagttttgtcagtgcatcataagtgaatttaagtctgagattgaatctgtaccgtttaatcttgccggctttgtgtttctagttcactggcgggaaaaataaacgttgtttgattcttgttctgttatatgtcggtggagtcctgatttagtatgttggtgacggtttctgttagttccaggtggtctcttcttgtccggaaggggttaaaatccctaattcttgttccgttatatgtcggttgcgtccggatttagtatgttggcgacggtttctggtagttccaggtggtctcttcttgtccggaagggttaaaatccctaattcttgttccgttatatgtcggtccagatttagtatgttagcgacggtttatggtagttccaggtggtctctcttgtccggaaggggttaaaagccctaattcttgctctgttatatgtcggtggagtcctgatttagtatgttggcaacggtttctggtagatccaggtgtttgtccagaaggggttcaaatccctaattcttgttccgttatatgtcggtgagtcctgatttagtatgttgcgacggtttctggtagttccaggtggtcctttcttgtctggaaggggttcaaatccctaattcttgttctgttatatgtcggcggagtcctgatttagtatgttggtgacggtttctggtacttccaggtggtctgttttttgtccggtagggcttcaaaaccctaatttcaattgagacctaagtccgtaggcgtaaccgacaatttggaaacgtccaaacacagagagaaggaaatggacgatgccacttatttttattggatgttagggtaatggatttgtcggtttcgactttcgagaagttgatccgagttttgtctttatgctccgtggttagtcggtattacggctacatgtttggggagatttaagcttgtgcttgctactctttcttacatcattggcggtttctgatagtgtctggtttgcttgttcttgactaaaaggctctaaattgtttaatgccacgtggcagtacgtggctccatgtgggcttgtagaagcgttgtttatgaaagagctacatattctatgaagttgtactttatagaccgacagcacagaaacttaaaaggttgataatttgtctgaatttgtcacatttagggtcatgggctgttcagacatggtgattttgggtgaagctagcatcttatgaattgttacgtatatttcatgtgctacacgtctaccttttgtaatgatatttcagcatcgatgattaagtatgtcctatgtttgatgaattcccatgttgcatgatgtcggcatccttgtgctttctgatttattttttataatgttgtgttgtttagggagattattctcttgtccttctaattatttctggtcacaaggataagaaatcaaaaggcgcttcagcgcaatgctttgttcactggggtgttttttccatgctgaaaccttttttatattcccttctcatggtgataccttatgtttgaacaagtttgtttagttggacacaaaaggaaacacttaatattttttttgttgcaattggtggtaagaagaaagtatcgagttcacaaattatttggagttttcactcctttatttcatctgttacataatggttcatggaggatgcaattgaaattgtagttcttgagaggactgcatagttcctttctgcttttacgcctgtgtagattcattgggttccctttgcaaaatattatcttattgttaatagttcatacggatatggccataactctgtctatgctgctttcagaaggtgttggtgggaaaattgaacaagacaacctt

SEQ ID NO: 1903 - DNA, 1751 bp, Brachypodium distachyon
  Intron number 1 from transcript Bradi4g27160.1 (locus Brad i4g27160) derived from phytozome v7.0 (chr-ID Bd4; pos 322 20997 to 32222747 reverse strand)
tcctcgccaagtggtgccagcaggtctgtgttgcttgagattaggtcgttttcttcctgccctagatagcctatgacataatagtggtggaatgtagtgaattagatagagatgaaatactgaatttaagggcaatttggttgatatccttgcatttccacaacttttggcgaactgtcttatgccagacattttgtggcaaccaaattgttagccacaaccgttacaaactctggcacaaaactaatgtatgacaagtgggctaactttggcaagtcacagcattggctataaaccaaacaataaccttacttggtcaaacatgcctaagacaagtgtagcaatgtgtggctcccagccaagaattcgattctatctagccttgcacacatgtaccattaaatacttgtggaatttcgttgacgtgaacagtttcaacttggtacagacatggcttagtgttaacaagattaagttgctttagattgatgtgtttcaacaaaatgtgtaactgtcatgaaacaaatagtgaatagcagagttaagtcaatatatacacagccaccagtgtgacacttgaccattgatttgttagtcatatatacaccgttataagaaatataataattttttaacacttcgaatattattgccatctgcctaacctcagcatccttctgcttatgttagttgtcaaagtttgactgcaacactgcatgcatttgtaagcaacataacagcattgagggagggtggacattacctaggttttccatgccatattatttagtagcttttagtagcatgatgtagcacttcatttgcttggctacgtttgtcgtcttactttttattctcccaccaaccttagtctattctgccaaaataaacatacctgttattgaatattgataatttggttcaaaattgcagataggaataagtccatatgtcccttgaacatccacataaatctaattaagggctacgttttcagatatgtggtatgttttgttttttttgaggaaaaagatatgcggtatgttaatgaaatgtgcttccatggaagttatactgttctaaattatttgttggcgtatctactttctagtgcaaactaagggatagacgcaattatgcaaaccatttcatgttggacatgaaaccaaaacgaaagttccggtatatatttaaattctcatcctcaatttagtgttgtagagtttcaatctttcagttacagacagaatctgaaatggaataaacaaaataaaagtacaaatactactgttcataacacttttttttcgtatcattggaccagtgaggtatgaacatgaatttttgaaggtgaatcgaacagtccactagtcctccctggaaccattttccaggattttttaatgttgatttcatccttgtttttcttatcattccacctattggtttgcactaggtatgaccctgtatattttttcgttgttgatcagttgcaaataattatcaactaagttggtgagaaaactgtatttttttccttctattttgtagccagtacattgatcttaattgcacatactgctttctttgacagatttggttaacagctatctcatgtttatccatgtacaaattgatgtctttttgaaacttagtgttcagattttttttcactactaaattttctaaataacattttcacttcaatgaatgcaggttcctttggttcagtactgtcaacaacttggatc

SEQ ID NO: 1904 - DNA, 1266 bp, Brachypodium distachyon
  Intron number 2 from transcript Bradi2g13350.1 (locus Brad i2g13350) derived from phytozome v7.0 (chr-ID Bd2; pos 118 15508 to 11816773)
aggtactacagtaattgtttgcctcagttctgtacttctatttttttttatcctttcatattcgaaaatcattttttttatcgtaattaaggaattgagagaattctcataacaatctaaattttccgtaccatgtgaaaattgaacatcatttgtgctgaggggcaacactccgagaccggctttatgttgcgacccatttccaacagaattcactgaattttagtgcatgtgtgctgatacttaacaaagctgctccaggatcaaacaaatatagttataaatttagtttctatgggcagtgttacctagactgtaacatgcattaagaccttcacaaggaatagttagtttgttaggaccgctagttaactaactatgtaaaataaatccttttgaagaacttctattctctctggtacaagaaaattggaaggtggcggaaattttgcagaatattcttttcatttagtctagtctattgattccaaaattataagttctatgggtgttctagaacgctaactcttagaacctgatttatcggacctctaatttgtgttggtatttaatgctgtgctgaccaggtaacactgcctttgcaaattcaggactcaggcaaaaaaatcaatctgttcaggttagattaactgttgtaacacctgggtctgtttctaattctggtaatattcagttcttggttcagagatggtcagatgcgatcagagaaaatgtcatgaatatatccttttgtatcaacgtgttggcaaaacgaaagaaatggtcagatgattgccacctacgaagtgttgtatgactaacattttgctacagatactgcaagtctgcaacacgcgttttctatccagaagctattgtattttgcagttttgcacccctgaactaattcctgagtgtgcatccctgaactctaaaactggtagacacgtaggcaccatatcatgtaaaaccactttgaaatggtcaggtctgcagtattctacctgattttgagttgagggttcgatttgtctagtgttagagtttatgggtgcattgtgcactcaggcaataccacaatagctgtgggtgaaagttacacttcttcctagcatgtttgtacatcaattatttgatgttgatggttattgatcttgcacatgaagaatttgcattgtggtctttgttgttctgtgcaatgtttcttaattattttggttctcattttatcttctataggtgttagaggccttacttcctgaaggg

SEQ ID NO: 1905 - DNA, 4180 bp, Brachypodium distachyon
  Intron number 1 from transcript Bradi1g13920.1 (locus Brad i1g13920) derived from phytozome v7.0 (chr-ID Bd1; pos 107 84992 to 10789171)
gacgtgggatccatcaagcaggcgcagcacctcatgtgattccccgcccccttttacccttctcaatataccttcacgcgtaatatatcacagttcgatttgttctgacccatgaactaaaacaatgacaataatttaggatcggaggaatagtagtgatctactgacacagagcaaatcatcactccactctgtcactagggtctagggcacctgttagtatttggatcttactccctccgtcccgaattaactgacgtggatttgtacaattcgggacggagggagtacatgttaacatgaagaaggcaaacttgtgtccaaacatgattatgtgctttggtgatcttttcgtccttgtatggtacttggagcttttgaactggtaacttgatcttctaaggaatctgggcagctactgagtcgatcagtagtcttcatttctggacccatgtttatccagaagtaagatgtcctaccacctcttaattggccatttgttagcggcgactggtgagtggaaagagcttacagagttaagctattgcggaagtgatgagctgtcaaatgtataggtggttgtaaattatgtataaaaactatcaagtaatatcctgctattctatatgaggacaccataatctctgccatgataccaagataatcatattggttgtccccttgccatgtgcatattttgattgttctactcatttcatcctacacctcttaagtcttaactgggtatttctctgcgtgactgaccaattgaaagagcttaagcttatagagttaagctaaatacttgcatttagtgatgcatcatcaagtatactagacaatagtctgttcattgctgcagaagttgttgacgatatacatgagctacattcatgtagtaagtacaatttgtgcacgtggacttctactcctgtatgcacacaccatgcaagcattgatgtgtagtaactgaaatatagtcaaatcaatgttgaataggccttaattgcctagatggaaatgtgttgacagaaatgtaatgtgcagacagaagagtgacacaatatgcgaagcgaatcgatggctgttaaggtggtaataggtaaagtggtagaatcgtaatcctatggctatgtgacatttgggaaagaaatggatggataagatttatcttatgatgctgttcaatgagatactaaggaaatagctatttaatgatgtcggtggggcttggctataaaaataaaataaaatatatatatatatatatatatatatatatatatatatatatgtatatatgtaggaaggtggtataaactcagtattaattgttttaccaagtactccctctgatcctaaattcttgactcaaatttgcccaaatatggatttatctattcttaaaagcgtctagataaatgtaatatttcgacaacaatttaggatcggagggagtactatattacttatgtttattagcactagaatctctgttgtgacacttaaggataatacttttgatggtgtcctttggccacatgcaaatattgcctgttttcttagctgttggattgtcttcctcttcgcatcctgaacatccatatgtccctactttggtgtccagttgcccctgaaccgcttcaggaatgaagtctggtagatatttatataggcagaacaggagtagaccccatttgctgggacttatggtactattagtattatggagccacctatcccgtaatcttacttttcaacttttgggtaccattttcctctctgagtccttgtggtgtttctgtggttcatctgctgtatgccttgttttgcactggcatgtgggtccaccttacccaatacccatacacggtatctgattctattcaattcatattatttgtaatgattgctttgagatttgagtcgacctaaaggacatttgttgactgtactgtttagtattttaaaaaaatcaattacatattaagagtaatgctattttacttgtagacaagctcatgtggtagtatattttgctttcggaatgaatgtagtttgaagtggttgtaggcttgtagcttgtgggatctttaagaggtatgtatcttgcatgtgtcaaatatatttcattgttatacatgatttctcagaaactcaccgatgttctctacccaagtaaccctactggctcaacagctttggagtccaacctgcataggatggtgatagttcctaaaccttgttattaattgcagtaattctcataaatacataggcaatcatgtgccactttcttccctcttcaactccatccttcccaataaagaacagctttctacttctggtaatgacatcttcccccagtagatagactcactactcagacattactagagaactttctgtgcgtactctattccacagttaagcatgcagaatgacctagtttgtcctttagtgtgcaattcttgttattattcttatttcccctatatatatatataggtggacaattgaattattcgtccagtttccctacaagctgccattagacatcggcatggtctccagaatagaacttgtaaccactaatttctattttatatactactccctccgtcccgaattaactgtcgtggatttgcatagattcttatgattttaacaacaagcttgcacacatgattttttgtttacctgatctaatatgtcaaagtatatcagtagctaaagtttcaaaagtatgactttaaggatctctccaaattgacagcttttacggaggtagagggagcataacacaactgccggtccagaagtacttgggctttgagttcctgagttttcttcattgccttcatgtctgtataacatgcgttaggttactgttcatctattgtctggcccattttgtaaatggttattgcagatattacaaaaagagctcaggcataaattttgtccattcttccccgtagactcgtgatactgtagtttcccctttccatggactatgctttagtttgggatgttcaacttgcccctgtcacatgctaaacttgcagccagtcctaagactaatgaacatgacaaggttgggggtacagctctgagtgagagtaggccggccatgatgctggcgatgaaagggacagaaggttggggactgagattagttagatcttaactgagtgtccattctcattacttgataatccatctggggtacacggcgccccttttatagggaagattgatttgtaccttatgagtatctcctaaccacatcattttgtattccttactgaattgatatattccctatctttataattacgtctaatgggtatagggagatggatcacaccctctgacaatgccggttaagtgaatcaacatactaagtgcaggcaattgaaataatctgatctttggttcaaggcagtggcggatctagaattttaccgctgggggtgccacactttacacgcacagcttgctatactctggaacataggcaacaggagaaatcaatttattattgtagatatcagtgcctagcattaatggtgcctagttagctcaaagctagtataagtgggtggcctggtggttcaaccatgtggattactagtattgtagtggattgaacattagtgaaacttgattaagtgtaaatactagtatatggtataaataaattagcatttttggagggggtgccatggcacccgtggcacactggcaccccccctggatctgcccatggttcaagggaagtcactgtgccctgtggatcaatctgagcttcaaattttaatcaagtactccgtactattttgcagcaaatgctgctattctcaatcttggttagtgcatattgtaatgcaaagccagcgtgtgtccctccccctttctgcaaagattaccatggtataataacatttcttagtaatgggactcctgtttgcttttttggtgagaaagcttcacactttcctacttcgagcaattttgctaaggaaacagttaggccggcatgcaacgtgagatgctaagtgacacgaatctattgctagaagtcatcagttgttgccttacttttcatttgtcactaacaatcatccatgttgtaatgatctcttactttgcagacttgggagattgcaagatagta

SEQ ID NO: 1906 - DNA, 2529 bp, Brachypodium distachyon
  Intron number 2 from transcript Bradi2g53060.1 (locus Brad i2g53060) derived from phytozome v7.0 (chr-ID Bd2; pos 522 82354 to 52284882 reverse strand)
agaggttaaagaagcaaaaggtacttttttttaaatacaaatttattgaaattccatatgttgtcccaagtgttgttactttattcttggcatgttaaccaattagttttttcccttctctctataccttctaaataggattcagataaccttataagtagcagtgaataaatgtgattcctcatacagcaaccggaatttttagtttgtatggttaagctactttaaagacatatatttactaaaaattactctcccctactagtttctgattatcatacttccatcatcctaagtatttgctccactactagggcccagccactgagttgattagggactaaaatcaagtctaccatgtaagcctgttggattatgtattaatatttattaggttagtgccttcaaatatttgttggagtaaatgcaaatagccagatagcaactgaggcttctaatgcttatttgttcttggaaggagtcatctacttttctggtggatattggggttatatttttttgccttcaatatttccaagtccacctgatatttttacacgtactaaccaaatgagactgcactatactaagatgaattatgtgataaaagactaaaatagatatggctcatttaacatcatgggagaactgttttaacttttaaattctttcggagattttaatcagcgctaacattctggacagtatcctgccataccagagccatcggatttgtatatgggtgccatccccactccccagtccccactctccatcgctcattctgaatcttaaagcacaaaccagatccgacggctgagcaatcgactgatccctaactaaaaatcaggcgtcttgggcatggcaaaaccatataagggccaagaaatattattaataataacaatggagtcctctctattctatcgtaacttgtaactgaagtacagtcctaccattagaactagaaggaataattttggtgttaatatttctactccctccgatccatattaattgactcaaatttgtccaaatatggatgtatctatccctaaaaaacgtctagatacatgtaatatttcgacaattaatatggatcggaaggagtaacagttttgctattagtctcttattcaacattaatgtagcaatatttataatcattattatttcaggtaggattaggaactagaaactgtctttgcaggtttacagatgacgaaaatcctataattgcctacataacgttgaatagagactaatagcagtttattagctgtgaatcttcaagaaagcaacctaaaagataatatcgcagtgctaacgtagtatgtgatgcattgcatactagttgattcgcaccttaaacaatgcggtgtcccaacgcaaaggaagtttctctccttgtctctacataagatttatattgccaccatcatttttctggtcatttaatttgtatgtgattcagaaatgtgtcatgtattgaatcgttctacttcttcagatgcattagcaataccatgtatattgttcttatctttttatgctagtgttattgagtgatatgcaagtggaattgatctcagaggtgcttgttcctgatgtttaacacttggtacttcgtagtttatacagctaattgttcatttacagagttgcttaatatttttctttatgatcaggggtatatcatctgagttgctcgataatgttgctaagcttttgtgtttggtcctgctcctaacctagattgataactcaaatctaaatccttgattgatctcagaaaataataataaatctaaatccttgatttaccttgaagataccttttctgagctccatcagattgaaagatgagagatagacctttagcaaggagatatcgcacggaaagccggattaggtcttataatagagattttttttacaggccgtagttccttaatgagattactttaacacaccctgaggcttaagaaaagaataaaaaaggccatataagtgagatcctagccagagaagagcaacaggagctatattaaaggaagttatgggcttgaatcagagattggattgacatctggaacagagaggaaaagaggaagcaaacatagctagctcacgaaagaaagccttgcaactacgcgctatatattagatttgcaactgcgctaataagggcacatccgctttctctgcatgtttctagaaacattcctgttacatttcatttttctggtattgcacaatttgaatccattgttcatctcttgtgtggccagaaaacacacatgcatggtaatcctgcactgctaatgcaagggttgtggcacatatctgtgaacaaatttcttatgcttattgcttgtctaatcctgctataaggcaaatgttacccatgcaatttgtaaatttgcatattagttaccctgataaaattagtgatgcatcttgtggcagaatctcaatgcataacattgacttgtttgcccttttctgtgatatcttcaggagttggac

SEQ ID NO: 1907 - DNA, 2329 bp, Brachypodium distachyon
  Intron number 2 from transcript Bradi5g26860.1 (locus Brad i5g26860) derived from phytozome v7.0 (chr-ID Bd5; pos 277 34486 to 27736814)
aaggagggacacgagaaggagttcttccacgagaggtatattcttcggagaccgttcatgaaaagatcataggatcgacgatgactactcaactctagtgctttttagagtactctgctttttattgtaggctatgtactatatagctatatattgttttctctttttctctaccctctgctctcattctctgtttttgtagttagcatggtgtgcgtaggtttagtaaaaaaaatttgctcacatggagatgtaccgtgtgtcgaatcaatgatagtttctgagctcttttacggtacccaaaaataaataaggacctttcgtttctcttaattcaatggatgatttcaactggcactccaagtaccactgactcatggtaaacatgtaattgatcaagaacaattttgatgtgaatcagcaaccacgattacaatagatgtacgatagtgggcagagaatatggactaggagtgggtaaccaaggtggtgcacaaattaaggcacaccccaacttccagctagttattaccattgggcagctgatctccagtctagcatggcgtgtatggaaaagagtgttgtatgaattcatggagatccacgaaatgatcatagcatgtcgggtagatgtttcccaagtcctgaagcttcgaagaattcaaatgataggccaatgctctcttcaaagattcacctacaaagacaacttctttgtgaggatgaaatccaaggatcgaaatgtattcattgtagcgctcttcggtcgtatctttcatgtcaagaacatcatcattgtcagaattccatcccaagttattttccggcagtgcttgttcaccgtcgtcgtctagaaatttagaacgatagaaatggtagttgacatcttccatgatccaagacccgcgaacttgttgccggttgtgaatctgatgtgaaagcacatgcctaaggtctgcctgatgcttcaaagacccactcgatatggagagaggattcgtcgaggatccaaacttggagctgccctggagaagcaattgatgcaagatacacccccttctctgattttccaagccgtaggtctggagagctacttgtatgaatagttcttgggggcggtttaatggcttggtacttgccacttgacaaagatatcctaggaaacaaaataaaagaggcagaaattcagaaaaatataatgcctgattgagtgtaaagaaaatggcggtgcacgcaagtttaataagtatcatgcactctctacatttcttcatacaagatatgttctgattttgtcctaagtcaaacatattaacttttgaccaaattcatagggaaatatatggatcgacatgtataactgtaaaatctaaattagtttaattataaaattcatcatgatatatatcttcgtagtacttatttaaaactgtagatatcaagccgatcaaatttcaagtgtccgacttaaagacaaaggccagatatacatacatgttagcacatttagcaaggaatgtggtagctagctagcagtaggagcaggtacctcatgataaaatgggagtaaatttcagaaaactacacattttgggtcaagtttctcaccgagccaccacttttgctaatttgcccgaaaaatcacacattttgagtcacgatgtaacaacaagcccgaaatgatgagtttagcgcgtttgacagtattcctgacaggtcaagcccacctgtcaggtgacatgtcggccgaaacccgacccgacccgtaagcccgctaagcccgcacgcactaagacagttgtcgggacccccttctccacactctcgccagtgtcgggaccctttctccacacagctccgaagttgaggggcggaaccggaggcgacgaggacggtggccgccggcggggaagaatgccgtcgccaaaggtcgattggagggatcccgcagccggtatagagtaagttttccccccttttgtgcctgtaatttgtcccccaagtaggttagggttagagagaggcgacgggcggacttagggttttcgcttttttgaaacgtggcatgatcgacgtcgatttgttgcgattttgtgttgttcttaggcttggggcatgggaaattttaattcttttcagttggtgcggcggatttcttaccgtaagcagtagcgaatccggaattgggggtttggttccacctatgtgtttttgctgtgttttttgtgttgtattttgtacttgggatcttgcgaattagggttagggtatgcagcatctggtagctgacacggtagtatggtttctgtttttgcatctctcagtttcg

SEQ ID NO: 1908 - DNA, 10675 bp, Brachypodium distachyon
  Intron number 6 from transcript Bradi1g45810.2 (locus Brad i1g45810) derived from phytozome v7.0 (chr-ID Bd1; pos 440 79901 to 44090575 reverse strand)
tgctggcagaggaaaattcgcgcttgagaagccaagtaagaagatatttgctgcatctgtaatcctgcacttaatcaatctttaaaaaatgcaatccgaacaaccattctagtttctctataattggtgggggcggcggaacacaaatttaagtgctgctcgtgtgattggatgtagatgcctcaggtgccaaaggccggcaagatgactgttgtcgaaactgaaaacgttgccactgaagatgtccactcatctgaatctgtgatgacggcattgcattcggggagctcgcacgacaatgacgacggttctgatatatccctgaagctagcgtgagtcccggacaaaacgcttttctgcctccttgggaattttagattaatgctactataaaattactacaataccatatgttcctaaaaggcgtttacagattcaggggctctgtctaactcttttcacccgacaggttgccttgaaagtacggggcgcacctgaggacgtcccttgtgatgagtggagtttctctccttcgtagagaagatgccatgttacgatggagactccaagactgactggaatgatcccatagtagaagccagatcagtttaacctggctcgtcattgtcacgtgcatgcatgcaattgttcccctttgcttgggtgtgcaccggacttgtagcgtagtgctatgtgtagtgtttcttcgctcctgcgacttgtatcattcgtgcaaactatgtacctaaggctcatgtgtacttcgttgtgaaagcttgttggcctaagccattctcagtgcattgttacctagcttgctgctgatggataattttgttgtccatgcatggtgatggtgaaaactttgttgtccatgcatggtgatggtgaaaacgcatgtacttatcttgaaccatcctcatttgcaatattgcgatgggtgaacgacctgaattgaagccgcttagggcccgttcggatctaccattctcggcggggatcaatggggagtggatcaaatttagttcaatttcccctcaatccactctataacctgtcgggaatggtgcaaccaaattaggcctcatggtgaagcggtcgaatcgctgcttctttggtcttcctcaccgcttcttcttgtagctcttgatgaatgtctagtcccaccccattagggctagttcggtcgcaacaatctctgcagtgattgacagggattagggagaaattgaactaaaattgcatcaatcccggtggatatgggcataaccgaactaggccttagggttcgttcggttacacatggtttagagaagattgggaagggattgttgagaataattatttatgattaattattagctaattaatagttaattagagagttaatgatgtaacggttcgtgtcccaattttgccaaaattgggacgcgaatgcccaaaacttgggacaccaatgcatgtattggtgtcccttccccttgtatatatatgatcatcgttcaatggattagaacacacagattcattttacaacagggatttggggaggaaatccggcccgataatccctcttgatccccaccgggatgggattaatcgaatgaggctttacggggattcattgagcttaaacggagaatatattggttaccaagcatgagagggccacctaacgtaccccgcttcgctaccattcggtcaaatcgttgcccctttggtcttcttcaccacttcctgtagttctcaactgggttggccatgtctaatcccaccctattacaaggattcagacaatcataattgtattgagtttgtagagagtgatatggtaaaatgttgggtttattttttgtgtgaaggtaaaatgttggttaccatgctccttgagagcagtgcttctagttcttacaagaataaacaagctgctatagtggtgcagtttacttgtagaagaaacttgggctagaccgaccgcagccttttgtgcaccagacgagtgtagcgcactaggaatctaggatatgggctggggaatgttggcgggccatggcatgtttaactgtttgccgtttcagggcctagatgatccgctccaccacataaaccgttttccgcggacggactgaagttccgaggatacgttttgttttggttgtaaaattttcgctggatgttttgctaaaatgaactatttcctccgtcacatattaagtgactcaaatttgtccaaatatggatgtatctatgtctaaaaatgtttagatacatgtaataaaaagtcatttaatatgaaacagagaaagtagtagaaaatgtaatgccgtttaactggaagaattggctgctattaaacaattactaaatttttggttagtatcaaaagtttgattaggtgaactttggctaccatctaaaaataaacaccacgtgcgcagaacaagataattacgggattaaaaagaagaagaaaaagaacgaccgctagaaacaagataggacaaaagacataagtcgggataaaaaaagtaaaaaacgagacatgtcaatatgagatgtcttgacgttatcttcatgagaaagtgcatatagtttgcatgccccgttcaaaagtttatttgtatttaaattttcgatatagggaaagaaaaaaactacctcttgaacccacatgttctcccatagcactccgtaaatcatactcagcaaatccgcatatgaggtgcaatttctaggcaatttgaagcagcaacagcttgcaaaagttggaagattaaagctgaacgcaaggttcagtttttcatgtggcttttgattcagaacagacttggaccgtccacagattgatggccagaaattggcagcatgatgggactcgcaaattgtgctatcaggagattgaatcagctgctcatatggggctcagatgttccttctccaaggaggtttggcataacttttctgctgatcaaccattgctccagcatgttgcggcttccagttcaattaaggggtggtggaaaagactcaaaactgctccaaaatgcaatgaaaaaaaagaagatcatctcactcgcttcatatattgtgtggaacatttggaaagatagaaatagaagagtttttgaccaaaaaagcttaactgcacaaagagtacggcgctaatcagagatgagattagcctcccacctcctaagtgaggcttcagcagtatcagatcttttcgtttttcaggtttcctttttgttctttgactgcttgttcagtctgtaaatttgtttgttctcttcttaatccaatagctgagcacctcctaactttcctaaaaaaagagcactccacgtgtcacactaggagatccccctcccacagtgaggggttgcaacctcctaaggagagtcgtcgatttcaaaatctgccggcttagtctctcataagctctcgtaaagttagggtgtgcgtgcgtttgtagagctgaatgtacgtttgtatttacgagcgtgtgcgattatgctatgttcccaaaaaaaaaattgtggcatacaaactttaaaaaaaaaaaaagagggtcccctcccgtgtgtgaaataatactacttatttttcaaaatgtaatgttcataaatttagtccatgatcaaactttctcaaatttgaccaacctttatgacaaaatattaacatctcggtgcaaaattaagatcgttagatccattgatttttttaatattatcctagtttgaaatgttatatccttgaaccttttttgttataatcttggtcgaactttagatgacacattgtgaaactaaaacaaaaaattgaactacaaaatattaatggactcaattctcgtcacattttaaattagcaaatccccagctctcttttttaagagttctaatttttttttaagtcgaacgtcttaatgtccgatcaagtttattgggaaatatattaatgtatgcctagaatatcaaataagtatactatgaagataaatataacgatagatttttacataataataatttatagttgtagatgttggtaaaaaaaattataaacataatcaaatttaataagtttgacttaaatcgaagctaaacgtctcatataaacaaacatagggagtactccctctgatcctaaattcttgactcaaatttgctaaaatatggatgtatctattcttaaaaagtgtctagatacatgtaatattttgacaacaatttaggatcgcagggagtagtattttacatatttatagtacgtttttttgttctcctccgaagtcgccgatcaatttacaaaatgaaactttctgcaccttttttcttttagattttttagactcttactgagtgtgcgagctccgagtagtaaattgcactaaattcttgggccaccgctataattccactcgaccatcgcgttcacgaggttggacgactaaccacaccccacgagggtctaaggtcttgtttggtttgagccgagaaaaagttggttgccaaaaatattaaaaatattggtcaaactttttttttcgcgctggaatagggagctttactaacgattaagggtcacattaaaagcaaaattctggagctcagcaaagtcttggggcggcttagggcactcagcagtaccatctacacccctattagaacgaaaactaggcttatgaactcccttcaaacgctccctactctccaaggacttgcccttcacatctgctggtttaagccggagattacccaacgactccaagtaattaacaaggaactgagcactgccgacaatcgatgccttcccatctccaaaatgacgttattgcagaggtgccacgcttgccagaacaacatcaagtggtgagcgcgcatctccttcgatgatccataggggagcagctggagccactcagggcctctccccagcttgtcctctggtggcagctcccagtgctggcgcatctcatcccggagtgctcgcgcctttgtacagccaatcacagcatgatgttcatcctcctcctcccgcccacaaatattgcaggtcgcgagcacctccattccccgccgttgcctgttcttctgggtagctagggcattgcgcgccagcctccaagcaaaaaccctaacctttgggggaacccgagccaaccaaagaaccttccagtgtttgcgacttccatcggtggtagaactcgaggaaccaggattctgtatctgcaagcggtcgcggatcgccaggcgatgggtgctcctaacagaaaaaatcccaagcttgtcatagtgccaagcgatcctgtcctccacctgaccttgtggaatttgcaggcgcaggatcagctttgcatcatgtggccagaaaaactcattgaccacagcctcgtcccatcttctctcgccctccaccataaggtccctgacaaacttcctcctcgtgcgtttctggaatatatccagaaattttaagggcatcgtcccgagcaagccagttgtcccggataatatgcactttctcgcccgtaccaactctccagatcatgccctttttcactagctccaagccatgcacaatgccctgccacgacgccgatccccccgagctgaagacagtatcatgtatttgtccagccgggtagtaacatgccttcaacaacctcgcgcacaggctgttcggctcatggataagcctccaggcttgacgtgcaagcaacgcctgattaaaagctctgaagtccctaaaccccatgcctctgaagctcttcgggacagttatcttgtcccaagctaaccaatgaatcttgcgatcattttcttcgtctccccaccaaaaattcctcaccaagtgagataggtcttcacatagcccggctgaaaacttgaaaattcccatggcataagtaggaagagcctgcaacactgatttgatcaacacctccttccctcctgccgacaagtacttctcagaccaatcagacatgcgtttattgaacttatcctttatgcctttgaactgatcattcttcattcttccgtttggcataggcagtcccaaatacttctcctcaaacccagccttctcaacttgcaaaatttccttcacaacttgttgattgtctgacgtgcaagaacggccaaacattatggagcacttactcgcactcaacagttgcccagtgctcttctcaaacaaggttagcacctcctggacttgcaaagcttgctctgccgtggctcgaaacatcaacaagctatcatccgcaaagagcaaatgcgagatacccggcgctccttgacagattctcagatcatccatacgttcagtttcaattttgtgcttcaagatgcaagataagccatcatccacaaatagaaagaggtagggtgacaaaggatcaccttggcgaagaccatgcattggggagatcgcctgaagctgctccccattgaggcgcaccgtggagcgtacaatggcgacacattgaagagtccactgtatccatgtgcgatgaaagcccagcctcaccatgcctccaacgccccccaatccactcgatcataagctttttccaagtcaagcttgtatgcacagaattccccacgttcatcattgttcttttgcatggcatgtatacattcaaatgctattagagcattatcagtgatcatccggcccaggacaaaggcactctgttcggggctgatgatatcccccaacagcggacgtagtcggttcaccaagcacttggacacaatcttgtagatcacattgcagagactaataggtctgaaatccttcaacgtctccggatcacccttttttggaataagcacaatggccgtatcatttacatcttcctccatcactccaccctcaaagaatctacatactgccttcgtaatatcctcccaagcacttcccaattccgttgaaaaaacctgcctaggaagccgtccggcccaggtgcctttaagggtccaatctggaaaagggcatcgctgatctccttgtcagtaaacggtttgcacagatcctcgttcatagcttcagtaatgacgtgatcatataagtgcacaatctcactcgggtcaacagcaggatcacgagtataaagttcctgaaaaaaggacctcgccatgcgcccgatctcctccccgtcctcctcccattcaccatcctccttccggagcttttcaactttattcttcttagcacgccacacagccttcttgtgaaaaaaacttgtgtttttgtccccttcccaaagccacgcgatacgtgaccgctgaagccacatcatctcctccttatagagcaactcatccatctctctttccagagtcattttctcaagtacagcatcctccgatctccccagagcacctcagctgctggtggtcaaacttttttgtccatgaattagccaacttttaaaaaataaaataaaaaatgacaaatagcattggcatgccaaaaccatggctattttttttaaataatacgaattatttaatcattattgaaaataatttattaaaaataatacaccctcgacctgggcctggcctactggagctaatcggcttggcccaagccgattaggcccactcggcctcgcccaggccgactggaggccggtttgccaagccacaggccaggaggcaaccttcaattgatttaaacgtatgccgagcaatctagctatcctttttatatagaatctacggagcaaaatgtttatgacatcttcttttctaataaaaattaatgtcctttgccgatcataaataagttcgatgttaatcaaaatatttacggtgcgctgtcacttagttgcatggaaaacaaactaaatagggatataatgcgcacgacggtaccaggaagtctatgttgtcttctatatttcacggaaagaagtccaattttcaccctcaagtgtatgtcactggatcaagagtagtgtaccatcatgacaagatgaccgggacaatgctgctaagtactgtagcacctacgccgccttcttcttcctcaagtctcaccatctctctcattccaatcaacggcgagaagaacccaacgaagactatgattaattagtgagcactaaggaagcacgagcagaattgaggcaaagagagaacatagggagaacagtgggaaggaacaaaggacagcgccacaacgagctcgctgaagaaacataggtcgtgggtcgtcgaaggtgatggtgaacatgaaacaagggttcggtttcggaaagaaacaaaggtgacgatgatagtgtggtttggacggtacatgtgctgcggtgggtgcacgtggaggcgaagctaggatcagcaaaattgggtgagtgtaaataatctatagaaggagaggattgcacgagcaagaggaattttttaggggctcaccgtgggcagagattcgatgcagctgagcagtggctggacttgagtaagaaggccgctgcgtagccactgtggtgcctgggaggtcgcgtcattgtgtcggtcgttgttggcatggcggcggtgtctcttggctcgccaatggtggcaaatacggtagtgagatcttctccgctgacaatgggggtgagagagtggaaaggaaagtgcatgggaaatgtcaagtcagatcagtcaaatagaggccatagtcacaatcagcatctatttggctcagaacagactgaacatatgccatgttagtttgaacccacctagaggggtgatttatcatgtattatatacattgtaggggtacaccaaaccaaatttcacttctggaattattgatcaggtgacatacatttggaggtgaaaatttgtcttcatcattatttccttagtagaccctgctcatgatttggctcatccttccagcttgggccctctttatatggcccactggacatgttctaagcccgaaacaaaaggcccagatttcattaatttcgaatcatttactgtgaatttccagatctgacaatctgaatttgcacaaatctcataagaaactctatcattgtgcctaatttatatgctagtactgacatctatgtgatcttgtcaggtagaacacaacaagtacaacagtttgaatgaacaactcgcagaagcaagtcttcggcttaggtaatgttttgtttgatcctggctttgtgtgttaacttaaaacttgtttactactgatgccatgttctataatctacatagacatatgagaggtgaggaacttgaggggttaactgtcggtgaattgcagcagatggaaaagaatcttgaaacaggactgcagagggtgctttgtacaaaggtagggtggctccctttttattcttcttaagtttagtttgggttgccagacacaatgtcaatcgtttcacacgacatatatatgtttctgcaggaccaacaattcatgcaacaaatcagtgagctccaacaaaaggtgaggaatgagtaaactccactgctttttaaaatctgttcttagaaaccggggacagctatgacccaggtccttttttgtactctggacacaagtcaaattatcaaatcagtggcttcttttggagtattattattattattattattattattattattattattattattattattattattattttaggttgtttttattgtttttggttttggaacccttttcaagaaagaaattaataagcttgaattgcaatttaatactccctccgtcccatattccctccgacctatattatttgtctcatttttgtcccaaaatgaatgtatctatgtttaaaagtgtctagatacatgcaatatttcgaaaaagtattaccggcagcagggagtatgagacttgcatgtaactaacagagtaaaatgtgttccgtgggtacttacctcaactggtagccgtgtaggaaataaatattgggaaccttagtggtacatgcccttgtagtatgctggagatagaaatccatatgaatatgtatgcatatgtagtagatatgtgcatgtcgtgcgcaacaaatcagttcccaaaagttgtcacaatagcatgatttgctaaacaagagaggtacgttgactattatttgtgaagtcaaagtagaaccttcttttcctgggaggaaggtggaacttgtcagttatgttacacatcaatacttggaaatgtaactgcgcatattatgaaattcttatcagcaatttctcagtgctttctctgtagattttcggacgtgggactttttttatttgctttcgaaatttattcaattaatcagaagaaatgagtatttcaacacacatgcaaccgatggatttttgtttgattgcatttttctcttttggttttaccatccagcatcacaaaatttctaccccagatgattattattatttggttaatagaacgctgtgtacttcttcaagaacattttataatgagatttcgtttttcttgtagggcacacttgtggcagaggaaaatttgcgcttgagaagccaagtaagaagatatttgctgcatctgtaatcctgcacttaatcaatctttaaaaaatgcaatccgaacaaccattctagtttctctataattggtgggggcggcggaacacaaatttaagtgctgctcgtgtgattggatgtag

SEQ ID NO: 1909 - DNA, 6006 bp, Brachypodium distachyon
  Intron number 2 from transcript Bradi3g20620.1 (locus Brad i3g20620) derived from phytozome v7.0 (chr-ID Bd3; pos 196 47111 to 19653116)
attgtatcctgctgcaaatcaaggtacactcgtttgcctaatgttagggcattctttcttatgttttttttttcattctttcttatggttgaactcatggggattagtagttttacctagtttcctcatttcttaaccctctcttcatgtggtaatgtttaatcttccagttctttacccagacctggtttcctagtttctttagtcttactttgatagctcactcgtgcattctgatgcattttcttgaggtaatattctaattttacttattattggacctcacatgaattgttgctatattcatgttgatacggtcaattagatacacagctttgttgcatactgccatgttctcatgtcataagcgtggtaagtcttatctctgggtccgtggctttaatagacaagtcaattatttatattctgtcttttctttttcgttttttgcaagggatattctatctcttctttagcttgttttatctctatatctattctttcaggaaccctgatctataaggagtctttgtcttcctttttattagccgaagaaacgaaaatgaaatatcccctctagtgtttttttgtttgtctaaaactccctccccttgaagcactgctgcctggacactttctgcatggtagttaaccatcatgatccagttattctattgcatgagttatatattttttaagtgaatttgtaggctagttcgtacttatccttttgatagtattctgccatctgattgttgtggtaagtatcttgaaactacattttgttggtctaactagcaggcagctccaggcagtgactattagcttggactttatgcttcaatttagtttggaggggttttgtcatcatagtgttttactatctgtgcagccccattagttagggccccaactgagtacacgagactatcgtagttcgtggatgctactcttcacgtggcagcaacaataggattggattagttttattagagttaagattagattgggttgtcaggatgatctatttccctaatattagagatgactttcttaaggcaagccatctgagatctacataaggatgcggttgtatctcctatggaagcaaccaattagcccctgtagtgtgctcgcagcttggccgtgcatctcagattcttttttttaccggagtgcttctcagattctggaccatctaattcttgtctatgacattcgatatcaaaggaatcaatcgtgaagtgtctttgtaccatggtggacacgatcagtgttcacttcgctactttggtgcaggaaatttttctgagattttcagcaactcggggcttgatttcaccgagataacaaaaacatatgctaaagatccaggccgagacatcgttgaggcagaagtggcataacgttgtgtttgtcctttcatcgtgccacattgctggtgctaggcggtgctgcctcaacgagcagagctgcccttggctgtgtgccggcggtgtcttcaccaagggagaagacaccaggtttctgattcctgacttgtcttcatcgtcaacctcgtgtcatgcttatggtggagtggaacacattggctgccatgtggtagattgtgatgtcgttgcatctgtacgaccgtaggcatagtaaatcacaggaagacaactctgctgccctgtgctgtttggcccttctgctaccagctttctcaacgtcgagcattgtaaggacttacccgtcatgaccatccaccatcaccgaacatctcctggatgaggcactgaatgaccgagatggaataacctagaggggggtgggggtgtgaataggttctacaaatttccttactttcttttgcaattttaggctttgcggataaataaagtgagcctgatgcaactatgttaacaaacctatatgatgagcaagatacttcaagcacgaaggctatcacaaattaaacagcacaagtaaccacaagtgaaactagcaacgtcagagataaccgaagcatgcagacataaagatgtatcccgatgttcactctcttgggagagtgctaatcaccgtttcggaaaggtgcccggggcttacaccgaagtgccacaccggagcaccaccgaaggctcaccttgtcttagagaagcttcccaccgaagtgaagctcctgggaagaagggtggggccttttatacccccacacaattctgcccgttaggacacaatttctgaagccggaggcaaaatcaggaacctccggattctccgggattcaaaaacagtgctgagctccgaaatctggcctggcatctgggctgggcttcagggtagtccagtttcctctagatgcacccggaggctccggcctgagatccgggactcagaaacccacggcagtgcccagattccggaccagcttccgggttgagctccgggattgttcagtaggtactagactcacccggagccaaagctggagcctccgacctgaaatccggcctgcacataaacactccaaaaataggattttcaataggcgttttaatgtaatgtaaatatgatttgtcttggctattttcttggggataatatgtggattagaaaggtgtatgttggaaagcgtaaatccacttgaagttcatcacaaaatccctcttaatagtacggctttcctatgactcaaagaaggtaaaagatgcgtaaatttaaatgtagcgccttcttcttcctttattctcgtagccaatactccatgcatgcttagatgatctttttgattaaaacgtctccacacacttagcacacatgattaaatttctaagcatgatgtcacatacaccaaaacccacttaggggataagatgtcctttcaatctccccctttttggtgatagatatgagacaacaaaatatgtaaatgaagctcaaaagatagtctaagcatctaagagcactccctctaaatttgtgcaccaatttagaatttgttttgaatgccaagcacacaagctagagagaaatacgtctcaaaaaacacaaaccaaagtgggatgatacaaggtgacaagatacaacaatataaacaaccttgtgcccaaattgtgagacataagcaatgaacataaagcattctcacaataggcacaaatatacaagatacatatcacaaagcatgtgtaaatggatatatcacaagactatcacaataataagcacgatatgactaagtctcgagatataccataacgaagcataacaacatccaacaagctatataagttcaaccaccggaccaaagtacttaagctattacatcccacacaaataacatagttcaaacataagagttcacaagtccaaataaaaaccaactagcaggaggacttgatagcataaacccataagaggaacccgggcaagtcctaaataagctcccttctactcaacctctccccccttggcatcgaaacaccaaaaagggagaaggaaaagcacaaaggatcgatgctacttgacccaaaagctcttctcttcttgaaagtcttcgccatcgtctgcaccttactcatcaccttggtaagcactctcaacatcttcctcttcgtcctcatcactagagaacgggtgctcatagtattcaagatcactctccttgtcctcagacccagcaggagcatcttcagcattcttgcgtcgttcagcattggcgagactcagagccgtcttcacacgccaactagccttgaacaacctcttgtgcatagctttcacataaaacaaggatggacttgagatcaatgcgagtggcattctttcttgtgggcttgcgcatgggagagtcccgtgccaagccctttccatgaggcctagacccaccttgctcagcaaacttagcagtagcagtaggtccatgtggatgaggatcacgaaaattctgagaagggatagcaggttgcataagctcgtgatggtgacctgatggggaagaagggtggggccttttatgccccaacacaattctgcccgttaggacacagtttctgaagccggaggcaaatcgggaacctcctgattccatccgggattaaaaaatagtactgggctccggaatccgggccggtctccggggtggtccagttgcctatggacgcacccggagccaaacgcggaggctgcggcttgagatccaggactcagaaacccacgacagcgcccagattccggaccatcttccttgtcgagttctgggatggtctagtagctaaacactctgaaaataggattttcaataggcttttaattggaatgtaaataggatttgtcttgtctattttcttggggataatatgtggattagaaaggtgtattttggaaaacttaaatccacttgaagttcatcataaaatccctcttaatagtatggctttccgatgactcaaagaaggtaaaagatgcataaatttaaatgtaccaccttcttcttcctttatcctcgtagccaatactccatgcatgcttagatgatctttttgattaaaacatctccacgcacttagcacacatgattaaatttctaatcatgatgtcacatacaccaaaacccacttagggaattagatgtcctttcaggcatgtaaccagtttgtctagcatggggccaccaagggctacaaggaccataaggtgaatgaaaaagaagaaatagggaatagagaagcgcttgacccaacagaagagccaaagaggggaagaagtgcaccaaccggagtatttattccataggatttttcttcagtcgttaatttgaactccatcggatttcacttcagttgttaattttgaactggaattggtatggaagttcaaaacaaatccgcgaaaatattaaatagtaaccggtgacgtggcctacctgagcatgcaatgttttaataatgttgattaatcttcttaaattaactttcaataaaaaaatccacaaatcagtatttgaagtagatatgtatgaaaaattggggttacaaacttacagtgggtacctatgcatattgtaagagttgacaacttaattggcactcatgttcatcagtattttcacgtgatgaaattagaatccattagactagaatgtatgataggaatgtttggatgcttgatagaatgtattttcgtgtgtatttaaaaatctcccctattggctgacaacaaataatctgtataaacacaagtagacgctttggctactgccattggtaggtacattttgcttcaattatttgtcttgcacattctgagaccataaaacactgatctcacaactagtgaactgaagtagctttgaagcttcagtagtcttaactttgcgaaacaagagaaagagaaggaataagttgccatgttatactttgactgatatttgggaaatcaagttgtgctccgagcgaaaggctatcctgagattcttttctgtcccttgaacatgtacatgatagtgttactctctcaagtgtacttcagccttgggctttacttcatattttataggcgaaatgtggggtgcaattgcagattgcagtctgaaggatgcattttagcatttttttttatattttcaccgcagtttgtaaacatgctgtgggacagtatgtttttccaaaactgtaggataagagatagcttatttaattatcattgaaagtagggatgttaactaatgaggtttaggaatgtggttcttctggattcaaaatggaaatagctattctgcaccttgcgcgatattgatttgtgcggtgtctctttacttgtgagaatagtatttggttcctgttataaacatctttataatttagggatgagtatgtgcagctgcaccttcatctacttcaaccctgacccaagatttgatgcttgttacacatagcatatacacactaatttcattgtcttatttcactcaaacatcttggcatatctctaaacgttcttgaatcctctacagggtgtggc

SEQ ID NO: 1910 - DNA, 1657 bp, Brachypodium distachyon
  Intron number 3 from transcript Bradi2g58900.1 (locus Brad i2g58900) derived from phytozome v7.0 (chr-ID Bd2; pos 566 74761 to 56676417)
agcagaaggcgaccgtccacaagctcgtctccaaggtacgtgccattcatgaccgatcatcccatctccatttcgagagtttgcttactttcgtaaaaaagatgaacccggcctgttctttggataaaattgatttttagatgaaaattggatacgattaatgagctcttttaagacaatttatttagaagaaaaaagctcgtttaaaatgatgagtgctcatatatacctcctgcgggtaattcatgagtagtatttaatcctggccgcgcaataattgctcaacggcattttaggacaatttcacttatggtaggttatcggcttgttaaaagttgaaggttttgttttttaaaaacgtagaaggttttaattgtataattaataatttctaatattcaacatatgctttgtagagtttgaccaagcttatgggaaaaaaaaatcaacatatatagtgtcaaatcaaaatattatgaaaatatatttcagatgtgtataagattggtcaaactttagaaagtttgatagtcaacaaaattatgcgtcatgtattttggaatggagtatatatgtagtagtactatctttgttcctaagtatcaaatgttctaactttgttctgagtcaaacttcctactctttcagtttctaaagataaggtgtattttgttaactttgacagagtctttgaccaacaattctcttctttcatgccacgcgtgagttgtatgtggattaaatcatgcatattactagactatacatgttctgatatacggagtagcttccaaattgattttttttctttcaaactattgtggtaaagtgaataatttagtatcgattttgctataaactaagtctgagattagtgtaattgtaaaagagactagaaatttttggtaactgtagatagcaagcgctctatccccgaggtggggacgggatgatttctactatatgtggatggagatgaaatagcaatactcgagtgggtgcagatccgatccgttgccacccctatccgtactcaggattgcaaacctatgtttcttttaactgactaaatgtttctagaagtgttaccgatgacacaatatatataagaaacaaattacacgtattaatcaacatgttactaatgacatgcaaatctgttttacgaaggctacataccgcacggaggattatctacaatataatctttggaagggaacaaataccattaattaattagcataataatcatattgttttgtttccttatgtgtcaccatgctttaatgatctattatatctttccttaattatctgtaagatgcaaagaccatattaacctcatgcagccatttacaatgccatgaggtaatggtagattttagccattgaataacatagaataaattgtccataaaatttctaaatctgtttacatatatgccatgcaaatctgttttaggagtaccttaaatttcaataaaagtagcctatttctaaatcaacttctcatccggccacgcgcccacgcctcttgattcaggcaccgaatgagtaatcctgttgtgatgatgacattacacttactatttcacctctgtcatccaatcctcatggtgtgtgtctatgacagttcccggcggccaacttcacagtg

SEQ ID NO: 1911 - DNA, 957 bp, Brachypodium distachyon
  Intron number 6 from transcript Bradi4g19990.2 (locus Brad i4g19990) derived from phytozome v7.0 (chr-ID Bd4; pos 229 48478 to 22949434 reverse strand)
gttctttgcctcctgaacaacaggcaatcagttaatcttccattgcattgttttccccaaacttttttccatctgtctatctaatatgaatgttaccttcctctcatttttcatttcgaaatcatagggttctgcaagtaaaggttttggtagtttttttttcttttgcaccacatttgtggcatcctttgaattaccaaaaatgccttgacatattttctttctctgaaatctagcaaataagttcctcgaacttaaagtttgactttgtttgagggtctatgcgaagtactttcaaatttacacagcatacagacttacaaagtaacctgaaaaggttctgtaaggctttctggagttatttttcagcacatctatagatctaaatcacctacaaatcttcaattacaaagaatgacagaatatgttttttttcttggatttagaaatagttccttgaactatctttgaatttctttgagggtctatgcaaagtactttcaagttgataatttggtacaacatacaagtcacctgaaaatggtgaaagatttcttgcaattgttctcctagtttttaagttatatgtactcttttatttgactataagaagctgcctcatctttaacccgtgatcattgactaataagattttttatgagtgtcgcattgacttgtaccgtatttgttattttattgagataaaccatttctacttagaaaaaaaagtgaacgttttgttgttttcttcaagctttttgttgttacaatactgtgtattcaagattttgtgttaactcttggcatgatcttgctctctgtcattccgtcagccttcatttgttttctgtatttatcattttgctgctaagcatttgatacacaatagaattattgctgatctgttcacttctgataataggttcgggtatttgctccagcacctccagagtgtcg

SEQ ID NO: 1912 - DNA, 5536 bp, Brachypodium distachyon
  Intron number 6 from transcript Bradi4g36510.2 (locus Brad i4g36510) derived from phytozome v7.0 (chr-ID Bd4; pos 417 15686 to 41721221 reverse strand)
agtggctccacggggaggctgttgcagctggaacagtaagatcacatgaatattttggtataaccacttaatcatgattttttatctcgttttcttaccatcttcttctgtttccgggatgccacttccataggttatggcagccgacatgtcttaccggctgggctggatagatgagcccctcaaaagacggatatttgacatactagagcaagccaagcttcctgttgcaccaccaaagggcatgacagtggagaagttcaaaaagattatggctgtaagtatcttaataatggcagaagttcaaactgttgtcttctttttatttattattttgcatgcatcgctctagcagacatatacgtcttgacatcttaagttgtcgctttagtatcgaagagcattcttacctcgtacaaaaaaaactcgtacaaaaaaaagagcagtcttacctgattttcgcaatgacacatatcaggtcgacaagaaggttgctgatggtttgctgaggctcatccttctgaaaggacctctgggaggctgtgtttttactggcgattatgacagaaaagcccttgatgaaaccctccgtgcattctgcgataactgatccttctcagttggatcttcagcacttttgtatactaaataggctgtaatatcatatcttatcagaaacagtgtgcattgtatgatatccttgttgttattctttttgtcgaaaataacggaatctggttaggggcttgtagggcatctccgtagctgatcaattttgatcagttgttttgaataacggagtttgtttctagtatatcgccgttagcgattcctgacggctttacttctattgtaataaagcttataagatattataaagatagtgttgttgcatgacaaagtgtacaatatgtgtgtcctagctgttcaataacaagtgtatatatactgtttcttttaccacacactgatctgtcgctggcttgctgcatgctatcgaaattcagaaatcgtgtgatgattgtgtcgatcttgaggagcataacaagtgtacagttcagtccctttacttgtccgacagttcttcatttttatcttggactgggctgtattgtgttgcttgttgcaagcctcaagtgttcagacttgaaaagccttgctgactctatgaagcccagcatggcacagctagcagtgcagctacctgagctcgatgatgaaatgcaggggaacttctgtgtttcgaacacaaacaacaaggaaccgaatgatcttgacataactttagcgagcatgaaactttacgagcgccaggtgggggtggagtgcaactttcgagatcggatgttgattgcagactttatctctcagcgttcataaagacgacatctacgtgacatccaccacgcggtaaacgtggtaagctatcttcaaaatctcattatcaaaaagacgacaatctacatcgtccccattgcgtgccataccggtagccgatgcgaactgttcaatccgtcccaagcagcatggccggattctatcttgtacaggacatcgttgccggcgatctgcttggcacagtttaagtaacgggatctctccagctcaagagaaaaaaaagcgcagtacgaggcacaacgtaccactgccgaacatcctccgccgccgccgccctctccgtttcgttgcccatggcggcgaccgcctcttccttcctcgccgctgcctccgcctcctgcgtggctatctccaccccctcgccgtctcgctcctcctgccctcatctgctccgcgctaattcccccgcgacgtccctccggagccgtctcgtctctgccgctgctcccgcgatgcagccgccggtggagtcccgcgtctccacggtggtcgacgtcgatctcggcgaccggagctacccgatctacatcggccccggcctcctggacgagcccgacctgctgcagaggtactcaggatcatcatgatctttgattttgctccattggtgactccgcgcgtgttggtcatttcgtgatcctagtgttttaatccgcccaggcatgtgatcgggaagaggcttctggtggttaccaacaccaccgtcgcgccgctctacctggagaaagtgacctgggcactcacgcacgacaacccgaatgtttcagtggagagcgtgatcctgcctgacggagagaagtacaaggtcatggtgcgtgcgggatccagccttctgctcgtgcttcagttcatttggatgtaattagtgtaacttgttgtaataatcaatgtgcaggacacgctgatgaaggtttttcacaaggcggtggaggctcggctggaccgcaggtgcacgtttgtcgcgctagggggtggtgtcatcggggacatgtgtgggcttgcggcttctgcgttcctccgtggcgtcaatttcatacagataccaacgtctctgatggcccaggtacgtatacactaagctcgattaagattaatagagttctgaggacatctgatttggtttctaatgtgggtcgttgtatgaattgcttttagatggattcgtctgttggagggaagacggccattaaccatccactgggaaagaacttaatcgggacattctaccagccacagtgcgtactgatagacacagaaacactgaatacattgcctgacagggagctggtttcaggcataggtgaggtggtgaagttagcgctcgtaagagatgcacctttctttgagtggcaagagaagaatatgacagcattgttagcgaggtactactcagcaggttctaaagttgatattattagcatgctctgccacaaaacgttactcagatttaagaaaaatatagcaagagaaagtgcggcattagacctactagcaagaagcccgtgctttgctacggacctacaaataatatatgtttagatgcgttgatcaattgctagttatatttcaaaaacatgcgcgatgagcacaaagctaggtgcttaggtgtggtccagacagtcgtgtcgtgggaataccaacacgtcccccctgctggcttcctccctactaactttctctcaggcgaccaccatgtgctctgtgactctcctctctcgttggatgttttcatctccaatgtatccagcggactgttttcaatgacaagaatttattatcggatggagtatatgacaacacatatgtcttcctcgctctccacatatattgggttttacccctgattttttccaccacctcgccacactgagttgctttgcggtctcacaaatcatgctgccttttgaaatcgatggatggagatgcaccaaacacctaatcttaacgtggaactatgaaaaatttagcttccacactcgacaaacaagaggtcgaccattcctaacaacactttgctgcattattggtatgtgtcatgcatgactgctagaacaaatttgaaatttgtataacggtttttgctctgcatggtgttattgacggagcaaggtaataatatcctccaaaagacatggcagacaacacacaaaaaggataaaaaatacaagcattgtgcgaagaaatattacattatttatttttgaaatcagacgtgaaaattgctccatagattgaaaattatgtatattttttcggaaaagaggctttaaaattatgtaaatagcacgtgtataatgtataatatatctcacgaaaataaatatcacaactaatcacatcttttttttttcttacagcatgttaaatatccagcatcgcctgacttttatgacctccgacgtgtgtcaatatagacttttgagtgacactctctagcagctcacttgtgcgaaactgaaagataacaagaaacaatgttttttagcgaaaagaaacagttaatcagaagtttttttgtttgagaaacagttcatcagaagtaagaacataatttttcgggcccgccctaccataatggtattgtgattttgcctcttgggcctgggaatcgctctatgcctctatgggcctgggaggctggcagtcattgtgcttgcgctcggcctggggagtggggactggttcgatcgccccgtccagaaaccagaagaggctcgttcctcgttcgctccgctctcatggagcctggcggcggcgctagtcgctagggattagggaagtagggagccagcgagactgggagaaccggagagggagtcagggaggacaaggagtccggaggactagagcctggaggagccgaggagggacagcgggagccggggggtcagtgactccacgactggccgggcgcggctgcgtgcctgcctcgctgggcgctggccacttcattgccttgggacttggctgtttctgttctttcggaccttcggtgatggacagaaggaagaaggggaatggcacaataccacaatttgttaagatcatacgaattataaatacgtcttgatttggatttcctgtttgtagagaaccaagtgccctgacctacgcaataaagagatcatgtgaaaacaaagctgaagtggttgcgcaggatgagaaggaaaatggtcttcgagcaacactaaacctgggtcatacatttggtcatgtacgtgttatctttgatcattgtcggtttttaagttgaaccaatctgttttaatgttattatgatgtaccgcgtaaatatgctcggatgagttgctaaacctgcaggaactgtatttttgttgctgctacattggaacatatggtggggactatacttaatttgtttgtcgcgctgttgtgtcggtttgcttaagtcactcgtgtgatctgtgagtattttctttgttgggtgcatgatgtgctagcaataacattatatttagaaaatattcaataggcctctagcggttaacatctgaaacaaagtcgtgttactgaagatatttttcttgatgcttttttaacacagtttctccttggtctatatgctagtacatccattctgcaaactgaaatcgaaattctttagtttatgacttcaaatcctgaattcatttttcaagatgaaccatccttggaggtgtttttccgtgtttctcatttgtgcttccacatacatgcaaatatgggcacacagtagagaagtcttgaaacccaggccggaattttcttgttgctgcagatttagaataactctaagattcctcgcagaaaaagagagaataactctaagatcgtatgaattctgatttacaatttgggcaacgtcgtaccagaaactaaataatcttaactcactagcttttgggggaatttggtagggactttgtgttttgtgaagcatccatatgttgcccacttatcgtttcattaattgccaggctatagaaacagggtttggccatggagagtggctccacggggaggctgttgcaactggaacagtaagaccacctgaatattttggtaccacttcttaaccatgattttatctcgtttccttaccatcctcttctgtttccgaatgccacttctgtaggtt

SEQ ID NO: 1913 - DNA, 2747 bp, Brachypodium distachyon
  Intron number 10 from transcript Bradi3g37080.1 (locus Bra di3g37080) derived from phytozome v7.0 (chr-ID Bd3; pos 39 413615 to 39416361 reverse strand)
aggagctgttgcaggcatcttgaaggtttcatttggtcagcttagttttttcttgtgctgacttgtgtatgttattctgcaaaataacatttaaagagaaatatattctttaaagtatgcttaatgccacttagatcttgtttggctcccaccatttgggcctggaatcctggaattcattttggattctaagaagtaagaacaaacttttagctggcacacagaattgggtataggaattcaatccgaaattccgtggaatcgcacctatacctaaccccaattcttctcttaaacgcattattcatctggatttgcctctcattttacatatccatgtgacaacaaacatgatttttgaatccgaaattcaaattcaatcaaatgatatcctgtaaaaaatttgaaatcatttcatttctaccaaatgaaatgaaatgaaggctgccaaccaagttgttagagttcacgtgccactgaaatgatctggttgttttgtttttcttttcagtccggaagttcagcatttttctctgttgtgaatttaaaactaaatttctatcccctgcaaaaaaaaactaaatttctaggatatgatgacttcttccaaggcaatgcgaaaatgggaattccaacagcttattatgtgattatcagatgtactttatggcttaggttacatacatttcagttctaaagagaaccagtggggaagctagagcagagaactattgggttcagctttactgcttagggtgtaatcttgcactaacaaataatggataagctaatttaatgaaggattcggtgaaatttattgggttcacctgcacccattgcttatacaccagcgtcgcccctgaagagaacgtggcatcacgtttcatcaagggtgcaaagtttctagggaactacataaaacaactagaactgtatcggttagcagtagagatatactatttgagtagtgtttctatgctcttcgcaaaactaccacagatcttaaagcactatgattggttatggagcatttggtgcttgcaatttgccagtcagacggtcgagtttttgaagagcttcacattttgcagagcatgaagcactacccgttaaccgtggtgcttgcagcatctccacaatctttgataattgtacattttataaatttttagaatcataacttttttttggaacgaaaagaatcataactcactggattcttgttctaccttcctagttccatgaattttgtagtgtgctgaacttttatgtttatggaggattttctaatagaatatattcctgaccgatgtaaagaatctgatccctgtcattcttggtcaaccttactagttccatgaatttgtagcgtgctgaagttttatgtttatggaggattttctaatagaatatactcctgaccgatgtaaagaatctgatccctgtcattcttggtcaaccttactagttccatgaattttgtagcgtgctgaacttttatgtttatgagattttctaatagaatatactccagaccgatgtaaagaatctgatccctgtcattgttactctacatgaactagatgagaaccatcttcctgatatgttgtccatttgttacagattttgtcctccatgggttgtgtgaagtagtctggatctctaagattgctatccagtggaaatggtcatgccaaactataccatgtttccttcattcaaaggttttaactatctccaatttgacctatcatgactccatcccaaatgccaggtgtagctttagaatctgccaggtcacacccagccatggaaaaacccaattacttttacttgcttgctggctcaaaaactaaaggcggcgctttctttcatgtgccaaaccaacgtgaactcatgcctgaactggatgctttaggatcatggaccaatttgtttgggtagctatgtaaagcatgttcgttggctctccacaagatgttagtcccagctaggaccaaatggtgtgtctgaagtacagtgataagttcttgttgtgatatttacccatgctgttactattctgattagtacttgcgtagttgcatgtgtgaatgcaaacttacatttaataaagaacatgaactgtaactgtaagagtgtcttgcaaggtgtacaattatttgtattctgctcgaaagggatcttgtagtggaaaatatgaggcaatggcaaaaatctactggagaattgtactaaaaatttagcgaatatcctggattttgctaaatctttacaggctagagtgaatttagaagttagaatatgagttgccaacatatggaagtaacatgcataccttcatgtgcatcaataaataatatttaggttattttatttaatcttccctttgtgcagagatggtttatgtatttctgaaaacacttcattttccttacaatgtttttgtttatgtttccttactacttttggctaatatctggtaaagttgcaccgtttggagttatcaggctctcaatgttagttttctcttccggtcttccctgtagaattctttatgaacagagagaactgaagtgactgcgacatcaagatgcaaccccaggggttcttaattactgcattattaatcagccgctgtagctggtgtcttacctggtaacgttactcaaggggaaaaataatgcttatgatgctatcatttggatgtaggtgttgctttctgagcaatccctttaacaatcaga

SEQ ID NO: 1914 - DNA, 1591 bp, Brachypodium distachyon
  Intron number 1 from transcript Bradi3g45030.1 (locus Brad i3g45030) derived from phytozome v7.0 (chr-ID Bd3; pos 469 65270 to 46966860 reverse strand)
acaaccctgacggctcctgccactatcacccctccgtaagctccctcctcccgcccctaatacccgcactcgcaaatttttgcatcgtttcgcatctttaagcagagtggatcatggaggacacctttcgtctccgagtttgtcggcgccgccggacagttgtaaccccagttctccggtctggcgttagtaacttgcaatagcaaggagtcaaaggctataggtgctctacgaagaccgtgaaggcacgatttggataactgctgtgtctaagatattgaaatccgccgaatcttaccgtagttgtgtactcttggagacaatctgtgtaactctttaagagacgatttgggtaatgatgttagtattaagttgttgacatatcaatatccgttccatgggtgatggtagattggtggcatctacctggtaatcgcattactcagtcagaaaggctgttgatgccatcggtaaaagaggctagaagtaaatgcaatcacaccttttggaatttttttctttgggttgctgtataacctggaattttcctgttgaggaggcatcgtgtgaggtgctgatctttatttgttttatagatggatcacaataaaaacaagggaggcaagggacctttgctttgtttggtacacatcttgcattaatgttttttacaaaactggtccgctaaggaaaaagagtaaattccacaaagctacaagtttaatgtataaactatcactaaactcaaatttaacaattaatttcatagaactatagaatgtgataacacgtatgaaaaaattgcagatttaggattttgtgagcatcagaaagctgtacttctgcaatgcaagcgttccctgaatctgtagttctttgttgtctgtctttaaatgtagctttcttatacagttggtctataaataattgagcatgtagttgtgagaaattgttctttaaatatatagtattgttatagtttttgtatcaaagctgtagcttcagaaaatttactctaggaaaatagctatttgcaacactttttcgctgctgcagtgttctgttgtaaataattctaattattctgcaatgttttgataccaatgaagaagtaactgccagacaaggaagagcatatataccttttgtcttttcaaaaacacaaactgcccaacaacaagcactattttttacgcaatgctaaatttgattctgatatttaagtaccagttgaactattgtaattaatccttttttttactactgtatgttaacaaggtgcttaaggaatatccgtcatagatctgagattaaatagttaaagcttggaataagtaagatatgaaccaatcatgacatgggattaacttaacatgcatttttgcctttatgactggacaaacttgatttcttttttttatttggttttcatcaagtgcttcagacaacatatctgcacccatgcctacttgcaattacagatttacaacactaatttcctatttgtcaaaaaaaatgtgttttgacacctctccccattgtttgatttgttgcagggtgtaagttcttctgctgtactcgagggattgta

SEQ ID NO: 1915 - DNA, 3155 bp, Brachypodium distachyon
  Intron number 4 from transcript Bradi3g39950.2 (locus Brad i3g39950) derived from phytozome v7.0 (chr-ID Bd3; pos 421 94893 to 42198047 reverse strand)
acccacatcacaacctttttgctcaggtattgcatgtatatagttctatatttattgttttgagtaatgttgatgcatggttaccaaactggcattacagcaaattagttttttttttgaaaaggctgcaactgtccgattgtccatactctatatagagagtttatctctgaagaatgggacaacttcacggaatgggcatatgaagtgcaaagtctgcaggcacatactaggtgcattcacccaagattagtagatgagggatgggtcgattagattgggtgtgctttgagaatttaggaaccttcgatacttcctgacatacgattgggattatttggaaattatatctgatctaagcaaaccttattgatctctggctctttgcatgactgatcctagatatgagttttcacatactagtcttcttttctgtttccccagctttgtcagtaagagacagtcaactctgacagaaacgagcaatctgagtttaaatggctgtcttaaagaacaggccactaaaacaagctaatagcaacatataaacaaatggctttaattcagaacagcgatcaatcaatgaaaaggaaagatcacacaaacattctgagaattgtatgcttcacttgttttcattgattgatgctctggagttccattttgaaatacgaatagtacatattaagaaggcaaatacattgcatgatctctatcgccagctgctacaacaaaccacattttcctgatattttttccttcataattatttaaatctaatgaatcgcgttaatgttttgttgtattttgctaaaacttcaatagtggagtttttctaacctaggtccagctgcaccgaaaaatataaaacacactgtgcggaccagtacactgcaaacttgttgaattcattatttcttcattgaaaacacatgctattcatagttttttcttaatgagggagggggcttgttggtattacattagttgcacgctccaatctacaagacgtgtgtaccgtggaattctttggtccagcttaacctacattatggtaaaggaacgcacaaaaagccatgcgtcccatcaaatggaatactgcccaaatcccaagtggcccgcgtccccgcgactcagcacaagacaagaagagagcaaggaaaagcctatgcaccttatcacacaatacaaaaacaaaccatttgcatggatttctttgctgatcggactgctcttggcatcgactgatatataagaaattctcagtggccttacaaatagcaaaacagttgtaacggtatatatagatgtaagaaatgaacagatgacattttataatactgttttttgtccaacctaaggtataacaaacttgccagaagtaactatggcatcgctgttcgataacatgaagccatcacagacgcagattcatcgttcaccaccagagagatgacagtcctgcaccaaaggtagtgacacgatctgtatcagaaaatgaaatgaaagggacaaacctgacactaggtcacaatttggatttgtacaatgccttaaatctagtcgatccccgtgttacagtcgagatcttgcggtatatgcataaaattatgccttcaccgtaaaaagtagctctgcattatgcacatgtccagatccagggaaactaatgacatttacctgaggcaagaacggcagagaaaagcacgcctgtaatggccgccgcgcttgacgttgctgcgtctgtggaggagtcacagttggaggttgagttccagtccccgcataggcacaggtcagcgtgactgtccctgtcatgaccacacacccctcccgtggcaaggcacgcaccacagaacccccggttggcctccggcagctgccatgccacccggataccatatgtccatccacgggccccctccgacgtccgcacaggtgccaggctgtatgcgctgctgtacccctcacactggagccggctcacgttcactgcccggatggcatcccatggcatcgcacagcattcaggtggcacagccaacccatatgctgatccagatggcctctgaccgtagtcgtcccaagccgggcagccatagtaatccccacaccccataccagacacgttgttccggcatgtcaagtgcggccggtcagggaagccctggaagagtggtgagttggcgcggcagcccagaaggaggaacacgttgtctggatcaggagccagaaatgtggctcgccatggctcaagaacgaatccattgccgcgcccgctccgggagcggtcgagcgcgcggcagtcggacatggccggatcgtgcagagtgaggccctgataagcgtagtcgatgttgaggacgcggtaggagcctgaagggaggtgtaacatcagcacacggttgatgcagaagagcaggtcacgtaaccccgcgtggccgcaccctgagcggagcgcgaatgggtagtccaccgtgatgttgccgcagaaggaccgacacgttgtcaccggcacgttggcagcaaggacggccggcgccgccatggagcatgcgcatagagtgagcaatgcggtgatgtaatacggacgcgatagcgccattgccctgttgcaaacaggccaggtgtgtggaaattaatacaagtgacagtggcaagagcacttgagtgctaatatggtgaagaagcaacaccgatggattctttgcttgcctttgatgaagagctgggggcatcatttgcttttctttttcgatgcttttgcttttgcttttcttactttttagtttttatgtcattagtctttgtgtccactgctttcaaatctttgctcttttccatcttgtataacaatgaatgctacggagtacaagaattgggtaatgagatcgagagcccgtgtaaccaatatacttaaagcttacgaaaaatcttatttttctgcatgttgacacctatgcctgattctgtgattctaggctactgttagtttgtttctggcgtcagttcctttagctctattgaaatcagccactgactaattgtgacaacagaagttactgattttgtttaggctctaaacaaaactgatatgctctggttgttgctgcttgacaggtcttgggcaggaagtatatcagactctatcaccc

SEQ ID NO: 1916 - DNA, 3939 bp, Brachypodium distachyon
  Intron number 1 from transcript Bradi3g41870.1 (locus Brad i3g41870) derived from phytozome v7.0 (chr-ID Bd3; pos 436 70700 to 43674638)
ggaggccgtcaaagaaagcaacattggagataatgacagaggcaaagatgggatcatatccatactaaaattaagctacagacactttttagaatagcgcataaatttcacgtgcaaatttttagaatcgcgcacaaatttcacgtgcaattagaatcgtgaatataatttcacatgcaatttttagacacgcataaaattccgcatgccattttttgaatcgtccacaaattttgacgtgcaattagaatcgcggataaaatttcacgtgcaatttttagacacgcacacaatttcgcgtgccatgttttgaatcgcccacaaattttgacgtgcaattagaatcgcggataaaatttcatgtgcaatctctagaatcatacgcaaaatttcacgtgcaatttttaaaatcaggcataaagtttcaggtgcaatttttaaatcgcgcaaaagtttcacgtgtaatgtttaaaatttggtaatctgaaatctgttgttattaatgaattcaacaagaaaacaaataaaaactaaagactaggctacctatcagcaaagccaacacacatgggcatccacactctcagatgcacaaacacgggaatccacacacacatgcacacacacgggcagacacccacatcgcgcggcactatgccaggaagatccagttgactgactgagaactcagtcgactgagccctagacattttcttataatatatccaacgttacaagaaaagcaacgaagcaagcaaagtagtgttcttttgatggatgcttgacgagctagcaaccaagtagtacgatctaccttgttggaaaattcagcggtttcctattagtttgtcttgctctagttctttgataatcgacttgtatcttattctgttgaagtgtagatttcaagctaggagaatgcatgatatgcttgagctttttagtcttgagcgctgaagatggctcagccatccagttactatgatgaactgataatgcatgtaattctgttggagataaatacattttcagattattgtcatttatgtagcatttttagctgtctctgttgcatatccggcctgacgatgttataaaagggatcaccagttccagaatatacaagttgcattgcaaagcagtttgaacccttacttgatagtggtacactgttaagcttggagaaggcatgttatgcttgagctttttagtcttgctcagcaatcaagtttagttgtctctgttgcatatccggcctgcggatggtatacaaagaaggcaaccccagccccagaatatacatcttgtgcagcaatatattccagcaccggggcaatgttcaggactgaaaataatgctttacgctcaaacgcacgcggcggcgctccgtcctgtcgcgcatggacgcgcagccggccggccgggccggcgaagaccaaccgcggcggcgcatgctgccctcgagctcccctctcctggcttcctcttcctactaggacctagggtcgcgtcgcctcctttcagctcgcgttttggcctaacaccaacccaactcctgcagccatgcgcgcaaggtgtttgtggaaatgcctgagtggctcgcacggaatcccgaggtagctcgcacggcctagcagcttctccgtggggagggaagatcagcggcgccgttggatggacaagatggccatgctggtctccggccaggcgacgggcacaggctggcgcgtaacaggtcggtcacactgcgaggctcacgctggcgtgttctgtctcgtcgtaggcgacgggcacaggctggcaagagacacactggaggcgcgccacgcttccctgaggtcgccttgttctctccgccccactcccacttgcgctcatcaccacacaggtcccgtagctgtgtgcctgtgtgcacgcagcgcgcttgtggaaatgcttgaacgaatgtttccttgccagttgcaacttggcaggtccattttgctaaaatgtgagagcttctgattctgggaacaagcccacgagagttcatggaggttcgtgttacacgccgctgctggcactgagttgccacccaccaagcgctattggcatcctctgtcaatctgtaagtgcacttttagttccttctctccaaatttacaatgtatagcgaagtaatcaattactagtttgtttttgccaataaaaaggactcgttgctccttatttcatgagcaaaaccaactggattcagtctgtgggttggtgaaatcgtgttatgaattaatgatgtttattgaattcaaagttcggatgcctctgggtgggaagttgcctattgcaagaataggttgaggcctgctctgctcatggcagcttagtacagctactgcagcattgtacaaagtcaagatgaagccaagattacattttcgtaaagaaatggtttggcgggccactcagcatttttcttgttctttgttttggaggagttgagcacttgacataaacaaactgtccaagtatactaaattactaaccatgaccttattttccccgccagacacgtcttcacctaatctttctgcctgtgaaactattccgtctgatctgcatcagagtgcatctatatctttttcacaactgggaatcgattaacaggaagatggcagaatcgttgcttatcccggtggtgcgaggcgtggccagaaaggccgtggacacgctcatccagaccgtgacgcgcatgtgtggcgttgacgacgaccgccgtaagctagagcggcagctgctggccgtccagtgcaagctggctgacgccgagctgaagagcaagagcaatgcctacatcaagaggtagatgaaggacttgaggactgtcgcctacgaggccgccgacgtcctcgacgacttccagtacgaagcgctgcgccgcgaggcccagatcagcgatcccaagaaaagaaaggtactcagccacttcaccaaccataacccggttctcttccgtctcaccatgagcagaaagctgaggagcgtcctcgagaagatcaatatgcttgttgaggagatgaacacgtttggcctgctggagaaccctgtggaggcgccacagtatccttctcagcagacgcatgcagcactggatgagtctgcagagatctttggcagagatgacgacaaggaggtggtggtgaatttgttgctcaatcaacaagatcagcaccagttgcaggtgctgcccatctttgggatgggtggtttgggcaagactacacttggcaagattgtgtacaatgacagcagggttaagcaacattttgagctgaagatgtggcactgtgtgtcggaaaactttgaagccacttctattgtgaaataagtcattgagttggctacaagtgacagatgcaacctgccagacaccatcgagctgttgcgacagcgacttgaggaagttattcgcaagcagaggtttctacttattctcgatgatgtatggaatgaagaggagaaaaaatggggggatgatctgaagccactcttgtgttctgttggtggaccgggaagtgttgtagttgttacatgtcgaagccagcaagtggcctctataatgggcacgataggaccccatgagctcgcatgcctaagtgaagatgatgcatgggaattattctcatcgaaagcatttagcaaaggtgttcacgagcaagcagagttcgtcaccattggcaaatgtatctttaagaaatgcaagggtctgcctcttgctctgaagacaatggctggcttgatgagttccaaacaacaagtagatgaatgggatgccattaaagaaagcaacgttggagataatgcgagaggcaaagatgagatcatatccatactaaaattgagctacaaacacttatcatctgaattgaagcagtgttttgccttttgtgcagcccaaggact

SEQ ID NO: 1917 - DNA, 1988 bp, Brachypodium distachyon
  Intron number 1 from transcript Bradi1g05100.4 (locus Brad i1g05100) derived from phytozome v7.0 (chr-ID Bd1; pos 338 9778 to 3391765 reverse strand)
catattgtgctcgtccgtgagtcctcaaaaggtgtgttttctactccttattgcttgcatcattcctgatcatgctaattgtacttagctaactgtattctctgaacttgttccttctagttttgattgacactgggaattttggatggttgttatgatttaggtctttcagacccttattttagtaggtatagtatgttttgttggttcagatagaatacagacctctaggatactttagcttgagaagtcccaattcaataagctctactttttatttttagaaacggaagaattttattgttcatttgctcttctcacctctctagcaagatgatgcacccacgtcttcttcaatgatttcctgtgagaaacatggccatgatgtcagccactgttctaaggttttaaccagctaggcaccaaagactgaatatccacataagaaataccatgccaacgcatctcttttctgctagtctatgggtccttgatattaaagttgtatggaaggttcctatgcgtattacatcctcttgaggtagttaaagtgtcatcgaatgtaaataataggcacaagacggcttcagctgttgatgaggtttcgctacacatcctttaccctttacagctcaacctacttggttgctactccctctgatcctaaattcttgactcaaatttgcccaaatatgaatgcatctattcttaaaaagcgtctagatacttgtaatattttgacaacaatttaggattggagggagtattagatttggtttaatgtagaagaccactcccatctaaccatctttggtggagtatgcttgagatcactttattttttcctaaagcaggaaatgagtgagacattgaccagaacatgtttagtacttttgcataacatggatagcatgtcatggttcagcatgactgcattaccatacataattcatgttagatgagtagtgtctatgtggaaatggcttttggatcttgggtgccatggctccctttatttcaaaaatgcgaaaaacacattttgggatatatttagatggccactacggacctgtaaaatttcatgaagaaatatttttatttgtgggctacacaaaaaggaaaaaaatatatggatctatgattgaagcactatgtgtatatattttgaggaaaattctatagtttttctactgaagttgtatggaaggttccttggtgtgttacatcttattaatgaagttatatggaacgcaataggcatgagaaaacttcaccagttcaccaagttttacttcagacatcctgtatagctcaatggctgtgattggattcagtttattgtagaacaccgttgtgaacactttgtggattacttccatctatcaacagcaactgtcctggaatatgcttgagattacttttttttctcctgaagcagtaaagcagggagagacattgaccagaacttatatagtaatattttgcataaggtggatagcatgtcatggtttgggcatttggcactactgcactatcatacctagttcatatttgatgggtagcgtctagccatctagcagaccagtcggtactgcagtataagccctcctttcgatccactgtactgaagatgccaatatggtagtatcattctgttagcattaaacagaatacaacatctaaacacaatgcactgactacccagcattgctgctcatcaggttcacgtgtctgtcatgaaccatgaacagttagtgctaatgttttttgtctagcaaggtacattaataatactgttattgaatctttcagttttaattgactgtctttgatgtgtcattgcatacaatgtctttatcatgtcttctatagagcgtacggttacttgttcagttgtttggtgttatcaaccatgttctgatctgtatgttcatctaatgatcttctccattggtgaatttcagtggcaaaaacatttccttggccct

SEQ ID NO: 1918 - DNA, 2508 bp, Brachypodium distachyon
  Intron number 1 from transcript Bradi2g13790.1 (locus Brad i2g13790) derived from phytozome v7.0 (chr-ID Bd2; pos 123 78468 to 12380975 reverse strand)
gcagcctctctgcagcaattcgtatgtattgctattttgctctatagtacccaggttccatcagttctctattatttttgttgtttattagaactgtcaaatgaaaagtcccataaatattagtaatactgttttgtagatcaggatcctagttcactaatatactgcactgcaaaattaattaggtttgcccttgtcatatagctttttactaaatggattagcgcacttcgctgtgcctcctactgccgggaaccatgagtagaataagtctcacagcaaagcaagaccaattgtccaatacgcatatgaactgatatgtacatgtttaaggcagggatatatgctgattgagtaaacttatgtagatagtaacactatgcaagttatttaagtatccgctccaacatatttgtgcacatgctacatatcattccaaaatggcaaaaaatacgcaaaacgatcagagcattcacggcggtttatttcatattgagcaacatatggaatcaacacatgtagatagcctcccctgattgtcagaaacagccaattgtaaccagcaagggcgtcatgaacatgactgcctgcaaagaattctcaaaatactccatacagtacagaatacctagctagcattgggcttatgaaacctgcccttaaatagtattcaggccacaacgaatttgctgaatgcatacaaagatctgataagtatcaattagatgccaataattaaagatccatacgtagaggcaagatctgataagtatccaactaaatgctactaataaccatgtttggactcaatgtaagtgatagaggtacagaacaaagtgggagggtgcaataaactataattagaatagcatttttgcaagcttttctctttccactagtagctagcttcttgctcttctccagccagatgcgctttgcctaaactttgccatcctagaaacaaaatccagagtgaaaatttctcaaaacacagaaaataaaataaaccttacttttactgtatacaacactgaagttgcacgagagttaaacctgctggtttatgatcaatacgtgttctgttggaagcacacaaggcgtatcatatatatttcttctgtatgagcactgtttttaacagaaccaaataactttgcataagtctggagtcaccaacctcttgctatgtttaaggctctgtgtcccttcttctcacgtgcctacactgacatttcttcaaacccctgtaaaccaattaagaactaaaaatacctagaataaagccagtctaaccaagaaaacatcgaatagtagaataaatattaacaactacaataaattgtagtttcttacagtatataaaataaccatcagttctgaatttgtttatgccgttttgtacttaaaaaacaaactgtgaatgattcttgcatcccctgcagaaacaaaatgataacgattctcgatattgtggacatatgaaagagtgttgcattgctaccactgatggaatgtaatatgtctatcctaacaaataggaatacttgtatagttcacccaagtacacacataaattctgaacctatatatgacatgaagcagcaggcttgtgtgctgccaaagtaactttgcggcgacacttccgattcatgcatgtcattaccttgccttcttctatcaactatgaacagttcttgcgttccatagttcacacccataccatcatcccatactctgcacattaccatagtggaatggtattctttcatgggattatcttaatgaaaagatccataagaacaaatggtggtagcagcaattgaatgtcctttaactttcacggttagtccatcctcaggaacataactggagaacaaagtaagggaaatatatatattttaacgtcactgccacaaatattcttcgaactaataaatcagcagttatttttttggtggcatgaagctgcaccaaaggagcagaatgtgctggccaaaaacaaccttgtctttttttagtgataaacgacttgctaataaatttatgaaacaacaggcatcgctgaatttctttcaagcatcacgatgaatatctcatacccacaacatcagattcacaacattttctttaagagacaaaaaccatccttttctctcccaaaatttatgaaaaggttgtaattattagcttccttccctaaacagtccctgcattcatcagggacatgatgtacacagaacagatcatttactatatgtagcctgtttaaaaaagaagacatagaccagcagcctgagctgacagctcagattgctcctagctcatataaaagtattcggtacactactgtatcattatgctctcgtaggtggcaaagtttgacttcattcatttcttttcgatgtggatttttgctagaaaatgttactatcacacatcctcaggctagtggtgaattcactgatcagatttgttaatttgctattacttttaggtaaacctgagtca

SEQ ID NO: 1919 - DNA, 1728 bp, Brachypodium distachyon
  Intron number 2 from transcript Bradi3g50870.1 (locus Brad i3g50870) derived from phytozome v7.0 (chr-ID Bd3; pos 519 82227 to 51983954)
cagatcaggtattgtagcaaatgtacgtagggcacaataggagcacgtgtggcggcgaatctacgtacaagcgaaagtagtttgattcatcatattttgatgttctgttgtaataagagctggtgtggcttgccgtactctggcagaatttttttatggtggtgaattataatgttccgatttggtgttgaaagattttgtatgggtaaacctgagaaacatatgtgtactgacgttttcataagaggtaaattttgatagccttctggtgtcactttctttactccctaaaaggaattgatggttaatgatgtagtagtctggctgtgtgcatcacattttgaattccgtcgagacaaactatttttccattaaaataatcaccctttgagttggatgtgttcatatgaacgactttgggattttgtggtattattgatagtagaatgtagattgtagtgcgtggaatatagaatctagaaggtagaacctatatcgtagattgtagtttgtagtatatagaatatagaatgtaatacgtgaacgctagattgtagttagtagaatattgaagatagaatgtagtttcttagaatagaagctagattgtagttcggagcatgtagaatatagaatgtagtgaacgctagattgttgttcgtagaatacagaaggtagaatgtagttggtagaatatagaagctagattgtagtttgtagaacggagtatatggcacgcagaaagtatttactcagtgaatagttagagatatagcagtataatcggcattgaaataatggtagcatgtaattcatcatagtgtgtaactgtaaccaaacatcaggcagagtacattgtctattacatgtcgaaagcaaaaaagaagttcatttattgtagttctaaactgaaaccatggtgtaactatgaaggccctgtagctggtggatgcttcttcctggatgtgaagatgggcaatttctgttgatcgcttggaggtagcgagagacgacatctggtagtatcgcttcattattctcgaatgacaagagatttggcagaaaagctttccgtagttctcgagaatcttgtagggtaaattcccttaaatttgctgaaagtagtatgtaaagttgaattgacatggtttctgtagagtgatgtcaagtagatactcacgttgatagcttcattcaccaggcgattcccgtcccaattcttcatgaagtataacacgtggaaaccagagtccatcctaagatgacaaacatacatgagaggttaaatttaattaacagaattcaaggtgccgtctacatgaacatggcttaccatttatcggtagctggattatttgtgggaaactcatgatgccagcttggaatatccatttcccatgctgggaaagcaagcttcatgcactcctgcaatgctttggcaatttggtcttttgctattcaagaggtgctcttgcagatggtgggcgctgtctggaattccttgctcacatgctattgcatgtcttaaacatgagggcatacaaccaacgatggtcagtgcttgcttctccaggaatacttacattaatgcatatgcttacaacataagccaaaatatagaaatacaagactgcagcatcaggtgtgggggcaaaaaaaaaaaagagcttgatggggcagacatcagtaaaaaggacgtgacacttctctgtagttactgcaaaaaag

SEQ ID NO: 1920 - DNA, 4525 bp, Brachypodium distachyon
  Intron number 14 from transcript Bradi1g46600.1 (locus Bra di1g46600) derived from phytozome v7.0 (chr-ID Bd1; pos 45 113443 to 45117967 reverse strand)
gaggggttcctaatgtaaataccaaacaatctgtttcttaccattgataaaaggatagtgagagatttaaggatccaatacacacctagtgttgttctgaggttagacctagagccaactcactaacacaattgatcaaaatacttttggcagaagatgtccagtggcgccttatttgggagctcttgacgtcttgtttcccaccaaaattgggtaactttaatttctttcctggcacacaaaattgcttcgaatttcattagctacccctttatactggattccagtcattgtaattagatgagttgttcaactatctgactgtatatatgtgccgtttctgtacctcccaaagttagttctactactgaagtaaaaaagttgtattgtggcaacagaaaatttgtttatttgttctgcattggtgttttgttgattagttttgtgcagagtagatgagtctgcaatattgcattggtgttttgttctgtcaagtggaagtaggagataaccatatctagtttagatacaagccaccaaataaagtactccctctgtcctgaaataactattcttatacaaatttgcgttagttatttcaggacggagggagtacatggtacgagcctaccagatacatcacagttgcattcactcaatatgtcgtctagggtcaggatgtctgggagattgccatgctaaggtggtcttaacggataccacctttgttcttaaacgtaagaagttctattttgttctaagtcgaacttttttaaatttgaacgagtatataagaaatgttaacatctagaatataaataaacatactatgaatatatatatcatgataaacttaataaaaataatttggagtaaaaatgtttgtatatttttcaataaactcgatcaaaatttaagaaatttgacttggaacaaaaatacttcctctgtcccgaaataactgatgtggatttgtatattcttcagttaattcggaacggagggagtatgactttttatatttcagaacagaaggaatacaaagtctaaggtcgacatgtctcgggggaagccatgctaggggtgctcacaaaattaaacaccataattttgttccaaatctatggaaccgggtttttttgtttgtaaaaatcagggtagaataatacagtgagatgcggaccagcggaaacgaggcttcacggataaaatggtgtgtgcttttctatagctctagtaccggtaactgaatttggtagtggacgcaacccacttgcactttggagattgaaaaaaaggcaggtctatatttgtctttttggatgctggattggaccaaggtttcgagtaatttgtgggtaattcgaccgttggttgtttctccagtttgggttgtttatagcctggttttgtagatttggagtgacatttcatactcttggggcttattcggttcacagaattttgaaatcatagaaatatgaaaagtagaggattgggatgtagcatctctattcatatgaaacgaattttacacaaagagaaaaaaaatctgaagattgaaatcctcaaaagcccttgcatggtttatgaccaagtttgcccttttcaggaattgtgatgaattgtatgatgaaaggcaatgtaataaagcatcaatataatagaatggaaataacataaaattcaaaatcgtaacttgaaataaaaactactcccttcgattcataataagtgtcttggattttctattaatttagtacaatgttgtactaaatcaaagacacttgctatggattagagggagtacaagtttaaaccaatattaatcaataatattgcaaaaatccatgaccccacatgattttattgcgaatattaattaataatataacaaaaattcatggccccacatgatttaaattttttttaaaccaatattaatcaataatattgcgaaaatttaaaccgatattaaacaaatttaaaccaatataatctaaatgttcgttgcgggattcatactttaatcataacagtgagaacgataaaacctacatatggctccacataattttattgcaaaaatccataaacaatatttgattccccggaagaataccctacacaaatctctaactttgtagctatctttctttttctctattttcttttttagtaattggaaaaaataaaataaattcaggtaatataatacaacattattctcaatttcttatatcttacggtaaattacgttttatagacaaattcatgaaatcataatggaattttcgtcgtaatcaaatcctatcactcatgggttgtttggtactgatgtatggtactgccgggttttatgttattcctggtgtcgtcgtcacatacgacgtaaaagatgtgaggctgtttgtgttggtttctccttttccagtcttctgatcacatgtgtcattacaaatatctaaatttatatatgtgctgcagaaaccctagccgccccttccatggccacgcgaaaggaaagaacaggggaggaggcggcggtcgatttgttcaggtgaggggaaaaacgtgaagggtttccaattgtataccagatggcagtttgtgtgttatttcgatgaacttcaggggtaccggttaggtgggaatcggcggggtgggcgagaagctcgggaagcctctcaaccgaagcttttttgcaccaacaggaaatctgatggcctgtgaaatgaagcccattttaagctatgtgtttggaacagcttatggcttgttttggggcagaagccggataggaagctattccaaacccagcctacatacaagattatcattacatttttatttatttttggacaactctcgaaatcaaaccgcatatatttcatttttctctattttatttatatcttcaatttttccccttaaatattcatttgtcatacaacttgattgaagatgatatactccctccgtccaacaaaggatgtctcaattttgactaaaatgcatctatacactaaatcacatttagatacatccaaattttgacaaacttaagacatcttttgttggacgaaggaagtatttaaaacgtttataaattaaatcaaaatctttgtattctatcagaatcatattatttaaacaaaatgtaaatattttgttcaattagtgaatatttttaattactcaatactactatattgtaatttagacataagtaacatgacttttttttttgcgagaacacagctatataaccatattaaacaacacaaaaacatcaacaatatttatatctatatataggtgcaatttagttttggtataacaaaaataaatcttatttatatatagcgtcctctaccaatctcgcatatgttttgtttttacagcccaacaatccactctgtctgtttctctcaaatttctccgtccttctggattcttctcaacattctcgacgtagccacgaaacctgaaacaaaggccgcatttcttctcaaccaatccacacatcgactagggcccaactattgcttgccgcaactaatcttatcatcacccgtcgccgactcccacagccgctgcagccgccgacgggctccccgctaccctcgacgccgcgcgccgaatccacttcgccttccgggtgacatcgccgcctcgtccagatccggttcgcccctgtgcccgacctcccactctgtacctcctcctgtcctttctcgttactcgtcgagcggcggcggcccggtccgtgtagctgcgtctagtccagcggcagcgggagcgcgagccagagagaggggaaggggaaggataagggagagcataccttggcgggagggagcttgccgttggagtagttgggggatggggagccccgagctgccggccgagtttgggggatggaagggatttggggagcggctgaatttggggagtcggatgagcaagctgctggaaccattttttttttgctcaaaccccctaatcttcttctacccatgttaatagggtcgtcgagttgtgctttaatttaaccctgaatttgtctaaatttcccaccatccatagttctttgctctgtgtttgtgttcagatttggatagtgagtagtgggatcgattaattcaattggctgtgtttgttcataaattgttacctgtatcaattcacagacagtcgtttagcaagcaatcgagaatgtcgtcggtgcagctctctggtgctggagtcaccgcggtggccttcaccaacaatggtccgcgcctctctccgacgtcagcactcagagtgtccccatcgaggcgctccttccgtagccttgtcgtcaaggctgccactgtcgtcaccccaaaggtatagactattgcaatgcaatgcagagtgcttaggtactgctcctttacactttgcaactattagttacaatttgttgccataactgcagtatacctcactcaaacctctgggagacagagtgcttgtgaagcttagcgcagctgaggag

SEQ ID NO: 1921 - DNA, 1159 bp, Brachypodium distachyon
  Intron number 1 from transcript Bradi1g70690.1 (locus Brad i1g70690) derived from phytozome v7.0 (chr-ID Bd1; pos 688 94513 to 68895671)
ggggtaactgacgccttactctgctcctgtttttctttcatgcttgattatgcgggaggatcgcatctgaaaatttggggatatatccgatgctttgttctgtatatgatttggggatagattggagcgaactggatgggtggaacgttatacgatgtatatggcgaactctggtttgtaggactacatattcgatttgaaaaacctttggccatcgggtcatgatcatacaatttccttgtacttttctgattgtttgagttctgacagaattagttgctaaggtttttcctaattgcacttgtgaggtatggaagagttcaggaaatggcattgttcttgagtactgctgatgagtatgtcaccatgtcacgtcttctgactatatttgttgcgtcaactgttgttcttgttagagaaataacatacacaaatttgtgttgatcggtatacattttagtgaactgaatattaaaataccaaaactacctgcaaaatggctcattgaacgaactattgaattcagagaactgtataataaagtactcaaatgacttcaaaaaggctcattgagtgggaccatttaatctcactgtatgctgaaggttagttttagtaaaacagaatgtagctggcccaaccaaaatgcctaatttctttcaaactagtgattgtgcacgagcaatgcaatgacaatttttttataaccatgtagaatttagaaactacagagtgtgttgatcatagtacacggtcatcaaactttataattactgagaaaatgcacagcgctttaatattaatgcacatataaattaagtccttcaatgttaacagaccctagtggaaagggttattagttgtgaaattaagataaaatttcaggagctcaacttaagtcttagcctccagtggatggctaggatgaactgcgtgaagccctaacttgtacttttgtaagtagtataggtgtttaatcagtacttatgtgactctcagttgttatcacggttagcaaatcttcttatgtctacctgtattttgattgatgactattgagtacctttgtgaattttggagtaaaaatcagttactttcagtttcttttagctatgtacgattatcaactgatgctgtttttccatactcagtgagcagg

SEQ ID NO: 1922 - DNA, 2493 bp, Brachypodium distachyon
  Intron number 8 from transcript Bradi1g55250.1 (locus Brad i1g55250) derived from phytozome v7.0 (chr-ID Bd1; pos 536 72912 to 53675404 reverse strand)
tgccatctgctggtgacaagtattgttccttacttcttaaagcatcaatattacttgttgattatttctttctttttgttgattcgaatgtgaatactccatagcgtctcattctttgtacaaaaaaaggtagaaaacagatattgatacttgagtctgagcttgcaaactgtggttaatggagataatccgagtcagtctgacagaatcagatctgctgatcattacacaattttttgtgttttgtgattatgcagactagttattatcttccatgaaattcgtatagtgactattttgtggcaattctacactgggtcctccacatattttagtactggaggacgaaaacattcaaagttgaatggctcttgttatctttgttttagcataaggatacttccataaagttttttgtacacgagctccactccacctcagctccactctacctgtaaactccactccactttctcactctggagctataagaaagtgtttgggtaatttgctaacttcagattcaggtttacaagaacttgctgtgaaaggaccaaagtgccctctagtctgctgtttactccgcacgtacttgcttgttgctacacgttaactccagcagcgtacgatcggtccatcatacatgtaactaatttttttaaaggcaggtataactgtctgtatagttctttcttttctgctagaaatacaagaaacagttttaactactaaaaaaaaacaatctgataaaaggatacaagatatagcatgaatacttccatcgacaaagaattttttgcactatccgaaatatagaagtagatcaacgctggtagtgtagtactactagcacatacagagcaataggacaacaagtcatgaacaaatacacacaccagcctgtaggaacttaagctaaattcctatcaaaggaccctcaatactgctccttgcaagcattaacaaactttgggtctgtctggatgtaccagctgcaatcatgatctataactcatcagagtcttgcgagcacttaaaaactctaattttacaaattttcttgtacagtatcagcaatcctctagtgcttacattcctaatcctgcaaaccagagatagcatgatcaatggttgcattcagagctttcttagatcaatgatattctatttaagaaaaaaattacggttatattcagagctttcttgatctctcgatccttcatttccagactcacagagctacataggatatacaacctagaaaacaatgacgttgtcggacatccttgttgcagcaattattattgaaagaacgcatatccatctgatttatgctaaagatgcaacattcacagatattttgctacaagtatacaaaagccatcaatttctgctccggaaaattcaacattcacagaatgtggtaactagtaatagtaatacactaatcatgattttgctacaagccatacaacaattagctgcaatgtttatgaggacgaagaagaaaattacaacaggaggagactggctaccttcttggtcggcagatggctctgaggtccaggtcgtcgtgctcggcaatgaggccacagtcgtggcagatgccggttagcgggatccaccaatgctcttgctctgcacatggtggtctgcaatgagggtgatggcgaggttcttgaggacaaggacgagagtgtcatggttcaggagggtaccgccaagcgctaggacctggtggaggccttatgcggtgagttgagaagatggtggcgccttcctgtccatgccttcatactggatctggacgaggcatgcgcggggtgaagagaactccgggatagtctctgtaggggaggacctcgccggggagaggaggcggcggcgtgagcagcagctagggctgcgccatgggagaacagaagcgggtgagcgaggggatttctgacgagaggaagccggttggttgggtcgaagggggtatagtcagtggcattggtgggtaatctgaaaccaactcaaagggcagaaggctaacagggaggcacaggaataaagtggatcaaccctttaccagcttcaccaaaatgaactaggcaccatctcagctccattctaccaaaatatggaattgagggtgttaggcacaacttcaccagcttcactggtgaatctgtggagtggagctctcccaaacacaccctaagtaacctcggtggcatgtcttgtgtgaactaatctccagctgtaagacttaaatgcatattctgcttggtacatcaacaagatttattggctaacactagagcttccgcaatctggagcctccagctacatctcagcatctcttgctatgcataacaattgttatgctatgggtcttacgcttttaatcatttcggaaaggacatgtacttgtgctttcctttaactagacagtttaacctactcttaacatcactctagtaacatcttctttgaaggctggaggat

SEQ ID NO: 1923 - DNA, 307 bp, Brachypodium distachyon
  Intron number 12 from transcript Bradi1g72090.1 (locus Bra di1g72090) derived from phytozome v7.0 (chr-ID Bd1; pos 69 914488 to 69914794 reverse strand)
agaaggtgtttgtattgcttcatcaagagttgcaggtgtgtagtatgatctgtatcgtcgtttggtagttcactatgcaattgcttccagataatttcagtcccattctagtcaacttcatgtgttttgtttcaattgattttgtggcatctgtattctgattcttttgattattaattcgtcagaatatcaagcaaagaattaaagacttcgcagaggcctattcaaatgagtaatgagaactgctgtattgattggtggtgatcatgcagaaggcctttgcaactatttttcagaggctgtcacc

SEQ ID NO: 1924 - DNA, 4159 bp, Brachypodium distachyon
  Intron number 2 from transcript Bradi2g26710.1 (locus Brad i2g26710) derived from phytozome v7.0 (chr-ID Bd2; pos 254 45409 to 25449567 reverse strand)
ccctcgagcttgttggtgccattgcctagatttcagtttcacaatatgattatggccggtggaaacaacctaagagaggattaggttcttcagtttcctgtgctccgaggcttcccaggaatatatcttaaaagggacaggagatatacatgtgtgctgtcattcttctgtagatcaagcattattttttgtaactagtttttcttttaaattatgaaactagtttttttcctgaagttgtgtaactagttgaaaaatcatgcatattgtttgttctctttatgatatatatatatgatctctggtctgctagtagtcacatttctatcttcatagacgattcaatacgttatctttatattgcaaaaattagtacttcctccggttggaattagtctcagatttagtacaattccgtccggagacagtaatttagacgagcatgaattactgagtaatggttctcagtttttcagactttcatatatgagtaatgggtctcagtttttcatacttcaatatatgtaacgataacagtgctctacgttaccggatgaaactcaaggccagagctggttctggtgacctgaatttgttctgttcatctctatctctactgtttataaaggcaccaacatgttcttttcaacgtccacctcactaaacgaagacaaagtattaatagccccgcaatcagactctctaaacatcagattactagttaaccgtgtgcgtttagtgattacctgttgagactgaaataatttcacctgcaggagaatctttcagcccctcgtccgaaccattttcttccttcttttctcctcgcccatccagactccaatgccgcctcctccttcccttcccctgcggccgccgcagcctcgtccccctccgccccccactcccccatcctccttcccttaccctgaggtcgctgccgcctccttccctccgcggccctcctctgccgcacctcagcccgcctcgcctgctcgcctccacctacgatccgcggccgccgtcagggccacgggacgaggcgccacctcctcctcccctccggccgtggccctcctctgccgcgcgtcagcccgccccgtctgctcgcctccacctacgatccgtggccatcgttagagccacgcgatgaggcaccgccgccgccgctgatccccccacacgagaccaagaattccgatcacgaccctgccacctgatctgctgcacgccgccgctatccacttctccccggccacctgatcttgctggacaggggagtctccgcacctgcccagggcagcgcgtgcccggccagggaagctgcgcatcaaccatggtcgtcttcacgttgggtgcatcgttgtttgatcgttgtccacaagcattctatatttcaggtaagacatttctcaacacatcaattgctcacagacccaccacgtgtttgctgaaaatgccaattgatattccggctgtttacaagcattctagatttcaactgccaacaaatccatgctttaatttctccatggttggtatgtagtgtgcaggtttgttcttcaagttatgttacgaatttaaatactacttcatgttgtagttttttatttgaatgccttaggtttgtaccacattactgtttcacacccatttaaatgtagttttagagaaatgtatgttgatcagaccacttcctgttgtagttttttatttgcgtaagtgcaataagatgaaataaatactatagaagcatgtttccatcatttcgcttgctgctgatctattccattagagatgagatggatttatgtattagtttaattagtcaattgacatctgttgctttttcaggaaaagggaagctggtacttcgtttttcaggacgacggaatatatttgtgaaataaaataaaataccgcttgtactgctgaggaagacgcctgttttctgattttgcagaaacattgcaggtggcttgtacagctccttatggctcttgattacttgcatggaaatcacattcttcaccgagatgtgaaggtcagtaccagtgcgatatttggagcatgtgattatctttctaacatgttgtaataatgtgcaccgaagctgctaattcgtttcagtgctccaatatttttatttccaggagccaaactataagacttggtatgtaacttagtcccttacaaagtacagtgctttatgtatgagttcagcaatactgataatgattgtaattctaacataaaaaatgctggtgactttaggcttgcaaaaaatattgacttctgatgatctggcatcttccgtgagtactactccctccatttcacaaaagttggcgtatttcgtttcgttaagacaagcctttcactaagaattactgtattaacatgtaagttatatgatacgaaaccatgatcattagcaagaacttttaaaaacgaatccattgatataaatttcatgtatgaaaaaaatacatatcaatagagttttcattggtcaaagccttgtcttaacgaaacaaaatacgtcaacctttgtgaaatggagggagtaaaacatttgttctctttcttgtacatgttcgatggtgttttgacctcaacaccggatggtacgaacaccaagttacatgtgcccaaaacgtcttgctgatatgccatatggtagcaaatctgacatttagtttctaggtatgtatgcgaaatcacttttctgaacctagatagagaacttgcaattcaacatttatatttgttttgtttcagtatgttgtatatgcgaaatggctgctctcaggcctgcatttaaagctttgtaagtctctacttttctggatctatttggagttggaaagtcatcctggatcttctttgctatgttgttaatcactgtccagtttgttcatgacaggtcatggagctaagcaaagctgaaatactttaattctcaactgatataaatacaacatattttcaactgatataaatacaatacaagtcatactgactaccagcatttcgtgaatataaatcaacaatataagattcctctgattctcttggacttaaaagatcccatgtaacgcttaaattacagaactctttctgaacaagaagtgataaatcttatggatttgtggactaaacaacatgttcttcaaatttattttttgcgagcatttgcagatgcagtgatgccatgatggcgaatatgtttaacatgtgatgcacctcattatgtcacactttcattctctcaagcaatgcttggcaggtgtgcattttctttactcttccctcgtttatcagattatgcatttttatgcgaataggtttaacatgtgatgcacctcattatgtcacactttcattctctcaagcaatgctttgcacgtgtgcattttctttactcttccctcatttctcagattatgcatttttatcctacagtgatccgttaattggttttggcttcagatctgttaccatattttatttttcttcttatccagtcccttatttgattacttgatttctaattactctaaacatgagtgtgcaactatagaaagaatagatgatgaagaatctggaggagaaagttctttattttgaatagaaagtgataaattccaagtctgcaccctccaggtgatagtgccaatggtattccaaacgctacagagcttgggttaagaagaacaagggatgtgtgtgtgcattcagaattggagacttttggttgagtttttcatttttttgtgtatcgaaggagatcattttaattgttgtggggtttgttcgtacatgtacatggattgcattatcatgagcatgtgttatatatgaaatcatttttatttgtgaagtttgttgcgaaatatacatgtcaagaaaactgatttaaaatatgtaaacaatgtcacgctgcgacccaaactataattgtagatgcacgcttacatcactcaacaattacacctatattaagtgtctcaatgaaaaaagataataaaaagcagcttacttaaagagaaggagatccagaagacatgatttatattttagaacagaacgtgcaggcacatgctcgcttactagtcttttcaatagcgtaaaaattatttaaaaatttaagaacaat

SEQ ID NO: 1925 - DNA, 1551 bp, Brachypodium distachyon
  Intron number 9 from transcript Bradi5g07690.1 (locus Brad i5g07690) derived from phytozome v7.0 (chr-ID Bd5; pos 101 54755 to 10156305 reverse strand)
acatttttcagtcaatttttgtcaagagcttggaggtttgcaaaagcaatggcttacatacttttacataagtgtcacgtttcctggtcataacaactcactatgtaataacataagaataaatttctaaaaaagtaaacgaaaaaaaagctctcataacacttgtttaagaccatccctcttatagcagtcccagaaactagtttggaaaaataccattcacaaattacattgttatgcttcatctagcaatccatttaaaactttaaatatatccctttgtgtccgttaaaaacaagcaattctctctttgtactcctaatcctaaaccacatgcatcagttactcctgtaccgctaatgcatcagcttgctcctggataaaaaggacgtcatgaatcacgtagcacccattgcagacctcaatttaagtcacaatcgaaagacctttctgctttgctgctgcaaatccattatatacgctgttgggcagcatggcatcatgacacagctgggaagacagagcagcagttgacgctacagtgaaacagtcacgtggctggtgggtactgagagaaacaagtcatacccatgactgcggttccattttgtcctccttattagcaccttcatgctgcctcttgtctgtcaagctccatccctcccttcccccttgtcagtctctgtctctctcatgtgggacatcttggcctttggtgaaactcaaagaatctggatttacaatggatgatggtctggtggggtgctagatggagcatattttaggagtactataagagccaagtggttttaatgggtgctataagagtaattctcccttaaatagaaggatgggagatggacattgaggttatgcattgtttcataaaatttcatttcataaactgatatgtacagtggtaagtttgtttaataaaatcacaacgaacatctacatctattattttcgtcatccagttttattgcgattttattttctttactttgtgtagattaaatcaggactttgaattttctacaacggcttcgttccttgttgctgacctctctctctttttgggaatttctcgtgatatttattatccaatatgcagtagttaccaagttcacatccagaaaatattcttcagatttgacctttcaggaagaattgtgctctgtgtaattgtgtgataatatcttctgcttctaactttgtatgtcccctacatcaacatggtgtaggaaaaaaaaagtagtgaactgtgtcataaaacatcatatcttcctgcagatcagttcaatttctagccagaaataattgcctcacgttagtttaactatcatcgtatttagctgtatgtaataacaaattacattttgtattgtactattgtcatcatttaggcacatttatcataaaatatcagctacgccatcttgtgattcacattttccccccttttgtttgttttgtttcacctcgtggttcacatttcttagttacgttacccatgtatgcaggaaattgacccttgcaagaacataagcg

SEQ ID NO: 1926 - DNA, 694 bp, Brachypodium distachyon
  Intron number 20 from transcript Bradi3g26400.2 (locus Bra di3g26400) derived from phytozome v7.0 (chr-ID Bd3; pos 27 098138 to 27098831 reverse strand)
ctgaagacagggtaagataatcctatagaattaaactgtgaagtcaagccatattgtgtcatggagactgttaagccataacatataatatcttgtataagctttaaaatgaatacaagttgagactttggtaaaggtatcaaaccatattatttagaataattggatagctcaactggtatgtacttgtgaactaagaagttacaagtagttcccttgttactttggttggtggattactatgatatttgcttttggtaggaggcagttaaagggacttgaaggactggaatgtatctagagattttgcttttgatagggctgcatggaaatcagcagtccatgtgcctgaaccttgatttactctcttgctcttttgttacctgcactttgctttagtttctgtttgggtttcatatctagcctgccccaacttgcttgggacaaaaggcttagttgcataatagtacaaaatactttatgttgattctgttgtttcagtgctttagcctctccatcatgtttatatagccttttggatatctcgtgtgttttgcagtttgatcaaccataattagcaatttagcatttgtatctgattgatgtaaatcaacttatgcacatatctttgccatgaataatgttccagtcattttcagggagaccctgtggaaattgcacgtgttatcaaaga

SEQ ID NO: 1927 - DNA, 2830 bp, Brachypodium distachyon
  Intron number 1 from transcript Bradi3g48520.2 (locus Brad i3g48520) derived from phytozome v7.0 (chr-ID Bd3; pos 499 33318 to 49936147 reverse strand)
tatcggcggtccgtcctacccggcttccatccgtgagttcctcgtcctttacttcctctagattctctccttccctgcacgccattgccgcagagttccgggtggccactgaggtccgtgacctggcgaaaccgaaagcaacgttccgtttcgaacactaggttgttctgttgcactccgtactgttccaaagtctgaagaggttgtatacctggatgagttttctttcaaggaaaaacttaggagttggtctccttttgaacccttgcgccgtggtcggaatgttgtatttttgttgggagaggccggtacaacaatccaagtagtttttcactatcgtgccacttcttacttcaggcgatcgtatttaaggtgtatatacatgttctccagcttattgggtgtgtttggtttgacctcaagcttgtcctaccaaaactaattggccattgttttgcttgcccacgactcccacgagttggccaactttggcaaaaacaaaaaacaaacaaacgaactagagttggctaaggggcattggcatgccaaatagttggcaacaatccaatccaaacaaagaggcatggtacattttggcaacaatccaaacataccctatagcatttttaagttttaacatatgaattatattagtatgtatagccgtcccgggtgttgctatctagtatggaaaatgatgaatccctgtgtccagcacacttgtgtctgcgttcatacagcttgtcttggaattataacatttgggcttaaatataacaagtgttgtgaaacaaagtcctgttgctattcctggaaaatgacaaaagtcatgttgcgtctgtgtctagaaccctagcttagaaccagagctttgacttaaatataacaagggctgcaaaacaaactaccactactcggggaatatgtgataaaatattttacagtatcttttcaggacctaagaaacttgtctccacctaggtatcgccgttgattttattagtcagcctgccctattcacccttttctacgctgttgacccaactccatttctttgcatggatttttttacatacgctaagcgtatcacatgttagacaagttttatctgtatttacttaccttttttttagtaatagcatttagaataaaaaacaaaccttttattgtttggttttgtgagaagtctcctggggtgtaatggtgtggatcaaggactcaccccacttagttcaaaagattgttgtttggttttcttcatgtgtttccccctttagcaatcaccctgaatatgcgtgctttggtctatggacatcttagaaatcaggaatgctatcaatcaagtaaaagaaacatattatagattgattggttcttactaacaatggtggaatgaataatttgtgcttaagtacttcctgtatacgtggaaacaaatttacgaggaatgcctcccattgatttggaagaccgcagcttttgcacaatttgttttttaatagaacatatagttaataccagcaaggaatgcctgctattttttgtattgtgggtgtttcttatttactgtcatcgcttatttgacgtctcgttgttcttatattaggaaacaatgtttcgatttaataatgtgaaactagcttacaggcaaaagaacaatatgttatacaatatctagcagtgtttgattataacttgggctttcggaggaggcctgttggctgccactccacttcatatttgggctgctagcgcggaatcaactgttgcaagggagagaaggaggcagcatgaggaagtactgaaggagatgacatcattttgtgatagtagccggcgctgaagccacccttggcgcttgcttgtggagtaagtgtaggagggagaggggagagatggtgcggaagtgaagctttgggcgctttacagggttgggtctgctgattttttatttattttaatgccacatgtgccttcttcagccatctgctgcttccttctggattcctccgccgtgtaggcaggcctaggcaagctgcgtgctagcatccagtgctttttttaaccttgcaacaaagtttctcgtttttcaaattgaaacaacgctatgtggtttgcatgcaagactatgtggtgcggaagagaagctttgggcgctttacagggttgggtctgctgattttttatttattttaatgccacatgtgccttcttcagccatctgctgcttccttctggattcctccgccgtgtaggcaggcctaggcaagctacgtgctagcatccagtgctttttttaaccttgcaacaaagtttctcgtttttcaaattgaaacaacgctatgtggtttgcatgcaagactaagcatgttatcgatttattgtttgttgcaaggtgttgtgtttgctttattctatgagtattattctctgagaagaagttttttggataccataatagtaccatgtcgctcaacttgagaatcatggtatcaatatgctattatgttactgtttaagcaaagaaaccatacctcgtgcacaatcaataggttctctaggaagtctttgctttagtgctgggctgacggctatttttagagtcgtgtatgaaaaaagctgcctttctaggggcttaaacactaagtagatatgggcatgtttatagtctcttttgctcattcatttaccatcaattaatattttttcttgcactgtaataccttgatgattaaagtattgaattgatattcttggagtaattttcacatgctgctgtctgaatctatttttgtgcatcttataggctgggagacacaccatcattctg

SEQ ID NO: 1928 - DNA, 1311 bp, Brachypodium distachyon
  Intron number 11 from transcript Bradi1g64680.1 (locus Bra di1g64680) derived from phytozome v7.0 (chr-ID Bd1; pos 63 860524 to 63861834 reverse strand)
cacacactggaatcatttccttgaggtacatctgaattctttgtagcactttgaactttgcaaacgttcttcatttaaggaaaccatgcttgtgaaaccatgatctgtgctaaaatggaaactactttgcatgccatcagattgaaataataagacaacatactaaaatggatgttagcaatgcaacagtgtttgtgaaaccgtgatctgtgctatgttcttttcctcaagaattcctaggaggacctctcttcttcatagaagagatgagcatctaaatttggaatgaaaaggactcaacttggttggtggtgagggtgcagcatagttatcggagtaggtgatctgtggaatgggcttcgaacccttatcctgattgatagatctagattggagtttcaccccgagtagtggatttcaattgaactgaaatatcgaatcgcaggcggagcctaaccaggatcaggggtatctccgcagcttggcctttcatgcgtctgcccattgtttttgtctttgtgctttcctccggtcaagccttgccgtgggctcgtctctaggtggagtggtggcgattggctgggaggagcagagaggcagcaaggttcgaccattgccgctgtgtttgccttcaagcagggacgtggcggcaggtttctaaggtgtagggttatggggcagcagtgactgctgggtgacgattgaggagtttgtgaggcggcagatgaccgtcatgaaagcactaccaggaactagggttgttggtctggttgtctgtctacgactgatatttcattggctatatattccagaaggaatggatagtatatagtctaagttaaaaaaagatcgaaatataaaaataacgtgcaaggtgtaaagcctaaagtatttgttggattatgatgtcacaataaaaatttagtccagaaattgaaaatacggtgtagtaattgtctttacgctgttatgacatcacaaataaaatatataaataagtagaaatattttttgtagaaactatacatgaaaatattgccggatgtgtctgttggaaactgcaagtagaaatatgtttgttagtataagtgacatcatgattcataattctgtctgataaagtgactgaggggttcatatgaggcatgaggctatgtgcatttgtgcacataaatcataatgaagtccatttagttttcgcttttgcatataattgtcactgcacatttacagaataccattgctgaaatcatcataatagacatgacgtgtttattcatttgcaggttcattacaacagaattggcaaag

SEQ ID NO: 1929 - DNA, 5289 bp, Brachypodium distachyon
  Intron number 5 from transcript Bradi1g43630.2 (locus Brad i1g43630) derived from phytozome v7.0 (chr-ID Bd1; pos 414 42833 to 41448121 reverse strand)
tgtaattacagagttgttcttgtaatctatgtataaaacttttgattttggagttgcattgtattggatgggagatggttaatgaaaatactaaacggttctacaaatgcactgtgcttattgctcagggcatttgtgcgtaaaattggtgttttctcatgcacttcaaactagaaatagaaacccaaggccgattcgtctgttaagacaaattttgctacagattcctctattgcccttgactcattatgcggttgttaaaatgtgtcgtgcactcgcgctgagctaataatttgatgcagaaaaatagtgaggtaaacagggaaaatgttgttagcgaatggtaaaagttagctggaaatgaagacttaattcatagttagatcgtttggaagaaaggcaaattaccacctcttttcacaatagatgacttccgagaaattgggtcctcaaacttctgtaacttaagatttgtactggttagataagagttgcattactagttatatttattgcggaaatgatttctattacaatgtcataaatagtgacaatttgaaaaattggataatgtagatttcgtggccagatgtttgtatttgttgtactaccctccgatccaatttaattgtcacaactttgtctagttaacgcatttcagtatataggtacatgcgtatgtagataaagctacgacaattaatttggatcggaagggaggacatagtatattatttcaaacacaaatatacaactctcaggtttttccaaaggaaagaatcaaccaagtttaagtttgaattgaattgtcttgttaattaaatagacctccaacttagagactcaactcacttttattggcccacccacgaaccgctctcgctctatgcgagaacgcgatgatctctgccccaaattacagcaaccagccgtcgtttcctgtctcctccatccgccgctcaggcgacgagagggggtgggtaccccggtgctccggcctgtagttagaatcggcctagtgttttcttgggcgttgcttctatggaggagacgacgccgcgtcagaataatttgcctctgctcttcctccatctaggcgtcgctccaatcggtggcgtcaaggggcaggtgccccagtcatcttgccgtgttctggatccggcgagattcgtgtctggtggtcgacagtcggcaatattgttggtgacggccatgttggctgctgtagttgtgtttgttgtcttgcggttgggcctatggatgacggcaggcgacgctgtttctcttcttcgactacattggatgaagatgacggcgtcaagatctggtgaccacgggaaagttccccggccgacgctccacaaagtctcggtctcgtcgtttgcgacgatccggttcatcggatcggaaagcatccttgtatgcgaaggtgctttcacagatttagatatggcggttgttcgcctattttttcagcgttgccatggtggcggcggaggacgaggctggacgacgattcagcaaggcacaagtttttctaatggtggaattgtaattttacttctcgtgaagtactttgtgcaaagttacttgacatcatgtttgtcttatgtcgtgactatatgtgtaatctctgtaaacagattgtctaatgaaatatatggtgctttaaaaaaaactcatttttattggattagctttaactaaacatctggtattctcgttgcataggagaatttggtgttgtttttgctaaagctaaagaaaattcaattactctcacccatccattagttgtcgctgatttagcgcaatgaactttggaagtaaaattcatactcaattttttttaacgctattcattttgtacagaacgttcaaattcgacttgtgtcgtggtcgacacggccaagattgcgatagctccacctacgcagtcaccgacccaaagatcttgttgccgtgccttcttcatcgtcggttcaagccggataagcgaccaaactcccaccttggctgcaatccggcaccccgccgaaatttcatccctcgtcgtcgtctccctctctcccagctccagccatgaaaactcaaatgcctccgccccctccccgaaaccctaactcctcctcctcctccatgccgcctcccaaacctttatcgcctcccctaccggcgcagccggaggcagaggcgccatcgaggcctgacggctcagcggctgagagtactaaaccgagcccctcctcctctatgccgcctccaccgccaccaagaccctcacagctgtcggagtcggagcctggcgtgccggtggatgtgagcgctaacctcagccctagcagtggggactcgccggcggaggaggctgggaagcccggcgacacggagatgacggaggcggcgcttcccgagcagcggcagcagcggccgcgcgcaccatacgctacccccgactggagcgccgccccggaccaccccttcttcctagaggtgctcaaggacggcgccatcttcgaaaagcttgacgtgtgagttgctgtctctgccctagtattggttcctcaccctagcagttggtagcgatttgtcttttttggttctaagctcatgagtggtttctagtcacgtaaaaccagtatttgtttatgcagggtatcatcatgaaatgactaattgttagtaccataaggaacattagctacatttttgctcatattatgatttgatgctctagatgtgccttttgagacctttgcattggaattagtcgaaattgtctgctacaagattacatcgattgatcctcgcattttttttacatggattgctgattttactagatgtgggttggtgaaattaactggcattacaaattgcaggtccaagaaaggagcttacatgtttggtcgaattgatctatgcgatttcgtactggagcacccgacaatttctcggtttcacgctggtgtgttttcagttttgcacctttttctaatcaactatcaaataggtcgaattaaagtcaaactctctgcttgtggcttgctggttaactagattttggtgcagaatgagttatccaagtctatcaggttttgggggcttgttcagtttgtaacagacacaaaatttgttagtagtacttttaccacaacaaggaagctaggccataacttctcccttctcagcttcattgcaataagtagatgcctacttccaaataaaagttggaaatattcctggaacaacaaagtacaagctcgggcacctttttactgattgctcagatagcttgctgaaaactggtagctggtctatcctgatattctgatcatttgtggatcagtgagcacagtttctattcatgatgctaagatgttcatgaacacatgggtctatagggaaggatatttcatcaggaaactgtgaaactttgctgtgatgtgaatagaccttttcttgacagggtaatatttgagttgggaaaaactgttcattaagtggcaaaattatatagatgacctcctaatggggtaataaagtcgaaccaagacactaattatctgatcctagtagtactttactttattaaaggaaattcgtccagtagcttggctgagttctatgggcagtacattgtgcacgttgttttggtagaacttactaacaggctgagggcttgaggttaactactttgaagttctgcagttgtttttcttgtgtaaataggccatctactacttttatccctaccgaaatatgttacatgaagtgtactcttgactttggcgaggaattattttttaaacagtctcctagtccaaatttttttggtcatgtgatggcgtatttattttcgtaaacaagagaaggcaatagtaggatccaggaaattcagcactacatattgacgattatgtaatattttcttgtttagtgctgaacacttatgagctgcttttgtgttatttagttctgcagtttagaaatgacggggacgttttcctttatgatcttggtagcacccatggatcttccatcaacaaaagtcaggtacagtctcctgccatttgtgttacttcagaaagagcagaatgattcccatttatcaaagagttctaatatatttgttgaaaatctttctgtcatgttactgaaatactgcatgtcctgttttcatgactgatcatgtcattgttcatactttaaaaaaacgaaaagcagtgtgatttatgttggtggtagtattagtctgtagcacttttgtctcttcatctacttttggcttgttgagtcacactgtaaattgaatctccatgctcctaccacatcatgggaaaccttagccttagatgtggtggttttgtgtaatttgctcaagatattataatctgctacctccgtttcggtttgtaggtcctgcacgtacccctaggtcgacgatttaactcatgttacataagtttgaactcaaaataattatatcattagaaaatagaacatttgaagtttctaacgatataatttttgtgagttcaaacttatgttacatgagttaaatcgttaacctaggggtacgtgcaggaactataaaccgaaacggaggtagtaaactaattagagataatatacaatcagaagtaaacaaatagcttagctctcagaagtaatctaatactaggagatagctagataaaggttctgctgctgccgcccgctgatggggctgatgtccataactcatgggttgagttattctgttgtactcttaatattcagagttacacatggaaaatatgttttgttatcggacgtagctgttgtcgctacaaatctatgtcacctcgatatgcgataaggtcaatatacttagaaagaaaatacaacatatagatgacatgagagcatgagaagagtagcggagtcgatactgcagtgcacatcagaaacattgagagcctctagctgccgtttcctaaacaaatcactaaatgcatttagataccagtgctatatacacgtacaaaataatatgtaataattattagaaagtatacatacaatacaataatggcccccttctagacagcttcggcttgtgcagaaaccggcttaagcttaactatgcacaggagctccgttgtgggtaagccctgagaaatccagtatcctctttcaaacagattctgttctgcagcttatttttaatctagaattgtgcaaagtctgtagtaccccctatccctatgattattggttttacgcttagtagattaaaacttttta

SEQ ID NO: 1930 - DNA, 2119 bp, Brachypodium distachyon
  Intron number 2 from transcript Bradi3g07380.1 (locus Brad i3g07380) derived from phytozome v7.0 (chr-ID Bd3; pos 547 7315 to 5479433)
ttgcagtggaggcgccgctgaggagatcgttccaggtacggatctggggcgcgtgccctgtgggggcaaagcctggatcttgatgctgatttttttttttctagaatacacttgatgctgattcttgtggatttgtttccagcctctgttgttgggttgttgggtcatggcgtagattagctattcttggcatcctgcagatttgatctgattcagtgtggggaagtgagctactcaacgtattactctgatgattaggatctgctaaatcttttagttccaaatgggcaaattctgttgatctaagcttccttggttagctgtacatgttagagcctaaaggtatggtcttgttgtcatgtgctgttagacaagtgtttggagtgtggtgcttgatccatggccgaatggcccgaataggcggcaagcttaggtggtgcattgccaatgggtttgtgaggtgagggaatggtggcgtgttagttgtctagtgaagaagtgtgtagtggctttgcatgtcgaacgaggttcggttgtggttgcatgggtcgatgttcactggtggtctttctcagcagatggagtggtgttgttatgctgttctcgggtccactgagtgagctgagttaatttggagatatttgccaagtactccctccgacactttttatggattggagggagtatcatttagtgtgccatgctattaggtttccagctgcctatttatagaggatattccaagtgccgtagcgtcattccctttttttgacctataatgttaaccaaagttgtttcctaaatctggacacacgtgcaaacagtaaacgtgtaacatttcaattctctgtttgttaccagttaatgaaatgttctctaaaattaataggcaacatgctacatgcgtgctatatcttgaagttacaacttattttgatgtggaatctgctggttagtggagtcagaattgggacgggggtattgcatcagaactcatcatatgtgcagaatcaattccatttgctgtggtacccaagtatgataaaactttcagcaactaactggtgctgcgatcaggaatagtggagttttgacattgttttaccatctattagattttttaaaccaaaaactacatcctctgaaccagaatgtaagtcatttaggacactgacagagtcctcaacatggtattctgaccatcaatttcgatgcaaacatgtttgccacacataaaaacaattgtactttataaaagtatatttcacgataaatctaccaatatcaattttgatgttttaaatgctagtagttcttttttatagatggacaaacttaaaaatgtttgaccggtaaaaaagctaaatgaagtacctacattttggattggaggtactgactaagggcattaacatccatgacctgctctccaagaccatatactgttaccatggttgtacctataaaactgctgtgcctggtagtaaccagaaaaggttacatagagagtactaccctgcctgtgtctctgtctttcctttctctttttgttcactgaaggctcataaattgttaatgagtttaactggccaaataaaccaaccttgagttatattccttttcccgagccctctctagctactatcgtaggaaaagagaaaagctacctccagtgtggaaatgatcaaccgtttatttcgaaccttagagaagagaatgttcagtatattttatgttttcattgggacacccccatcatatatgactatccgatatgctgtggaacaacgaaactattttgcaaatcttatttgtttcgtaaaccatatcagatgaatcgtaaatcatattttcatgcatctccaactatttagatatttgaaatcagttgctttcatcagtggttgcagagatgctttacattatatgtatgactaagcgaatatgcacataactccctaccttcttaaaacaaggttttgattgctaaccttgcattcctaaactgtgatggtcatgcaatataattgtttgcccatttgtctcagtccgtgacttgtaaagtgattatagctcttgaatggaaggaaagttctaagcatatattgtgtatttcaga

SEQ ID NO: 1931 - DNA, 9697 bp, Brachypodium distachyon
  Intron number 5 from transcript Bradi5g08230.4 (locus Brad i5g08230) derived from phytozome v7.0 (chr-ID Bd5; pos 107 96463 to 10806159)
ttctgcgtcgccaggtgaaaatcttgataccttttttggtttctccccttctgacctgcacaaccatcttagggtgcataaacatctctctttttttttccagatacaccgggacttccgaaagcctttaattgtgatgtctccaaagaatctccttcgtcacaaggaatgcaaatccagtctgtctgaattcgatgatgttgccggacaccctggatttgataagcaagggacacgcttcaagcgtctgataaaagaccggaacgatcataaggaccttgaggagggaatcaaccgtttagttctttgttctggaaaggtatattatgccacacttcctgatggcagtattttcagaagagttgcaaattcacctctttagacagccctttttataactaacttcctattatccaggtgtactatgaattggatgaagaaagaaagaaatcggatcgcaatgatgttgctatatgtagagttgagcagctgtgtccattcccctatgaccttattcagcgcgagttgaagagatacccaagtatgttaaaaaatgccttcggtcaaatatttccctgaagttgctactagagtactctttttttctgtgtgaacacatcatagtttttaaagtggtatggcgagcagtggcgacacccccttttataacgcctatggcatgtggcgagaagacttcatggacacatactaacttagtatggcaggcaaattaaattacagcactcactcgctaccaaattaagtcacaactcgcaacttagcctagtataaccctgtgcaaatacatagaaaacagctgcagaaagtctcaggctctcagcctcgcacaaaatgaaccaaggaaaacaggcctatacggacgccacagaccagtttctgtcgcgaggcccaaggcgatactctggaggggcgccacattgttacaacgacattacaatgacggtatagcgccggcttgaaaaccatgaaacaaacaaaagccgttcatgtcattgccttgggtagagcaatctggagtactcttttttgcatgccaatctgatatttgtttggatagcatgggagcatgcaaggcaaacaggtatacagaacacgggaggaaagatgcaaatggaaaatatatttcagatgaaaaattatttgatgaaatatgatgcccacttttatttgtgatgtggttccttgatcttaaataagggtatagaacaatagataactcaccagtgacgtagtgtacctgtttatcattagttaaataggatactcattccagttataaaatgtttttctgttgagcaataagctggcagtaatgagaacactttcatattgtttgctttagtgaactttagtaaacaataaaataaactcatatcatctttgtgtttctattctgcagatgccgagattgtttggtgccaagaagaaccgatgaacatgggggcatatacctacatcaaccctcgcctgctgactgcgatgagagcgcttggccgtggcaccatagaggatatcaagtatgccggaagggccccttctgcagccaccgctacaggtttctattctgtccatgggcaggagcaaaccgagctcgtgcagaaggcactgcagcgagaccctatcaagtgtccgttttgaatccgtagatgctccgaatagccatcagaatctcttgagtttggtgaataatcgttttggatgtatggtacggcacgttataaacggtctgaggtccatcttggacagcaattttgttttctgcatcgaagttttcatttctgagcttggttccgctgcacccatgaacaggtagcgaaataagcttcatcaccacattctaatattttcttagacacgccacattgtgagatttaccttgacattgtaataacaaagggtgcatcttctactaataacaaaggagtatattagtagaaggtgcatcctttgttattttactacactcggacaacaaaattttgggttcttcaaagtgcttctcataaaattttggtgttccataggtatgccactctggtttttcattggatgattcttgaaacttgctttcagtgatctgtgatgtgaactcgggtcagcaaattggggtattcgataacacggcctcttcaatggattgtgtttgtttgtgttaattttacgatttgagtatagtagttttgatacttcgaatggcattctccgtgcacgctaagtgtaaccattctacggcttgagagttacactaaaggtaccacttttaacgatttttatgagcaaaatgcatggcttgaaaattatagcaaaaacgcttacaagttatgtgcaactaagataaagaaatacgtttgctcggcctagacgctgagttggcacatcaacatagacagaatgacccgtaataggggcaatgccaacaatgcaaaagggcccctcaaatgcttcgccttgaccattatctccttagccacttcttgatcgtgatgcggtagccagtggagaagatgatggcgtctaaagcgtgtcgctcaccgccgcaaattccaccatgttgccatctctccatgaccggtaacacctagatctggttggtcttgctcttgttgcatgtgccgacgtcgattgatcgggcacacgttgctttggagttctcggcaaagggcccaagaacgggtcgcgggaggtcgtagttgaaagatcgaaagataggtacggtcggtgagggagtggtgaatatccgactaacaaaatttactttttttttttcatttttatgggatacaagtattaatacatggttcactaaaacatctaaacgatgaacacccctaatatgatgcaatagccgaagcacgagcacaagtaatagataatcaattgaaacttgcttggtagtcgaagcacaagataaacaattaaatttagcaagtaagtaacgggcaagaatgatatcacagggggagacgaaaattttatcgaagttccacttactggggtcagtatacgtctccgtttggaggagtgctctaccacaaaggtagaggcgccacaaaggctcactctattctccaactcaccacaccacaaaggtgggataagctttcacaataccacaaaggtgaggtgagttccactagtggctttcttgagcgtgaacgccgaacccttacaaacaaggagaatcctcaagcacctcctcacaagattggaagtcttgaaaagacaccttcagttaggaatcccaaaatcccaaagtaacaaaatccacaaagaaaacaaggggaatcaacttttcaatttggtgaaaccctaaatcaagatcttctccttcaatcctcaaagaatcaagagtggggaagcactagtgagggagatctaggaatttgaaactcttgtatttgggggagagaggaatagctcggtggagaggaagtcccaaggaaggggacgactcctatttaaagggcgtctcaagatctgaccgttaagtgaattttgcgcaaccgggtggtagagaggtagcagagaggtactaccgccaacgggcggtagtactgctccggtaccaccccactaccgctagaagacagtagcgtttaggtgtggttccggtacggggacggaactaccggccccggtactaacggcatagatagagccgcactgccgcactagagacatttagacactaatctcttaggctaagattatgaggtgatctctctcccacttaggaaacggctttatgtgggtgcaaatagtacaattgtgtacctgaagttgattcacccaaacctttcccatgtggactcctttttaatagtacggattttctacgactcaatataaataaaaagccgtaaatccttctacgcttctttcctttttgagagcaacgaaccttcttgtgccatttgatctcacatctgaaacactcaagcacacggttagtccacgagtcatgttgtcattaacaccaaaacacttaggaatcaaaatgccctttcagtagttggcggtgtcattgctagagactcggtggcacatgagcagccctagcttctcgatggggaggacttgggtggagcgtcgaggttgtccgtgggagcgaaggagcgacagccaatggggtagatcctcatgttgagcatgcccaggacaacgtctggtgctgggcgccgctaggaggagcccaaaggccttgttcaggcggactaatgttagagtgtggttcatatagaggcggcgtgacttgtaatggtggatgaccagcatgttgagtgccgtcacttgcattgcctattctggtaagccgtgccgcgacgttcgtactggtgtgtatagaaatagataagttgtggcacgactagggcaactagcccgagacgaagcaaacacgtccaaaaattcaaattttgccatttagcccttcaaaaaaaatatacatgaacattctgtaaaagaaaacaacctattttcgtgccaaaatatcttgccacaggcccacgagccattttgtatgagagtgcaagcataattttttctcaccacggatgcgcataatttgcaacatgtaaacgtgtttgctactccgtacaattttcgtgtacattggtcaatcattatcctcgatttttattaacgcacattcttgtatgcgaaaatcacccggaaaatgtcaaatacaccgccgcacggccgcagtccgtgacctgacctgacctccttcttctggtccttcctttctcatctagtcatcttcccttttcgacggcgtcctggaaggaatcctcctgcccccgttccaccgaaggacgcctggagagttctcctcctccggcctactggactagctcggagtgtagatccatccggaattgggtaatttctttggttgctgaagccctaaagtacttcgatcgatccggtcttctctttggtgtgcgcaatttaatcgaattctctcttcctgcgacggaattctccaatccgtcctctttttcttttgcggctaggtttggcgttgagaggggaaattcgatccggaaatggggtggttccgggccgcgtcgggtttagcccgggtggcgctgcgaaggaacctgtctcgtgtcccggcgagcccgttcgccggccccgcgccgcggtacttccactcgacgcgtccccggcgattcgctgcgccagagccccgcgccgtgccgctgtcgcgcctcaccgacagcttcctcgatgggacgagcagcgtgtacctcgaggagctgcagcgggcgtgggaggctgaccccagctccgttgatgagtcgtgggacaacttcttccgcaactttgtcgggcaggccgccacctctcctggtatatccgggcagacgatccaggagagcatgaggctgctgctgctcgtgagggcgtaccaagtgagtgggcacatgaaggcgaagctcgatcctcttgggctggaggagcgaccggttccagatgttctggacccggcattctacgggttctctgaggatgatttggatcgggagttcttccttggggtttggaagatggctggtttcttgtcggagaatcgccctgtgcaaacacttcgttctgttgttgaacgtctggagcaggcgtactgtggcaccatcggttacgagtacatgcacatacctgatcgcgaaaagtgcaactggctgagggagaggatcgagacagttaaccccagggagtacacctatgatcgtcgccaggtcatgctagataggcttatctggagcacacagtttgagaatttcttggcacagaagtggacaactgcaaaacggttcggcctcgaaggtgccgagacactgattcctggcatgaaggagatgtttgacagggcagctgatcttggtgtcgagagtattgtcatagggatgcctcacaggggcaggctgaatgtcttgggaaacgtcgtgcggaagcccttgcgacagatcttcagcgagtttagcggcggcaccaagcctgtcaatgaaggggagggcttgtatacagggactggcgatgttaagtaccatctaggtacttcatacgataggcctaccaggggcgggaaacatatccatctatcattggttgcaaatccaagtcacttggaagctgtcgatccggttgttgccggaaagaccagagcaaaacagtactattctaatgatcttgacaggaccaagaatcttggggtgctgttgcatggtgacggaagcttctcagggcagggtgttgtattcgagacccttcatctcagtgcccttccgaactacaccactggtgggacaattcatattgtggtcaataatcaggttgccttcaccactgatccaatgtcagggagatcttcacagtattgcacggatgttgccaaagcattggatgctccaattttccatgtgaatggtgatgacttggaggcagtggttcacacgtgtgagcttgctgccgagtggaggcaaacatttcattctgatgtagtcgtggatattgtgtgctaccgtcgtttcgggcataatgagattgatgagccctccttcacccagcctaaaatgtataaggtaatcccctccacccccatgcacaatcattttgatgatgatctgacttgattctatatatgtgtttggtttagctcttcctttgttgattccagcgatagtatatcttttgagtaatgatatgcctgagcttagtattccacttagctgacattggtatgcagaagtaggacaattaccataagtgagcaatagcattgatcctgcacaattgaatagtgatattatccatgtaacatgtatccttttatacatctgtaaggttctttccttttgcatcagattattaggaaccatccaagtgcgcttgagatatatcaaaaacaactattagaatccgggaagctctccaaggaagacattgacaagctacacaagaaggtcagcaccatactgaatgaggaattccaaaaaagcaaagacgatatccccaacaagagggattggctttcagcttactggactggatttaagtccccagaacagatttcacgtatacgaaataccgggtaactgattcttcccttccagcttgattgtttccaatgtttacatccacattttatgtaagtatatgtgatgtaatgcatgtgtaacgatgcagtgtcaagccagagattctaaaacgtgttggagaagccatgaccactctgccagaaactttcaagcctcacagggctgtcaagaagatttttgatctgcgtcgccagatgattgagactggtgaaggcattgactgggcagtgggtgaagcacttgcttttgcaactcttatagttgaggggaaccatgtcaggttaagtggccaggatgttgagaggggtacattcagccaccgccattctgtcattcatgaccaggaaactggagagcagtactgcccgcttgataatctggtcatgaaccaaaatgaggaactatttactgtaagcaacaggtatgaatttgtctgccgacttgttcagtttggggtgcacttgggttacttcatttaacattttagaaggaaacatgaaatcaccataacctgatccgcttgataatctggtcatgaaccaaaatgaggaactatttactgtaagcaacaggtatgaatttgtctgccaacttgttcagtttggggtgcacttgggttacttcatttgatattttagaaggaaacatgaaatcaccataatctgatgacctgaaaccgtatcacctagttcaggtaatgctgcttttatgttccacatcgtgagaagctgcatatccctattgcaagaaaaacttcaggcaaaaccctgatccactagtgatcaagttttgacagtggacgcatggctctgaccaattatgctttttgttatcagcacttggaaggaaaattgacaatgccttcttttaatttctaagaacggtttagaacatcacaaaattgggcccatcattaatgtatatggaagatgtaatttgggatgctgcagcttcgaagtagtagtttcaaccttagagttgtactgctaaattactaccgttgccttctgattcatctctgttgttttgagcagtagctagggataaatcatggttaaatacgttccctgtggcttgtagtactgagatgatctatatgaagatgaagtaattaagaaaacaacatcagtactgagatgagatgatctagtttgatggtttagaacgttggtttctgcatgctcaaattgctttgaacagttggaaaacctgaaggagaagatattttgaccaattttatatactcttaaccaacggaattagtaatttcagattgaaactactaggggcatgctctactgatccataccttgacatatgatataagtctttaaactataggcttgttctgacttcatggcttctcccatctcccttttatggttgatctgactttatttactataatctgatatgtgcaatcattttaacagctccctgtcagaattcgctgttcttggctttgagttgggttattcaatggagaacccaaattcacttgtcttatgggaagcccagtttggtgatttttcaaatggagctcaagtgatatttgatcagttcattagtagtggggaggcgaaatggctccgtcagaccggactagtcgtttgccttcctcatggatatgatggtcaggggcctgaacactctagtgcaagaatggagcgcttccttcaggtattatttgctccaactgcaaagatgttggccaagtatctgtggcgtatgaagtacttgtattatatctggacatagaaggaacatggctgagagctcttactgtaaagtagctcttgcacaattttaccatgacatgcatatacagcactagaactgccataattgtacactagattattttaatattctgataccacttgccaatgacaaaaccttaccatttccccaccagaattgtattactcttcttcattttcttgctttatgcttttcctgttctcagccaatatgaataagaaactgtatatgcataatgactcagcatattgtattgtacttcctctacttttgattagacagtagaaactacatttgggatctggcttatggattttagttgtacttctatgttatgcaacttatcggtcgtccttcacatcatttgagaccatagtcatggagatgtacacactccttagaatgtctatgctaaattttagatttaaaatatagttacacattctgcaaaattgaacagattgtgtaaggagattttttttgctgggtcatatgcgttttagacactcgtttcttttgttttacctatattctttttatgaacatcaacaattatattgcagatgagtgatgataacccttatgtgattcctgagatggatccaacactgaggaagcaaatccagcagtgcaattggcaggttgtgaatgtcacgactcctgcaaactatttccatgttctgcgtcgccaggtgaaaatcttgatacctttctctgtttctccctcccggcctgcagaaccatcttggtccattaacatatctccttgtctgcttccagatacaccgtgacttccgaaagcctttaattgtgat

SEQ ID NO: 1932 - DNA, 6386 bp, Brachypodium distachyon
  Intron number 2 from transcript Bradi2g25740.1 (locus Brad i2g25740) derived from phytozome v7.0 (chr-ID Bd2; pos 239 06339 to 23912724)
cagtcgcggcgccgacgatacccgccacggaaaaggtaaacagctcgcgacccgtgtgtgccactggagcgttatcgtctcaggttgactctcgcgtcgccgttgctcgtttgattgggaatttgggatccatgagtactgagacagcaggtacgatcgcccaggctcttgtagctagccaagtcgatacggtattacgatataccaagttaaacaaaactatcatgaaagatcaatcaaagaaacaccgctaggggtgcgccggtcgccgggggatcacaacgtggggttggacgtctccccgactgtccgatccactttagaaacatgaatctcgtccgtctaatcatggcaatattaaacttccgtatgcaacatcatttttacgctagcaacggctgcaatatcgatttctcaactccctccgtgcaacaaaagatgtcttaagtttgtcaaaaatttaaatgtatctagacatagtttagtgtatagatgcattcaaatttagtcaaagttgagacatcctttgttggacggaaggagtataaagccttgcaacattttaatggtgctcatgacgaaaaatattatgtgaatgcaacggatccccattcattagagcaaaagtgtttgaaaaagttcgcaacatatagagcataaaaaacaacgtttgcaatgtttatacatcatgtattgaccaatggagaaatacatttcagcaatcaaaacaatgttcgcaacacaccaaaatcattgcaacatcatggttgcacatattgcaaataatatgttgtagcatatcaaaacatcgtttgcaacatcaaaaaattcaaatccgtttaccttcaattgacgcatctgaggcgttgattttccttttttttttaccataggaatgcacgggtatatccaagattaaggtttgtcacactttaacccttccgatttataggccaaaccgtaaggtgctgctggtaagcttagagcgaattgttttatgtgctaaaagtgcatgtcgtttctatccctaaatttctgagtaattcttccatttgccatctttgaaataagacaaacgctgcacactaactcttaactatgaagtgacagccaattaatttacaatgcactcgtataatcttcccctaaaataactttgaattgataagtccatacataaattttcttgtgctgcacagaggaacataggcagctctcagctatttggataggaactcgatcccctggtttcaacaaaaccagaaaaactagcaagcagcttggtcagtatacgtgcaaaatattgtccccattcgtacccataggcatttgtatacaaaaagtcaaaatatagtggaatttgtcggttctatgcgcctcacagaacaagaactgcagtttatagttatgctcttgtttatatgcattagttatgtgatgcatcctgtattgttgtttctctgttgccgaaacaaccatcttgcttagaaaaccagaggttcgattacccacaggttcaattacccacaggttcaattaaaccataaattaactagttctcccgtgttacagcaacatgattagagacagacaaaaacctataaacgtgttggtgctgggaggtgttcgtgcataggtttccatcagtgtcatttctccgtttagtccaacattagtcacccatggacggtaattttcaagcttttccatatgttcttcagataagatgtaacttcggttgattttgacatatgtttgtaggcgcttagaatacatgttaaaaggcggactcaacctctaaattaatgaactagacgaagccacacgcgttactgcggaactatgttaaaacaatgcattaaaatatatgtttaaaactgactaaaataatgggaacaaaatgtaaaaatgttcttattttacatgatttgcatcacaatatggtggtctgatgaggtggcatgcttacatgatgagaaaaatagctattcgggttttcctatttagatatagaaaattactgatggtggcatatgttaacctcaagttcaactgcgtgagacgtggacacgtatcctggaatttgtgagtcatgtagaattttagagatataacctcctttggtttctttaattgttattgcatagggttgtttggatgtcctttttagtaacgaaagagaatgctcttcccgcatcaaaattgcagtgcacacaaccacgagctttgtttaaaggaggattgataagatgtatccaagttcttagagtcttgtttttatttaaactataaacaactgccaaaacagtggcctcatattgttcataaaaagaggaaatcgtattggaggtccactgacttaaacttgaaaacgtttcaccgttacccctagacttggcttgagggattattctgggtccaaaacatatgtttctgaacattatcaccgaccagtggcggtgccagcagccaaaacttgtgatgtcaatgtattctgacatctgacatcatgcctagaaattgtggatgtgcaatatttggaaatacgaaggtgctttaagcaaagctactatgatgtcatctgacatgatcacaacctacatgtggtgccgccactgacttggcgtttcttagcttgtttgcaatttgaagttttcaaaattcctgctgtaccttctactctctctcccgcatgtcctacattagccaaccaagttcattattttagagaaaacccttgcaaaggttactctttacattcattgatacgtgttcggatgggagattttacacaccacaagagatttggaggttttacactgtacaagagagaaccgcagggacataagaatttttttttcattggggaatctgcaaaagagaacatgctaaaaaaagccccaaaggattctcgaacgccacatcatcgtgattatgctcgcaaacgtgttttgaaccaagaatgaccccgcaagccaagttctggcataaccatagaacgttttcaagtttgtgcactgaagtgtttaatttccacctgccaatttcatgagctgccaatgggatttcgtcttataaaaacataggtgtgaagtagtactccctcattcctcatgccaacttcagtttgactaataaaatgtaggtaatataccgcataagttatactataatctacttcgtattggaaagaagttaaaatccaatagtgcactattaattaattgaagataatcgtctagataatgcaagcactatttgaagtacctgcttagcatgcataactttgttttcggaaattatggatgtgctccgaacctaatatgtgacagtggaaataataaggtgaggtatattggataatgctttctgtagctaagtcaattttgtatttgcccaagtaataggaaacatgtaacacgttttgcacacagtcaaaaatgaatcccatgtaagatgttgacaagatggaatatgcgcatgcatgattcccaatgagcacatgccgtcgagactatctcgctgacaaatttacgatcgaaggacctatgtatttagtacggagtaatacttacatgtcatgactagctacaacctgtcgcggatttggtccttgttttttccaacagtgttcgctcttcccatgtttatagcgacaaaaaaaagagaactttatctttgagcccctggcggaacggaatatcagggtgtgtgctgggttactggggtagcgtgtgctgctgcgaggatggccgggggggttgaaggaaggtcgtagcgtgagagcatggaaccgccgcgcggcaacgtgccgatccaatccaatccaatccaattccgagcagtatcagacaacgcacggcaggggcagctagcgcaatccaaaaccacaagtgcaagactgtgcaagtgcccaagcaagcgcgttcaattcaactcgggcgacacacacttttctcctccagctcctcccgtttaatttggtccaagatttatcttcgattgaccaagacacctttccggaagaaaaaaaattgagtaaaatgcaccggaaattcctattctttcgtgaaggtgtcaagtaagttcctaatctttcaaaatgcacatttgggtcctattatttgttaagtggttcatctcaggtccctcggctgtatgcgcagctctggccgcatgacgtggctgacacgtaggttttgggcccacacgtcaggcaatgacgtggcgttgccatcttatagaaacccccccgcacgtttctttctctcatttccgcggcccgctgacggtggcagcgggggctccggctccgcgcaggatctgtcagcgagcgcggacggacgcggcgagcgaagacgcgacctcctcgagcctctccaacagctcggcgagttcctcctcaggtgtcgccgtctccaccgtctccgccacgtgaacctcagcctcctcctccgccctcgcgatgacggcggcgagcaggaggaagaagattagggcggcaagggcacggtgggccatggctgtcagtgagcaaccctcctctacggtaccgaggaacaagaggagaacgtcagcgggccgtgaaaatgagagggagaaacgtgcggggttttttttgtaagacggcaacgccacgtcgtcacgtgacgtgtgagcccaaagcctacgtgccacgtcatgcaatcagagctgcgtatacagccgagggatctgagatgaaccacgtaacaaacaattaggacctaaatgtgcattttgaaagactagagatctacttgacaccttcacggataggacctcgggtgcatgttaataataaaaattatccattccaactcttttcatcttcccgtcttcggccggggctggatccggaatagtagtagtacaagccgccgcatgcgctgggtcaacaccgatgaagcttaagcacgttcttcagggtgaatttatcagtcatgagccaaaccaaatacaattggcaccatttcctcctagcttccatgctcgcgcgctaaacaaatttctctacgattcccgaattcgtaccaaccaaacattgttatatagacaccaaaagttaaagcttttcttctgcatcgttgtcacgggttagacatcaaacggcatgtaaactcctcagaataagaggaacacatatatcccttgcatccagctagagattatggggacgtgtagctgagttccgaaccccatcctcagagtcagacgcgcgcacgcggctcccaacccatcctgccacggcggacatcgctgtcactctgtcctgcgtgcgtgtggcatcgatcgagctggtgtcaagtttgcttcacaccttgagctggtggcagctgaagcgcaccttaaattggggatgacacatggtagctggtgccttttggacgtatttttcgattatgtatgtatgtatgtatccaagataagacgtacgcgagcagcagaggaaaaacgtacgtcaggctaaccgaacctcacatgcgcaacaaacaaacgttacttcatgatgactggaaaatagacaagagtcgtacgtatgtatgttggcattacatcttctttttgtaacgctgagccatggaacagcggttgaaccagctagcggtagaaaagtgtagtagtaggacagtacaactgacaacgggcttaatttgtcaatgttacatgcatacctagctctgttttgtcttaatttgttgcaggcttgcagcactatatcgttacaatactgaccgtattgcaatgcgtccggggacttgcctaaatttttaccgcggattacacaactaatgctgcgctgaattttacccatgcatcactgaagatctcaatcttcatgacagaccctctatctagaaacaaaaattcttcataacatactgtcacactcaatggacttcttcccccggtttcgaattggacgcatggaacttgatttgtccacactctgatcgagctcactaattcattctcgcctctcagcaaacactcatgaaggaaactcccggtttacccctgaggtttgaatatccctcctagtctacttacgttcttgaaccaccagtaagataggtaggaggagtagtacacgaccactcggcccctccctgggctggcccgtcccccacatgcgccactcgtgcgatgacgtcttcatcccaccgcccccccggtttgctataaatagactccggctagcttccctccatgagcatccaagatcgaagctcatcagcaaagctacttgtaccgtgttattcgttgccactggtctctccgtagcttaattcgcattgcagtactaatggctcctgctcaatgcgcgcgcgtgcagcgggtgttccacttcggcaagggcaagagcg

SEQ ID NO: 1933 - DNA, 4574 bp, Brachypodium distachyon
  Intron number 1 from transcript Bradi2g59020.1 (locus Brad i2g59020) derived from phytozome v7.0 (chr-ID Bd2; pos 567 72820 to 56777393)
accccaaggaggcccctcctgcacaagacaaagaggtaagtacttctccggccgtatgagcagttacaaagaaggcaggcatgcatgcatgctacctacgtgctcatttttttacttcactcttgctccaattatatgcctagcacaacccaggcttgggaaattcgttagttttatcattttcgattggatggctatgattgtttactgagaaataactctttcttagacgacggataaatagacaattcctatattataatatattgtcgaacatagacacgaaataagaagaagtagttagccaaacagtaaaatagtttgaggttgctgagaatcagtggagtaaactagactcggtggcggacaaagattttcaatattggatgagacgaatcattgtattttcaatatttggtgggacaaatgcattgcgactatttttttttattttttttaatctttacttgttacaagaatttttaaaactagtgagtttgcacatgcaacgcacgtctgcacaatacgtgacaacttgatttctactccctccgattcaaagtatctcagatttagtacaattttttgcttaagttagtataaaatctacaacacatatggatcggagggagtacctttttttttatatgatggcttgtctttctacaaaaaaatttgtcgatcttatttttaagtcaagatgctaaagttgggcctccaaaattgcccacattttcttgataatatcatcaaatctgaaccatcatgactaacatacaccctaacacattgagtcgaatcaatcacattcgaacataaacaatattcaaaatcatcaaatctgaaccaacaaggatacatggttaaggtttacagccgaattttcaagaagttgcataacctgaacccaaaccctgaattacgctccgctcaaactacgattgtactccagtaggaccacattttaaaagtaagtagtctgtcctgcttgactcaggatgggaaacaatgacaagcatttcaaattcccaacccaccattgccaataacatatcctagtacaacgatattttcagttattagatgtctaaatctcctaaccatttatatcagtaccagaaacaaacacctatgtcatctcttgtttaacccatccatattcctgcaaagaaatatgccaatgtgagccagaaacattttacaccaactctaaacaccaaaagtgtacttaatagcatgagttccaaaaacattttgtatggattgatttccaggataaaaaaaacaaccatactggtcagctatcgcctcatccagcaaaactaaaaataataattctgcggcagatacatagcaaaatcaacacatgatttcacaatgctacggccgagctaattgaatttctgtggcacaaaacaacccagagtcatagttgtgcggttctgatacagctgagtcctctgatgtatgctcaccacaattttctggtggccgttcatcaccaacacgctagagcgacattcttgcttgtgtaacaagctttctagcttcgataagtgatgcttgagcaaaagggtttgttgcagcaacagtctcaagagcatctgtagctttctctgcttccaaaatgagtgacctgatggtgaagaataagaggatcaattgagatgacacagaataacattttgagtgaacaaagcaactgtggaattaggtagtttaaaaacagtcttgcatgtatagctggcatgcataactttctgtcagcaaagtgtcaacaatcaagtaactgaaatgacaaggaattcaactccaagtgcattccaatatggcaatatatattgtagttacctatatgtaattcatctttttcagcgatctagagtgatgtgcttgttgttttatagttgtcattcttgtcttatagttgcataattatcaatatgaaaccaccatcaaaacaaataaaataattttgtcccaaaataagaataagtgaatcacagacagaggagaagaaatgaaacaaaccattttctcctttatatgctattttaatacaagtgctggtagagtttcattgtatgatttcgtagcataccccattcataatattaattggttccacccgggtttttttagaaatcctaaagcatttctaatggtgatttaaggctgcatatagtcagagcttagatctatattgattcttcagtagcaaacttacgtgagttacatacaccttttctccgtgctgacagcactcccaaaaatatgtggccacctggtccatctttgttctcaagtcgtgatcgtggaggtcgagcagcggggccaggtcctcgggcatgagctccatgatgcatagaattagaaggcctatgttgaacattgaaatagcagtatagcacctatctagagcaactgtcactcaagcacaaccttaattgaagcactgtggtgtaaagtaaagctgcaaatgataatctacaaatatgatattgttcaaccatgtaagtagagtagcagtcctcgaagcagggcagtccctcaatatcgttctatatgtacaatcactttggtaactggcgtaagcaaggactgtggagcacaattgcaaacaatgcatgcaagtgaatgaataagataaattgttgtgtccctgcatagagaaaacatcatctgcaaacagcccagtgaaaatctgctgcagtgcaatgatagaagaccaacagtttgaatagtaatgcacatcgatcaagacagttcacaagtctttgcaatatctgaaagagaacaaacattttgactacctgtgagatgaatacagttgtgcatttaaaaggacatgtttttcttttaaaactcatccaagccaaccaaaagctaagcaaatacatcttttttatgagcgaacctcaacacaagcatccttctgcagttccagaacactgtctccacaaacagtgaggatagtcatctcgaggctctcatctgctgtaacagagtcaagctgaaggaacatctgatgacaacacacggccacaagatccaacaaggaatgtttcgtacaaatcctcaacctccttccagaaacgagctctagaaagtctatatgaattcatgtcacttttacatttagccatttcctgcttcacctcatctgtcacaacacgattgaagcattcagcagaaattctccaaagagtacccctaggattgtgtgtccttatgttcatgcttgtctctccttatccctgcttcacctcatcttgtttggcaatcggcggcggcacgattctgggaggacaacatcagctacttacataattagtcacgtctcatgtagagacagtaagaaaatttacacatacatttcaatgagcacatagtgtgcagggacggaattatacctggaccctggtgcttggtgcggagggggcgtgcacgaggggggctgggcagaggcgggccgcgggggtaggaggccgcggcgggcgcaggggaaaggaaggaggcagcgacggcttcaggggaagggaaggaggaggaggtgtgggggcgggctgtatggcggggtcagaggcgggccgtgggggtggaggcggcggcaggggaagggaggagaaggaggaggccggccgcaggggaaggaaggaggaggaggaggcgggggtgtggaggagtcggcagccgcaaggggagggaggaggaggaggccgcgttggaggatggctggggtgaggagagaaggaagaaaaaatggttcgggtggggggctgaaagattttcctgcggggttgaatttcagcctcaacaggtaatcactaagcgcacacacttagcaagtaatctgtgtttagtgagtctgattgtgggactattagtatttcgtgtacgtttagtggggtggacgttgggatgaatatgttggtgcctttataagtagtagagatttactgggtgggcccttcgcacccagtcatccggttgggtcctcccctgactagattgtgagaactcatcacaataccaaatgcaatcttagattctaagaggtctctatagttttatgttgtgtctttttttttccggtttctagatgcacaaatcaaaacaagatttgaatttctgtgacataacatatgagtagggtgtgtagttgaaatatattctgttttttttcacgactttttgaacgtcaacatatttcatactagttgcctcccttttataaagaaaaagttagaacattcgattgcttgggtgtttgtatcttgtgcgttagggccaaggcatggtccctctatgcttgttgtcctttatgagaacaagatgaatcaaaaattgtttccattttattccaatctttttttgagcgaatattccaactttttgtactctctccgtcccaaaataactgacatgaatttatatagattcttatacaaatccacgtcaattattttgggatggagggagtagttaccatcgttgcaggtgaacataaggtagtccactagaggcccatttacatcgaaggggtttctaaaaatccactatgcacacaggaa

SEQ ID NO: 1934 - DNA, 3651 bp, Brachypodium distachyon
  Intron number 3 from transcript Bradi2g21480.2 (locus Brad i2g21480) derived from phytozome v7.0 (chr-ID Bd2; pos 189 67475 to 18971125 reverse strand)
tagactggaaaatagtcctaaagatcaaggcataggtacatgtgacagcgctcccttttttaaaggtgtttttcccgcgaacgcactttttttatatggacaatctgctatgttttttgcaacatgtagttgctttactttatcatttatgaatacatacatctccctcacctgccaggcaacttacaatacatccagtttttcaaaaaatgtctactgagcctttttatagccttcacaatatatacccaaaaaagggccaccccctgtctgataagttgcttttttagttgttttacaaccccccctaacaagcacctatatgtgtgtgtggtgttctaagtgtgagtcaacttttcccccaaatagtcgtctcgtctgtttccaaaatcccaaaagtttgttcacaaattgtcctgactgctggcatgatgtttgttgcacagagtaatttttccatactatttcaacaaaaggaaaagcaataacccagcaattaacgccacacaggggtaattatagagagcaaggattttctttagattgatatactccgtaagatcaaagcaaactgtttgtgcaacacaatagctttttttttcaacaaccatgcactgctagtattttcaggaactaaaatttgtttcaaccacagcacacaaaacaagggatgaaacaatgttcaaagcaagacagtagataaactaggtaggactagttatgttctaattcagaatcacgagcatcaaccacagcacatgaagtcgaacatcaaaccaatttagaaggacaagttgcttggttatgctcatctaacccacacaaggaacatttgttcttccgtttgggccttagctcaagtgcattctcaaatcttcttttccttttgtcaccgacctctccgggtttcggactgctggagcaactacaggatgcagcggcacagaagatgacgcctcacctgacggggctgctacagctgctttcttactaggcttccttgtcttgtttagatgcgaaagttcagtccgcattgtacgaatgtgcttgtccacaatttgcttccctgcatctgatccacaagcctgcctagcaactttctacaactcaacagacatattggccaaacggatctccttctctgatgggtttggcataatatcaggctgatcttgctcgggggcaacttctccctttatcgctttctgcgtccaacgactcaagatgtactgttcgggtatctcatcaatcgcacaatgagtaaatattttttaaatgtggcagcaaagcagtccatccttctgaaaattgcaacactcacacgagtaggaagcttcatctaccctagcagggactttgtatgttcttgttccatactcgcagcagtactttctgttggcgtaaagttcataaatgtcattttgcaatgcccttacattgtatcttccaatcttctcgaactctgaacgaaacctgtagtatatgtccctagtgtaaatctgcaaagcttgcttttcgattggatatgatgaccaaatttcgacatgcagatggtatgtcctgtagtcattgccaccttcctttactaggatcttcaattgtattttctcatattgctgcacaaaattgagaatagaattgtgtgggtttacgtagcgcttcaacacagcattaaagccttcactgcgttgggttgattggagaattgggaagaagcaattcctaaagtaacacgggatccatgtcgccctaatattttacagccaagcaatgtgcttgtagccagccacatcctgatgcacttccatcatctgtgcccaactctgctcaaactcttcaggggtcaaactgtaatcaacaacctcgttgaactgagcaacaaattctggccttctaccaagaaatgaaccaagcttctcttgtgcttttttcataatgtgctagcggtagctggggtgtactgtgtttggtaaaactttagctatttaagcatgcattgcccaatcttggtcagtaataatattcttgggagctttgtcattcattgcatctagataggtctcaaacaaccagtcaaaactagttgccttctcatccctcaaaaagccacagcctaacatgaacgactgcccatgtctattgatgcctatgaaaggtgcaaagggcatgttgtactgattggtcaaataagtagtatcgaacgagatgcaatcagaataagcatcttcatatgttgttcgggctgcaccatctacccagaaaaagttctgaactctttgttcatcatccaaaagaactttgaagtaaaaatccggatcatctagtcgcttctgcgtaaaatatgaaatagtctcggtcatatcaccaccacgggtttgtgcacgcattctagaccggtagttgcttattgcctttgttgtatatggaacaagaagaccagacccataaaaagatgacattagttgcatcatatgacctgggtaaaagaattaacatcatgcatcagataggcagttgcccacaaaactgggtgttttcttttgacaaactagttaatgttaacaaacaaatcggagagaaaagcaactcagcatgcacctgtttctaagttagaatcgtgcagaattctcaggaagttctcttctttcttggggatgccctggtgtgatcttagatatttagtcaaggatggtttgttaatcaaggggtggttgtgttctgcaatgaaataaaccacttgccatatgttgtccattaacttgacaatcaaccgtgctttgcaatttgtgcctttcattgtctctcttcttcttttctttcgaggttttttccccacatgcaaagcatcttcttgatcattctcatcttcactgtccacttcagattctgagctcacatctggagcaactttagttttctgagtcttctcaccatctaccttaggctctctgaatttattgcaaacaaaaagctgcttctccacttcatttgtgtacactgatctcttagaagtgcttgaccttgtcgagaaccccaaccttagtgcataggcattatagtgatcttttgcacataatagcgtgtcaaatctcatccccaaataaggctcacttggttgcgataaaacctcatcttctggtatttccacatcattgttgtcattgtcaggcatgcttgttgtatcttgattaaagttagtggactcaatttgcccaacctggccctcatagctagcaaactgcatgcttccattatgtgatgcaacaacattcccttcggtacaaattgcttggcttacttctccatggagggcaggctgtgtgcagtatgatggtaatgtagttgttgcacagccttcaccaacagcatcatttgtgtcatcaactagatcagtaggcaactcattgagattcagccaatccatctgcaattaataagaggccataagagtgctattgataggcaagtttcaaatcgaaccaaattttgtgctttttcacagcttttttgtgttcttttttatgcccctttttgcacctacatgaatattttctgcattttttatgtccttttttatgctcccctacctaagttattctctgtttctttaaagtaggaactgcttttttgaagagattgatttgtacatat

SEQ ID NO: 1935 - DNA, 907 bp, Brachypodium distachyon
  Intron number 1 from transcript Bradi3g17770.2 (locus Brad i3g17770) derived from phytozome v7.0 (chr-ID Bd3; pos 161 15723 to 16116629 reverse strand)
ggcaggcggcgggcagcagctggcggacacagaaggtgagatgagggagggaaccctctccttgcggcagttggcggatggggatcgattagggaagctataagtatggggaactgctttggagcccctttttttgtttttggtgtattggccaaatttcgtgatagggaagcatctggggcacgggttggagttgctctaactaaaccccccattcccaacattagttcttcccctgcaattgtgcacgtccgcatgcgcaaatttggccaaatgccaagttgattattggttttagctgcgattttttttgtaaactgtatcttattgcaaagatgatgcactttgctagtagaaaaaacgattttaactcttgtgtaccctgaagcttagtgtataatttatgtagatatctgcttcgaaactctgccttgtacaccatgcttcttgtgccagcccttggatttaactagccacaagcggatggaacctaccagaactgtaagacatcatgtagcatgttggatattagaggagaactagacacttttgttgatagtctgaatgaaatttgtaaggcaagaagctgcctgtttgatgatagcacttgtgttaagtgatatgtataaataaacaccagtaaaggcttgtttggtacaggtggatttcgcgggatttttagggtttgtagttcatttttgaattagagtccccagaatccctcaaaatcctgttaactccacctgttccaaacaagccataagtgagaacatttctcttacgcattagaatgtgtgccttcattattgtcacttgctatcctagagtggtgttagtgtttcgtattaagtgcagaatttatacatgtacagatcaattgtcatcatcacttcatcagcaaagtctg

SEQ ID NO: 1936 - DNA, 1242 bp, Brachypodium distachyon
  Intron number 1 from transcript Bradi5g25310.1 (locus Brad i5g25310) derived from phytozome v7.0 (chr-ID Bd5; pos 266 80938 to 26682179)
gctggggcacaggccggcggcgacaacaaggagaggtgagctgcggatgaaattagggtttcagattgagatgactgatactaaacggcacccctacttattggcgctgaaatctatgcgattgggcactgaaatctaacctcctactaattagcttgtcgattcctttgattagcgctgctagtattgtggatttgatgttaaactgactactcatctggattcatggaatggctcctaactgcggaggtaggtttaggggattagggtttagggcggttaatatcttatattagcaacttccttgtagacatcgtttgttatggactgtactagtgtggtgttttggatttgtgcttaggggttaggatatcgttacacgctttttgaccgttcacaatggctgattggctttcaattgtagcttgttattgtcagtttctgccacttcaaatagacagggcaacgacaggggaatagttacatggttagtttgataggttgcatctctagcttatgagtcttttcagttatggacctcttcagctttcttgtaagaaactgaatgtaacctcctctttttgtcttgttttctggctgacatgctttcgataaaattgtctgagtagactacacttggtttgtctattccaaacacatgggggcgggggaggggtccagcaagaaaaggaacagaaatttcactttagtttgtcaatatccttgaagagtatcttaatgagttagcaacttttctgtatacttcagtttttttagaaaaagctagtaaccgcaggctgcatttattctttggatttatttgtcaaattcaaattatttttcctgactgacttgatgcatttaatgtactccctccgatcctaaatgcttatcgttattttagttcaaattgtggtaaaaccatgacaagaatttaggatcggagggagtactagtttacgctctctcttttttttttgttacagaatcatgctaatagacctggtttagtttattggtattgaagaatatattgactgaactgttggattcatgtagtggttcactggttcatggcttcatgcacccactaccaacacgtactagaattttacagtacactggacaggattgcataatagttcttattatgggagctactcgtctatgtaaaccaatttgtgtgatatggttatattttttccagtgcttctaagaggaaaagaggagggcctggtggct

SEQ ID NO: 1937 - DNA, 2443 bp, Brachypodium distachyon
  Intron number 1 from transcript Bradi4g18300.1 (locus Brad i4g18300) derived from phytozome v7.0 (chr-ID Bd4; pos 202 54818 to 20257260 reverse strand)
gagctcgtccaggtgaagaatcttgctgtcttcatacgattcttttccttctcttttggcactctttttttctctctagtactataggttctagtacaaatagtgtaaaacttgttgatttgctgaaacatcggatattttctttttgtctctggttccgatctggtattttcttacaaatgctaccacagattttgtatgcatatttggcttcaatttctaattgtattcattgcctgggaaaatctttgttatgattaacttagtatgcatgtgctcttcttttctactccgttccattaaggtaacaggttggcacggttttgaactgagctagttcaaagccgcgtcaatctttgtggaacggagggagtacattagttacctttccagcctttattgtttcatctagatctctatgttttgttttgtttttcaatccatttttttcgcacaaaatgaacataaattataattcttttgtctattcgatttattttctatatctctttctttccacagtacaattttttttggttctaccgaatattaagtagcaaatttgaactatatctttttctgtttaaatctccaggatgcaactttctggaaatacattagtgaaagatatacttattaagtaactcaaatttgtctgaaaatggacgtatctatatattaaaatgcgtctcggcacttaatataggatggagggagtatatgaatattattttcgacatggttcgattgggcagagatgaggctggtgcttctgggcgtgcagactgcggacacccgccgcatatgcaccgctacctcctcgccacatatggcccgccgctgcccccaccgcatatgaccgctgtggagtactgcgtcgccctgccgcaccgccgctgctcgaggttgctggagtaggccgagaaaaacacagtggggaaggagatggaagagatagagttttgtgtttgatttgggcacgaatctcaaagcagaacatgtgtagggagataggaggtgcggtgctctgaggtttagaaaatcccctcaattttttttcaagagaactgcatttttttttaccgaaaactataatagaggctcatacagtataaatttataaatatagagtaattcatgagaactgcatcaatacctaatcaacctagttaagattcattgcatttctcttttaaaacaccattttttttttaacattggtactagtaattgttatagtttgttggtgatgtggtcctaattgctgaggatatttatgcaaatgttctaacatctgaagtaaaaacacgttggaatggtgcatgcaaaccgtgtctcttcgggcacgttggaatggtgcatgcaaaccgtgtctcatatgttgtaccaattttgcactatccacatactcgtactcatgctgtcgtacatggtttagtaactgcgcaccatccacgatggaatggcgcatgcatacctgaagtgtttttctttttgcactgtacacatatactcatgctcatactcttgcatggtctagcaattctggacttggagaacatatgactatttcaagtttattgataacttaaattttgtgtgaaaagtctatggctagttttaggaaagcaggaaatttcagcatgtgactttgaacagtttttgtgttccatcaatcagttctgttaaactggcttatgtatgagtaaatatttttccagtctatggttagtattcataagtattgactgccaattaattagattgtggatattgatctgcatcagattccacatatggtcttttgggatccatgcaaacgtagtttatccttgacacaagaagtattttttttcatgatacacacatgcacatctacatatactgtaactgtatatcagtgaaataaaacgtattaaatcttgaccatgaacgcaattgatggagtcaatggttatgtttcttttgtagtaactaccggaaataagtattaacatattaaggtgtagtgttgcattaatatgttcttaaaacggactgtcttcggtgggctggatgatttttagataatggaagagatttcgcctctgcgtccatggatgcaaacagatggcaacatgctcgtgaaatttttcttgatgatgcatgaattattctttatttttcaaaccctgtaagttatcgcaatattctgaacttatgtgtcactcaatatcgcgtaacaacgattctttatgtaatgacataatgctctcttttattttctgaacatcacatttattgttaaattttcttcgtaaaaactagaacgctgaagataacgagcacccttcgggagtagcaccatctttggagtttctaattacatccaatgatgctactggatctgttgcatcttatacgttactcattttcaacaatgagaggggcttctttccctcca

SEQ ID NO: 1938 - DNA, 11206 bp, Brachypodium distachyon
  Intron number 5 from transcript Bradi2g13360.2 (locus Brad i2g13360) derived from phytozome v7.0 (chr-ID Bd2; pos 118 13469 to 11824674 reverse strand)
ttgtgatttaagaaagcttcgtgcagtttattcaggtcccatcacttctgccttttgtctcttttcgtttaagactagggtttggtcattctgtacatcgggttgagtcattttcttcagccgactgagttccttcaggcaaaggccaggtaactcgtcctcaagaatcaagagccctgctaaactacgtccaccagaaaacggtggcactagagttgattgtcctaattacagcttcgccaatatctgtagtcaatcaaaaggacaaaaggataacagcaaatttgcgttccacgtgaaagttctgtagggaaacaagtgtcagcactgtatttctgtgtgcattcaggtctgtggtgacttatcctttctttcagtccatccaattttagatcgacgttcttaaaataagtagagctctgagcagagggcatgcatcaaacatgatgttgcaacaaaatcgcggcaattcagatccatcatcagttcccactcagaagtgatagtaagtaagctcacttacaaaagcatatttcacgcatactatctaactttctattaaaaaaacctaatactatctaactagtcagctgacatggtttttatgtacacgcattcaacaagtaatgtaattaggctttgcaaatgcaacagattctggaagggtgaaagatgcacatagcatccattttccaggagcaacaagccgtactctgtgcatttcgatgcaggcaacattatcgcacaatgccaaatttatcctctgcaatgttgggcatatgtgtcaatttgctgcttaatatttgatacagttacgaaataagtgattcagtataacggaatattgtttgtgttacacctcacatttacctcatggaagtcatattcagggtcctcggctttggagaatccatacacatggatctttggcatgggaacatgttgttctgtttgtctgtttcttaagatccctctgaagacatctaggaaacaaggaagagcaaaatcataagaataattgaaaatatttatttcacaggaacaagagtagatgctttttaaaagctacatgggcatgtaaaaatataagaaagataactgttcctgatgcaacgccacattttttttctgactccaaataccatattagcagtgttttagtacaggggtctatgcctcttccattcctgctttgaatggacaactcacttggctcatcaaacatatttactgtaaacatcaggtgacagtttttgattaaatccttctcggtaatggtactagtagggttaagaatatacaatcggtaaaaaaattggaccgctgagttccaaatttgaacttacaatttgaatttaaaatcctaagagaactgttattaatattggcacttgtctgggtgctggtagaagttgtccctaaaaaaatgatgaccacagaaccagcaacgcacagcccctaagaaaaatctacaacaaacaattgaattctccatgcttggttttttcaggactcttttcagaatcagaagtgaaaacacagacttacctatctctcacctgaatatttcctgcctgcactgcggcacctccgtctaacccgatgcatgctatcttctagtgcttggtgccatggaggatggagccgcgtagccacgaagagcccggcggaattgctccttgcctgcccaagctattgtgctgctgttatgctgtgcactgggtgtgcttgctgcctcgctcccttgctggcttaatgttgtagttttgctggtcagcaagccagcaatcgagcagaccaagtgtatccaggcgagcaaagcagcaagttgttgttactgccttacagatgtgtttgcttgaagcgttcaatgcttcccgtgctatttatgttcaacaattcaagaattttggtgtactggcctgctatgctgttggcgttacttattagttgtttagttagacaatttctcaatgactcaatttgtcatttctgatatggagttgtcgtgtcgtttgaaattctcatcaactgtggttaatacggtatttacgaaaaccatagtgaagtagttcgacattttccagaaccaaaccatatttctatttcataccacatttaccttagtactaaaaccttatttacccagtaaccaaacacacacccttaccatgagctgcagccaccagaagaagcaattctaatctgctagtagaactgccgcagcgacggctgagtttctttggcacgtcgcaaattgcaatactatgtcacaaacagatccatctaggttttacttctggtcatattgtagtatcaaactgttggttaatatctcagaaaatcaattgtagatttttactttttagaaattgtgttttctgcattacaactgtttcatcaaccaaagtccaatcgagctcatgcgcaagggctatggcttgctaactacagcaactcagaacagtgcaaacaaatatgcattttctttttctcacccatcttaatctatatctatgctattataaaaagcacgagtcatggaggacccgaaagatctcaagtctcaaccatccaaccagctaaatccaacgtcccaccttgtttcaatgttgtctgatgtacaacacaatttgattatccatgagttacggaaacccaattaattacaaatcaatctcatagtttcatgtcatgactaatttggaaagctttcaatcaattatagaaactctcggttaattaccgttagaggatattgttgtattgtaccaggactagttgtatttccttttgtagtgaggattccttgtttatctccttgtacttgtatatatttggcctggagccttgggaatatatcaagttgcatagttcctcacatggtatcagagcctaggacttttttttcgcttcatgcgcaactcgtgcttcagccccgattgtttttggtcttgtcccagatcgatttcttctcctccacccccgattgagacgcccgaggtggataaaccattttattgaccacatgtttttttagactatttttattgaccacatgttaattatatggcaagtacacatggatacccaagacaatgagaagaaaaaaggagcaaagggagaagacattggaaattaatgcatatgatcctttgtgctagtataataaccatacttccatgcagcatcttgaaggtgaaacaaatttcacccagagaaataataatgctaaagccactccggccatgagtaatattagaaagaaaatatacaactatttaagaaagaacaacccacctaaaaattctgcagcgtccttgggcaaattcattactaattgtgtgactggatgcacatgttggcttgagtacattgcagcaacaaacctcctggcatccatgttaaatacctagtttgaaagaagatcattagcaacttccacataaatttcatgcagaagcaaaaaatactaaacaatggactgttcctggtccataccaggataactagcaggatgtgattgataaggagcacacatcctcccttgtgtatggagatggacttgaccccatgaaacaaatccctacttccctaactagcaggatcttatctcctaactagataagtatggcacatgacaaacccattcgctcactgtaggccagcagaagcacaagacgattgtgagctgattcccctagatagtagcttcaattctcttctatgggatctataactataaactactccctctgtcccatattaagtgactcaaatttgcccaaatattgatttatctgtacacaaaaagcgtctagatacatgtaatatttcgtcacttaatttgggacggggggagtagaatcattgcagatttttttttacggaaaaaactgtagggaggccttgacagtaaaaaaatattagatctaaatgagataggtacaagtcccttctgaaaagcatcatccaagaaactaagctgggggtaaccctaaaaaaataatcatatttcggtatttcaaatctcccaggctgcggaaataaacgcttctttgagaaaaggcttgcggaagctgtccttggcgctagtaagaagcgcatcagggtcagtgtgaggaccaagctgaattccaatgtatgacagcaggatctgctgaaggggcaggaccaacagaggtggtcacggtcttcagaaaccttgagattacataggacacataacttatcctctcccacaaaaatggtgtcaaagcacaatgatttcattcttcgattgatagcactgataaaggtattcaaagctccaggcaagacacttctgaatggtgccaagttttgataaagccatattggttgcaatggactaggctgatcatgatcttctgaagccgatcagccaggagctttgcaattgcagattgttataaacactagtccataacatggtaggtatcatacagaagatgcggcatggctcagcttgaaggaaggcgatcatggactgggaggaagagactagaggctaggttaattcaatcttattgcttaactttaaatgatgtacttaataattctgaaaaggcttaataaaaaatgaatactgcaatcttatccaaataactatttctgataacaagatcttatctcaactaactattaatactactagaataacaaatactgatcagctggccaaaggaaggtgtgtgtgcttctccccgcactatcactttaggcttggcccacatccctcaaatagatctagactaacaaaataaatgtacatgtgctattctagcatgtttctaagtacaatttacaattacctcaattttcctctcaagtttgttaaggacaatgtttctttcaaggtactcaactgcagttgggtttaggtcatttgcataaacatatttgactttttttgcagctgaaattgctattggaccaacaccagagaacacatcacctgcatgaagatgcaatgtcaaatagttggttgtgcgaggagaagtaaggttaagtttagcgaaaaggttaattcaaacatgacattagcagcattaaattctaaaacttgttaacaaattattttacagtgtaactatgcattagggcaaatatggacaatgtagactatcctagcagctctgtcatgtactcatgttacatcatggaacaaattctatgttgttcagtaagtaaacaccaaaattgattgatatacatgactgccatggtaaatccaacagttagcaagcatacaaattcccatttgtaatgtatgttcgttatagaacttaaccatgaccaatagtatgcatgctgatgcattatcacaattagaatatgcttttacaacagtggcagcaaagatacttcatatgcatgggcagagaactgaaggaaggaaaacagtgtgttgatataaaatatcctgtttcatccttttaggggtgaagctacaaaaagcccctgcgtgcgttttagatgggctttcggtttctagttttttgttctggcttttgctcttttttcttttggcttctttgtttgctcagctcccctggaactgtttgtatctccccgccattctagcaatcttcttctaatacaaaatggcatatgttgtgtgcgtgatagaaaaaacaatttgcaacaccaagaagtaaaccaatagtttgtagtgtacaagctttcaatgtaaatccttacatctattgctgtaaaaataaaatgaatgaaccaccagaagttgaaaggaatagattactgcaaagctaaatacacagtgaccttggttacacaataaaatcatacatatactcaaaacgagcagagctggaacttacatacaacatcagaattttgaaagacactgttgacaagtctctgcctttctgttgctaatctagaattccaatagctgcaccaaatcattataggactggagatcaaacaaaagactccaacaaccagtgcgtacataagaaagagaaaacctactggactttagaaaccagacaaccataagaatgaagattatagtattaggttttcagattcagaaattgcgttcaacaacatagaggtagtgtgatgagtgtggtggtcttcactcttgaagcaaatggtgttcacacttcagaaacaaggacgctttgacccagacatgctcttccagtttccctcgataagatggaatgcaagtttgccccatcaaacaatctaaaattaagttgctagttttattttgaaagctgtgattttacattccttctatttgttttattttgtagaacaggctagtagggtacagttgtttttgtctttcctttccttttctttcttccttttttgtttgttttgtgattgctttgtttggttttgagtggaggccacctttggtggtttctagctaggccttcttcggcgtcttcttctaatacaaacatatctagatgcgtgtttgagaaacaaaatattctgtctatttataagctaccatttgctcataacatgcttgatgaatgaatggtgcatcctgaaccaggcagtgcgtgaaggtgcaagatagtgacacaccgaagcatctggtcctattgttgcaatttatgaactgctgataaatttgtttgttaccagcacagtttagcccagcaatgcctgatagtctggtactgattgaaattagtcacaagcggtagttttaggataacaagtgccaacattgtgcaaacctagggagctggagataataattcaggccaatcctttccttgtggctaagtgcggaaagagcaaatgctattgtgtttactcatggggcattaagtattaccagtttcacatgaccattctatgtaccttcatatactgggggtcaaagttaggatgattaattacatgttttggaaaatgacatgtatttttaatagaaagtaatattaaaaaaaccatcactacttgacatctcccattgaactattttaaaacgctaggcatatccaagtatccaacgatatctcgattagcgttgaatttgatgaaagtatgacttgttaatagctaagaatacaaggaaaatacaagatatgtattttgttgaaggactgcccctagaaaaaaggcaattttatgctccctccgttcctaaatgtaaaaagtcctagctttgtcctaagtcaaacttcttaaagtttgactaagtttatagaaaaatgtatcaacatttagaatatcaaataactatagtatgaaaaaatatattacgatggatctaataaaactaatttggagttgtagatgttggtagatttttctataaacttggtcaaagattaagaagtttgacttgggacaaagctaggagttcttacatttaggaacggagggagtagcttctaagctatgatacggtaacacatcataaaagttgaaggcctggtgcaaattataaaggaacatacatcttttgcatgctaacaatgtaaataagggtattctttttttgacaacaacaagaaagctggcacgggtaagaacatacactgttgcaagatcaactttgaaacgaaggccactctcaatgactgttgtaacaagggagtcacagccagctaagacctcaagtttcatagttctgtaatcattttgaatagcatcagtcttattgacaacagtttggatctttggcttgtttttgtctagaaccacctgcatgtcgaatcatgttttattgagttacagaaacaatattcaaaatatggttaataaaaacatattatctaatcagatacaacctgagctataagtgtcttatacggtaagtgttcatccctcaagttcaaatgggcaatatgcccaactgtctcaaagcctgcagggatgatcatcccttcaggaagtaaggcctctaacacctatagaagataaaatgagaaccaaaataattaagaaacattgcacagaacaacaaagaccacaatgcaaattcttcatgtgcaagatcaataaccatcaacatcaaataattgatgtacaaacatgctaggaagaagtgtaactttcacccacagctattgtggtattgcctgagtgcacaatgcacccataaactctaacactagacaaatcgaaccctcaactcaaaatcaggtagaatactgcagacctgaccatttcaaagtggttttacatgatatggtgcctacgtgtctaccagttttagagttcagggatgcacactcaggaattagttcaggggtgcaaaactgcaaaatacaatagcttctggatagaaaacgcgtgttgcagacttgcagtatctgtagcaaaatgttagtcatacaacacttcgtaggtggcaatcatctgaccatttctttcgttttgccaacacgttgatacaaaaggatatattcatgacattttctctgatcgcatctgaccatctctgaaccaagaactgaatattaccagaattagaaacagacccaggtgttacaacagttaatctaacctgaacagattgatttttttgcctgagtcctgaatttgcaaaggcagtgttacctggtcagcacagcattaaataccaacacaaattagaggtccgataaatcaggttctaagagttagcgttctagaacacccatagaacttataattttggaatcaatagactagactaaatgaaaagaatattctgcaaaatttccgccaccttccaattttcttgtaccagagagaatagaagttcttcaaaaggatttattttacatagttagttaactagcggtcctaacaaactaactattccttgtgaaggtcttaatgcatgttacagtctaggtaacactgcccatagaaactaaatttataactatatttgtttgatcctggagcagctttgttaagtatcagcacacatgcactaaaattcagtgaattctgttggaaatgggtcgcaacataaagccggtctcggagtgttgcccctcagcacaaatgatgttcaattttcacatggtacggaaaatttagattgttatgagaattctctcaattccttaattacgataaaaaaaatgattttcgaatatgaaaggataaaaaaaaatagaagtacagaactgaggcaaacaattactgtagtacctcattcattggccaataatcatagaacagggttagctgacattgtacaagctcataggcagaacttccacactgcttggcttcattttctaacacaacctgcaaaagtgcataaaccaaacgagtaaacaaatttatggttgaacaataaaggtgcacagacacaaacagggaacatattactaactgtcagattaattacaggatcgggcgagattcatacaaataaaaggttaaattgttgttctaactgttcatcacaatgtaagatagcattctcagtccatgtagtcaacaatagcataagatcacgggaagaaaatgcatagaagtgagacaactgcatcatttcttgaaaacatattttcttaagtcaaatcgagcatgattgtgagaactaggagttgaatattttaattatatgaattcaaacatgttgaagtgtgctcttccccttcggtgttaaaaagagtagtttccatgctatgaataccaggcaaagtgctgagcaccgccgaatgtttcctaaccatagttcaatctcgacagtatcattcaatcaggaattctacctaagctatcttctgaaatctgaattgaatagctactattaagaaaggcaccagaaatcaccaccttgatagcctctgggagctcatcaaggctccttttggcatagctctcgtccagcagcagcagccgggtgggctcccctctccacgcgcccttcccaaacccttcctccccgaccaaacccttccattcgtcgtcgtcgtcctcccctccctgcctcggcacctccacgacatacaccttgtctttctcatgcttggtctccctgttgcagcttcttgtccctttgttctccctgcgcgtccgcgcggcgggccgtgacatcttggcgaggatggggaactccacgaagccacgggcgttgaactcgcgcgccagcttctcgcggcgcgcgacagcagtcggcgggagggcggaggaggaggaggacccggaaggcgaggggaggagaccgtggccttcgtcgttgggttggcgggcgatgttgcggacgcggggccagttgaggaggtggccgcggaggcggcgctcgaggggcgcgcaggcagcggcggggacgcggagagcagcgaggtcgaaggtgcgtgctaaggagaggaggccttcgggaggatggctcggcgaggggtgcccgacgcggcggagcgaggggccatgggaaggaggtttgggaggcggggtttgggaggcttctggggaggcagcggtggcggagagtggtttgaagcggatgttgaggaggaggcggccagaaatggggcggcggaggcgagggaggaggtggtgggggttgaggtggaggagcggcgacgccatggaaatatgcaatgggagaaggatggtggtacctgcggtcatggaagcggtctgcaggattttcaaaacgtgttttcatatatttttaagaagatatgcattttcaaagataggtccagcttatctaattggtgaatcacttattctctgtccacaaataagtatacatgcgggaatttcaaataaattaagaaatgagatacaattaagtgtacatgtgtgcaaaccaccatcttttttctctttaattgtcccacctgcaacgaggcaagtgcatgaaaaaatgttattgggtttgatttccgtgcaatgaaagagaaacaattttttaaaatctaaaatactttggaaaaagagaagcacattcttcagtggacaaattttaaacgctaacctacacttatttgtggacgcagggagtaaagtattgatttggcatattgaaattaagaaccaacggagtggagttacattagtcagatttgatcgcatacaacaaacccattttacataagttcgaactgggagtaaaggaagaaaaagcaatgttagtgattccgacttggaacctctaacttttacagcttcgcaggaaactaactatgtttgaagtagaaaatctcacgctaattgccttcaggtaccaactcca

SEQ ID NO: 1939 - DNA, 1995 bp, Brachypodium distachyon
  Intron number 1 from transcript Bradi1g77630.1 (locus Brad i1g77630) derived from phytozome v7.0 (chr-ID Bd1; pos 738 82381 to 73884375 reverse strand)
gggaccggcatcactgatctcgggtgagtccttattccgccccccgtttgtttcgaacaagccttgctgttcccacattctccctccctgtccccgcgagcggaagaagggaaccccccctttggcacgcggtcgattcgtctgcgattagaacttacaaatcccgtagagattggacgagcttggaccccattacagaggagcagcaacccccggcgtttagttcggctgctctattatcgcctcggactgctgagaacctcgtagtgtccgtgcatatcttgttctatcaaatctgaaagcaataaaccatacttctgtcttggttctgagcagttacctttttggttagttttaagtgtgtacaccgctatattgaagtgtcagttgacattattaagaattattttgtctcctattgttaaacacctgaactgctagttgctaatggacataagttaatgaggaaataatccgttgtcaagtgttttgcggtaccaatttaaaatttctatttatctgtttatgtattagttctcaattggaatgatgggcataatccagttacatttgtgggtttcttatatgaagaagaaaaattacgttggtgatttatttactgctctccgatgtacttcaagtatgtgacggcttgttgaactcgcttcttgcatgcactcactgactcacgtagtacttgctatttatgcaaaggtttaagaaccatggcttgataaaaataacagaactaggaaggcttgtaaagcaccatgtgatccatatcaagtgttgttttagctattcaatcactacaacctgcattggtgttttaattacctcctttgactatcctacttagttgtttgtgaatgtgaacacactgccattttaggtggtagctaccataggggatgtggtatgatcagttaagtactgaaaagatgatatttctcgcctatctctatttcattattccgtcattataatataatttgctttggtgtattttccgctttgattatctggcttgattgtttgtggatgtgaacgggcaccattctaggtaactgctgtccaggtctttctttgctatttatgctggattttgcacagtttacttcatgtgcactatatatatgatatatgtaaatgtggttgatgttcatttttattagagcgatacttattttttgcttattttgattggacctaatgctagtttctttgctaggtgcctagatcggggtgtttcctttttttttttttttgcttaatagaagtacatatcctctatttttcttatactaaagagaatgaccttatgcctttttatcatactaaaaccctttttctctagaggatgtatctaacagaatatatgaactagatactatatggaattttttttaactgttgtctaaaacaaagtgcttgtaatgtctgattgtgcattcatataatatgtctttatttgattgttcaaaatcaaaccttttaatttttgaccaataattagtccaacaatatgcacattttgtgacactgaggcactgccataggatctgtatctgaaattatttgtgtgatcatgatttgtagctactaacaaaatatcgtgcaaacataacagtagaagttcaattttaattttcaacatctaattgaaacttcataatatgaaagataactcaatgttcataccttacgttttcagtttatattatattttttctgttaaataatagaacattgttctttgtagtcattcagcattggtcgccttgtttcaaacttgaagtccaaatatgaaatgactatttgattttatgaacctgcaaggcaatagtctgaactctgaaccatgaatgatatatcattgaaccttcaagttctttttttctgccattatttaagcagttgggttttttctaattatctttgtggtccatctattgatggaaagcatttcatttattgcaggttcaatcgaagttg

SEQ ID NO: 1940 - DNA, 5086 bp, Brachypodium distachyon
  Intron number 8 from transcript Bradi1g66760.8 (locus Brad i1g66760) derived from phytozome v7.0 (chr-ID Bd1; pos 655 50156 to 65555241 reverse strand)
cttgcatcaggtaattatcataccgatcatcttacagttcttttcttcatttggtgacagcagaggactttactttctgctatgacatgatatgtgtaggaccttttaactgtagtgctcaattgtactttatagagtaacttgacacattgttagtgaacttcttgcaagcatgctagtaaatcaagaatgtttgatgagtgtttcatatgcaccgcaacatggaacaggggcttgacccttcattctaaaaaaaaacccgcgtttgatgctagtgtattttgcacaatgtgtgcatgatgatattgaagtaacacatggaagtttttaatcttgtttcttgtatgcatatcctatgcaaatattttactttgaatgttccacacttcgactttgtcagacgctcgtccttttgtacacagtttggcactaagctgaatttctgatgatgtgcatgctgccacaaataaagtagtgattatcataacatggatgtgattcttactaattactcagaataggaaaccccttagcattttttaagcaatttcaatttgaaaggccaattgccacattaatgacgattatagtgtaatgcgtttgttatgtttcctcccatatagagctttgattaaacctgggcataccctgggccaggacaggtattggccgggcttcacaaagtgtgacagcaaaaccccaagcccgggcccgaccttttgggataaacaatgagttcttatacctatttttcgaaaagacaacatttttattcataccgagcttttttcgggcttcaggcaggaaactggagcccgagcccagctcaggacgccatgctttgggccgtgccacccatgcctaggtctagctttgatatagcaggatgttcggaacaactaactaaagctcctctgagaagactcgcccatcagataaacatccaacacctgaagcgcacagatttccaatcacatctaaggctagaacatgcaaactattttaaaagtttaggtgattggtaatcgaaagaacggtatagtttcctggataaaacttttgagctgattgggccaaactacaaaactaattgcttatatgcagaaacttgcatgcacaatgacaaaatttgtgaatttaaaagatgtgttctaatcaataactaaggcacgacacgttgggattgagaataaaatcattgttccgcatgaccacacgcacacatgcacaaaagaatttaatgataataattgaaaaaatttctagctttattcttggccaggatgtcatttcctatactaatacccacatctggtatattctattctaaattaattatcaaaataaatgaaccatcttatggggatgtaaagcttcagtgtccacgcacaaggaattttaaatgtcaacaaaacggatcaagactttaaatgatacatacagattttgaaataacaacgaggtatatcataactttgcaaggaggtaaggaaatattcctacaatacatgcacaaagggtcaacaaaagcaaacgcactaatgcagacgatatcatcaggaactgtccaatacatatatcacaccatggcgcctgcatagtgcgaactgcattttctccaattcagaacccttcggttttctataatcccttcaatcttcttgcaagatacattcatgcagagggcgtacatagtcttgaaccattttattagattccaattcgggaaaacactcagcgtggtaaaagcgcttactactacccttccattgaaagacggttaggaccaataagaaatgaaaaaacaaattgaaaactgaaagacatctttcatgatcaccaactacgtaggcgaagacttattcaattacattgtaaatgaaatcaaatatcatctacagtacacattcccaacaacaaaacatcactgtttttctgtctcattattctcagttacataataatattaagaaataagtaaatcgagtaacacttctactagaaacagcatctcagggaatgccgaatgcaaccacaagtttatcttagacacctcttgttggcttgatgatttgtataaagacatgtccgagggtcccacgtgtccacaaacgcattggtgctgcttgtactcgtaattcttgcgtagaaactttggtaatttctatacaactcaaacattacgaaatgttggatgcagatacataacatataaagtcaatcataaaactgaactaggaaggagtagcaccagttgctctttcctcagcttaagagttatgcatttggaatgtgtagcggtatctttggttgggtagaactacctctgacaaacaccatcgcaactgcagtatatcatgttattattgtacccatgatgtcctgttgttgagatggtgtctgttgaaggttgttccacccaacagaagatgtgacacatattctaaatgcataactcttgagccaagtgaaaagcaaatcgtgctccttacgtggtttcgttttattcttgctttcgtatgtgtgttattcacatcaaactttgaatatgtatataactagcctagtctctatgtaacaattgtgagtacaagtagcatcaatgctttgttcgtgaatacctggaccctcagacgtgtcaatgtacaaaccatcaacgtagcaaaaggtgtctatgagaaacttgtggttgtacttagtatttgctctgattcattatcttctctttgtgatggaactgtcacttgatttagtcatttcttaatcatattatgtaattgagaataatgagaagagaaaaggcagtaaaattttggtattgggaaagtgtaatgtaggagccaaggccttgactgacaaatggtagtttatttcatatacgatctaaattattaaataactttgcatatgcagctggtaataaaaaaaggagacatacgttcatgcagagggcataaaaagtcttcaaccatttaattgcaagacaataaattcatgcagagggcatacaccatcttgaaccattttattaaattccaatttaggaagacagtcactgtggtagaagtgcttaccctcatattaaaagatgagaaatacctaaaactggaagaagaaaaattgagaacggaaagacatctttcaacataaccaactacatatgcgaaagttatttaatattttaggtcataaatgaaatgaagtaccatttgttcttatctgcacccttgactcctatagtacacattcccaacaacaaaacatcactgtttttctctcattattctcagttacataataacatcaagaaataagtaaatcgagtaacacttccactagaaacagaggacaatgcatctcagggaatgccgaatgtaaccacaagtttattacaggcacctcttgttggcttgatgatttgtataaagacatgtctgaggatcccacatgtccacaaacaaagcattggtgctgcttgtactcgtaattcttgcgtagaaactccggtactttctatacaactccaacgttacgaaatgttagatgcagatacaaaacatataaaatcaataataataccgaactaggaaggattagcaccagttgctcttccctcagctcaagagttatgcatttggaatatgtagtggtatctttggttgggtagaaccaccactgacaaacagcatcgcaactgaagtatatcatgttaaaattgtatccatgatgttttgttgttgtgatggtgtgtgttgaaggttgttccactcaacagaagatctgatacatattctaagtgcataactcttaagctaagtgaagagcaacccgtgctccttacctggtttcgttttattcttgctttcgtatgtgcggtattcacatcaaacttcgaatatgtttgaattgtatagaactagcctagtctctatgtaaaaattgtgagtagaagtagcatcaatgctttgttcgtgaatacttagaccctcagacttgttaatgtagaaaccatcagcctaagaaaaggtgtctatgggaaacttgtggttgtacttagtatttcctcatattcattatcttctctttgtgatggaactattatttgattttattaattctcttatctaattgagaataatgagtagataagaagcagtaaaattttggtattggagatgtgtaatgtaggagtaaagggcttgactgacaaacgatctagaatattaaatatccttccggatatgtagttggtaattaggaaaggagatatacattcatgcagagggcatacaaagtcttcaaccatttaattgcaaagaaccatcaagctaacaaacagtgtgtataaaaaacttgtagctgtactaagcatttcctgagatgcattatttatttgggatggaactgttacttgatttagtcatttcttaattcccttatgaattgagaataatgagagaacaagccgtaaattttttgttttggaaatgtgtactctaggagtcaagggcttgactgacagatgatatttgattttatctactgtctgaaatattatataactttacacatatgtagtttgtaatcaggaaatttgtcttttaattttcaaaattctttacatttctaatttgtccttcccgtctttcaatgtacgtaagggtggttgtaagcgcttttaacacgccgagtgtcttctcgaatgggaccttaataaaatggttgaagactttgtacggcctcgcattaatgtatgtcttgttagaaaaatgaacaaaggaaaatatcaagggaacatgcaaaaccaaaagggagtgaaatggagaaaatgtactggatgtatgcaggtgttattgatttatgtattggacggttcctggtgatattttccgcattactgtctccctttggtgaccctttgttcatgtattgtaggaatatttcctctatctccatgcaatggtatgctatgcctcgttgttatttcaaaatatgatgtattacttaaagtctagatctttttgttgacgtttatttgttgtgcatggaccctttactcattttctcttttgctttagaatacaag

SEQ ID NO: 1941 - DNA, 6029 bp, Brachypodium distachyon
  Intron number 1 from transcript Bradi1g60150.1 (locus Brad i1g60150) derived from phytozome v7.0 (chr-ID Bd1; pos 593 74519 to 59380547 reverse strand)
tcaacttctccttctcccagccgccgccccgtgaggtaccgactaatctcacattgaaacctagcatgtcttctttaaattcgggaatacaatccgaaggtttcctgggctaaaatggtagctttccccatggattggtgttccccgttctagcccaataacctagtttgtttaattaccttttactggattagtaggcggcagaccatgcttgtgcgtgtgctatgcattttttgcgtgatgttgatgaattcactttttgtcaaattgctctctggcgctggacttgcatctgtgtagatcgcggaaaacgattagcaccatttagtggttttttgtcaagttgctgctcactgagatcaccgtgtttattactccgtagatattacacctgctttcggtcacttggtctgtatacagacttgttccttttccaagacaatatcctgttggtgtattcacccagcggtgctctgtaagtgtaactcaactctagtcatctcagggcagaagcaatcgttagttcgttactcatgtgttgtatagcagttacagtagccactggcggagccaccgcccggccagctagggcaattgcccaggctccagcccgtgacatacactatcaattaatgttgattaagtgattttaggttgattttgctgggcaaaaatctgttagagcggccacatgaagaatttgcctatggttagtgaaccggctggctccgcccctgacagtagcaatctcgcatttacaatgcatgttttcatgttgagctcccatgtgattgtattgctttgcatcataataaaaaaactcgacccttaggctaagaaacccagaaggctgtttttagttcgaggaaaggccccgaacgctggctccacccactgcggtggcgcaattggtgacttgacacgcgcagggaacaaactcggcgaggtgcctttatatgtgagaaccagggttcgagctctggttggcagccccaagacaggggggaataccactgtggtatcagcatgttctcgctttgcatcataatagcatatcaaaggcaagcactgaaatattaaatacacttcactgaaaaagtagtcacttttcatattttttatcatgatataaccatactttgtcctgatagctacgagcttgatagtagcaccattctgcaaggaacatcagtactacactttgaactggtggaaaatcaatattaattgagagctgtcctttttatgacattctcatattcacaccgcaaattgttaattctatgcacatcgattctgaaaagaaccaacaactaagacttatagaagagaaccaagttttatagccttggaatgtgaattttggatagcccgggtagtatcatgaggtgttaactagaggggttcattgagtgagttattgtctaattaatgcagaatttattagggtccaaccaaatttgtcaatcgttggatagttagatggagggttcatattttttggattctgctcatttgtgccttttatattggtataaatacaggggtcaattgaagttatgtgctactccctccatccaaaaatacaatgaaaaaatcctaatctgagaaaaagaaaatacaaggacaaattgatccttgagctcccatgaaacgtccctatatactcgttacggtgcagttggcctagtgggaaatttactcaggggtaaatttatagactttaacgcccttctcgggaggaatttttcctttgtcccctcgatcctcaaatttgtcttcttattttttggatgcagggggtataaatcagaaaaaatatatacaagaccaatgctcttagaaacccggttttgcatgccaggtttaagagatcctacatttgatgaataaccagataaatctcttcaaataataatttcaaagatctacttgtctgactttactcgcggaactgctacatttcttgaatggcaactgcctacataacttgtcttacataacttgtctccctcttttcctggaagaaagtatcagaccttatttagttcttggccccttttgctatgccaattccttcctgtgctgagttctttacagcctgtgcacgcatgagatagatgctctccatatagagcacttttgacaagtggaccttaaacttcctggagcatgtctcttagagacattttgagttatggaacattccaagcttccaccatatctgtggactcctattgggcattggcaatcttaatccaacagaggaacgtcaggtgatggtgcgaggagagtctaggagagggagaagttacggaagatgaatttagtccctgtcttgttaggaaagttcagttcagtccatgtcttgttaagaaagagctcagttgtgcccatgtcttattaagaaagttggaaacatagtttggtcaaactattagggagcacgcacagcttattctataaaaccataggcattgtaatatttaagaatcgagcaagaaataaacatcttatacaattccttcattggccttcttgtttccctagaggtagcactgttccctttcttctctggcggtcatgccatgcctccatctttctttttttggaagtttttttttgttttttggaaaggtgcctccatctttgaattaacatatcaggcctgaaaccaatcatcgctgcagattgtacaatctatctgctgcctattcctggcagagttattttggaaaattaaatttcaaatatgatggataaataacctgaatctgttccacaatagggacacatcaaagctttcttgtggtggttagagttagaagccaccatctccatgcagagatcaccagttcgagtcctttatttcatgaaatgtcgttcagacttctttcatgggcatacatccctataggggcacagccctaggtatccaaacaagggataatatcccagtagtatctcctaatttagttaggcaagagataagataggaatgttaagatatggtttgttagggaagtagagatgagtttcctggatgtgaagttaagtattccctattcccttgaggtgcgaataccttcctggagctgtcgcgcctcttgggttcagggtcgtcccgtataggccctaaagccattatcctccatgtcatgaacctagtccatgacaattcggtattagagcagtcgactccactgcacctgaagccacgaagctctctcctttcacctagattgaagctacatatgataggattcaagctgcattcgacaaactacaagacccgttggccaaggttgaagcttcactcgacagattacaagcaatctgtacaaacgtcctcatgagggtggagcagcagaaagcagccatgccaacaaccatatctccaatagctgcagcaccgctgatctcgtctccttcgccattgccttcaccaccgctgttggtttcgtcatcggtgcccctatgggcgactcaactaaagccagccctggtggtagtgcaacctgcggtagcagcctgttggccttgcagaatgccttcactaacgagcagctcgaggacgagctgcaagtccggcaggggtatgaggtcaagtacaggaggttgtgttgctgtgcacgtcttcaagcttgcaagaagcagcaacaagcgccttggatgcccatcagcagggaagaagtgcctctcagggtgggcggcagggaggcgatgtctcgcagcacaggcaaacacggtgagacgtactgccgcagcatggagattcctgcctccaggcacaagggagatgccacttcttcaaaaagcatcaggggcatggatgggtcatcctccaaagttaagaggtgccgcacaaccatggctagccatcagcttggggccttctcggacttcagccatggccaccacagcagcttgaggacgagctgctaaaagagggggggggggggtgtaatgtcatgggcgtacatccctataagggcgcagccctaggtatccaaataagggatgatatcctagtagtatctcctaatttaattaggcaagataagataggaattttcagatacggtttgttaggaaagtagagattagtttcttggatgtcaagttaagagtcttccctataaaagggccccctcttagctgtccatggtaccaaaatatcagtcagtgttgcattgaaactagtaagcaaacaataggaggggatgtgggattcaaaccacagctagtactctaacaccctaccactatgacagagatgagttgttacttacaggtgatacacctttatccctgggatatctgaatagataaaaacctttccccttttgatgggtaaccggtgagcactgagtccagtaggggcagaaggatttggaagggagctgaatttgatccgtgtcttgttaggaatgttcagctgaatctgtggatggttaggaaagttgaatacttatctgttaaaaggccccaaatcttagggatcgtgtgccggtagttccagaaaagcatatacaacgaaaggcacacaataaataaacaccctcttctttaagtgacaggtaacgtacccgtcaacagcgaggcgcctgcggtgacttcgtcaatctctcaagatctgccggctcaatctttcggaagtgctcatagggtagggtgtgcgtgtgtgcgttcataggggtgagtgtacgtgcgtgttgtgagcatctgcatttgtactgtgtttcttaaaaaaaacaccctgttctattagtgtagagatactgatgacaagcagtcatgttactttcggaagtcagaatagtagttctctctctcagtggtggggttgaaggtgagccccgccaagccgctgtcgtctcgtccttcggagctggacgatgcggcggtattggtggacgccacacctcggagagtggcgactctgctccaaccttgcccgcagccgccagcactcagcacgaccaccgccccatcttccatgattctgactgcgggcaccaccctaaaccctaacctctcatttgccactgcgcctctgtgtggcaacctgcttcggctcacatcacacctcgccctcgatggtgactgccatgtctgtgtcgtcgccatctctggctcacgtccatctgtgctgccacagccgcgtcatctccgcttcctgctcagcacgcctccgccggttctgtgcagccgcacgtaattatcaactccggcttgcctccgtcggacccgaagaaggcctggggcaattttgtgaaagaaaatttgagagtgttgggcaattgaaaagcagtctagtgactaagtgactgttagcaaaaccatatttattgagatatattctgtgtattatatatagcttccgttagattcggagattattttgtggatcaagtcaaataagcgtatagaagggatagcaacgtatccattatgaatcaaacaagcaaaattaaatatattccctgtaaccagggttcaaatcggaaattcaagaatcacgaccatgacctcaaacattggtctggtggccatctgccaattcataccccttcaatccacaatacatgctacaggtagtagactacattttttttggggatgcatggctggacttttataagaacacgaagcaaacaagggatgattgttagtatagttagtctggcatatgttctcacaaaaaaagttaggctggtatacgaagatactacctaatttttcatgaacgatagtaggtaccaaaacgatattagagtttctagcctcaagggttgtgtactcgctgacatgttagctcctaaaagcacaactcaagaaattcctccatatatacatgctatgaacaactgtcgtggttatgctttcaactcaattgcttgtttaatgttttgtcagatccttggaacttcaagtatatgcataggtctgttttagacttttagtctgacaagtcagtttctgttttggcaggttctccttgagttagcacgcagccgcaacaaaat

SEQ ID NO: 1942 - DNA, 7297 bp, Brachypodium distachyon
  Intron number 4 from transcript Bradi3g59190.3 (locus Brad i3g59190) derived from phytozome v7.0 (chr-ID Bd3; pos 584 20873 to 58428169)
ctggactgcaatccgttggcgggcatcaaatcctggtgagttatttcagcgtttgcaatctgactttactataatgttttaacgggttatgtttgaagatttaataacttttgcgttttttgcttggttaggtgtgtggttcatgcattgccacttcgatcgccatacggtgtggggaatgaacactgtgttcatcgtgagggatggcaagaaggacgacgaaaaaatgttcagtcgccctgcaaacatgcctaggtgctaactaccgtgatcacatcgagcatggaatctccatggagcacaatccataaaatacatcgtcgtcatcaatcagtttatttgttgaagtaattccattgcgttttatcataggtgtttaataaatgtgtcaattgagatcctagtaagtagtgagtattcctttttttttcccattcggctggaagagaaaagatctcttttcattacatgatgtaagacttacgtgtttgaattgtttgttatttgtgttattcaatcattctattaatgcaatcaagttgtttcattgtggaccgttcgatcggtcttgtatgtttggatgggagtcacaagtccatagcacaaaaacccaacgaataggcagcagatgtgccgctgtagttcagcaaattattgtttttcttctctgaaggccacactctacgcgatcgagctgctacataatataagtaaacaagtccatgttgctcaggcacatggacgcgtgctggcactctttttctgaagtaaacaagtgggcgatacgccaattgaaagaatctgacaacagcattgatatatacaacatgcaagcatcagtacacctcaaattttcgaatcgaaatacgatcggtacggttcgagaaacaaaagtgataaaatcagattaattgtggatatatgtaccaatatgatactctttactattcatcataggcgcatgatttgtcctttttgttttctgaagctgtagtctgtaggtggaatctgaatttgaagctgataaacttctcgatctctcttccacactatctgaagagcatgataaatttttatcttccacgctatctgaaagagaaaactactccgtatttttcacgagtcatgtcactggcattccttgttcaaaaaggtatcaaacccagaagtagagaaaggattccttggtcctatcaaaaatagagaactaattaagccatgcatgcatgtggcattgtggcatggctttgactcgccacaatattggcatgcagtgcgtacgtctggaagaagtcatcagcgatgggtgagaagtataattaacgggacaaagctggctatgggttgaaatgacagggaggaataaaccatcttcgggtagttcgtacacaggtctaaacctcggttttgcccacaaactgtcggtgaaatagacattttggctctccttttttttgcataggcggtcggctttcttttctctctttacgctgtagctttgtctctgcctagaaactagaaagtggaacgtacggaggctgagttctccctgagaaagcgatctggcgagcattagttgacgtctggtcttctatcacacatgcaagcataagacaaaactaaactaatcaaggaagcaaatgaacagtaggacacgccttagacgtcctgtccttattcttcctcttcaaaaagctctaactactctcctacctggaacattttgttatagttagtatacaaataattcccaataaaatcatggccacttggccagctcaaataagtttctgctcttcgattgctttcgaggaacatgctcgatcgttaatgcactagctatctttgtctggtttcctggccaaaatggaatgaatccaaggcgattgcggttccattttggcttgagtttttcactcggtttctaaggatggctcccatgcatgactgatattattggatggtcgcctgcacatatataatataagaggatcgtctagaatcagatcagaattgtcagaccagatcataggtgtacattctaaataattcctctgcgaattctctactactctgttcttcaaatgaatggatgtaaaacgttcgcaaatgtacttggtacaggcatgcatgataggaaacatcctggcagcttgattgcggaatcgagtttgcagcgcatagagtagaccggggattaattaaagcttagtttatcggctggatctggctgcgcgcggcgacgtgatcgcttgatatcctgctgattggatctggatatatatgcagactgtagctcaagatggtaatggcccccaaatccgaaaacccgtgggtttttaccccattaggggacgggtttgggtcaaatctagtcctcgcgggtttgttcatgggttaacagtgaaacccgacgggtttcacgggtttagacccgggacagcactacccgaacccgatacctaatgaaacccgcgaagatttcagtacagcgcatataagtggtccaatccaggccatatgtgaacttgcatgagattgtctattttttagaactatgatccggcagtcatcttcgtcggctctcatgttggcggggtgtgtgtggtgtgggtcggtaccgggagaaattcttggttggctcatccgaccacgacgacggggacgtctttgtacgtctttctccttctctgagacgttgttgagttacctgcacaccacacccgctcgagattcccgggtgaaaacccacagtccttggactagacggcgacggcgccgatggtgtcgctttcccccttgggggcgtcattgggggaatgctagatttgcgggtgaagggtggcagtcgctgttgggcacgtgttcttcgggggctctggtttgcaacgtcgttgacaaggctggcatttcaatgcttcgttttttcgtcttgaagatgggttgctggatggtggtggtggctgattctggagcgtgcgcagtcagcacactttgagaattcacttgctcggttgtgctcttcgtgtggcctccggatttaggtgttgggtgttggtgcggtcagggcactcggctccgataatggccacaccctcatcagtcttgtaggaatagcttggtggctttgagtcgattgatcgttgtattcgtctcgccagacttgtaaataattgaataaatttggctgtgtgcatcaatttgatgcagaggccgggggtctcgacctctttttcaaaaaaaaaatatgctgccatattaagtgatgttgtcatcttgctgttgttatgtgtgaatcgtactgaaattatattgtttttctttcatgttgctgctgctattttggctctcagtatgtatgttacctgacgagttcgggttccccgatgggggcgaaaaacccgacggggacggggctgggaaaaatctgaaacccgtgaccggggacggggacgggtccgggttcaaggtcgcggggatgggtttgggcagcaaatacccggcgggtttcgtccccgttgccatccggagctgtaattaatcttttttgaggtcatcgctgtaactaatcttgctccctctggttcacaacttatgacgtttaggcatcgacaatcttgaaaatctcatttttacccctagtttctacaacatacttcctccgctcataagaagttatagctttgtcgtaagtcaagcttttgtaaattttgacaaactttatagaaactttttcaatatatctacaactctaaattagttactccctccgacccatattatttgtctcaaatttgcccaaatatggatatatctatatttataaagcgtctagatacatgtaatatttcgacaagtaattccgaccagagggagtacattaaatccgtcatggtgtatattttcattgtatacttatttgatattgtagatgttggtgcattttcgtataaacttggtcagaattcaagaaatttgacttaggataaaactagacctatttatataggttatatttaggaatagaggtaatactagtaaattatactagtaatactcctatttgagaagggaaaaaaatcctaaaccgctagacatgatatagtacattgcaaatattttcagatcagccttagcctgaagcggagaaggcacttattaaggtcgatgccgagttgcgaaataattaaccataccgagttgcgaaataattaaccataccgttttcatgcaccgaatggtcctccaccgtcattcatatattgcacgctggtttacagagaaagcaaagtctgcagacctttgtcgcccaaataaaggcaatatcaggcggctgggccgggtcaataccaggttacaattcagcgacatttggtagccttgacggagctggccgggatgaggtgcatgtaccggcagaaagtgagagctgagcttctcagaagtagacatcaggagtcgtgacagatgatgtttcttcctgtgatgttctgtgattatagttttcagcaggtgttgtgtgagtacttacatagttgcatattcatgtggtggtgtttaaattgtgcgtacatgttgtacttggtttcctttttccggtcacgttgaagcttgattttgcccaacaaccgctaacaacccacatgttattttttctatccggtaaaggaggatctggtctccggctgatcattaatcatactatgaacggattggaatattttgatattctgagaactgaatgccatgcattattccctggtctcgtcggcttgctctcggccggcaagttctttctctcacaactcctagtcctataaatacctcatgcatcagctcccaacgatcacacacattcgaagctagctcattggctctcctcaaacagcaagctagctataggacaagcacgtcgtaagtgcttgttgcctagcccgcagcttagctgatcccggcaaattctcctacacttgacgtacggtccaaattgttgccggccggcaatggtgggggtaactaagataaccatgatgctttgggtacttggtgtggtgtttacatttggagctgctgcagttggtctggctgaggccaataacgtccacaatttctatgtaagtctgcttcttcttttgttcttacacgcacttcgtgtcccaagtcaacaatggattagatcatgcagaattgtcgatggtaaacatacaacttttataccatccggagcatccatgcatccatgcatgttttcgtgtagaatacctaatgattttttactaattaaacatgcaacttttttgaggttcgcaaaacatatgacttactgattagtttcaagagttttttatataacaaaacaggactgggaactagtgattatttcttgtgcgagaaaaggcagcacaaggagactgacaacattacttggtgtgatatttttcagatcaaggaggctaaccacccaaggctctgcaagaacaagaccatcctcaccgtcaatgggcagttccccggcccgaccatcaccgctcgaaggggcgatgtcgtcatcgtcaacgtctacaaccaaggcaataagaacatcaccattcactggtaattgaacttgtctgctttcgacaaaaaaaaacttgtccgctcatctgggccgaccattttcaaatcgatcaaactaactatatattctttcttagcctacctagcaattgtccttctaacgtgtcaatggcgtgtgtgatgtacataggcatggcgtggaccagccacgaaacccgtggtacgacggtccggagttcataacacaatgtcccatccagcccggcaccaacttcacctaccggatcctcttgtctgacgaggagggcacaatctggtggcatgcacatagtgacttcgatcgggccaccgtccacggtgccttcgtcatccaccccaagcatggcagcttctatcctttcaagatgccgcacaaggaaatacccatcatccttggtatgtatgcatgtagctcaattatattaaaacatggatcaatgtatcgttgccatgtggcatgcatgttgtgtgaattaaccacgagatttggacacgcaggtgagtggtggaaggccgatgtcacccatttgctagaggagtccaagaggaccggaggtgaggttaatctttcagatgcaaacatcatcaatggccagccaggagactttttcccatgctccaaggacaatattttcaagctgccagtgcaaaccggcaagacgtacttgctccggatcatcaacgctggactcaccaacgatctcttctacggcatcgctgggcaccttctcaccattgtcggtaccgacggccgctacacaaagccgttcaccgtcaagcatatcatgatctcacctggacagaccatggatgcgctacttgaggccgaccgtgctatcaatggttcatccaacgggcgatactacatggctgcacggacgtttgcatccaacaccgctcttgacttcaacaacagcaccaccacagccattctggaatacacagatgcaccaccttctaggcgtgcggggacacctgacttccccaaccttcctgccaacctcgacatgaacgctgcaacggagtacacggcccaacttcggtctttggcaagcaaggaccacccggtggacgtgccgatgcatgtcgatcatcccatgctcatcaccatcgccatcaacgtgcttccttgtgcacccaatcagacgtgtgatgggccaaatggcaaccgtttggcagcgagcctcaacaacgtcagcttccagaacccctccatcgacatcttggatgcttactacagttctgtcaatggtgtgttcgaggcaagcttccccaacaagcctcctttcttcttcaacttcacagacaccgtcgtcccaccggagctcgaggtaacaaaggtcggtaccaaggtgaagatgctgaattacggtgacgtcgtggaggtggtgttccaagacacgaccatcaacggcgccgagactcaccccatgcacttgcatgggttcgccttctatgtggtaggcagaggttttggaaactatgacaagctcaaggacccggccacatacaacttgatcgacccaccgtaccagaacacagtcaccgtgccaaaggctggatggaccgcaatccgttggcgtgcaacaaatcctggtgagtttttagcttttgggatatgaccttactataatgttttacgtgttatgtttcagaaatcactaacttttgttcttattttggttggttaggtgtgtggttc

SEQ ID NO: 1943 - DNA, 5507 bp, Brachypodium distachyon
  Intron number 1 from transcript Bradi1g67880.1 (locus Brad i1g67880) derived from phytozome v7.0 (chr-ID Bd1; pos 664 54429 to 66459935)
acatccgtttaccaggatctcttcagctgtgctaggtaatatatgttccttcttaccgataaacaatcatttgttttttggatgtaagatcttgaacaaatggttaattgtggtatcactattatttgctgcctggatgtatgcaacttcagaaaactgtcagttttgctttatagtagcctgtttgtgtaagtctgctacgtaatggtcaaatcctcaagctaattgatgataatagagggtgatgtctcatatttattaggcgttttctgaatgcatgctgacaaattcataaacatattgatttcttaaaatagttttgaaatttatttcttgatgttgaaacaaactgtagtgttgcattctaacttgtttgtgtaagtctgctatttgaaattcttgcactcgccaatgatttatggatgttatatctcacattgaaagaatgtatctctggataaatgtttgagaatcttaaacatcctgatttatttgaattttttcttgttcttattactgctatgaacatcagaaattattctcgtagttagtaacttagtatttagttgcttatacttggatagttggatcaattgcattgtcctccatttactacatccttagcatgcaggactaaacaaagcaaaaaaaaattgttgtgagagtacatgaaagacacatgggcacaccacaaatgcacatacatgcgtgtgtgtgctgtctaaaaacgctaggagatgcggattcatgagtaccttccttagtatgacgacacactttatgcctgaatgcatgtgtactgtgtttaaatgaggtggtacgctaaacatatgtgatgattgtactttcaagtgattgttgattgccaagtggtactgaggatgcctttacttatagccatctcctttaaaagattttgagtccttgacaccatgccatatatgtcagatgcacagggccaccttgggaaccattcatcacgaaagttctttgtgggcccatgatcacaggcgtcagtgtgatgactgatgaaccttggtactctaatatgttcctatattgtagattattgtcccaggttcattgacactttaccctcacaggttaggcgcacaaatttgtagccactcgttgagatgctattttggcatcatcgataagagttaatctacagtttatactgggaccctagcttaattttatatgcggctactgcacaatttagacagcgagttcttgacacctcccacccagggtcgattcttgtttggagtttttcccagcacccacagcaaggtgcaatttgtacccaggacgtttcaagctaatctgaattacaaaattcaaacctgaggataatagaaatatcaaccataaggtaaataagaaagaggaactagcctgtcatgggggctcaatgcgtgctatagtaaggtcaagggtttgactgtacagtagcaagcttcattttctcactactcagtttagatgtggatacccttagccaccagtccaccactaatttggtagggttgttacgggcatatggcaatagtagcgagttatgtggatgtcctatcaaggttatcaaccaacacaataagtctactactgtcatgaattgtagcaagcttcattttctcactactcagttgagatgtggatccccttagccaccactaatttggtagggttgttacgggcatatggcaatagtagcgagttatgtggatgtcctatcaaggttatcaaccaacacaattagtctactactgtcatgaattgaattataatgaatttttttagtgggttaccaatctccaaaattggagattagatcattgaaaaaattatgaagtcgacaatagtaatatagaaacataaaaaatgttcagtccaatgatgatttggagaaacttttaggtttacacttcagtgactggtctcttgagttgtaacttagtcaccgaggttgcatattcaatctaatgaaccacgagcatgttttacatatccgtgtttattatgatgcaatgtatatagagtatagaaaattgcgctataagtttctaaacttacgtgtggggcactcagtactgcttagcttgctatacttgaaatgaacttggcaggtcagtaagaccatatgcttgtaagaacatatcagttgggtctgtatatttacaggtcgtcatctcactgtcttcaaaatctttgatgtagttcttgtctttactgattctggcgattactgctccaatgcaaatattaaggaagagaatgtaaacaagttccaagctcggattctccaattaaattatatagaattaaaaattatcaatgctcagcatctttattgagaatgaagattgatgagtgaaatagttatattggcttttatgtttaggtgctcggcatctatagggcataaggctatgtggattggcttctgaactgcattttttcttctagtttggatatgttaactaatcagtgacatattttgaaagacctatttcaatactatgacgaagaggcggcattgatgtctcgtaagggatggatgcgatggaaactgaagatttatgatatggaagtacatagtgatagatccatacaggtaagaagatttcgcagagaggatgaccagtatgcccttgctttcttctttaatatacaactaagctctcctcctttgacgaaagcaaactaacaacgggaacaataagctaatagacaaaatgatagaaacagatacagatagggacttgttggccattatcgcatgcaaacagtaccacataaacattcatgataaagtacattgtggctgcccctagccaaatataggccccttgtggccctcgacatagcatgatacgttttttttaccattttggtaatgcttatattatctattttcacataattgcaacctgtaccataggccatattcatgtttgacttcgtaattcttgaataccttttaaaattgatctcgttcattttaagatgtagatgagcatgttactttggaattatggaatatagttcaggtcacaacaaacattgattaacaattatttttatactttcatagatgcgcatgtgatacttgttttggcactatcaaaagagcacaccagtatatcactgtacacttccatggccttgcaatcggaatgctgtggtgaactagaggaggcacatcaatccctgtgcatatgattgatcattgctcccattgtctgggtttataaggcccacgtagaattttgtgccaaactttgaccaagaattacattagtaatatgatgtggcacaaaaatgatatttttgaattcaaattagatattatttgtataatttttggtcaaagtttggcataaaattccgcgtgggcgttctaaacccggacggaggtagtagtatgcacacgacattagaaatggctagagacctatccccacatgctattcatggataataagagtgataaacatgtgtttggctccatcattctacttccattctccctcagatattgccgcttacaacaactttgcttgacttgtcacaggatttaggtcttaggcatattatagccagtctagtttgcgtattttaggatgtgccccatacatcttcgcttgtatcacttgtcatggagttgttaggaaggggtgaggtagcagctgacagcagataacacttagccatcgaaagaaaagacaacaaggattatcaccaccactcacaatgcacaattatggagagcttgttggcgttgccaaagatgctattgccgtgatagatcctacccttttttctgaatgctcttaacttcaatcttccacgaattcatgtgaattcacatcttttttggcatcattgacttctatttcaacataagttttcaccacaaattagaagcaagtttggataccgctattttagtatttgctaggttgcacgtaaatacatcggatgcctgctgctgatgaataatttcaaatatagcacgcgtggttaaacctcaaatcctttattaggagcagtcaattaagcagcagcctgtgtacttatgtggaacttggcagaatattagaatttgactagatgcgctacaatatgctattatgtggttattttaattctctataaagcttatcatattcaattccaactattctcatatatggtggatttctatactatatctatctacctattttcatgggtgtttaattccattggagccatgcataccattaccatttgtagttattaacattgttttgcctcctcttgattcattcacttttagaacaacacaaactgtacatgctaatatgaatatcattctttgtggtgaggtgataatacccaataatttatacagagatgtctgggactctggtttaaattgatttttattgttgagctgtaggttgtagctggataattgacggctactttaactcctatggttgccagctgattaaagttcagctattcccatccttgcatgcctgaccgtttccatgtactgctgacggtgaagatggctttctagcatgcagaccaaaacttgtgaacagtagcattctgtatgcattactctcagtcatttttcgttctctttaaactctcaaagcttagagatcttgctggttatctccaacttatgtaaatatagttgaatgcctgtgaagtgttactcaagcaaaatgtaaatccaattacgctcgcatcacaattgacatacaaatcaaatggtcacaaaatctgagttgcgctgttgtgcacttgtgcttgagaaaaaacacgaaaacaataaaatatttatgatgtgtacttaaacccactaaaacaagataggaaattactgatacatagttccacttttcagcatgttattgtttacccggagagctgggatggcaaacagaccatcgtcaccagctctagcatttatatgggtgatgtaaaagatatggcatgatgatccgctttgtcaacatattgaaaatttctggagcaatattatttgttggttgctatgagcctatgagtaccgcagattgaaaattcagtatggtgttcaccagtcaacattctggattgctcttttgtgcttctgatctggtggcatgtactatatgggactaaacaagtaagctagaagctaggtgattgctaatttggttgcaacactcttacccataggccagagttgtttgtaaataatttaactagcagaatgatgtggtctaaggtgtataacatgttgatgacaagtaactgttccacagttacatctatgcacatcaaatctactggaaaaacaatgattgcaagtactccattagctagtaaatgcttaatgttacattttcgtttgaaactgtatttgttacgtgacccctcatttctatatgttttttttttctgaacactgctctgtatcttctttataggttgttgagagttcagtatctcctaca

SEQ ID NO: 1944 - DNA, 796 bp, Brachypodium distachyon
  Intron number 14 from transcript Bradi1g24950.1 (locus Bra di1g24950) derived from phytozome v7.0 (chr-ID Bd1; pos 20 185204 to 20185999 reverse strand)
cgtaccttcatcgtgacacacaattatttcagaaggtaacgtaaaagcttttactgttgaattcttcttgtattagtacctgctcactatcctgctgtcctaatttatatatatgtctggatattttctccagtgcatttaggtcatatattgttgatttgttttagacattttttataaactacaaagaataccatgacccaagatcttctgtttcatcagtcgttttgaattatgatgaccaggattttgcttcctctcttgtgttgccgtaataaattaagaagccaaaaatgccatccatgatacaattcagcatttttgaactggtgttcacatgcaagaggcaaaaatgccatccatgatataatgcagcgttttggaactggtatgcactggctatctgctgagcatgcatcatagcgtgggcaagggggcagctgtggtgtccaatgctttgacatgaatatcctggccgcatgatgctaaaattcaatggcagcagatagccagtgcatgtgggcatctcttccatcaggacttaatgtgcttgttacataaagaatatatttccagcttatagcaaaaaatattattacatttgtttagaaagcatttggtcaggtccaatgactggatacctttgcttgcgacctggatacctttgcttgcaattatgcagttgcacatggagcctgttgatggcgaatatttttgggtgttgcttacttaatggcccatttggtatgtttacttttcaggtttgcagagtgctaaaagtgtatcacgtccgatc

SEQ ID NO: 1945 - DNA, 1391 bp, Brachypodium distachyon
  Intron number 1 from transcript Bradi1g71160.1 (locus Brad i1g71160) derived from phytozome v7.0 (chr-ID Bd1; pos 692 19967 to 69221357 reverse strand)
agacgtacaaagctcacaccaagggagctgatcgagtaagtcgaattgttccaattctttgaattttcgttttcagttgtgtgttaaagagattcagggtgccgacatttggtggaataatctggaaacatacattattgccataataaaaaatgtactagctaaatatagtcagaataacatgggagtttatttgcatcgcccttcattctttagtcagacattatgtatagaaacgaaattgaccggccttctttggcaagccttgcacatgagcctgacaagtgagagtatgcttaacagagtaatcagtttgtaaaaaaacaaatcatggaaaatcatcaaggatcccctttcacgtaatactggtccatgtctttctgtgagattcaggaatcatgccgatcaagataacaaacttatatagttgtaagcttattttatctaaatatgcttgcaaggatttctgtacctgtggcgtagtgtgggctaatgcatgaatataattttcctgatcttttagattctgtcggtgaggcaaagttgctactggacatgttggaactaatgttctgtttgggaaggtaaggtagttacctgggttatctggaggcaggttaatgtagtttgatatatacacggtataggagatgaaaaacacatagcagtttccacaaatttatcatgtggttattgtttgaactttttttgtttgatgttattccttgcataaaagagttatctatcttctttcctacttactctgtttggataccttcagtattgcgatatacagtcctttcagcatagtattagcagacttatatggaagtctatgtagtaggtaaaaccaaatgaaaattcaaccatatacagctcctgcttccgagttttctgccgtagacatgggagaagcaaagcacatggaaggtttttcactaagttagaaagtaatgtttagaaattctaccatgattataattattttttatttaacccaaggtgactgcaatactgccatagcatctaatattatcagttaatcgacttgatagaaaatatgacactggtttttaaaaatggagaagggcctggttctgatgtggtttgaggcatttttcagtaagaaatcctgggcagatctttacttgtctgttatgtgggcatacatatgtatcttgcttctgaaatacaaaagctattgatattcagcaggttaacttattatgctattttctgtgtctcgctatataactgtttttttgggaagattcttgttatatactcttaaacgtattttgcagaattttgatatgtccatattgtcattctaaccaatacaatctctttttctaggttgacattgttggtgtgagttgttattcttcaaa

SEQ ID NO: 1946 - DNA, 3103 bp, Brachypodium distachyon
  Intron number 1 from transcript Bradi5g25100.1 (locus Brad i5g25100) derived from phytozome v7.0 (chr-ID Bd5; pos 265 46834 to 26549936 reverse strand)
gcgtctcgtgggccaccggagccaatctctgcaaggtattctgaccccaaacactgtgcatatagttcaatccgccgccgctgtcgaggcgtggagacggattcgcgctcgctcccggtcccgtcgaggatttgcggcgtgctcggtcgtttgttgcagaatataattttttggttctgccccccattgcgtggcgcttttgttttgtttggtcgctgatttgatctgttctgcccgccctcccaagctcagcgagaaacacgatcttattgtatattttgtttttatttttcgtttttggagatgcgaaatgcacgggtctgcctagaaaacgaacaggctatctgtatagatcgaatcccacaatcggcggatgagaatgagatgtggatttcactctgcaaataggcagaattgctgcagataattcagtgacaaggcttaattggccgcaaacaaaaaaggattaattcaacaatacctgcatgcatatatgtacaacatcaggacacaagagatgtggtggaaacaactgaagtgaactcaggacactggcaataaaatgaatgatcagtgaaataactgaacaaatgatgaaatattgcttctagtgaccgccagctgtgaattttgcagctacattatcctatatcatctccataagacaagatattcatttatgttcctgatgaaaaaacatcagctactgagccttatagcatttagttaaatgataggttagttcaaatagtttagttcagtttttattttgtagcctgtttctattcaatgagcccataccgacatttttttccagcagtaggaatatgcgatgctgaatgtttgctaccggagagcacgacagtatacatgtgccatgtgtaatattttcaatcagtagcatgtagatgtgcagctagtataacaggaacatatgcagctataatattctgctgactaagtctgtccaaattacagtgtgaatcatgcactcaacttctataaatttgtgtagtattaatgcatcagattgcactagcatgcatgcatgcaatgcagtgttgctgacatgttatactatcatcttgtattttacaatttataacctgcacaagagactcaattgttgaataaatatcatagtgaaaatacaccctatccagttattcctgccagagtgatggcattccgcttttgtggaatccatcatttattgctatttgtcgaaaaaaattaagctgtaagagggcattatgcaaaagatgtgctagtgcacatgtttgaagttcaaattgcaacataattgatgcgatttacagaaagattattgttaatacgtgatcttcatggttggattatgatagagctgaaatagaaatatatggcatgctgtagcccatagtcaaaaaatgccaaaacacagctcacatcatttcgttgcatttttccacttcctgtcatcaataaatgtattaaatttgtcattaattaattcaagctcatttaataatttagcgaacctctagattctgtatggatgtatgcccttctttggtaaatgattatatttgtcttatgtgaagctcatatcgcttaataaatacggagtattgttttgagaactagtcataagactaccattaatgtgagatatatggttccacttccatgctatattgtactaccaagagtgaacttaaatgtattcgtctgttctggatgagatatcattagtcagataaagtatttattgacttgtgtgagcaaaatatagtcaagatgcattaccctgttttctcactaaccttccccaagtaattgcattgtcgtctctgtaaagccacacatgaatacgttacattctgattgcactacaagacttcgttcacggatcatccttgtccctgtttcctatggaccgataccaagtcctgattgatgactccctcgatcatgcagatctttctacctgaacattgttacgttatatacttgcaatgataacaggagaatccattagctgttaagtattgcattatgtgtaaatggatgatggattttcatggtctgttgttgaaagattgcttggtaattggcatcatttcgtatcttgctttgtttaaacataatccataagctgttgtcctgcccatgaaattgtattgtatgtcactgcattgccccctaaaacctcgtttccttttctccagaccagaatgccttgattcagtacagagtcctgaacatagattatggcaagctgatgaataaaccattgtctgtatttccttgtctgcgttgaacttattaatatgtcacagaactgttcctcagaatctcatttccttttcttcgagaccagaaagtgccttgatctaactttcttgtgaattgtacaaagtcctgaacatagattctggtaagagcgagaaggaacagattgtgtgatttgaattaaagttttcttgtcacccaccttataggcacccttcaccacagctatgcaatggatgtatatgtgattattagtacataaacattgataattttgtgattctgtaaatattctttgatcgatcagtcatacagctactggcctttgcccagatttaaagatattttgatgtgctatagcacgtgtccttcagaacaaaattacatttgttagttaggttcaaggtgtgcttcattccttaggtcataggttcccactcaataaggcctttttaggtgccagcaacgcttgttgcttgcttcattcatggatagattctggctgctaaaccagagaccgttataatctattgactattatagcacagctttgggagtagaagccatgatcaaactactgctgagtatttattcatgggacgaggcatcagatatataagaaccggcctaacagtaccagagtggaaaaggcataccattttatatcagtttatttgcagtcgtacatattgctgggtgcagtgagttttaatttagattttttctgtagtcactaaattttttaaactgtaaacattaagaaaccctatctcttacatgtataaatgtttcaggtacggctttttatctcagaggattccccttctca

SEQ ID NO: 1947 - DNA, 2741 bp, Brachypodium distachyon
  Intron number 5 from transcript Bradi1g61940.2 (locus Brad i1g61940) derived from phytozome v7.0 (chr-ID Bd1; pos 612 26245 to 61228985)
cagacacccgaacatctgaagtgtaagctctaaattcatatcctagtaaatctttgctttcgtattggcgatcttcgatctatttgttcactgatatgttacatatctttgtgttcttgaataattttacagcacctgttatttctgtttgggtcatattcctgtgcaattttgtgttactatggctttatcctttcatgtaatgatcttaccatgttgtggatagtaaatttacctgaattctacgtttgaagctgtatgtttaggtgggcatcaattacatgaactaggggaaagaagagtggtggggcttgaaatgtgcaatccatattaggcatatctacaataatacaaaacctataggcatagactgttctataacatttgtgttcatctctaacccaaaggtccaataaagtgaactccagcgtgggccatcttaaccggagtctgataatgcaaaaccctagagttagccattggcccaggctcggatgaattgtattttggtggacttatggaggtggaatcccgtgtacgcaatttagcaatctgtgggaggggttattgaaattgttcatccatttgaataatttgatttcaatcgatccagtggttaatgtttggaaatttatagttgcacccatacatgggtttgcattaggcaaacattattggtgaatgaagttctttatgcagaacacatgaaataagttttcgtttttgtttatgtgagagagatctaaagaacagagttaatgtgagaaatgacaagtattggttttccttggaaatatcaaatatgtggtaaatatgaggttctagacagatggtttactcttaatctatgagtagtacttttgtgcttgttggagtagatacttttgtgcttgttggagtagaaagcaaaagctattacttatgaactacttataccaatgcgctttatgctgttgtaatcttctaggtccattccctgttttaaaccttggaaaattggaaaggggcatgcacccccaccttccttatgacagccctaatttcatataatccatacatgtaatatcaaatggtgttttcatccagcaagatacaccacctctggatattaaaatagcttgggtaagtgacatacgtcttgattcttgaaacatatttgcaaatcttataatctatttcctagggaagttaaaaaataaactcatgcattgtggatgagtgatattactgatatgttgtattcacttattgacaagaggattattaattctatatatcctatggagattcgattctttaagttggattctcaaaatttcccatgcaaatttgcactgtggatgagtgctatgcggggtacacaacaacaggtggtatcactggcattttgtattcgcttttattgacaagaaaattatgaattctaatcttcctatgtagatttgatttgttgagttggattgtgtgtgcagctttgatgctttatgagctgagttttggattttttattatagcttctttggtcttactgattgttgttgttctagaaaacaacaggagtacggggtgccaatgcacgattgcacaaatgcgagaataaggtgtagggggtgtacgccggccttatagcgaaggtcgccgtacacttgggacaagttgacacgttgatattttctgaataggttcggtcgaccctgcgggtacgacttagtcctatgttaggagaggcttcgagggggtcgttagccaagcgcttgggccgaactcgtcttcccaagtcgcctatagcgagagatctctaggggccgcctcggacctgggccgaactcgtcttcccaagtagcgaggttaggataccctcgagactctaacccgatccctctactttgagtcgaggtcgtactagacggcccggaacctcgaaactaggcttctcaagtcgcgtccccgaggtcgagtcgagactaggctcgacccaagcactcgagagcgggctccttgagatgctctagccctctcccctttgatcttattccaatggagagtgaatggtacatgcccccatggggagggtatttatagcctaggggtccatgacaaaagaccatggctacccttgagggagagggaaagtgagggtaaggtggtaaatttgctcctagagctttcttggcccttactctagctcctttgaccatggcatggggggcttgaccctttgactcctttgaccggtacttagttggcatggctaagccttgttggcaatttgaccggtcttcgggattcgttgacttggtcgtcgccacgtaggatcgcggcccggcccatgtaaggattttattatattacaacactgataaacctgtccatgttgcatagttgatgctcattagtcagatatttcatttatcctgcttaactccgaaggataggaacatttggtactcctttcagatatacaagatgtatattgactgtccaaattcattatttgaacgtaaatttcttggacagtgagttgtgagtagttacaaaaccacaatcataagaaagtgcttttgagtacgaatcagtcgaatctaatgtttgtcaaaacctgaacttggactatcaaaatatgtcctgtatgtctgaacaagggagtacttttctctacctccatatggccctaatgttctttctgtttgtcctgtcttgttttagctatagatactgtaatagccttattggaacattcc

SEQ ID NO: 1948 - DNA, 2257 bp, Brachypodium distachyon
  Intron number 1 from transcript Bradi3g08400.2 (locus Brad i3g08400) derived from phytozome v7.0 (chr-ID Bd3; pos 659 1213 to 6593469 reverse strand)
cggcgagcgcggcgccggtgaggacgtgcaggaaggtatgccgtccgcaggcctcgggattctgctatgcgtggcgcgtcgcgagatctgctcggttccgtgggtggggatttgacgccgccgtgggcccgcgcatttcaccgcgcgcagacggggatctccaggattcggtcgtccagtgcctttgcgaattgagaggatatcgcggaggctttgtcgtgatttgggtctggagcgcttgggtcctggcgttttacgaagtgttctgctacatcgtgtttcccggcgatctagcatggttcgcggctaaatgacgagctcgttcttatgcgcggatgggtgcttagctactggggtccgtgccggaatcagttgtcacgtcgtaggctttgctgctcttgtaggatcgattattgtcgcagattttttttttttttgacgtggtggtagtagttgttccagtgcattgcgcccatgctaggtagtcgcgttaacggtaaaaaaactagaaatgcttgatggatttgctgaagatattggctggcatctggctctttacagcatgattgccggtggcatattcaaagtttagacctttttgtgtgatgacctgatgatggtgggaattgtggatgtggtaaggtgttctaggatttgggatggtttggtagtaagtggcatgaattgggcgcacacaatatgaagtgggttgcaaagctaggtaggataatgccagctttgtaaatctttcatggttgggaattgtcatgtgcttgggagctgtaggtgagtggtatccttctgtgactaagccataccatgacatcttgctcattacgcatcggacagggttcattagcatagctagttttctacagcataaagaatgttacacctgtctaccttactaaaactgggtcaggtgctcactcggcatccatgggtcatgccctaattttgttaggtttatggtgaaatggtgttgatttggtaagtgtttgtttaggaacagtgaggcatattttttatgcctctcataacaggtcatacatacgagatacgacctgcgtttatttgtatgattattaaatgttcacaatagtgtcttgaagtttaagttataataaacacgatacacaatttcattcctagacatgcggtcctttcagacttcagatcaatggtgcagtccaggatttgcagtctgttcagaccagtttggtatacatcttgctcttaacttttagccatataggttttatgagaatccttccattgggaccacaggatcttcagatacagaacccatttgtacatagaggatatggcgcagttatgatattctggcaaattattacgaaagcaatctttccctcctacttttctatgaattgctagcacaaagccgaaactcctgcatagttctgctctgtcgatctaattcagtcacccattacatatttaacatgttcccaataccacttcttttttatttctcgaatccgcacctaagtccgtgtcattttcattagaagaggcgctgagatggtgaaagttacaaaggcccaaagccaacaccaaaactctaaaacaccgaaaaaggaagagcaaaagagaaaaatgtcaaaggccagaaagaagagaaaaaaaacaaaaactttacactagcctgcaggagaaagaggctactcaggaggccgggaatgcagcggcaatcttcgaagggccttggcaccggcatgcatccaaagcacggcttcagagaggatctcctcggccaggagcgggatgtcgggaactgcaccgatacactcagttacccatcacatttttaacatgttcccaataccacttctattaaggcagcactgtttgcggagagcacactataatgctctacactacagtgatggaaaaattgatcattgattgtaggctcttgataagtaatagctgaaatttcccaacagcagccatgtcttgttcctttataggaacatcaaaaccacataactgtttggatacttggtcccaggtttatcatttgtttctaaaatcaacatagaataaataattcatctcttcagtctgaatgatttgctataagtgtttctattcattttagttgatggttgtgttgaataactgaaatatgctttgtttttgtggtttgacctaccaagtcccattcgtatcttgatttaatatgctacttgtttcagttgacatcatctctgcaattgagtttgacaaatcg

SEQ ID NO: 1949 - DNA, 4259 bp, Brachypodium distachyon
  Intron number 6 from transcript Bradi1g29020.1 (locus Brad i1g29020) derived from phytozome v7.0 (chr-ID Bd1; pos 244 97827 to 24502085 reverse strand)
tgccagcttgtcctaaaaggtcacgccaaacagtacttcttacttatcctttttttctgaatttaaactacagtatatagatagatacactatattaattttcacaaggtgaggcaccggaatgcgaccttcaagggtcgaaccctggtaggtagccagcataccttgctgggctgaccaaccaagctgagcttggttctccttccttttccttctttgcacagtattcgaaaaaatgccttttgagatatagatttcaggaaagcagttaaataagctgggtgacagtcattcaaggatgcaatgtctatctgcacactgaatttgcaaacatatgtgcttcttcaaaagaaataagagcaacggaatactttaatattaaaaagcttacttcaaataccgggacgtatctaccaatggtgctataggtgcaggtggagaactggttccacctaccatgccctcctaatttgctgatccctatgatctgaaaaccaaattgtatttcttatctttattcttggtcaaactatgggaaaaagttattttcaagcaagttacttccactctgatcattgattgtatttttagtttgctccatcacattccatgaggatcggctgcatttttccctgcatgagccactgatcacaagcatactgtaaatttaggcctgtgcaaacatgatgaagcaagacatagacgacgtactcatgtagggttgcctacactgtcttgatcgttagttttcttttgtctggataatgaggttagaggttccttctccagttagtattcgataaagatccaaccgccagatttgatgactgaggatttggacaagttcatccagaggactgtttgatttgtgcaatactccctctgttcctcaaattaaggcctatattgttttgtttgactgagcgtttgaccaaagattacttcatcaacgtgtgacttatacgatataaatcattatcataaacaagcacttttgaatacgaatccaatgatatcaattttatttcacaaaatatatatattaatagactaaatcttggtcaatatatatgttggaatacaagatttcacaatggctcctctatttcttatttgagcatgatacagaattttaataagctaaataaataagcaaatagatacaacctttggatggtgtcttcatatagtctatagatttacgacaacattgtgctagtagtatgtaatgcgcagctccttccgtcacacttaagctgctataatcagagttcatgaattagttaggttggaatcttgccgagtctttttttagaggaaaacatcctgcatatattatatgaaaatgaaaatgggctccacaaagagcatgcagatacaacccaataaagcttaggcacaagaaaaatgaaaattacaagcatgcccctgaggatgacgtgttccagccatggactcctggaagccaatgtgtcctgtcatgccgctcaggttaccataaacgccttcaagacacctccagggattttcattcgtcaccaccgccgtccaaggccagactcctggcaagcccacggctctgccgctgcaaatggaaccggacaggaaaccgaagtgcctcccaacgactcatgaacaggttaggaggaagagatgatcgatgccacatttgttgatgaagacatattcaatgctgattcgacaagcaaggtcgctgccgcatatgatgcccaaaatcccttcgacggtgactaagaggcctgtcgatttttcttagagacaggtatcttcatgtaggatgatcgggagagagggctgggctgacgagggagaagatggcgatcgtaccggagtttggcaagacacaagtttacccagattcggctatccctactcttggatgtagacctacgtcctgctagaattgcagtaatgtgtgtaatgattacaagattgtctttgcccatcgagggcacctaacccggccttatatagtcgaacagctagggtttctctcgagagttgtacattcacccgtgcatggactctacatccctaactttcttcctttacaagatatgcacgtggtattctttctatacaagatatgcacgtggcattctttctatacaagatatctatgacatatactgcctatacaagatatctacgaggagtccttcctaagatatctccacggtgtccttcctcagcaagatagccaccaaaccgacctttggagggaggccgacttgtacactaagttgtccccgtccttcagttggcctggggttaccaggcggagatatcctcgtcaaggccgtacctagaaatttgaggccccggcacaaaatgcaatatgggcccctaaactttggaatttcagataacggaagcatgttttcacttaattagataacttcaagacatgttatttcttataataccaaacaatatatcaaatatgctaaaagagtaaatgtagtactcaagcaataaactgattgggcaacctacgattctggggttgagaacctgtgattgggacttcaggaatcaggagttggcagatctggagtcgcagttggctgagagcctgcgacctgcggatctggcgcctggcggtagcggacatgtgagccggtggacagcgactgatggagaagtcgagaagacaaagcgtgaaaagggagatcaaggacgtgattaggcactagaagttgacgcagctgcaatgaactgatgaagttcatgtaggggatttattggactgccgggggattgattagactttgggaattcagaagcaggtctatgggtgctctctgcccttctatttctgggattttttttcttttcgttgggccttgtaatttggttttgattaagtacagatggtaaacttagatttgggccccctaattattaggggccctgtgccatcgcacacattgctcctgcaacgggcagaacccccaatctggaggcaaagacgtgacggtgagctcctgtgggccgccaatcccagaaaccgtgaagcaggcctccggtatggggttatgggtatcagcagctctcccgctaatcctatatacctatacaactgatcccttcctcagtcttcacctcaccaagttttccacgtcagcctgcaatttatatctgtgagacctatcatcttagctaaagttgggtttgttccagcacgtatgagcaccagtgagcaaatcacccgatgccacaaaattggagaagaagatatgcaccgtcctcaatccattccgccccgaccaggaaagaggactaacttgaagctttttgcatgacttaccggaatacaaagttgtagagagccagatccgacgagctcagcaaataaaacatgcagggcataagaacaaacctatagctaccaagaacaaggaccagagtggtgccaaagaacctggacatcacacagagaggtaaagccgcatatccagtgaaccgggtatcttttccagctgcagccacacagccacgatggcgactaccagagagatggaaggagaccagatcagatagatctgggcatacccatttattggagaagttcacctgtgcccaacaagagaaggtgtcgactttagcaaccaacccacctgcgaggatccaactccagcaaagccacaagaagctctggcatgcgctcccttccgacagtagccagacttctagtggcatgctgccaagagcccctaaggcagctactatatctatataaggtggatctacatagagggaataggtcctgcaaaggttattcaaagaaagtagcagttatgctccgtttactataagaagtgcatacactattgaagtgagatgcactggatgcttaggatgaagcttaatcctttcttccaactagacaatcttagttgcctagctcaatcctcatcatattaggtgtatttttgctgcctaagttgaagtgttgactgtaaatatcgtatacagtatcttgttaatagttacagaatcacagcttcataaaagtgcttccttttgaatacaaatccagcagtaacaattttttgtcggataacctacatatatttttattggattaattaattgttggtcaaagcttgaacttgggcagttaaaatctaccttcaatttctgaaccgagggaatacctatgattattgctattggattaaaatctgccttaatgattattaagtgtgcacaacatgcagatatagagaaagggg

SEQ ID NO: 1950 - DNA, 16411 bp, Brachypodium distachyon
  Intron number 8 from transcript Bradi3g25380.1 (locus Brad i3g25380) derived from phytozome v7.0 (chr-ID Bd3; pos 250 97206 to 25113616)
gcaatcatgtaagttttctgccatgcatttgttttctgctctgcgggagtgtcagtaaagttcaaaatgaataatgcatttgacaatggaatgagtatgattaacgtacatgtgccccaacatttgcacagccattcatttacattacaaattttctctctctctctctctctctttagctatccattacatgtacagttttagctgatccaatatatggtgaagtaaactaagatggttcagatgttaaacgtttatgacttgaacagtctgttacttactccacctaggtccattcagaccctattatactctcatctttacccacttaaaaggttctaaagtattgaacatagtcattgatgttactaaaacatactcccctctgttccacagcaactgtcccacacatacctagtaggtaaaattattacgtgatatttgattgaattggataactcttctgttagatgttatactactaatctatctagtgagagcaagtctgttatgatttcaatacatattacttcaattttgtgcctcctaggtctcattgtgggacggtacaacttttcatgttatggaataagaaaggtatatgcttgtataacctaggcttattaacaaagagtgttagcaggttgtcactcccacacctaactaggtacatatccccataattgatttgacagcatctagcctaggtgcagtggctgctaggtttaatgaaatattacacttgaagaattgtaaaatacaagcattcatgtatgctaactgtgaacatagctgaaactgaactgatactgctaagcctagacaagttatgatacacgcgttgagactgaaagaatattaagttcactattgctgtagccattgtctttaaattttgtggggcagtcacaaactctgccatggaaagtgtcctgaacaagcattggctacagcaaacaaagaaagcgagattgctcaaacacttaagcctgtgaggggtgtgccttcggttttcggttcggttcggtttgtacggtttttatacttttgtttgttcggttttgtatacaaatacggttcggttccggttataaccatttagtttcggttcggtttcggtgataaccatattaaccaaaactgacgtgaatttttgagcaacgcataatagaaaaaatatgttttcatttcatctccatacttgaaccactatgcagtcatagagatgtatcttgtaggaacaaggaagttttattaaagataaaatctaatgggcacacgtgtgcccttttgtgatttctggcggcgccgttggatccctccaaacgagccagatgcgcttgggtcacgtgggcgccccttccaatcttctctctccccgtgactttctcatctcgcaacgtctggtccgcctccttctccactttcttcctccctcgaccctaggtgcttcaggctgcgacagcggagtagggcacggtgccaatgcagcggagcagatcgcggggttggagcaggccgcggcggactagggctcaggccggagcaggctgtagcggcgcggcagagcgggacgcggcggatcagggcgtcgcactgccacggagcagtgacagtggtgggtgcagggctgcacgcagcgggcatggctgagcagcggtgagggcggagctgtgagctgtggtggcggtggtgggggacagcgcggcgcgcgatgggtgcggcaacgcagaacgacgcacggtggcggctggggcggcctaggccccggacgctacgggcagccaggcaagcgcgccgtcgctgaccagcatcatcgtgcaggcctctgtggagagtgccgttggcaagctccgtgctgccgcgtcctcctgcacgacttggcagagtcggggcggctcagtggcacagtgtcctgcggctgacgtggacgaatgcgagttccctgtcatctccctcgatggttggtgaattcttcgatgtcgtgcacgggccagcaaggtgtttgatggaatgtgtgtgcgtgctacgatgtggtgtgatgctaggctaggccgcaatgcaccgttggctgctgtgttcagccttgcgtgggtaactgcagtgttagcgagccggtaactgcaggttagagggcccgtaactttaagttagagagccggtacctgcagattgaaaaggtgctagttgtagtttcggtatctgtaggttagatggtcggtgactgtaggtgttatggcccggattacgcatatagctaacacatctaggattaagctcattgctgcaatcaaaacccgaacttgctctctatcaacataacagataggtcacatcaacatttcggttcagcagtgaactacaacacgatatggcacaacacataatcgacacggcgagatatgattcacatgtttcccaagatgccaaacatgcacacatatcctaagattgatacatcacaactcaaacacacatacaatagatataacacatagttcaggttttaacttgagttcataagcgatacaaccacatcgaaagtcgaataaaagacagcagaacaaggtccaagtagagccataagatggctgcaaggtacaccttcgatagcccaacaaaatcaacgcaagggctggccccgtgtgtagggaagaaccaagcaactactcgtctccattggagatcgatatcgctctccaatggagtttgctctgcaaaagcgtgtcaacagcaagggtgagtacttggggtactcaacaagtcttactttcgttcattttaatttgttccatagcatgctcattagtcaagattaaagagtagcgatagattgcaagtgaggtctcttagacaagcaaaagttcagatctgaaccaaacgatccagcccctaaaccgtcacgttttccatgctaaaaggcatcatagtaacttatgaaccacctaggttcaactccaaacagttctggaatttttgggcagcatatgaaacaattgctagcaatgaatatcaactaagcatgtgaaggacagatttataccatgctgttctacaacaagtttaaccacttaaacaacatgtcaagaagtcatacaatgtacattaagataatctaaaacattgcatcaaaggtgggaaataatctggacataaaagcataaccatagacatgacaactacacaattaagcatggcaaaagacaagtattccagatttttaccaatctgtccagatctgtaatacaccttaaaagcagcctaaaccatgtcaaatataagccaaaagtgatacataatcatgtcatactattattacctaaacataggaagcatggcattcactcgcaagtgaaatagaacaagataaactagattaagcatgataaggaatggaataaccatgcatcaactagttaccatggcatcaatattataccaactcaatggatataaacaagtatgcataagcatcaagtataaactttagatttaaacaatggcatgttgtgacaattccaattgacacataggatcaacaccaagtatgagtgactctaactcaagtgtgatataaccaagcatgtccgtgaccgtggacatggccattcgaattgcgggatgtgttccactaggtttatttcagggcgctagaaagcattatcctggcccataggttgcagtcgaagtccaagttcgtttatggtccatcgaattgcgggatgtgttccaatttgcaagagaggagcacaaaaagcgacaccatgtccgaagaccaaatccaaccaaggaaaactaccaactgaaaacagcagccaccatgttagagctaggtgagtttgttggtcaagaccgtcccataatgaccaatgaggtagtacgattgtggcttggatcaatggcataagatttcagtccttaattgacctaaaagtgggataaagaaccaaatgacaggtacccactcaagtctaccattttagtttcagttttaattatcataagtagagacaccactctctactcatggcaatgctgaaattatattaaactgttcataagctcaacatcatgctcaaggttaccaagtctaccaagactccgaaagcatgacttgacacgtatcatataaacatgggtatacaatatcaagagcataatcaagaccaattgattagcaaaatataagattaccacaatcaactcctactcatgctaatgaccaacataagcaagtagcgagcaattaatagaagacataagcatatcaagttcatcgcaatcatcacacacaagatatatagcagaaatttaaagttgatacaccctaagggctggttgctttgatcaccttgctcgtagtccgaatcgttctcactaagcacaccctcttcgtcacctattgcaagaagcagcaaaaagatcgaatagaaagcaaatgagttcaccacacatcatcaaagtacatagataaagaatgcaatatgatgccatgtgaatgatgcatgatgcgcaagtaaggacatggaaggaattatggactagagcacatgatcaagcaaactagttaaatatgcactttatgtttgattggaacatagagttattatgcagaaggctttattttcttaaaacgatgccataaatctgactataccctctagccaccagtcgtgccttgtatcgttctacttttccttcttcattctgctttattgtgaatacccacttgtaactaactgccctctttcctgttggtagagtggtcaatacccaagttttattctttattaatgcttcatgttcctctaccatggctgcacgccattttgggtcttcctttgccatcttccaatcctttggtactgacactaactgaagtgaggcaacaaaggctttgaaggatggagatgaagcctcatatgacacatagttacgtatagcatgttcatcaaagccatacctcttcattggtcttcccgcaacagcccgagtaccttttctcaaagcaataggcaaatctattgatctctccgtggcagcagactcgatttcaccattgctttcccgcagaacttccctcagacggctgtatggttgcactatcttgctgctccccatgtatcacatgctgctcatcaccaccaccctgctgtctcctggtatatacttggaggtttctttcctcattcaccctgcgccactgttgttgttgctcttgggcctgaccttgatctcgccccgctgctggaatcataccaactatcggttgttgttgttgctgctgcatttgagcctgctcaacttgctccttctaagcttattcaactctcatctccccctcttgaccaatctcactgagctgaggattgtcaagatcctgaaacagcaggctgaggtcagtcttttcaccatacaaaggttcagactctctaaacgtaacatccatactgacaatgacaaaggttctcctttcagtgggactccaacacttacatccttgctgccctggcgagtagccaataaagatgcacttgatggcgcgaggatcaagtttgttcactgagggcctgtgatctctaacaaaacatgtgcaaccaaacaatttcggtggcacaatgaagttattctttggataaatcaattcacagggagatttcatgcctgtcaccctgatggcatacggcttatcaagtaagttgcagtcataacagcttcgccccataaaaatttcggcacattcatagtgaacataagagctctagccacttaaagtatgtgtttgttcttcctctatgccactctattctgagggtgtgtatcagggcatgaagtttgatgcaagattccttaatcagacaagaaatttccaaaaacatgattaacatattcagtcccattgtcggtccgaatagcttgtatttgcagacggaactgattctggacaagagcatagaaatttttgaaacaaccaaacgcttcatctttatggcgcataagataaacccatgtcattctggaataacagtcaatgaaggttacaaaatacttcatgccattgatggacacaactggacatgtccatacatcagaatggatcaacatgaaaggagatatacttttgacccccttacataagatgtcctagtgtgtttagcaaactcacaagcatcacacttgaatttgttcctatcaactccacacattacagttggaaacacttggtacatcttatcaaaagctatatgacccatacgacaatggtgaattagtgccttcacctccttgtcctcggtaacggcagcaagaacttgactcccttcttggtcaaagccattgcgatccaagtaccaaagtcctctatgcctggttccagtcccaagcttcctccccgtcattttctcctgaattaaacacattcttttgttaagaaatactccctccgtctcatattaagtgactttctattacatgtatctagacgctttttaggcatagataaatccatatttggacaaatttgagtcacttaatatgggacggagggcgtacatcacagtctaaccgatcaatcagagcgcgtagagacactaaattcacaggaaatgcaggcacatgtagaactgaagagagttcaatcctaggagtgcatctaactgacccaattccctttattggttgtgctgtaccatctgcagtatgaatagtttcttggtatgtagggggaaattcactatatgatacatattctgctaagttaccagaaacatgtttcgacgcaccagaatctaatacacattccgaatcaattttttgtgttgcaagaaaactctgtcaatgttaccttcattggtatagacgaagttggcgaaatttccatagctgcttgtccctgctacctcagtggtctgtccagatttctgcccagatttcacctgctgcttgtcctctccttgtgcaaccagatttgcccctacgagctcccccatattgagctctagcacctgcacttcgaccacctcgattgccactgccatatgcaccattgtatccccttgctcttccccttctaggagcagtgcaatgtctgctcaaatgccccgtctctccatagttataacattacctattgtctctccactcccctgcatctctccttgtgcccaaagcgaatgctgactgaaactgtgattcacttgtctaaccagatttcagacggacttcttgagatattggtgctatggtttaattcaaggagggaagctctgacgactgatgcaacaatgcagctcgacggttctcaaaacaagggttcaagccttttagaagcttcatcgccctcctgtgctcaacccacttactgacggtcacaacatcatcacgattacgcaactccagtgggtcactctggtctagatcagaccagagatgctgcagctcctctatatatgctatcacacctctctctccttggcgcaagtcatgcactccatcctcaatttgtgacattagcataaggtttcccttatcggagtatatttttgatagtgtactccagactgttgtagcactagagagcccctcaacagaaccagcaattgaaggagacataattcaacagccaagcaaaactgagaaaatcaattatactccatttctcccggtcctcactttccttgtcctctggttttgtattctttcctagcacataaccttgcgaacccttcccctttaagataagcaaggctctatgagaccagctcaagtaatccccataccttccagctttaccccgttcggcattagctcgatcttctgcactacctctggtttgggacctgtagcgccctcctctccctccagaacctgcagcaccctcttcagtcttggccacaagaagctcagccagcttctcgagaacacttgtcagctcttccccccatgcttccttgatgcacgtctgcctcgatttcctttcttgtcctagaccggcctgttcctcctccgtgcctgtctgcctagatctaccctctccaacaatagatcgaggggagggtggagatccagacgccaccttaggctgcaaatgaagcagccaacagttgcatctcggtggccatcaactctggcaccagctccaccgtcttccccgtctccggcaccacagttgtaacctcctccaccacgggctctgataccatgtggcgtggaggaggaagtagaaactcaccttgctactactgctgctgtgtgtggagtgtgtgtggcggctgtgttctggagagctaaggggagctcctccaggaaagccttaactagttaggtcacaactaccatgggctgtatgggccacatgggctgttgagtaataaagaggcccagaacatatccaacaaaattcaaagatatcaatttgaatgattttgaacataggttgtaccaaaggtttgtaaataaattgcacatagaagacatagaatggaaagttttagtttgcaaagcttttcatgatgacgattttgacaaaggcatgcagtgacaatgtaatgcaatgcaaatgctcatggattaagatgcataatcaaaacttagggctttgggtcactacaaaaccaaccccccttaaaagaatctcgtcctcgagattacttttgcccttcaaaagaggaggggaattcagacttaacaaacacttctcgctcccaagtgtcttcttcaaaatggttgctcctttgaactttgaagaacttggtacaatgtctcctagtttttctttcagcttcgtcaataatcttaattggcacttcagggtagtaggaccagtcttcttgaattgctaggtcttcaaaattgtgaacaacctcacaaggaacccgaagacgcttcttcaattgggatacatgaaacacatcatgaacattagaaagtgtcgggtgtagttccaacttataggccagttcacctcttttcgccacaatgggaaatggtccaatgtacctcggggcaagctttcctttcttttcaaaccttgggagtacccatcttgggagagaccttgagataaaccacatcacctatctcaaagttaagagcacgacgatgacggtctgcatagctcttctgccgggatagagcaactatcaacttctctctaaccaccttgacttgctcttcaccttcctgaataagatcaggacaaaagaatttcctttctcccatctccgaccaattcagaggggtcctgcatggtctaccatacaacaaggcatatggagccataccaatgctagactgatagctgttgttgtaagagaactcagctatcagtaagcatttctcccaattgtttccaaaggtgagagaacacaagccctcaactccatccaagaacacatgattcgaaatcaggcacacctgaaacttgcatcccctaggtatgtccttaaacacctgattcaccctatcaacttgtccactcgactgtggctgaaaggcagtggtggaagagagatgtgtactcatggcctgctgaaattgctcccaaaacccagaagtaaaaagacttccccggtcagtatgaattttcttgggcacaccatgaaggctcacaatcctggaaagaaagggacatgacgtcctcgtcagtcacatgcccaagccaggctttcccctcttcgcacacgcccacatgcgtccagtgccggcacatcttcgtcatgtccacacacctgacccgcacatgtcgataaccgcaagggtcggctttgataccaatctgtaacgtcccagcgtcactcctgactgctctctaggcttcaagacttgccccacagaccaacacatgtctttccagcgcattttctcctcactcatgcgcatcacccatcctcaaattgctctcagccaagcatgcttaactttgaggttcctttcggatcgcctcccggaaaagaagatataccttgttgatatgagtattctattaatcctattaagccataggccagcatgtcacagtaggttagtcggttggtaactacatattgaaaaggtggtgactgtagtttcagtaactgtaggttagaggggccggtaactgtgggttaagagggctgataactgtgcgttagagagccggtaactgtatattgacacgtcaattaatttttgatcttagtcgccgtgtccattatcttttctgcggcgcacatgtgcgacgaagctatgtcgacgtctacggtgcatcgggacaaagatggacttgttggtgcgacgtgagcgggatgaagctgggctgacgaattttgatggcctaaactattagtttctcttctcttttttatcatttgtatagtgtgactaagacctaagattgttttcccacgaaatttaggctgctgtgtggagctgagcctaaacctatacacatggtggaaaaaagttgggcttgctcagataggccagaaacactagagttgaggtctataaaggaacccagggcgtacaggtaagacttcaaaaggcgcctatattttaaagcgaaaggcagaggggtgcccctgacactaggctttcggttttttcggtattaaaccaaatggcttacggttagtagttttgctaaccgtaaccggatccgagaaggtgaaaaccggaaaaactggaatttctgtttcggttctgtgttttttggttccagttcggttatgcacaccctgatctgtgatgccaagtgcaagtgatcaagttattgccagcaccctccagtatcctcaacactcattggtttccatctatggtcagataaatacagttgcagcgtagaaaatatatagctcagttcccagagcgagcacaaatagcattgaagacagctttcctttcttgttttcctgttgatctgaaggttaaaattacctagaggaatggttatagccttaaaggggaacttgtggtacatttaccttgacattgccgattgttcacaacaagtgtaggcaatatagtaacatctcttgaaccttttccagtctgatacaacatatcatatagaacagaagatacacgagtacaattatatgtgataaatgttcgcattgctttattttacttcaacgaacatacataataaacaatacgcaaggtcagttcacctgtgcctcctgctccgtttaaagtagggtggtggtcagaatcagcgtttggatctcccatgcacttatcaatcttcctgcccaaacctctttaagtgtaatatcactatagttacatctatactgaaccggtgattccattttatctgcgaacaaagtgcctggtgacatactgctacattgttagaaactatgtacatgaatatcttaattcaagtgcatagcaaaccatattcatcgtatgttaattggaataaaagaagtatattttcgtgcaataaaactctggtgaaggtaattcgcagaaagaagaggagccaacctagtaattttatgacacttcctgcacactttgtgttatattcttgtccatcattgggaccttatgttcaaaatcaacgtagtcgcaaccaccagattcatggttttcttttcatctcatttgcaacattaaacgcagaaagtagactcaggttctctaccacaactttccttgattgctcgtacaaaaatcttgttctggatcaagtgcacaataccttctatggtttgtacactggttcttgcattgtttagtcacaacaaatgcttgagggctgtactaaataatataatggggcgtgaactgactataacctccttttttgtagtcattgtgcagctcatttaaatcttttgaggaaatgcaaaagcatatcaaattttgggcccacattcatcaatctttttgtccacagctcatactcaacctggtcatcaggatgtggaatggcctccctccaatcaaaataagcatttccatttcacctccttaacagccttcttcaattgttcaccaaacattttatcaattagaacagacataatgcttatgttttatatattacttcgcagccttgtcacgtcctgaggtaaatccatttttttgagcggctcatccattgaaaggactgccgacgcaccagcattttgtgcattccaaatcttcatgtcaaacacgcaatctagataacatatatagagaaaacaatatcagcctttaatttgaagtagcttttttcttagaggataatttgaagcttgggcagctaaaactagaaggccagaattaggggtgtaaattggacaggcttgctgtttgtcctgcagcccgtgctgcggtcgctagcccatttatttttatctgggttatccgtttctcctgcagggataacactgggacagccatgacgacccgcgggatcccgcatggcccagcgggtctgacactgctcatgtctttcccccatcctcaatgtctctcgtgctcttcgccatggtagcgcccgccatcctcatgtccggccttgacaggagcacacccagccaggtgattgggtcaggcccgcgtcacccaataatttttaaagttctttttcattagaagaaattatcagaaaaaaatataatcacagtgcatttccccacccaacattgaaaatacagtgtttgccccacctaatattaaaaacctgagtcctccactagcctggaggcagtcgtcccacgaaatgctcacagctgcctccctgtgtcgtgccgttagcctggtggtcgaggatgatccccgtcctcctcccacctctgctacagccagcggcggtcaaggaaccgctggggaacaggagaagaggaggagcttcccccgtccctaaagcacgcgggtagaacggggcgctgtcgcaactctttccggtggggacgccaaccgtggatctgtcagtgacttgatctcagaggtggaacctggactcggtggcacgacatgtgcttcagtacggccgcgactattccacactgcgggccggtgtccttggagaatcaccaatggtgggtgcaagaagagcatcggtggctctcttcggcttcgttctgctcgcttccggagagggcactgcgtcagcggagacttggtgaaggacagatgggatcaggttttgctccggcaatgcaggaaggcgcgacggcgacagctctgcttcacttccgctctagctttgggccctaatttctggtgatatactactaatcgttggctgctactagcagagtagcaataggcaggcatataaatcatatttatcccatatttgctgtatgcgaggctgcaggctactatgcgggataactgtgccgaggatgcctaacccacatatcccagcgggacacgatctagcaggatgtaggcaggaaaattaatccggcaactcttacagcagcagcgtgggcgggatgaggctgtcccacttgcacccctagccagaatgcaccctaaggcctaaagatgcggaaaatcctttcagtgcttgtgtgctaggtgtcttgatatcccagccctgcctctgtcgatcggagcgttgcaatgagcttagagctattagtatgcaagccagccttttcgtatatggtccagtacatccccatgttggcccacaatagacatgctatttattacgacagacctgatatggcccatgtttttgcctcactttggtcatggactaatgatactgacatgcaccaaaacactgcacatattagcaaccacagtggttcatctccaaacaccaaattcccttgttggggatatttgaattcgtgcaaatttcaaagcttatgcatcaattctaatctgatcaaatttccaatcatcacaaagttttcaatcattacaaattttccaatcgacaagatctggactgatcagcaacatctgtactcatcacaaattcagtctggacaaccaatcaaccagaaaatggatatgccagaaaatagataaggaaagagctaaacccaaaaatcgatcaaggaccggatcaaccagaaaatcgaaattattcatgagcagcgagaggtgatggccgacgtcctgttcaaggccggcatgctggacatggaggagtggcttgctacgcgaagcatggacgacgagcgggcatgcacatgggccgccgtcacctgcaaccacgtaccatccgcatctcggggctctcctcaacagctctggcaagctcggtcataggctcctctgcctcgagtcactccggtcaccctctctcgcaacaacttctcgatgtggcggcatggaagacgtgcctcgcgtgggtgtcgttgggagaaggggtaggagaaactggagctcgacactatgcctgtggccaccggccaccgccttttgcgtcgtcggatggaccgctccacttcttcgtcggttgtgcagccacctcgccgtgtctatcctactggccgtcgcctctgttcagtgccgcctcgtgcccgagaacagttacctggcgtctgcgacgacgacgacgaccatggcgcgctttgatggacccaaggagcacttcgagtccctcccgatggagttgtacctggggggtggtggagccgcatgtggccggcgtgatggtcaatgtcggatctggagagggttgccgatgtgaggaggcgatgccgctgcaacttgagacggtggcggctggcgatgaactccatggcggcgatcatggatcttcacggcacgtcgacgcgctccggcgttcgctgcaacttgagatggtggcgaatggattttcgaggaggcgggggacaggcgaccatagttggtggcggcgagagggtgagactagggcatatttagggtgagcggtgggactatgtaccatcccgaaaaattgagttggtccagcaaccacatacgaagtggagcagtataggcactgtttatacccgatactgggccagaaaagaatccacttgcccaccactccgaccgttcctacatcacgggacccaaacatccttgttcctaaagatgttcttatttggcctatttaattgttagaaacagaaattggctaaaaaatataccggactcaagtgaaatgagtctaactttgaggtcaaaaaatataacaccatcttttgacatccctaaataatttctggtagggcaaaatatgcaaaagaaaacctcattgatgatgcagtttcttagtggtgcgaaaggatagcattgaaaatttgaaatagggataaggatcttgtcagatagatagtgaccgataacagaagaacgtgtcgcttcaattaataaaatgcactgcacaccatgaattaaaagagaatatgtcaaaaaaaacatcatgacaagagcgacatatctaaaaggaaggctcctattacctcttgtttcatactcatcaaccgaacactgaactgcaaaaccctccaaagagcatggaaataattctgctaaacaaaaacaaaaaactgtaattacgataacaaccaacatctaaagtgaagggacaaccaacaaaccacacgcgatgcatatatataataaaccgtactactgggtgtagttactcccacttctcatatactatttctatgatactccaaagcaaactgcatgaaaaaaattacaagtcagtatatagttttttatgtattttagaaataccttaatatttgtacatataatgtggaatattaaaaacctgtgcatactacctacaaagtactccctccgtcgcattaagtgtcgcaactttgtctagatacgcatgtatctagatgcgttttagtgtgtatgtacatgcatatctagacaaagttgtgatacttaaagacggagggagtagtatatatttacttcacgtactctatactgcctatatactagtatgataaacatccacttgacttctttgtaagtaagcgaagacgatatagatagtgtgcgatcgacatgggtggagataagcatatttggcttccggcccatttctctagaattgttccatagtaaaggtttatgacaggttcagaagctccaacgatggaaactaacaaagtacttgggaaacatcagaatttttatttgaatactggactattgtcaaggttgctaacattgcagttcatgttgtttttctttagagacgttgcgcttactgggtacaaataaaagtacatatgctcctttattctgttagtgttcatcggtaacatacaaagtcatttgtagacaaaaataaattctacatgcgtgaggctgtaaagctaatagtttgtgttgatggaatactttgttttattgtagcaacttttataatcatctctttttaattgccttttagtttggtctcttttctggagacatgaatttgaattaatgtacaaaaaattgcatgttaatgcagggc

SEQ ID NO: 1951 - DNA, 6810 bp, Brachypodium distachyon
  Intron number 2 from transcript Bradi2g10620.1 (locus Brad i2g10620) derived from phytozome v7.0 (chr-ID Bd2; pos 882 9481 to 8836290)
ttggtattgccctgaaatttgggtaccaggacatagatgcaaaggaatgcaatgtgcagttaatgccattcaaatgcaagatgattatgaaagtgaagacgaaacaaaggtgcataacatggtggaagcccctaatcctaaacttcctgaagcagaacaagtgcaggaagaagtggaagctgttctccatatttcagccaaagctataaatggaattgctagtgacggcaccttttccttgctgttacatattaatgggcaaaaggctgtagcacttgttgacagtggtagtacaaacaccttcatggactatagttttgctatcaagaggaatcttctttttgttcttgctgtagcaagaaaagtgaaagtagcaggtggaggtgagcttacatcctcagcaatcttacctaagtgcacctataacattcaaggaagacagttcaccaatgatttcagactcttagctctgaaagggtatgatattatcctaggagtgaactagatgaagctctatagccccattactatggattttgatctgaggcaatttatcattcatgtccaaggacagaaagtggttctcattgatcatacagcaccacagaatgattatctcatttcacctaaaagctgctagaaaattttgggaaaaggagctttaggattttgcattcagttgcaaacagtgcctaaagagctggaacctcaacaattcattgatacattaccgactcctatagctactgtactccacaagtacatggatgtgttccttcctcctacaagactacctcctgccagatcttgtgatcatacaattcccatgttacctagatctacacctcctaacatcaggccatacagaatgccccacaaacagaagaatactgtggaagaacttatacaaaaaatgctccatactactgagataagacccagtacaagcccattttcctctcctgcaatccttgtgaggaagaaagacaaatcttggaggttgtgtgtggattacagacaacttaacaacttgactatcaagaacaagtatcctattcctgtgattgaagatcttcttgatgaacttcaagggaccacagtattctctaaactagatctgaggtctggttaccatcaaattaggatgcatccagaagatattcccaaaactgcttttagtactcatgtgggacattatgagtatcttgtcatgccatttggtttaaccaatgcacctgctacctttcagtcactcatgaacaccattttcaagaaactgctcagaaagtctgtcttggttttctttgatgatatcttggtatacagtcctcatatgcaaactaatatgcaacaccttagtcatgtgctgacaaccttgagacaccacaatctttcagttaagctttccaagtgtgaatttgcacagcctcaagtggaatatcttggacacatcatctcagggcagggagtggctactgatccatccaaaatatcagatattcaaggatggcagagtcctaaaatagttactcaattgaggagttttcttggaatgacaggatattataggagatttatcagaggatacagctccatttgcaaacccttaacagacatgctcaagaaaaatgccttcaagtggggtcctgaacaggagacagctttctctaatctgaaacagattatgaccaccactcccctgttagcactcccaaattttactaagccatttaccttggaaactgacgcttgtgcagctgggttgggagcagtccttatgcaagacaatcgtccaattgcttattatagtacttcatttggaccaatggcagctagcaagtcagtttatgaaaaataagctattgatatattacaagctctgaagaaatggagacactacttacctggtagtaaactcattataaaaactgatcaaaggagcttaaagtacatgaccagtcaacgcctactagagggtgtccagcacaaactgatgctcaaactgcttgaatttgattatgatatccaatacaacagaggccaagataacaaggttgctgatgcactttccagaaaggattcattgttacaaacatctgatcagtgtaatgcaacatctgaagctattcccagctggattactgatattgaagtcagttatgcacatgatcctaagtgttgcaagctattacaacagcttagtgtacaagctgacagtaaacctaactatactttacaagctgggatacttcattacaagggccgaatctatgtgggagaagctactgaattgagaagcaaaattcttcaatcttttcatgcttcagtatttggggggccattctggcagaagagtaacatatcatagagtcaagaaactgttttactggcccaacttgaaacagcaggtggaacagttcatctccacttgttgtaatatcacaaattttcaatttcggatgttcacgccttttcatttctcatgcatatcaccttgatcatatcttaaaattttggtgtttcattaggatgctttattgaaattgtttaaattggtgttttggaatgtgttagtttggtagaatttgatttgagaattttctagaatttaaaaatgcattctaggattttatttgaatttatttaaaacataaaggcattaaaactatttttattattttatttttgagtgggaataagttcctggactctagatgaaatatattattttacagaatttttgggaaattttctgaagccatttgatattttaaatgatttaaatggattttcgggtgaattatagatcctaaaaagtattttatactctttttcttctattcttttcctttttctctaaaagtacgctttccccatgggaaagcgtattcttagtgaaatgcgctttcacttaaaaccctgaaggggtttcttctaatcctaaccgtccatctctgatccaacggcccccattctttctcccttctctctcccttttctctcactgacacgtggaccccacctgtcatctctctcctccggccaaactccaatcgccgcccgcgcccacgcctccaccccgcgcggcaaccgccagccacttcgcccacgcgccccgcccgatccaacgaccccctctgccgcctataaaatgctcccgaacccctctctcgcacgccctcgcccgcgccctctccctctccctgcgcccaatccgccgccgcccaactctagcgagcaatcgctggagaaccgccgcccatttcgcgaagccgctgccgcattctcaatccccgcgccgccgcggagctcggatgcccccgcatagaagccggagcacgccagagagaccccgacactgacgaccgaagccgacgtcgctggagctgcgacgcgccgccgctggagaccaccccggagcaagccgccgacgccattcttcttcccgcaaagccgtgaacctcgcccaccctttcttcttcttccccgagcctttcttcaccgattccgttcttctccagtgagagttgttggggtatgaacttgttcaacttctctgtagcttatgttctttggttagcttcctttaggcgtcgatcttagcaattccctgatcattatgtgctctgggtttcaccattgtgtagagtgtatgtttctctatatttattatgtagatagtagccgtagatcgttcatcttgatcactgcatcgtcgttgcaaaactgtattcatagcagactctctgccgcggcaggaagttgtagcaccattcttaccgagtagactagttcacagtagttcttcttgttgtccgtagcatcattttagttgactcttgcggtagttagaaccttaggtacactcctacacagtagttacctagttgggccatttcaaattcatcttcactagtggcacgacagcagttcgtatcctgtattgttctgttttagagtggccacattcatctgttcatagctattgggtcatatctccaaagtttgtgaaaccagtgtcaattggaagattagatgatattcttggatcctcatgtttagttgtctgtcattaggatagtttagcaccagtagtttatcagtagaagttgatatcctttatctgtcagaatctgactagccacctttgcaagccagtaacttttgatctgtagatccaattgacctgaaacccgttgcgttagttagtacaatcttagtactgtactgtagcatacgtttcatgccatgttctgtactttagcaccttttagctttcaaccttagttgcaacctgttaacagtagcagattactgaatttcagacttagccactctaggcttggctttaggttttagaaccttgatagttggtactatagtattatttgtatgaagttgaggttctgttattgaatgcttgtaatacattcttttattcgaagttcattggagttatatttggatttggagctatgcattaattttgtttcattcttcgcgttagattattcggattctgattgcgacgagtgcctgggagttgacgaccgcaaccacttttctgatccaggcaagttacacttattaatcatgtagtacctatatttttgcttatgctattttgtttacaatgtcatagggatgcatgttagagttatttctttatgaagtatttatcacatgcgttttcaacatgtttagcgattcctagtagattgcttataggattttattgccatgccaccaaatacgataggttatgtatttacatttttccaaagcatgctatactattataacgggacgggacccaaactatgttgaaaagtattaagtgctctttatgagcgagtatgtttttggaaaaatgttttcaaaataaaaccaaaatgttttatctggacggagtggtatgatggaggccagttggctgtcggcgagtgttgtaaccccgtaacgggtacacgctcaggagaaggtggggaccgccgtccagaaatccaagagttcaaatcttctcttgtacccaaaggcttcttgtgcaaccacttgctattatggactctggcttggtcgactaactagcgggacacccttacctgggtatcgccatccagagaggggtcaatgtgctcatatggggcgggcggtgccagaattaggtatcagggggcttctagtgaaagatttcgtcacaatctttacctgttgcgcacgcttgtcgtcaggcaacactttggactgattgtgtcaagtgggtaaagtgtacaaacctctcgagagtgtcaatctaatcgattagccatgcccctggttacggacgactttgagtcattaagtcagtagaagtggagatcttcaagttttgttttcgaaaaccccaaaactgttttgactcgatggaagattccacaggatgagacagggaaaaggaatgctatgtgagtgtcaattgacccagagtgcatagctaggtcttggagtgaacatccacagaataaccatactattgatcaaaccctgttttatgaaaactccaggattagagattttcaaaggaaagtactatgagtaattcaaaaccccaaaagcagcattttgcaaaaacaaccctagtagccaaactaggaaatccttaatcatttccatgcattcctcctaaccacgcaggtgtgacttgcaagtacattcaatgtactgacctgcacctatcatgtgcagagagtgacacttaagaagaagacacagggtcgcgagtctacactcaatttgcctgtggcgttgatgggactccctctttatcagtttgttttatttggacttccgcttggcttgtattaagtactctggatttgtatttcgaaccgatgtaatagacatgtgtatgttatttcatcaatggaactgtgtgtgctagcatttgatccaggggctagcacagattacacagaggtctggacccttacgagtctgggtcaccacacttgtccagtttgccaactcaacaagggagaacatatcgcctcacctatgctcttgcaccctctccctattcctgaaacaaattggtctcaagtatcaatggattttattgaagggctacctaaatctcagacaaggatgtcatcctagttgtggtggataggaggaccaaatatgctcattgtctccccctagctcacccattcacggctcaacaagtagctgccacatacatggacaatgtctttaaattgcatggtctcccacaatctattgtctctcatcgtgacagaatcttcactagctccttctggtaagatatgttcaaatcactcaaggtcacattaaacctaagctctgcttatcatccatagagtgatggacaaactgagcatgtcaatcagtggctggagaattatttgagaatcatggctttccaacaacccaagaaattgtgtcagtgtttagctgcagctgaatggtggtacaacacctcctatcacacagcaatcaaaatgtcaccatttgaagcactatatggttaccatccccctcaagttgctgagttgacaatttcatgcaatatcaccgaagaagcaaagatcagtctcactgaaatgtcaccatttgaagcactatagggttactatcccctcaaattgctgagttggcaattccatgcaatatgatgcaagagctgaagcacaacttggaacgagctcaagctcggatgaaaagttttgctgattcaaaccgtaccgagtgccattatccgccgatttcacttcaggaatcgcgctggtgctgacaaccagcccctctacc

SEQ ID NO: 1952 - DNA, 738 bp, Brachypodium distachyon
  Intron number 24 from transcript Bradi3g31490.1 (locus Bra di3g31490) derived from phytozome v7.0 (chr-ID Bd3; pos 33 728740 to 33729477)
caggaaaggtaatccgaaagctggaagtggttgatacttgctccttaagagaggagggattcatttcatgcaattatttggtgcctgcggagtcaatgcctccagaatgcactacggcatatctgggagctgctgatagagtgtaaccatgacagcgataaatgtatccaagagtaatgagctagggagataaagtatgcatcatatggatccacgccaacgaagtaactcttagaagccgtcgatgggtgtgatccgaaagttttgtaaaagttaaggggggtgtagaatacctgcttcttttttatatataaaatgatcacggttacgaatttgcaaattattatagtgattgttcaggaaaacaacctcgtcgtttttatataaaaagatttaggtgagggacgtggagaggaggtgggggtgtaaaatttgtacgatgatttgcaaattgctcttggggaactggtaggagtgtattgaatccaactttttccattgtgccactgctgtatttttttttacttatttcaatttacacaagcactcgtctaataatcggttgtatagcatgatatacaattgcaaataagaagtctgcatttatttgttataattggttctgaatctgctttgttaccattaaatcacattgattcttagtagtttattcagaactaagtctgttgaatgctctctgcagcacagtagagcaggagatagtttgctgctaggctc

SEQ ID NO: 1953 - DNA, 6084 bp, Brachypodium distachyon
  Intron number 1 from transcript Bradi2g26030.1 (locus Brad i2g26030) derived from phytozome v7.0 (chr-ID Bd2; pos 242 65509 to 24271592 reverse strand)
caaggctgccgtcatcctcatctccgacgtctacggtaattagttgtttctgctttcccccactacgccagaatgggttactggcgcacgagctccaatgacggtatagctggtccaaaaaattcaccgccactggacgtcgttggaggaatccaaaacgaataccagtggcgggtgagcaaccacagccactgctagtagagcaccggtggcggtgaaagcactcgcacgaccagcaccgccaccggtgctctagcacccgtggcggtggtcgtttattgccactggagctctttagtggtcaccagcgcacgatctacagtggctgttaaagtggtcaaaaaaacaaaccgccactggtaagtcgttggaagaatctgaaacgagtaccagtggcggttagcttccaccgccactcgtgctcctagtaccagtggtcgcatcagttaaacaccacgggtgctcctcagagtttcacatcccggttaccagtggcgggcagattctttgaaccgccactagtaagttatctacaaaagcaaagtcactgtggccttatcttcctcaaaagttctcgtggctacccgacggctacgtagtgacttaccagtcatacgcaatgaacgggcatacgtactacatcaaggatcaagatcgtaagagcagttaccaaaatagcggtatagtgctggttgctgagactagttctgataaccaaggcactatagaagcgtactatgatgtgatcgaagagatctgggagcttgactacaccttcaccaccatctccatgttccgtgtcagatgggcacgtgatgtcagacaagaagatcatagattcacaacaatgaccctgcctcgtgaggttcctcgtcataaagtggacgtgaagaaaatcccggcaagatgggaaccatggcagtttgcttcaaaatgcaaacaagttttcttcatcgatgacctgacaagcaagaaccgtgttgtcgtaaggagaggaaaaagaagcatagttggcattgacggagttacttcacaacaagactatgaaggctttcctgatccaacgtcaaagcaagaaaaagaagaagcatcacggacaatccagacaaggaagaagtcaagacttgaggcaagagaggaggcatacgctagaagcggccacagcgagaccctaacatataagaggaaggagaagaccagaaagaagaagaaggacaagattgtggaatagttgaatatttgtgtatcttttcgtagttgatgtttaacgatgcttttgaatggaaaattgtaacttgtattatgtcaaatttgaaatcaaaagtcttaaatatgttctgaatttgaaataacttgttcaaatttgaaatcaaatgtataaaatatctacttgttcaaatttgaaatcaaaaagatgttctgaatttgaaatcaaatgtatcaaatatctacttgttcaaatttgaaatcaaaaagatgttctgaatttgaaataacttgttcaaatttgaaatcaaaatgtcttaaataacttgttcaaatttgaaatcaattgtcttaaataactttttcaaatttcaaatcaaatgtattaaataactacttgttcaaatttgaaatcaaaatgtcttaaataacttgttcaaatttgaaatcaattgtcttaaataactttttcaaatttcaaatcaaatgtatcaaataactacttgttcaaatttgaaatcaaaaatatgttctgaatttgaaataactttttcaaatttgaaatcaaaatgtcttaaataacttgttcaaatttcaaatcaaatgtcttaaatatgttctgaatttgaagtaacttgatcaaatttgaaatcaattgtcttaaataacgtgttcaaatttcaaatcaaatgtcttaaatatgttctgaatttcaaaataactttatcaaatttcatggaaaaaatttagcccacccagtcaacacaacttttggggttcgggcccagcccggcgaacaagggagctgcctactacctattagtgcaggtttgaccgggcccacagtgctttgactgagcccaccaagtattcggaacaacaaccgggcccaccggccaggaagagaggtacgctaattgattcggaagtgaagaagcctatttatgttggtcaggtccactgtaaacaagcgaggtgggactaaactccctacccactttgcaaaagctcgctctgaggagcactagtggcagtgaaaacgcacgaaacaccactagtatgaagcactagtagcggtgaaacgcagcaaaccgccactagtataaagcactagtggcggtgccgaaaagaaaacggccactggtatgattcgcaggagctattaaattcatattatattctctgggttttaaataaacactagtggcggtgactacatagagaaccgccagtagtacgaagcactagtggcggtgttcgcaatgaaaccggccactggtatgatacgcaggagcattagagaccctaagtttgtgtaccgcatatcagtggcggttctcctcataaaaaccaatatgctattaaattcatattatattctctaggttttaaataaatacatcacctgttcttttatgtgtataataagattgtttattctcaataaacttttgaaccataaattcaaatgttacataccctaatttctatgattaagtgtcattatgtgtggcttttgtgctataaaaattctataaaattcaatttttctcaaaaaaattgtcaaatttggtgtggacacttccctattgctatagaacacccataaaaaaaattcaagttcaaacaaaaaaaacatgtcacatttgatttatggggttggatggtttctgagagatctacctagatggttccaaaatgaaaaaccaatgtgaaaaaaatgaagaaccaaggtgcatccttttgaatttttggacaaaaatttatatgtaagattgtttattgatagaaacatttcatgcaaatattcagatcattttgagcaaaattcaattttatagcaattaataacttgaatatgaacaacataatcatataaatggttgatgatatttctgtatttaggtttcaaactttgcatgggacatgatattagtaatttacactcaaaaggacaggtgttttaattttaggatgtacacataatttaatatgaatttaaaacttgattcagaaattagtatcagtgctagatacaggagcactggtgcagcacccgtggccggtgctcgctccagtgctataggcactgagaagcacgggtggcggttggaggcacaaaccagccactggtgctttctctcggaccgccactagtgctgctgtggtataaatagatagcgacgggacttggcaaaatttcgaacactcgcccgcgcgtctcacagaccggcagcggcacaacgaaccctaacgcgagcgaacccctgccccaccgccgactcgtcgccgccgccgccgttcccctcctcttccccacccgccgttctcctccggcccctcctcttccccttctcctccccgactcgcccccccccctcgccgccaccatggtccgcactcgcaggaccggcctccgccgtggcttctccacgttgtcggccccggcggaccttctgccccgcgacgagccgacggaggaggcggtgccgccccgccgcacggcggatttgggcccgccggatttcgtggattaggtccgaaattcggcggccaagcccccccgcgacgacacaccgccggggtccccggccgccggcgacgaggtaagttctagggttagaatttttttttatgtttacttttactgtttgctgttctagggtttactatttgagacaagaattctagggtttgctattctagggttaggaattttttttgtgtgaatgtgagattgttggacaaatttgagacaagaatttagaatcggaggaagtacatccgtccaataatacgaggcatattaggattcggttgaatatatgtcatataatggatatgaatatatgtcatataattatatattaacagagtaatttgtggtcaaagcattggtcatatatgtcagataatggatatgaatatatgtcatataattatatattaatagagtaatttgtggtcaaagcattggtcataggaaagctaatacgccacatattgttggtcaaattaatagagtaatttgtggtcaaagcattgatcaaaggaaagctaatacgccccatattgttggtcaaaggattcggttgaatatatgtcatataatggatatgaatatgcatgacggtagggttaaggattagggcgattagtgtattttttttgatacaattgaatatgcatgatgtggggcctgccatcgcgctgagggagtatatgtgggtgggtaatttttatgcaggtttcattatcgggtagaccaattcgctagctttatagcacgggtcatgccgaatttttctagatttacagtagggtcatgccgaatttttcaattttttaaagtaatccatgtaagggcattgtataggaagctcatggtcgcgatggagaaaaccctgaggactcaccttagggttcttcgtcgttgagcaaaccaatagcccatagccaagacaacgagcctgaacacggcggcggtgatccttcgggcttcaacgcaggctctgaggctgccacgtcgcaggctacttctaagaagaagaagaaggtgccgcgtgggtctaacaagccggcggaggagaaattcattgttaccaggactgacgacgtggggaaacccaaatcaccaaagagagtcgcgtcgtgttttgccaacacttgcaatgcaatcgttcgcgagttcacgaacatcaatcaaagatggaccgaggttcctgatagcgtaaagcaagattgttacgccaaggcatgggagaggttcgaggtgcctgatctcgtgctccgtgaagaagtattcggagcgatgaagaccacaatgcgtaggggtcagagcaattggggtaccaaggccagagcttttttgaacgaagattgggagtcggtgattcataagaaatggccaaggatcacagaggaagaatgggaggagttcaaggagaaggaaaaggatccaaatttcaaagcaacccaagagtggtacgcggcgctacgtgccaagaggaaatttaaccaccgccttggcagtcgtggtatcgaggaaaagaagccggtgtgggagaaggaggacgccgagcttgcggcaagagggatagtccctcttgtcccaacaatgctccgtcatgaccggtccaccacctttgtgcagagtaccatgacaaaagaacagtgggcgggcctgaagcctatccgcgacgaccagaaagttttaatcgtaaggcctcaaccgccacttctttttcagtttagcttctaacacactcacttataaattggcaccgactttgtcttattttacgactaggtcgccgagttcaagtcggaaggctcccacgacgagctccatgcactgtgggattcaccactaagctatgctctaggaagaaatgagcacgggggccatattcgagccttaggaaccggggcccttcaccgcaaagtctttcctcaagagaaagaagcctggagccgtaaaagaaaggccgagaagcacgaagaaataatagaggtggcgaaaaagacggtgagggaggagtttttccttgcttgaaaaaagcaagggactccggccagactatggaggagttcgttgctacatatgatggcaaccggggcgcgacagcgaggcctatgactccaaatgatcatcagtcgactccgaatcattcaccgccaccgtataagagcagtgctggctccggcaccgaactcccggatgaccctgatggcccatctgatgacatcccggtaagctccttactggtaccatagtatatatagatactcaattacgtcattcttcacatcataacactaacatatgtatgttaatttgtttgtcacgcatagaagagtattaagtgccggatattg

SEQ ID NO: 1954 - DNA, 6132 bp, Brachypodium distachyon
  Intron number 3 from transcript Bradi3g12030.2 (locus Brad i3g12030) derived from phytozome v7.0 (chr-ID Bd3; pos 107 19951 to 10726082 reverse strand)
tcggtaagtcctcttttaactttttgcttcctttcatctggcaggatttgtaaagaggtcattggctgagggctccgtgtttgggtagcattgttgtgaacattgattcccagcagtccatctgccagatagaggccagatggcatggcttgaacaaaactagtgtttctagatgagagggatagatgtagagtttgagaagagaacaagaagggttcagaggtggcatatgaaagagatttcttgcctgagagcaatagcgtctcaggccatccttgtatattggatgctaagggtgtgtttcgtttggttccaagatgtgccatgccaaatttttggtcatggaccaaaatttagtagttgtttggatggtggccaactatttggcgagccaattttctttagtcaactctagttcaattttttggccaaagttggccaactcaagggcaaccaaaactgtacaaccaattatttggcttgccaaatttttgtagtgcaattgtgggctcaattcaaacacaccctaaaccttatctagagtaaattataaacatacccccttccagtacaaataaacattctaaattctgacttgacttctttttcttccttatttcccctcgaccacaattcagacaaactccatggcttagcagttgaacatgtaacttacacaaatatctactaaacttataacctatgactccccttgtacatgacaacatctccttacatgactccttgtgtgcattttcgttgcttaccaatatgtgaccaccatgagcaacattggacttctgctccatgcatatcctgctgacacacgccttttctactgccggacttgcttctacggtcattgtccaagacattactcaggcaagcagcttgtcgtcgagctgtggagtggtggccatgaccgcagtccatggcagcaatatgatgtcaatatggttagatacaggtgtctcaccttgcgagagatcagtctccatcagcatttgtcggtgatgatggcagcccatagcatggtgcactgtcgacatgtcgaatcttcatgtggcacatcatggatggcactggcttgggttggtagtttggaaaacggttcctccatgatgatagttgttgggtctgtgtaacatcattctggttttgttagatttgctgtgttcttcacactgcatcgccatcttcttcatggcctctagtttagcgaggaatctttcttcaaagcttcaaggcattctttgcgtgcagtagtcatgatcatacgaagatggcgacaacttttgttgatacaacgacctttcaacttcccaaaagtttgtgccacatcatgttccttaccatttttggcaagacttgatccttctattagataaaaaccacaatccttgatctctcttgacatgtttgaattgtcttcacgactctatcgaagatctgacatacattttccgtcattggattgaatctgactcataggatagagaacctgatgaaccaatacatgaagcatacttctcaatgtcatgtcggcaacaaagctatgattgccagcgcatttgatgtggcatgcttggtttacaacagcgtagctaggcttggtgaaaactagtttttttatagaaaactgtagaggggaccgtaatagtgacggaaactagcttcaagaggagagggatgggcatggattttggtgagagctagtgggatttgttgtgattttaaatggcatcttcatatagtggatgcggatcatgttctgagtaactcatataagtcattttagcctttgtatatctcttactccttccattataacagtggggaacagcacaatctatatgtattgctaacaaacataagtcgttttagcctttgcagctcctcaaaatgtaagtcgttgtagaagttgtcggttcttttgttcttgttgtgcccttcattagttgcatctataagtagatagattgtgtgatttcaagagtgctaattgcgtttaagagaaaacacgattgtgggaacgattaaaggccatgagatgtcattccacctgccttaattcttgtgctcaacgttaaaacaacctatgttgttgctcataagtaacaccatgagtccatgaatctgacatgaatcaactacataaattctgacttcacttccttattctttcttaactctaattcctgactgtcaagaacaaaaactctaattcctgaccatctcactgaccaaactactgctgaacacgtaacttacgtagatgtctactaagcttatatatcctagaactccatgtgctcctttttgtgtattttccttactcaccaatacgtgtcaatcacatgcaactttaggcttcctactccatgcttgtcccgcatgcatgggttgctgctgcacctgctgctagggtcatcgttgttcacagtgagcagcatatgatatattgtttctaaggtgtctctaaagcgtcacctaagcgtcagagtgccctcaggcagtgaggcgtcaatctcgccttggaagggcatgtgaggcatccgcaataacttttaggcctccagggtgtcgattaggcctcgtagggtgtcaccctgggcaaattggacgccatacgcatgtgcagcatcctcctgtgcgggacatttggaagagaaattggaagcgggtgggaaaattggaagaagcgggatggactcagatacgcaggccgcagccacaactttgtccttgggcgaaggggtctcagggtgctagcttcctcctccgggctgggcttctctctggcgaaggggaagcagggcgctagctcccccccctcatctcccttcttcccatgccctcccctgctctttcatccatccagatagaataatatatgatgcggtgcctttgattcctatccttcagtcaagatgctacatatcaatgattccttttttccttcagttaagattctactccctccaatcctaaatccttgtcgtggatttggtgcaaatttgaactaaatccacgacaagaatctaggatcggagggagtacctattagtggatgatgtccctatgattacaagccaactagccaagaattagtaaaccgattgacgggactgatcagcaaactctagcccatggggcaatagcctataggtgtacaagtgcttagtataaactagataattccccgcgcgttgccgcggaaactgttggagatgaatacatcaattagcttaggtcatggtatatttttaaaaactaaaaaaatcagataaaaagaaatatagaaaaatatgtcaattctgtgatctttaattagcattaaccaacaaataattgtcagcaattttaagtggtggaacaacagaagactgaatagatatattttagacaccctctagattttcttcacattgactaaatgatccaacttcagtacatgaattatgatgatcagtaaacttgccattaaccaaatgatcgaacttcagataatttagattggaatacaatctctttgttgcatgatgtgttcacagacttcggtccatgaagtatgattcagtatgcatgtgttactttctgagctaccctgatacaaaggagtagtgtattcccatggaaatttcctttttattagcttatgcccttaagcatttcttcatgagtaatatgccatcagcccatcatggcgtcagtaattaataagtcttcagatcatcatacctggatcacaatccctttagggcaagaggaggcagaagaaacaacgcacagttgtaagctctaactccatattgccagttcatgtgagcacaaaagaggcatgatactgtggcatatgttttcatgtacaggcaactccatattgccagttcctgcgagcacaaagagacatgatgacataagttttcatgtacaggcaaggatattagcaattcatctatctgcacagaactgagtaagtaatcagttgatgaaaacaaattagcatggtgaaggatccttgaccattgcgaacttattcatcttagtagatgcccagacataaataaaatcacataaatagcaaagtaaatctcaccctatcaatgcgaagtggcgaactggaaatttgattccaaaacaccacaaagccagatccctgatgcacaaatttggaagtgcgtatgtgcagaagggctgcagcagccggacggacccgtccacccacttcccggaccgctacgcctcctcatcgtcagcctgacgggccttctccgcccacctcgtcctggcccaagcacagtaacgcgtacctgggtgagcctccgtgcgattcccccctgtcccctctccattcctgctcggcacggtcccgcgcgcctccttccttgcctccggtggaatgtgccgcctccacccgtgccgcccctcacagtctctaccgcctaggtgttgcgcccctgaggacccctgcactgcaaccccgcgaagcttcctgctccttcgcctgagagcttcgccacctcgagcctccttgtcatcggcattcctcctggtggattgaggatgcaatgttgagccctgtcttttaaaagggcaagttagctactcaattgtcctagaattcatcttcagtttcaggtgcgttagtgtggtggagggagaggaaccgggctggcatcagaggatgattaagatgcgcaccgtcgcttgtgagggaaggcggcgcgaggagattgcagggcaggggagcagcacaggggatgggggacgacgggcagtaggacggagggggtacagtagggccggcgaagcaacgcacaccataggatcgggatcgaggaggtacagtagggccggtacgactactgcgcgcaggtgggctgtgaattttcccttgggccctagcaaagcgggaacgggtgcgactgtgtggagagtggcggcacggtagcaggaacgcttcgccggggagcgcggacgggaaaggaggtgacgtggcgaagataggagataagatgctgacgtcgataggctgcatgtgcagcttgctaaattaagtgcacttagtgggtttcaactttatagagtttatagattcctttgactgacaatttcaaggtatgtatatctactcaataggtgctgctattgtaggtttaagtcgttacctcgcctcgccttacgctttagttaggtgcttaaaagttgaaaaggggtcaggggcgcctcgcctcgcattacggccttgaaaactatgatatgatatcttcccaaactttctaggcttactgaaaagctgtttgcatttcttccttgggcgtagatgtgggtaccctgagttctctcttaacatttttcagctggaatatacaaggatttaatttttgaaccagaataaatggattttcaaagtctgtttcataaataactttacatagcaagcaggtcagcttatttagtgtgccatgtcatttatcgctagtcagggaacaacaaatctccttttgtttccgttacacattgacttagttgataaataatgcgagttttgggcatcttacaatcacgattcacaaagattacaatatttattgacccaacaaagattacaatatttattgacccaacagagaaagtgttagaggcttaaagacctacactgcgtgttactctataccttaatgcatattcatttcaatttgttggtgtccattctagtctttgaacatcttcggcatcattgtgactctgtattatgatgttgggtactcccccttatccctcaactgtagtttcagttgtgattaaatttggactttgatcgaggaccacttatatttttaatcatctatgaactagaattgtggtttctacagaagagtataacagggcatagcttttgcatggtttctatactccatgtagttgacatagctacattcatttgataaggtcatcttgttcttctctttcatctttttctccgtcagtttatcgtttttctcctcctacatgtgctgcatgtaagcggatgttttatgattgcttcaagcattctgtcaatacagatttttacaataaattgtcttgatcttctcgcatatttcctcttgttttatgtggttccag

SEQ ID NO: 1955 - DNA, 2364 bp, Brachypodium distachyon
  Intron number 1 from transcript Bradi1g50050.1 (locus Brad i1g50050) derived from phytozome v7.0 (chr-ID Bd1; pos 486 89703 to 48692066)
tgatagactggtatccatatccttttgtttttcatttcaacttagttacattttgtcctagtgtaatttggtaccgacgaccctgtgtgtgtgtgaagcaaggcaacagcttgattgtacctaaacttaatctacaattgttgagatgagatgttcttcattgtacctctgtagctactgttgtatctagatgtttactctgtgtacttggtaaaagaagttgactatcattcagtttgttgattcatatgatgctaattgtagctctttgttcccacttattctacattacctgtataccagtcctgctgctctcttttcctgtaggatccttttgtcttagaatagggaaacaaagtttaatataatggactcggtagttggggacatattttcaaagttcaacacaaaaactaaaggctgaaacctagagcactatattaagttgcaaatgttgtttgtaatttggacagttcctacctaactggtttcatttataagcttcaccgtgatgcttgaattccacctctaaattcagtaccctgcctagttagagtacatctgcactttggcattttgtggtttggctttgccaactaggaccctcatgaagatacatcagcaaacaaacaaacaaaaatgacccaccaaatatgtaatttaacttctgttaggagattttgacatttcaatttgcacttatttagttattctacagtttgccatagtcaaaatacttggaacagttgtgctgggttaagctggaagtactatagtagtatacttgcacctttaccagtcttgggttttatcattattgaaagttaagctgggatatggccaatcgggggtctgacgtcatgctacaacccattgcagcgttgatttttctaccctttggctatttctctatggcaatcatattgtgctacatctgattgcagagttgatttttcaactcgttggctattctctttggtccttctgttagttaatttataagctgatagctcgataagtagcagtggaggcatagatttttgttccactgagagagagtgggaagttgtatttatgtttgagtatatttgctggatgtatttttttcaggatgatttacaggtgtattacttgacaatggtagtcaaagatgcttagtcttatcttaagtcttaactgaatcatcttttttacacagttttcctcttttttttgaatgatatgtcttttgcatcttccagattgtggtgttctgatatctttgaaattgttcctaatttggtcttcgaaaatgagcatgtgatttcaaaatttgatatcctggaacatgatttacgtcatttagaatgttgtcggctttgttctctgactagaacaccaaaatgtcttcctcaccagagatctttgctgtgtatattctttttattgaaatcgagtttgatagttgtatttaaaatttacgagacttggcatcgcctgttacttctttttagaataggcatctttacttggtcagtgaaactaggttctacaagggcacttgattccttttaggatttaatgggcctggacctagtgaagtgttagcttgggctttgttgttggatcctgatattgtcatagcccaagcttgttcctggtggtgtagtttcagatctgtcattaacttgtccctaagcatgatagagaagatataagaaatttcatttgtagacttacttctgtattttgcttctgttgagggtgaactgaaccgcgagcctagattctagaagtctccttaatgtaaccacaaaattacttgcttcgctgggcgtgactgaaaagtgtatgtatccgtgtatggctgaaaattaaatttacagttttgactgctattaataaaatatgtttgttgggtgcccaaaagttagcaacattgctttggatctacaatggaggccatagaaagtgaagtagacttaaggtactgccaaactgaaagtcagagatgcattggggccatttaaatagtttttgaatgcacatgttcaacaccttgagttttgcaaaagaaagcgttataatgttttgaaaaggtgctggttctatctcagccaattattgtagagatgcttcttctcgtgttgaaattctgttggcaagtaatttgtggtttctatgtgctgtggtgagacttggtgtgtgactagcattgctgttatgtacctgaaatttatatggatttccaccctaactttggggagggaacagcgtctctatcgtgcttgttagggtaaaccttactgaatcttgattataataaaaggttcgttatgccgtgttacaggtggttcctaaacggtggaagcactgagctttgat

SEQ ID NO: 1956 - DNA, 3791 bp, Brachypodium distachyon
  Intron number 5 from transcript Bradi3g50460.1 (locus Brad i3g50460) derived from phytozome v7.0 (chr-ID Bd3; pos 516 66434 to 51670224 reverse strand)
ggaagcaggtaattcaacctcctgcattagctcacctctctgttatatagttccttgaattgttattgatttccaaatctcacatcagtttaaatcctttaaattaatctgcactaccaaatattcagttcaaaagaatacaagggataattacagggaaataactccttgaagtatattatctatgctttcctgatatgcattatcttttacgaatgtgttgggaaccttgatccataatgggataaccacagttctgaagatagtcagatggatgagaaaatagattggttctttcttgcttgccccaaacattgatacttgaagtatattatctatgctttcctgatatgcattatcttttacgaatgtgttgagaaccttgatccataatgggataaccacagttctgaagatagtcagatggatgagaaaatagattggttctttcttgcttgcgccaaacattgatgcatatcatccttataagtggatgcttatgcccttgacctttcctaacacaataaaattcctaataaattagagtacttcaattatagattccctaatataatactgaaaggacccctgacctctgtttggattccatgctgctagcccacaacattttacaccctttccagacgctgtagggtggctgccatggctgcgggcctagatgaccccaggtagatgagaggccatgacgctgcagccgtgtcttctgagcgtgcagcatccttgcgtgctacattttggttgatcttttggaaacctaacagaataagactcctccaataattccttgtgtagtgcatgaccgatgagcttttttttgaaaaaagaatactttctcacactggaagggtccagagtttccttttattctatgttgcttatgtagtatgtactcataggagatatgggtacacgtagcttgctcctaaccataattgtctcttgatctcttggttgtcgtgaactcctttccgtctatattttggaaacatgtagacagcttccttgtttgcttttgcttggagatagagtacggcaacatgaatgacaaggaaaatttgatgaaatgctggacaccccaactcgtatgagaattcctttgccagtcagtctcctcctttctggcttgatttcccttttctatctagcaagttccttgactggttccgtaatctacaacgaactgatggatatgcacgcctgataactccatgctctgtccaaagggaaaggtacctgtggtggccccaaatcaaagaatatttgatgctgtgaccgattgtattggcccaaatcagaggagaccattgacgcagccctctctgctatagagaaaaaaaggaggctttgctaaggttagtacagccgctacccctattattgtgcccagccagctcttttgcctccggctgcaccaagctctactatggatgcgcatgccactgctggtatgccacccctaatctgtgctgtgcttatctgcttgtgctgctgtcttacctctggctgcaccaaccaccgcggcctctgccgccactgcgctgccgtcgtttcttcttctttactgcagtacctatgtagcgtcgattcttgttgcatcgctacgcaaactttgtagcacctgatatgttgaataatacaggcaataactcgattccaagttgactacagcccttcgtatatgtccctgcaagcttcccaaagctcgtgtcgcatcatcgcccctggaaaaatttcaatggtctccactgctccataaggatttaagcacattctctgtgatagggtagaggacacgatgaatcctgacacggagtgtcctttctcggcggcaaaagccatggtggtctggtctggtttgataccaatttttgtgaaccttgatccacaactggtaactactgtgctgaagatagcagtatggctgtgaggaattagatagatttagactagatgagagaacttgggagagagtacatgacatccttatatagtggatgcctaggtccttggcctttgctaccacaattcgaactcctcgtaacttagactccttcagttctatatttcctaatataatattactgccttaggatttctgatctccctctgtttggattccatgatgcaagtccacaacagaacgccaaaacaaacagaaaaagaaatcttagaattaatgtctgtgagatcaccctcatagtttttcagataaacactgtcttatctatgatatcttcacatcttgaagtcttgaagcatttatatcagaaaatgtatactgtcagtcatttacactagagttaaagttctgttgttaaactagatcacatacaaattcactcactaatcatccttgaatctatatttctataccacaaaagcccaaagcaccagatattttcatcatttgctagttttgtttactccagacagtctgagaatgtggattgatggggtatctatatcacgaggtttgactgttagttattacatggatagtttcaaggccattgctatcaaggtaccacctagattacacctctgtatccaatcggttggggctaggtgctgtggaggctcacgttgcatggaaatgattagataggcacctgaaaataaaaagagctggccaggtgtcgttgagtatcatgggggatgtacatggtacccacatgggtcaatagatccttgaggacccagcttggcagaccaagggtcctaacctaggagagagatgggtcgatggtgattcagagctaagcttgctggccctttcctgcccatgatgactgttgcagggcccattacctccttccctttgatcgctgcggcactagtactgttgcaagccccattgccaactctctacctctgatccctggcacctgtttttttcttcttagcttcccctttctattgcttctccaatttcctttaattggtatcttggttggtcaactaggtgacacctaggctatccccctcagggtgcactgataaccttaggtagtgtttggttcttagaatgtgatggaatgtaatggaaccgttccagatttgaagacgattcttgtgtttggttcctagaatatatgaaagtggaatgaaaccatatggttcctcaaaacgaaatattcctccaatatgcctaactatctcagtcctcaaaaatgtaggaatcacttggttctaagtggaaccggtggtttggtgtttggttcctagaatatacaaaagtagaacggttccactccattccatttctataggaatagagccattccattccattccacctcgctctgcaaccaaacactaccttaatgtaaagattatgcgggcagcttcttgttgcttgaagaagcgctgaagtagataaaggtgcagggaaatcggtgtgtgagtgctaaatggtaaataaaacagcacgatatcaaaggagaggcggagaggtggtgtcaagcctgtcatcagcagctgtgacaaccaacgtgagagattaggttagttagcacagttcagccttcatggtatgtgtttggtatctgttttctaaatgaacattaggcatgtaatttagttagcaaaatcggtagaaattttttggatgctggtttcctgttgcatgactatcctatatatcctttgccttttttccatatctcagaacaatgcagtttggaaatgctttttcacatgtaaattgtgcatttactcttctggctgcactgtcaggctccacctaacacatcgacaccacctgccacaag

SEQ ID NO: 1957 - DNA, 1726 bp, Brachypodium distachyon
  Intron number 2 from transcript Bradi3g50640.1 (locus Brad i3g50640) derived from phytozome v7.0 (chr-ID Bd3; pos 518 00564 to 51802289 reverse strand)
agaacgaggtatgatcgaatcatcagaacagacttatgtctcttctagtgtttgatttgcattcttgtttgcttccctttgtaagcattcggctgggcttaggcccttcagttggtcataattttattgtacaattgattggcacctgttcaaacatatcagtcctacaattcttgccacttcaaaccagtagtttatattatatccatatacctgcagctcataaaattccggaaaatctggaaattaatatttgacataggcataagtacagagtttgcacctgtggtcatgcataatagtttttgtagctacaattaacatgaaatgctatggtcagttaatcattcgaaattgtcgagatttgcatagaatttgttgtaactcgcgtgaggtggttatggctatgtggttatatgctaggcatgttagatcgtgtggatggcgcattctacttatacaggcatgcaagggatgctaaattttagctaacgctcaggatttgaagagcatcataatggctcatgaaattgacaacataaaaagtacagttcttacccatcctgcacaataattgtttgcatgcagtacaaaacaaaaaattatgatgatttgagagttgtgcattaaaatatcctgctcacctgcaattttgttcttcttttttgaagtaattccttttttttgaacgggtggttttttgaagtaattccttcagtaaagcacccaacattttggttaagttcagtttggcaaatggagctaattagtggatctcatgtaccatacattctcttgcacagaatgaacatgatagttaaattaataatactatgaagaagcaaaattttagaggacaacatgcaagcagatttgattgaaaaattagcatagaaaagaagcaagctatgtgagcatttagaataacttgcgtggcaatgtcgttgttagttgaccattttacccttgtgcaatattgccagttggtatgaacttggctgcttttggagccagaacttcactcatatcatatacaaaaacttcctgtctttgtcttgcatatagtgcaagggtatgtgattgggacaagggaaaatttctcatttctgattcttttaaacagtggaggtgctagggtttataccctgttagccatgaggtcaaggttcacatatgaagtgtccatttgaacacactaagcccctttttggaatgggtgtaaattttgtgggcatgccaatacttagttcatggttgaactaaacaataaactatacaggtcgacccacaaaattcacacattcccaacagggtctgaaaatttgtcataaaacatccatgtgaacacaacatatcgtcaccagaaacatgtgatgttgctggacaccacagatgcaccattgtaactgtaaaatggcgatgctttttctcgaatttctacttgatcaatccgtcttcagataaattaaatatgaaaaatgggatcatgtgatggttttgtatgatctagaaccattcttgcaactcaaaaaattgtgtactaaaaaaccatagaaagaagcttccagaaatactcccgtcttgtttctagagatccaacgagcttgctgcgaaatgcttataatgtatttagctggttgaactgccaggtgtgttagtacggtttcctcattctcagtcaccatttgcaggaagagggcacggtgaacatcaggaataaagatca

SEQ ID NO: 1958 - DNA, 2072 bp, Brachypodium distachyon
  Intron number 25 from transcript Bradi2g05240.1 (locus Bra di2g05240) derived from phytozome v7.0 (chr-ID Bd2; pos 38 45671 to 3847742)
cttgtgaggtttgtgatcttctgattcccttattctggtttcagttttaatgtattcatattccttccatctgctggaattacatggctaagactgtctgtaactggcttagagaggtgcttaagaacgatataacattatcaccaaacgtgatgcaacagaggggtgaatgtcgattgtatgatagctacagttgggatggtgatgagaggggtgcacactgaggtccctcatggttcacccgtcctccaatatagatcttgggagttaggatagcctgcagtgtggttggtgaacaaaatcaactgtgggaaggtgctgtggctatggagggtgatttgggatgatgacaacgagttggaggggaagtgatttggcaaatggggtgttgaggtgctagcacctagcaggtgggttggacagcactgaggcacaggcctgtacggcaagcctctgcagcatgagcagctgcaccgggcccccaattaattagggcccccatatttattcttaagtactccctccaacccatattacttgtctcaaaattgcccaattatggatgtatctatgtttaaaaagcgtctagatacatgtaatatttcgacaagtaattccggtcggaggtagtagtatacttagtagtactaatcttaatcaatataattgatcctagtagccataaacaaggcatctctgctttcttgatgtgcagagcccaatctcctgagcctagcccaatactcctaagtcctaaagtctctctgtcttactttgcatctgaaattaacacacgtctcgattctcctccagctggcatccagtttgtttgaaaaccccgcaaaaaagaagaaacaatttttttgatgtgaatgaattggtgtatgtcctcttctggttctctcgtctacttttgggtcattttcttctaattccttgctcaattatggcttcttctttcactcttttgtgttgtcgtgaatctaataagttgtatgtggacttaaagttaatccacaatttcattccaaacaaaattaaaagatttgtgattaatttgtaaaatgactagaatgctcggtgatgcaactattacatataggaccgttttgacagtgacacaggaaacacctagttgcttaacagctagttgattagctacctagcacttgaaaatatgttttgtagaatattgcttatcaatatcaaggtgtgcttgaatataatttgccaaaggttatcctaagttatgcaagctgctttaagagtttattgaaaattgattacctctatgatgaataatttttgtacatgaggcctactttaagattttgcacgggcctccaaattctcggtacggccctgttgaggcactggcagcagtgctcaaaatgcaggcacccaggctggcaactggtgcttgtgcctgtaactgttgttggatagtccggatgatgcacagggacaagcaaaggtgcaggaactcggtggggatgttgagtagatgaagctgcactattttatggtattccagtatcctgattttttttaatataggaggtttagccgtttaggtgctgaaccagatgatgcattgaagaccaggtgttggtaaacggcaatcgtccaattttaatttcttggccagtaaccggtggttttctacttttctaagccctggctcaatccattctgtcatgattgatctaatatagagtgaagtgaagaagcaagttccaatttaaattacatatcttcagtgtcaaccatagcttatcctttttgtgagccatgcatcacatttatttcagtatttctagtattctatagtattgatgatttgcttaaaggtattatgtattgatattcatgctctccgaacatgcattggcatttatattttcggtgttattacttatttgatgggaacttcgacatagacaagctacagtttgatcgagttcagtttggtttgagctttattgatttcttattgtttattgacctctaaattcttcatgccaaatgtcattgcaggttgaactccttatactgtcgcatcacttctacat

SEQ ID NO: 1959 - DNA, 6430 bp, Brachypodium distachyon
  Intron number 8 from transcript Bradi2g10120.2 (locus Brad i2g10120) derived from phytozome v7.0 (chr-ID Bd2; pos 829 4168 to 8300597 reverse strand)
attctgattctgcagagtaaaccattattgcggaggtaatagcatccgtccatgtggaacttgcactattttgcttatacttgttacatatgaaaatatcaaaatctttgacatggaattgcattgtttgctcatagttttacctcattggattataatataaaaaattgcatgactttgcgttctttgctcataatctcattacactgaaaatggcaatgactgtcaatgtaaatgtgcaccattagaaattttcgatcaattctctcattgcagaccacttgtttggctgatgaacaagaaaggatggtggaaaaaagaaataccggtgaacctttgttgttttcttttgaagcgtctactgaatatttgccacttactatgtctctatgaatagtcatactactccctccatccaacaaaagatgtctcaagtttgtcaaaatttggatgtatctagacatgacttagtgtatagatgcattcaaatttagtcaaagttgagacatcctttgttggacggaggaatacaatacatctaccctaagcaggaccatacagggttccaccaacctaggcggatacaccccgagtcctgaaggaaaccttgcggattacatggaaacaagtcaacatgggttccacccatttacaattaggagactagcctggcatatcactgagtcctactcagagacgagtgtgcaacctccatactgcgcatatataaaggtggccaagggtcggtaagcaagagagaagtgattggagaaccacataagcctactgtagacacaaaccctggcccgtcgatttcctctaactcaccgggtatcccccattgtaaacgcaattctactctgtgatccccatgaaatacaagtcaggcaggaggagggctattacccaatccttggggtctgaacctgagtaaatctgagcgttagatccaccggtaccccaagcatatcgccacatctaaacaaatcacgaacaacaaccgtgccgttacaaggtagcgatatttaatccctcgacacaatgaagtacctaggatatttgcgaaataaccgtacaggcgtatagtattgtggtaccatgtcatttcgttaggataatgagggtgatggcagataagtgacatagattttctcgtggtggtcatgtgccgaaatgttggtagaagctgattgatgattcggtttggcagtttcagtgaaggtgcacaattggtgctaccaagttctggttaaggcttggatactactcctattcatatataaggtgcattaggttttgttaagacaaggtttaacaagagttgctccattaatatgggctttatatggcatgaaaccacagttatcagtaggtactttaaaaaactaatccagttatacatatttcatgtcatataaaccacatactattaactaagtaattcttggtcaaagccttgtcttgatgaaacctgataaaccttaaataaaagcaggcagcatatcgtatcagctcatgtggaagctacttttagataaatttagagcaacagaactgcttcccttaaaaaaaaggaacatgctactgataccgttcttattgtttttcagagggcatagtatttctctagacaaagttctcatagaagatacatgaaggcaccaccatcttccatttcatggtattctgggaagttttttatagatccaagggggagccctttggcttgttgaatatgttagtgccagagttccctcatcttgtattacggggaaacattctgaatcaagcaatactgttacctggggctctttcatatgcagtagttggatgcatcataccacaggatataagctattgatttaatgagttcttgcatctggcagttggtacacacgatgctagactctaaactttgctacactcttcatttgatgtccttgttaaatctttgtgaggataaacctgctaagctgatacaaaacgccgagtctgttatatcttcttgatgaacttttggcttgtacaatctatctacaatcttcagcggaagcgcttgtcatgttgccacgtttgttgtgattgagcacagcagctgtcaaggcagttaaccttcatccacaatagtgctagcgaaaaataaacattatcgtctagctttagtttgttcttgttccatatgcccctgcaacttctctcccatccccacccccctcctaatatgttgcccctgccgcccctcctccctggatccaccgtgcccgttgcctgtcctcctcagatccgccaccctcgcagatcttccctggatccaccgtcgccgctcccctccatgcattgtcgtcctcaccacctcctctcatgtcgcttcagggcggagttcgccgccctcgatgacatcgagaggaagatgcaggccagccgacagctccgttgtcgacggcgtgggcacgcttttttttatttctacaatgaaaagtttaaatctataatgtaaaaatcaaaagtaaaaactaaaagctaaaaaaaattagaagttcattaaattaaaattcaaaagactaaaatttaaacccaatggctaacaaatgcagctgcacttttactctctcacgagcgcatgcttgtgtcgagtggtctagccagccaaagcggaagcaacatgcagttttttttcctgtcgtttagcttaacacggtcgcatcgctgcatgcaaacatatgagcccctgcatgtcatcttatcttgcatttaattttgatttgaagcattcaaaaagccataacttttgactcgggcatcagaattttgatccgttttcacggttgggtttttcgtgttgagctcttcaaaactagatcccatatgtgtatgtttgaacgaccttttaaaaaaaagcaaccttctattaaaacaaagcgacttttgagacctaagttatctacctttgttgttaagttccgtgttatacagttcttgcactactagatatggctttgcctgaaatggggataaatgtgagagcaaaagttgctagtacgagaaccaaagttgctagcataagagtcacaattatcggtagctaaagttactagtatgtgagttaaagttgtgcgtatgtgagtcaaagttgccggtatgtgaaccaaagttactagcaccagagtcaaagttgcaagtatatgagtcaaagttgcaaatatatgaaccaaagtcaccgttatcggagttaaatttgccggtataggaacaaagttgtttgtatgaaaaactcacagttgtcgacacataagaaaatattgccaacatagaagacaaaattgccaccatgtcataccaaaattgtttgtgacagagtgaaagttgctacagttgaacaaaaattgttaccgggtggaaaacaaagttgctaatatgagagacaaagttgccattatagaaaccaaagttcgttgtatggaagtcaaacttgccggcataagagccgaaattgctagtatgtgagtcaaagttatcagaatgtgagtcaaagttgtcagtatgagagtgaagttgtttaacatgtgagaagtagttgctaatgtgagagtaaaatttgctagtatgtgagcaataactgttagtattggagttaaagttgcggttttgaattgaagcaaaacccgccattgatatgagagccaaagtttgctatgggagcaataattgctcttatgagagacaaagttgttaatatgagagttaattgacagtatgagagcaacaattgttagaatgtgaccaatatttgctagaatgagaggtacgaaagacaaaattcccgacacattagcaaaagttgctaatatgtgaatagttgctgctatagcaaccagagttgctagtacgttaaaagttactcatatagaagccaaagtggctaatttgagagttcaggttgtcgatatagaaactaaaattgcaagtgtttgagtcaaaagtacaatatgcaaaaattaatcgatataacagccaaagttactagcacgtgaaaagttgcaaccagaaaagtgaaagctcccaacacatgaaccataatacctacacaggagcctcgttagcaaagcagagtgagttgcgaaaaatgagcctaagttgtttactttcaagaaaaagttgctatcccgtaaaaatttatcgaaacatgcccgcatgggatctagttctgaagaggtcgccctcagtaacccaacagtgaaaacagatcacaattttgaccttcggttcagaagttatggctttttaaatttttcaaaacggaaataaatgtacgtgatgctattactagttcagtttgtatgcaggcattgcagggacggtaccgacaaaaaaagttgattagcatcacctgtgcgagaagggaaacgaatctccatgccttttctggatggagagaactttccataacgggaggccgctcgggaactaattgagcaaacgtttgaaggaaaaaaaaaactttagacagcgcagaatttgcccgctgcttttgattttggtggttgtccaccaattatgcctcccatttattaggacatgtatcgtgttcattacaaacaatggtcctgatgacatcaggtgactcgtgaaaccaacaggaccctgcatcatgcttagcagactttgtcggagcatgagttgcctccttacaagaacgattaggagcagactgaccggtatggcaaggtgtggcgggtcacctaaaatttggaaaataatcctaatagacctggtcatatcacacttttggaaccatttcaattaaattctaaaaaatagtactcccttcatcaagtataaaaattgaccatattctaaacaactactcccttcgtcctgaattaattgacgtggatttatatagattcttatacaaatccacgtcacttaattcgggacaattacaaacgttttgggataaaaaaagataaattaatcttcatttgcattactaacttcacactttcattcgaaagatcatatcacatcttatgagatgccaccattacaatgcaatgtatattcatagttctctcaaatggcttcaaaacattatggcaacaccccggttgatttcatatttttcggagcacatttgggtattatttgaaataaatttggttaaaatacatgttacttcgaaataatagccaacaaatataaaatatcaccatacttaggtagaatttacaaaatatagtcctatgcatggtcaaatgttttgagagtgtttagagcaagacttatggtacttgcttcacaaaagtgataaaaacaatttttgtgacattgttatttttgtgacgggtacatcataatcgtcacaaatgtactcgtgaatagttatgaccgacatgaaaatacagagtttccttgtcgggttccagccgccaaaaaatattttattatatgtcggtagtgtgaagccccaccctgaaaattaataatttggtgtcggtagtactagcgcgtcacaatttttgtgacggtacttctgatgctcgacacaaaaataaatcactgtcactaaactctgagatcctggtagggcaagggggagccccttggcttgttgaatatatcatgtcagaatcccttgatcttgtatgacggggaaacattctgaatcaagcaataccattagctgggcccctttcatatgtctttggatgcatcgtaccacaagatataagctgttgatttaatgtgttctttggctgttttgcatcatttgccagttggtacacacactgctatactctacatatgacactcgtcatttgatgcccttgttagatctttgtacgagtgaaacaaagaactggaacggatgataaacctgctgagctgttgcaaacgctgagtatgttctttcgtcatgttgccacgtttgttgtgatttgagcacagaagctgtcaagggcagtaaaccttcatccgcaacagtgctcttgttcttttggcacctcaaacaagggaaggataacaacaaaatcgataagctagtgagaaccgcattgatcaacaccaaacaaccgccataggagaggaacttcttcctcagctgctgagcttttcatgttggagagacacccctcctccatagccatgttcttacccgactcaaacttgacaccagaccatgcacatctccagaagaccatgtcctaaacaaactcaatgtctaacagtgaacacaatctggaactaacccaagttagcgttactttcaacatttggtaggtggggaaaaaacgtaactttcttggtttgatatggaacgtatagacctatcagcagcgactacgtgcatacagagtcagaccttgacgagataatactttctttttctgaagatttgacgacataaacactggtcagcaggagaaat

SEQ ID NO: 1960 - DNA, 5351 bp, Brachypodium distachyon
  Intron number 2 from transcript Bradi4g08600.1 (locus Brad i4g08600) derived from phytozome v7.0 (chr-ID Bd4; pos 771 4223 to 7719573 reverse strand)
cctcgacgccgtcgtacgcaaccccgccgactacggtacgttatattagtattgctgctctctctccgacccacgttacttgttacttgtcgttgattcagtacaactttatactaaatctgcgacaagtaatctcagaagatcgattcaccggaaaaaaactgtacgtaccgagagcttcgggtgcaccggtgcatacgaactcacagatacagtacagtacattgggcgagtagctagcggggggcattcatgtcgttcgatcgtttcgatcgattaatgctgcactgctagctgcaccgctgcatatgtatatcgacaagtatggcaaattaaggcatgggcgccacatgccctgtgctagcaaacttgcagcggcggatgctgttgcatgcagaattggcacagtacgtgtgccctcgtgtgcattaacatttggacatctcaccctatgtttctttcctgagtcgccatgccagataatattaagtcacgatttttggaacatggtacatatattcgaacctacttttcatgacttgacaaaatacatacctttaagttttagaaagaaaatcatgcgagtaatttatgggtcagaacttagcgttgtaattctttttaatgatgatttgagagctgtacaaaaatcagaaaacgaaataatcaaataaatccatttgaaattattttgtgaattttatttttctgtaattttgttctgtgaattttgtactactcacaaataatcaaattattttacgaaatctacaaatctaactttgtactaatgcactagttgcatgcttttttgaaatgaaacttaaaataggaatttatgcaaagtttgtagaaatacggttcatatgaacccatgatcattagcccttatagcatttttcatgttagatggaattgccatcatacatttcacttttagtagaagactgtagatatattttaaaagaaaaacaattctatatgttatttgtctagatttcttcgaataaaaaattgaacaactgaactttcggatgaggagcgggacaagagaaagaaaagggaagcgggaggacaaattggaatgggtgacagaccggtgagctccatcgtggtgagacagtgatcatacacctccacgggctcattggtctcgacatgggcaggatctagccatatagggagaaagcgagagcatttcaacttgatatgctcgacggcttttcttcttcagtataccgataactctactctctcggaaaaaagatgggtatgtggtctctgctgggtgaaattagtgtccatgggtttattatgatgcatgtctcagcaactatggtagacacctgtggtgagatggcaaggcgagaggagcagggaaggtagaaaaggtgattggaagatgaagtggaggagaggaggaacatcgatggatgggagaagagatggaccgttgggggcagtgagaggaggcagtggtagcctggcagtgagaatactgtcacagatgtgcgggtaacttagagcatctctaacagttcctttatatattgccgatttttatataatttttttgaatgattttggtgtgaaaaccttaaaaaaaattataaggattttggtaatccacacgctatattccacttttcacgttggattttcaaaaaaccattgtctactcaaaaaattcaaaaaccgtgggctgaaatttcagcagcttttttcattcccaaatcccaaccaagaagccatcgcgtcctcctcctctggacaccggcgacgacgccgccccctcccatggccgctgccgccgcttcctcctccccctctgttgccgctcaccacggccccctcttcttaccccgaaggagagcatctccagcccatcccaccgcagccaaatcctcgctcccggacgacgatggctgccacgacggggaagacggtcgaggagatccgccgcgagaaatctggctgctcggcaggagaagcttgctggtttagccgagaagccacaggaatccgcccaggaggcccccaacatcaccccaacccccccccccccccccccccccccccccccgatgaagtaataccgagatccaaattcgcatgcttcaaattctaaaaagttgagttaaaaaattggctcgtcacctccctgccacctgttgatttcttgtcgcccgaaagaggatttgctggaggaagacggcgaggtggaaggagtatatttaaaaaaaaacggagacgaggagattagtgagtgttcttgttgtgtttgagttgtcgtttacggtgggaaaagagaaacgcattccttgttcaaaatatcaaactaaatggtttccactattcccatgggcggaccgagcaaaaatttgagtggggtcaaagatctataggcagcgtaaattaaagagtaaattccacaaaactatttcaggacaattttctcacacatccctcatttttgttaatttgtccagaaaaaccccacaattttttagtcacattgtaacaacaagcccgaaatgacgtgtttaggcaacttgaaagttttcttacataccgggcccacctgtcaggtgacggatcggactagttcaggagactaggcaacttaaaaaaatatcaacaaatacctgcagccttgctaaagcaaactaaactagttcaggaatctttgatgtagatttaaataaaacccaaccattaattagtctcctgcaagtggcaaaaattgaaagttgaaatcatgcattgcttcagtctgcgtctacgtgtgctgtgtgcatgtctgcatgactgcatgaacactaattcactgaatattgaacagtagtgcttcgccaagaggcgcaggcgcgggcgtgtgccgatctttcgagaatctgtgaccgttcgcctaatcaggggccgctaatgatcctgattaagccaaggaactgggtagggatggcaataggtacccattacccgcgcacccggcgggtaaatccccattagggtacgggtttgggcaggaattttgacccgcgggtacgtaaatgggaaatactttatacccatcgggtactgcgggtccgggtatgagaatatataacccatacccttgtacccgtttacccgtataataaactctcatacacgtgtgatgtgatgtcgtttactatttcaaaggatagtattattttttatgtgtggtttgttatttatagtttgttaatatagtgttgtttatgacaaaattgatgtggttttgacaaatatgatgccgtttctaaggaacatgttgttgttgatcaaattttattaagagtatttttacccgcggatacccatcaaccctgacgggtgacgggtatgggaaaatgttataaccattgccgggtatgggtatgggtaacgggtaagctcaaaaagaacgggtaagagtatgggaaggctcaacccgtacccataccctgcgggtgccatccctagaactgggcggagtgggggcacagaactgggcttgagtgggggcacaagtcctgtaccatggaatagtacaaggagatgaaaaaatcgagctgccaacactgcctccaacgtgtgtccgcccatgactattcttcccattctaaattcttgtcgttgttagcacaaatttgaatttaaaaaagacaacaatttaggatcgaagggggtgctatctattcagttacgagtgtccacgactatgattacacttttggaatgaagagtaataagatatcatctcagggttttgctccatatggttgtgaaattattgatgtaatctagattattgttgttgaaatccatttgcgtagatgcctaaatttacggtttcatgctgcgtcgggcagaacaattttgatgtatatcatatatgacatttaagggtaaggtttttaatacatctgctagagatgttcttagatcaactccaccggtcctccaaacccacccctatcgtcgaatttagacccaaatttttttttagccaaacccgcaaatctctctcgggctcccaaactcggtcgccggatcgggactccccatcccaatagctcgagcggaatctccctcctgccaaggcacctcccgccccctctctcccctaccttctgtctggcgcccgtcttgtgccgtcgagttggtggcggagcttacatctccagccgatggaggtggggatcacgccataaaggcaggcgccggctacggtcgaggctggcgcgacggtcacgactgaagcaggcggcgacgatggttcaggcaagcgacagcggcggggtttgggatggggagaggcggcaccggcattggggatggggagatgtggttggcgctgtgaagaaggggtgaggaggaaaggcggtgccgtgaggaggatagggagaggatttcggagttcacgggagaggaagaaacaccgagggaaattagaggtgagtgatactagcttttatacaaatccagatgcaaatttggtaggtcttttttgttgttgtttcatgtggtcagatcatatagccgttgtaaaagagccgttgtgaaagagttgttgcaacatattcagcaataacaaactctgataattaaattataacattatagttcatttaaataatatataaaaaataaaaaatgttctgatttaaattataagcgtgtcaaatatataatttcgagtcaagttgtttgaaatatagatgttcacaaaaacggttggaagatatgaataaaatatagatgaacgaattattaggggtgagatttggaagtctgttaggacaatggtaaatttggggagaaaatcttttataggactctccacatagagatttgggggctcaaattttcggacgatggagttgctcttagagcaatataggagtggtgcgcaaaagttacactcagtgatcatgttagtttttttgacacctcacaggatatgtaacatttcggaaattgacaattgcattaccattttacgaaatgcacacactttattttattgtagttttgaggtaggtagtgtgcaaattttagataactatcatatgaaattttaaaaaactgggaattagcacaccccagatatataaagggagtgtctacttctcagtcgaattagaaatagttatttctcagtcgacgatcataaccatcaaattaagatttctcatcagtctatatagttgttatcgttgatttacaaatagttatttctcagtcattttaaaaatagcaaaaccgatatataaaacactgtacgattttacctgggttcatatatctctttggtgatgagcaggtttcgagaacgctgtgcaagg

SEQ ID NO: 1961 - DNA, 1431 bp, Brachypodium distachyon
  Intron number 1 from transcript Bradi1g30060.1 (locus Brad i1g30060) derived from phytozome v7.0 (chr-ID Bd1; pos 255 04505 to 25505935)
tggtatgtgcatacttgctcactgctgcctcgatccccttttccaaatccccaacccttccgtcgcgctcccccgattctggctgctccgagttccgatttgcgcttgcctgccggcttctcgcgtcgcgctgatttgctcgaataggatcccgtcctctgcgggggagtcttctaggttaggataggttgggttgggatttaggaacagttttgccaacatttattttgctcactgattatgtataggggataaaagggcgcacgaacggcgattttacgtgcaaatatccatagcaggcgcccgatttggggatctagagtgggaggcacggatcgcttgtccgatctggttcagtttaggctatgcgatttactggctgctgcgtcgtctgtgttgcactgatccgtagcaaatgtactagagagtttcgtagctagttgttcaaatttaggcttatagtatgttcttactgtaggtaggtgatcatcttcttcagttgcgtttccggtgctattgttggcatcagattaagaagaagctctcaccttcaggcgtcatccataataactgtgaattctgtcgattttatcaattactgaccttactcaaaaccagacaagtaaagaacagtcagtaagcaaacatgatcgtctcatctatccaggttcatggtctgtcttcagtataaaaatcgaatgaatagcgctaactttgagtaaaatggtgctatgcaactattgatataccatctcctgtatagggaaagagttgcatgctgtcaacggtatgtatctttatcacctttgcatctgcatcacagaacagctagaatctgtcttttttttttctttctttcattctagaaaaatcttgaatctgaattacaccaaaacaatcacctacagctaaacaacaaacgctgatagataaataaatctagtaaccaatatcagcgccacaacgacacagccatgataaacatgaaaccagaatgccataattaaagagaaataaaaaacgcagcccgacggagatgcatgatacaaagtcttcagttccattcagtgtttttttctgttttcttcagcccgcttgatcctttttcttggttctttatggttcctcgttaagtcattcattgcttctctccagaatctgcgtgcatatgttaccatgaccacactagtatttatgcactagtatagacaataaaataccaaacttgtttttttgttcaagctagagcctggcatccttgattgtgtcttgtatgctctgcgattttaagcttaccaaagtataattactgttacatacatattcagatccgattattctaatgacacacttttgctgtattttcacaatcataaccaaagtttgctgtctacaggttttggattttctacagggctaagcaggacggtg

SEQ ID NO: 1962 - DNA, 3148 bp, Brachypodium distachyon
  Intron number 1 from transcript Bradi4g08900.1 (locus Brad i4g08900) derived from phytozome v7.0 (chr-ID Bd4; pos 808 2434 to 8085581)
tgcgttcctcgcctcagactactgacttttcgtcggtaatttctaaccgcccttcccacccgttattgtgattgcctggagtaatttgttgcatatatatatgcataagtgctaaatagtaaataacataggtgcatcaattagctttggatagggagttcttcttggaaggtaggtatagggcactgatgtgattgtgctcaaatcgataaacatgggaggcgatcgttccaaaatataatttcgttttagaagttctgaacaattcctgtctgttggcattatatgctggtggtacaagaagtaattgcatacttgttgtgccacatggttcttgtctctaaccaatgcacattttcatgatcctaccctggctttgcactttgcaatactgaatcttttccaattatgtcttaactattcagaatagttaacttcagtagcacgttctggataaagtttgatttagtacgtggcaggttccatctagtacacaacatgcatctctggcacaagaaacaaaataacatttatgtcagtagctaccttgcttatggattcagtagcacatttatgttgtgacattgcagttttgttcattaggtttgaattttaaccacccactcgctaactctgattggtttagtgtttcactgtgatttgttagatagtgttaggctgcgtgtagaattctagaatcagtgtgattttaatgctgggaattcatgggtttgataggcttgttgcaagtttgtgaatgtaccttcgtcagtgtctgaatcctaaacctcataaatccatgtcacgaactgcctggagtaattttgtgtcaagcttcatgcactacccaacgcaaccgaaagaccgatctgatggaaaggctaggcaatccacttatacacttcaacaatttgttgcgtgtgcataaatgcataataccataacgccgcactgagctatataccagggtgcacacaaaaagtacactcaatctaagtagggcctaagtgaattaattagctttggagtaggctagcagaactcggaagcacaaatgtatccattttttctagtatttgtagggttatagttgcaagataggtagggtgtgaagtgttttctcaagcaacatgggtgaaaggcagtcattcgaaaattgaagtctgttttagatgttctgaacttccgatcacacctccagttggttggcaatatatgctggcggtacaagagataactacatatttgatacttccctagtttgtcccacatagttctagtctcttgtctctgcatatgttcatgatagggtattgtaattcgcagttccaaaagtttcccaattacaacatcttaatattgataaaattaactaagtaacatgttctgaacaaagtttctgtcatgcacttcaagttactttcctatgacagctctctttagtgcatggcaagtaattctggcaccaggaccaacttaatgttcatcttggtaacaaatcttgcttatggattatataatactccctccttcccaaaatctatacaaatccacatcacttattttggaacggagggagtatttgttttgacatttcaatattattcattaggtttgagttttaaccaccagctcactgactctgattttctcatatttcattatggatagctttgaggttatctttaggccctgtttggttaatcccacccatgccatgtccatagggaatggaagggattgtaattcattttccctggaatcccttccgttccctctcaatcccccttgatcagctggttgccgaacgaggccttggtgggtgtgatactttggtaggcttgttgcaagtgctgatggtcctttttagcttctgtttctgaatactatagctcataaatcaacatcatcttttgtaccttcatatgttttgtactttagacattttcctatgttgtggcgggttgggtgatagtccttcttattcacatagttcaccatcacaatcaatgttactttcatttcccttgtaggagatacaactatgcttgtgtttcatagatttagccatttagaatatgaaagcaatctacataatattttactggtgtcaaacatgcaaatgattataaatgtgccatccatcgtgtctttattggttaagacttaagagccttgtaaaacttcactgcatggaatcaattgacaatgtcactctaaacccttttttgttgttgttggggacttttagtttagtttttttttgacacaaaacagtagggaagatccctaccgtaacattttcatttatatatgtgcaatggctatttacaatggggaaatgagaaaattacaaaatgtcaagtcatgtctgcatgccctccttcgaacttggtttggctctatgcctaaccatcagaaaattttccttgaatagttgaaaaatgccattggaatctctgatgccattgttaaatatgatattattcctatgattccacaaagcccaacaccctagaataaggacttccttgaagcaaatagtatgacggttctgtagcccagtagcaataagcatgtccataagctgaagttcatgattccattccccactttccacgaaaagtcctgactgaaaaggcaagcaaagaaaagatgggtcatgcattcgttgataccatcatcacataaaacacaagtgataacctccacatagaaattcttcctagccattaagtcccttgtgttcagacagtcaaggatgaggagccagaagaaaaacttctgtttagatagataggcagatttccaaatccaagagaaaggacgttcagctgggtcagcattgatcatgacttttagtttagtagatagcccgtctgattcagttttcttttcgtaatacttggagtttctcagtttgtgtgaatagttacaattcagaaagctctttgaacaaaaatatatttggagagttagtatccattttagttttcaattctaaacagcatgcacatgagctgaatgttctggtcacaatgcagttttatttttgactagttgcttttcttgcttgctcattaatttcaattggtttgattcattgcaaatatggtggctgataattctgtcaattatatgatccagg

SEQ ID NO: 1963 - DNA, 1798 bp, Brachypodium distachyon
  Intron number 1 from transcript Bradi4g12680.1 (locus Brad i4g12680) derived from phytozome v7.0 (chr-ID Bd4; pos 127 29940 to 12731737)
acaaaggacctgcggaagcacctccaggacaataggtatccatccatcgatccatttcttcgttatccttaatttaccacttagagctagggcgtgggtttctgtgagaacagaggggcagcggaagacttcaaaacatcaagctgctactcacaatcattttaataaacaccttgtgtgcatagaacaaatctgaaccggtctatcaaatctacaaacatcaagttctcaaacctgcacacacaaaattagcaactgcaaggatagcttactggaacatcaataccccaatagaatcatccatatatcaaataatacaagtaacaccaaatttgagcaataaatgctaacagcaagtagggatgataaccaaccacaaatatagcaagagaaacaccaaatcaagcagagacataagtatttacgtggaaaccccttgtggaggaaaaccacgggcggcggcgagcagagagttcattatggagatgaaaagtacaaggtggaagcaaggatggggaggctttaaatcccaacaatctctcaaaaatttagataaatttggtagatcaaatgcctctcctctcaccctaaccctagaactctcaagaacaagaagacagtgaactctctgtctattttcgagcaaggggaaaggcctaaatagaaagctttgcattcagcccctcagcttcctaacatgtgataacaagtcctacttcagcctaccacatgtctaagcattgttttgcatgattaacaagtcaaaatggctctcaaataatgaaattaggagctgcacatcaccgtttcaaataactcttcgtactaccggacaggacgaccttttccaaatatgaagcatacgtacctgagatatgtactcctaatatgaatgaacccacatgacttatgaaatcacattgaaatatagtatttttttttaaaagtgaaataatcaaagtttaaaggaactgcaacaacagagtgcaagtatacccaaatagaatatatacataactttgagaaaaacatttgaagcaaaatgtttcaaggtatatttgaatcacgtgtcctgaaatatgaatatcttatcttgcatacgctgaattatcggtatgtggttttagtaataccctaaaaccttagttttgttcttttttttttgggaggtatgtgttttatttgaattctaggactcggctatacacccaaaacacaatgttcgaaaaatatataccaaaaaatggtttgttttcatctttttcaaatggtgccccatttggtcttattttatttattatttttcaaaatattgaatcattagtagctctagccgccaaagccaaatcaattgatcgagtcaggactctagttggattcagcttttggagggctggctcggctctatctgtcggcctattacatatggagagttggagactcctaatcgtacgtattatataattataattaagataagaaacgaaagaatcgtttgggcaggagtcaatccgccccagctggttattttggtaatgcaagccggccctatgttgtccatattcagtcgtgtacgtagttcatgtttaaaattaggacaaaattatgtttcgggtgctgtccggtatcaatatgctttgattcgttactaaattatgtaaatccatgttcagatcgattacctttttgctgtaactgacagctgactaaaatcggctgaagagtacctgctgatcctactcctgttcctttgcttgtcctattcttgatttcttggtcaggtacttgctgttaattg

SEQ ID NO: 1964 - DNA, 5515 bp, Brachypodium distachyon
  Intron number 6 from transcript Bradi2g42330.1 (locus Brad i2g42330) derived from phytozome v7.0 (chr-ID Bd2; pos 428 15112 to 42820626 reverse strand)
aggtgatttcacacatcaatcagtaatgctattgaactattcacattgtcatgttgagctcctgcagttacagattctgttgaatacatggatgaacctaccagtaaaaactacgcttgccataaaactacgcttgccattgattcactatcaatgtatatagcgtgttccaaaaaagaggttacttaatgtgactacttaagattagcagggtttttttcagggaaagattagcagttattcatcactccctctgtccctgtttttcatagatgttctaggtttgtcctaagttgaacttcttaaagtctgaccaagcttgtaggaaaaatctacgacatatacaactataaattagttttgttaaatccgccatgatatatatcttcatattatacttatttgttatttatagtttttacctggttaagctttctgatgggcattctgttagtaacgcatctgaagagcaaattgtgaaagtctgattctggcaacctgctatctaaatttaggtcatgcaaaaacttgttttaggatggatatagggccaaggtgctcccacgtggccacacgttttgagagggttttgttattggtggacaaattctaatatgtcttggttaactattagtttttttcttgtgcgtggaaaatgtccctgcaagtttgggagaaaaggccacacactgtgacctgctcatatctcatatttatacagccactaagggcctgattacatgctgtactaaaggcactattggcctgattacatgctgcgctaatatatgctgtacttaatgcactaactatagggggaaaacaactatgtgcattctgcaactgtttgcctaacactcccccgcagtcgcaacgggagattctcggacattgagactggaccaaaaatccaagaacaatgaagagggcgtcgcaggtccagggagagttggcggattcagctagactccgctactgcattagcgacggcacggtactccgcctcagcactggaacgggagacagtgtgttggcgcttagaggaccaagacaccaatttttccccgaggaagacacagtagccagaggtggagcgacgtgtgtccgggcaaccagcccagtcagcgttggtgtaggcggtcaaggtgtccgcagcagatggagcaagctggagaccatgatgtagagtacccttgatgtagcggaggacacgcttgaccagcgcaagatattgttctcgccggtcatgcatgtgtaagcagatctgctgcacagtgtaggtgatgtccggccgcgtcaaggtgaggtactgtagagctccggcgaggctgcgatacgccctcgggtcggcgacgggggaaccagcggtggagcctagtttcggagaggtgtcgacaggagtgggcgacgatttgcaggaggacataccagcacgttccaggatctcggcagcgtacttggcctgggagaggaacatcccgcccgagtcgcgggtgaccgcccgagtcacggcgaactcagagttgagggcagtgatgacgcgctcgaggaggagtggtgaagacgccgtgaggatgatgtcgtcgacgtacagcagcagatatgctgttcccatggtgccgtggaggacgaagagtgacgtgtcggacttggagcaggtgaagccgatggtcgcaatgtgggaggcgaagcgctggtaccaagcccggggtgcctgcttcaaaccgtacaaggaacggttcaggcggcaaacgtggtcggggcgggagtcgtcgatgaacccagtaggttgccagcagtagacaacttcattgagtgtgccatggaggaacgcgttcttgacatcaagctgctggacgtgccagttgagggagtgcgcgatggagaggatgacacgaatggttgccgacttgacaaccgggctgaaggtctcgtcgaagtcaacaccatgttcctgagagaaaccgcggagcacccaacgcgctttgtagcgatcaagggtgctgtctggccgcagcttgtgacggaagatccacttgccggagacgattgttcgcattgggcggaaggcgcaccagatcccaagtgttgttggtgatgagcgcttggtactcggccgtcatagcgtcaagccagtttgggtctttgagagcaccccgaacagacttttaggacagacgagtgcgacccaagggcgacggcgtggaacatgaggcggtcaggcggtgggatcttcttgcggcacgccgccttgtcagaggtccagcataggctggaggaaggccccagccggaggtgttggggcaggccgcaccagtactggagctggggcggttggagctggaaggtgtgatccagcaggtttatgcacggccggggtgatctgcactgctggggcagtaatgggcgtgctgtcctgtaagaaatcataggaagacaaagaaacagtttctgttttggcaaacgggtagttagtctcatcaaacaccacatgtcgcgagatgatgatgcgaccagtggcgatgtccatgcattgataacccatgtggttggaagaataacctagaaacacgcatggggcagaacggggagcaagtttatgtgtcatgatggaggctaagttaggataacaaagacaaccaaagacgcgtaagtgagagtaattcggagttatatgaaagagagcaatgaaaggacatggtgccatgatggttttggtggggaggcgattcaagagataggtggctgcatgaagagcttcgacccagaacctaggtggcatgcaagcttggaataagagggtgcgggctatgtcatttacagtgcgaaaacgttcagctttaccattttgtggcgaagtgtaggggcaggaaaaccaaaggtgtatgccatgcgtggaagcaaaggtgtggagatgacggttgtcgaactcttgtccattgtcactgtatggcctgtagaggaagtacaaactgagtggagacataagcatgaaaggaagataatatgctgaaagtttcagatttgaggcgtaaaggaaaagtccaaagataatgtgtaaatcatcaagtataacaagaaaatacttataaccataaatacttggaataggggacgtccaaagatcacagtggacaagttcaaatggactagaagtacgactagatgaattagcaaacggcaaccgtacatgacgaccgagttggcatgcatggcataaactaggatctgttatttttgtttgacttggaaaaatagaagacgacgtcaggcgccgaaatgcatcatgaccaggatggccgagacgacggtgccacaaggtggagtcatcggtggcggcaaggagggtgtgaggtgcagccatgaaagggtacaagtccccggtgctactgcatctgatgatctctctcttggtaagaaggtccttcatggagaaaccaagagggtcaaactcgacagaaacattattatcaatagtgaactaacgaacataaactaatttttttgagaaataagtccattttacccccctgaacttatcgcaaagtccaaaaaacaccctgaactctgaaaccgggtatttaaccaccctgaactgtcaaaaccatgcacccgacccccctctgcctgtttgaggctgttttgctgtgttgaaggtggttttgacccatttgacccagcatcttcctctccttcctcttctctctcctgagccaccctccccttctctcacgcgcgcccccctctgcgcctccgtctcgcgtgccgctttgctcctcctctggcgccgccacacgaggaagatctgccacgagccgctggaggcggcaccggcctggaggcgggtcttgacgacatcgatcaggagcagcccgtgtaggtgaaggccctcgccgtggcgcccgcgcaggccctgatggccgcggacgcgagcggggttggcacctgctcctccgcctgtgcggagctgcagggatgtagagcgaggaggagaagacggcggcgtgggaggaggagcgaggtccggtctgtgaaaagggaggggaagtcctggaagtagccgccagaggaagggagcacatggtcagcttggacgacggcatctccgcgggccgccggtgccgtcgccgcccgcgtgctaagagcaagagaggagtgaggctcggggaggggatacatggacgacttgtgccagcgtggcagtcgacgggtcaaacccaccttgaacacagcaaaacagccagatacatggcagagggggcttgggtgaccggttttggaagttcagggggctaaaatgcctggttttagagttcagggtgttttttggactttgcgataagttcagggggataaaatggacttatttcaatttttgacgatacgaggagcaactaagacattgttcaaatgaagaggacgattagaaaaatgtgaaggaagagacgtgtggccggttgtggtgacgggaagagaggaaccatcgcccacaatgacatgccgaaatttaggatggggagaaagggagttaagtataccagcatcggcagacatgtgccatccaatcagtgcacggtggctgaatgttcatggtgttgaagtggttgatgagagccgatgagtcccgagatggagcggtgggtgggctgggcggaggagcgccgtagccatccgccatgtcgggggtagaaagcaggctggtatgtcggtgattggggcattgccatgtatccgtgcgattgaggacgagggaagccggggtgtggaccaaggatgctaggggtgtcgcgcccctgcattggccacatgtggatggcggcggtccaagggttgtagaagttggcctggaaattgccgccggcaagcgtggtggtgcagtggcggcggagatagtgcagagggaagggacaggaggggagatgcggaaggggatcgatttcagtctgataccatggaagtttgggagaaaaggccacacactgtgacctgctcatatctcatatttatacagccactaagggcctgattacatgctgtactaaaggcactaatggcctgattacatgctgcactaagagcactaatgccctgaatatatgctgtacttaatgcatttactataggggggaaaacaactatgtgcattctgcaactggttgcctaacagtccctactccctagatatgataaaagactgaacttatttcttgcttgtgaagagagagaattgattgaggccctcaccactgacagtaaacaatgatttttcattaattgaatcttatttacagacctagcataaaattttaaatccatatgtaggtattagcctgttttagtttgtatttaagactcttttatgatttgagatttcagttttagaactattgcataccctttttattgtcattaatgacatactagcttcacccatgcatatttcctaactcttgatcattggtcttgttttgtatatgcagataaagttactgcagaaagagagcgagatcccact

SEQ ID NO: 1965 - DNA, 2321 bp, Brachypodium distachyon
  Intron number 2 from transcript Bradi1g59250.2 (locus Brad i1g59250) derived from phytozome v7.0 (chr-ID Bd1; pos 583 56719 to 58359039 reverse strand)
aaaaggctcttatttcagctgaatctgaaagcgaggtataaaatttgttgtgatttacctgttcttcctataattattaggatgattcttgctgttttcatacattttgatttgaggagattaattaattaattgctacatttctattgcacaaccattttaagtcgtgtgaattccttcacactaaaagcatatatggatcactttgttgctacattttttaatccgataatttattgctccatttctattgcacatccattttaacttgtgtgaattccttcacacaaaaagcatatatgaatctttttgttgctgcatttttttatttgataattacttgctccagtgctaccaaccattttaactcgtgtccttcacacacaaaaagcatttgacaaatgctttttgttgctgcattttttaatcagggggttagttctaaataattaaaccttttgaaattatattatgacaaccttacattctgcatttttttatttgataattacttgctccagtgctaccaaccattttaactcgtgtccttcacacacaaaaagcatttgacaaatgcatttttgttgctgcatgttggaaacaaatatatttgcttatatatttgtttccaacatgccactcctgatacaaggattggttaattaggttagatttaggtcttttttgcgagatggtttgctgaacctggtattgaaaaccgaccatcttcacatttctagtaattaagttctccaacctatctggtaaaaaaaaatgttctccaacctaggtaaatgaagaatgtaaaagagcaaataaatcatggatgcacaaacaactctgtttatataccaatgtcttggtgatggatctctcacaagtcttttgctgaaggcatgtgtattctcaatctacacaatccctctcaatctacatagcgaaaatcttagtatggtatatttagcccacgatgtatgtcttttcttttttagaaaaaaggaagaattttatatctcctggcctttgcatctaagggatgcacacactcaacaatgtatatgatgcattagttttggttaactaaaatatttgtccctttgagatctaatatcgtaccagtctaaccatattttaaactgcaaatacaattgaataagtactgtatgtgtatatttttctactagttaattaatccatcaaaattgtctgcgaacatataattcttaggccccttaaattacaaaagtagtaccaaaatactactttaaaactaaggtgcgtctttcatgcttttaagctgggaataacattgcatccatttttcattatgttttttaccttcgcagaaaataaaattgatttgtgccagattttcttctagtatatctcatgagcattattagaaagggtagggctaggagtagcttaaatataacaattatgttttcttctatcaaatgtttatatgatcattggtttttcctgctactgacgatccgaagagtggagttactgttgaatgtttttagggataatggggtcgttagttaccaagccagtttatacccaatatgagtttgtgctgaacctaacctttctcaaatactttgttataccaatggtataaaacaattggtagccaacgtatttattttctcatttcaaatattggtttctccacttcatccaaatttattaagtatgccaagttttctcattatcccttttcttgtgtgtattgaacacggcacgggtattgtaaaattagttatagacattgatgcgatgatttctttgtgtacaaggcctaggactagtatgatgaccctgctttgcaatattgaatatctgggagcgtttaagttttcctgcacttcaacaacagaaacttggttagtataagcagaaagggcattttatgatatttttcttcttatctggatgcctagctgttcttgtagcatctttgaatttttttttccgaaaaggttgtagcatctttgatgtaataaaatgtagacatgatgaaaacgcaagtttgagtgacagcaggtagatggatcatgaactcctcataaaatttggaagtctttgtttgtactttccataagcagttccctgtttttctacagtttccctactacctatacacatactccatatagtataagcaagcatcatgatagtgatagttgcctgcagtggcaaagcatgtttagtccatttaaaggaacatccatttcctatagtcgcttcattctgacagaaaacacttgtcctgtacagggaaactggtgccacgaatacaggaaactgaaggc

SEQ ID NO: 1966 - DNA, 8077 bp, Brachypodium distachyon
  Intron number 6 from transcript Bradi4g06730.1 (locus Brad i4g06730) derived from phytozome v7.0 (chr-ID Bd4; pos 564 7701 to 5655777 reverse strand)
accaaggggatcaagtaattgtttgcactgaacaggtacaaccttttgagattaacacttcactttgaatgttgccttgacgatttcatctgatgtgaaatcaaagggtgaaagatttcaacacatatacataccatattttacctttattggtgtttctccaactttttaagatttttcattttattttcaaaacctgaggtcgatcgaccatattttcttttcaacacatatgcataccatattttaccggatcgagggacgaagtttgggagaagctgaggtctaggatcaaggtcatgcgggacgtttgtgcgaaggaacaatggaagtgaaggttatgatgatccggcagggcaccgatttgtcgtacgttgtttataccggacatgtacggtattggagatattcgatacgtgatggtcgagttttgaagatatcacaagaagagttgatggcatggagtggcatcgacatgaagatatgtaggtccagccgtggctggatgagagctgtttaaagattaaacagtagcgtcatcaagatggtgtcggatgaaaaagtgttccacatgaaagtcgtgcgcgttgtcgagacgaacaactttgcttttggagtcatgtcaatctgaggtcgtatgcgggccccacgggcaaaataccgaccgggacagaggagttcgtgttggattcggactcggtttaggatcgcgaattttcccttataaatagagggcgtcctaactagggttttagcaaggacgtgagggaactcagagctttggatctaaatcaattcttggagagttcttgaatgcatggttgcatcttttgtaatcgatcgacatcgttgcaataaagagattcgttggcggtatcatctctgtttttctcggatcttcatggattcttcgtgctagatctttctaatactttgctgcaggtttatcacgagttcataatacttttctgcaggtttaccacaagatcaagaaagatcgggattatttcatctttcttgttattcctcgaaatcgattatagattaattctcataactttctgtcagctgttactgatttgatcatatcttttgattggtaaatccaattgagctgattcttgttgcattggatatataatttcaatacctttcttttgcatactcatacgtattttttggttcgtccaatcaaaagttacggctgttttattatcacggacagaaagatgatttagggtttgaactttcggaaaaagttttaatttgcttccgcggaatcattcaccccccctctgattgcctatctcgatctcacaattggtatcagagcaaggtctctctaatttatcttaaccggtggattagacttgccagatatggatatatattctaccaaaccctgtgtgttcgatggtgttgattttcagttttggaaggcgaagatgaaggcatacatcatggcacaaagctacgtcatatgggagaaaatcgccaagccctatgagcttcccgcggacaatgcgatcataccaacaaacttggtccacgtgaagaacaactacaaggcgaggaactacatcatccaaggtctacaacgaagtgacttcgaccgtgtcgctcaccttgcatccgctcatgaggtatggaacgcactttgtagttatcatgaaggatcaaactctgttaaggagattcgtcaggacatgtacaaaaaggagtacatgagatttgagatgaatacaggtgaatctttggatgaattctttgcacgctttaataagattctcagcaacttacgtgcattaggtgttacttatactgatgctgaggcttctaggcaacttttgagtgcattagatatgtccatatgggagatgaaagttacatctattagagaatctactgtcatgagcacacttacacttgatattctgtactcaaaattgaaaactcatgaattagatattcttgctagaagaaccggtttcaaatcaattgcacttgttactaaccctgacagctctaatgatggtatttctacatattgctatactctgtcttctttgtctcaactaactgatgaacaactagagcaatacccaaaggaagaattggcactcctcacctctcgttttacacgtgccctgcaaaatgttcgttcaaggaagagaggtgggaacaatgctccaaggtgctttgaatgtggtgatccaaatcacttacgccaaaattgtcccaaattcttatccaagatggcgaaagaagaaaatggggaggacaagaagaagaagcgccccttcaacatcaagaataaaaagaggggcgactttgctcgagcagtggctcacagtattttctctgtaatcaatgaatatggtgaaccatgcttgagtgatgtggatatcgagtctgatgaagatgatgcatccaaaggcaagcgcgacattaatgggatgtgtcttatggctagcaacaagagtgttacctgctgcgacgactacgacagtgacagcaacaatgaggtagaactttcttatgatgaattacttaaaagtgctagtaaattgagttctttgcttgatcatgctactaaaagaattaaggaatatgacttgaaaattgcatccttgaattctgaaattactaaacttaagtctatgatttttgatgatgattcctgcaagtcttgtgattctatatattctgagcttacctctttgcgttctattcatgatgatactcttgataagcttagagttgcattagaaaacaatgagaaacctactgtgcataaacgtaaacaaattaatgatgctagcatggatacttctgatttgataaattcaatttcttgtaataattgtcatattcttgaattgaagttgaaagatgcaaatgttaggatttctcatgttgaaaatgctttacacatccatgaggtttctttgtgcgctaattgtaaaagtggaaaacaaatcatggatagtgcttgtgataattgtattgctctgtctcaccaagttaattatttacaagcatctttgcagaaattttctagtgggcacagaaatctgaatatgatcttagataagtccaaagtgagtaagaacaagactggacttggttttaatgcatatgctcattttaatgctaatccacccactatagttaagtcactaggcaatgaaatttttgaaacaactgacaaaccaaccaatgtgatttttagatcagctagcatcatgtctaatgatactccaacaagtgcaaatgtagttcatacatcacatgctaaacctggaagtaggtacacttgcacttattgtaataaacctggacatgctgtaggtttttgttttagactagctagagtaattaaaaaggaaagaaaacaagctagatctaattctttcaaggcacattatgctcatgataaaactactactcctcgttatgtgcctagggtgaatgtttcaccttcagtttcaatttgcaagagaaactagaatctgtcccaatgtataaggaaactcgtgctttgcctactcgtcgtgtatctcagtactggatacctaaaagtttttttttatctaacctcagtacggagatctcggcatgtatttgttgtttgtaggcacttcacttgaagaaggggaacataggactagtggattctagttgttctcgtcacatgaacggtgataaaaaattggttctcctccctcacacgtgcatctcgggctgaaagtataatttatggagatgcttgtatctctagtgttgtggcgaaagtcctcttattcgtaatgcaggaacatatgttcagggggaggaaatatttttaaaggtcatacccttattggtgcatgttgggtattatgttatttttcgcaacaaggctaggtttgaagtttccccacgcgcaccacatctacaagttgtcaaaaggattttcaggtatctacatggcaccctatgttttggcattaggcttctacttgctctagtattatattgcgtgctccaggtggcgaagagccgacatcgaggtgccaaaccttcccgtcgatgtggactcttggggaagatcagcctgttatccctagagtaacttttatccgttgagcaacggcccttccactcggcaccgtcggatcactaaggccgactttcgtctctgctcgacgggtgagtcttgcagtcaagctcccttctgcctttgcactcgaggaccaatgtccgtctggctcgaggaaacctttgcacgcctccgttaccttttgggaggcctacgccccatagaaactgtctacctgagactgtcccttggcccgcgggtctgacacaaggttagaatccgagctcttccagagtggtatctttacggatgctgattttggaggttgtagaattgatagaaagagtacatctgatatatgcttatttttgggtgattctttagtactttggtcttctaagaaacaaagttctgttgcacagtctactgctgaaagtgaatatgtagctgctgcttgctgttgctcacagattttatggataatagctacaatgaaagattgtggggttattttagaaagtgtaccactttattgtgataacactagtgctatatgtattgctaaaaacccggtgcaacattcaagaactaagcacatagatataagatatcattttcttagagatcatgttgaaaaagaaaatgttgtgctcaactttatagatactgaacgtcaattggcagacatttttactaaaccattggattcttctcggtttgcttttcttcgaggtgaacttggagtaatcaaaccatacggcatggtttgagggggagtttgttctttttgtacgatatgtaaaatatcttttcagttgcttctttttcgttcttttatctttaataaataaaaaatctgaaaaagtaatgagcattgtattccatcctgaaatgacatttttgcaaccacgtttatgttttgaggacattgtcattttatatgtatgctcgtatgaaatagtctatcacatgacttctaatacgaatgataacttgaactaaatcttgtcatggttaaactttgttagttattttggtcttggatacttaattactagcaatgatgaaaatataatggtatcaaggttccaaatatacaaagacacgtggtgtcaagcaatttttactaaataaatatgccaatgtcgcactgcatcttcatgagactgcttaccattgcactttggtatgaacttgaaagttgctgtgtttattgaaacctttgtcttaagtttctgattgcttaccatttgccttaaggttctaattgttaatcattgcactttggacataggcttggcgtggtgttttaaatatatgcttgacaaggttgaattgacttgatatataaattcaatgaaaataaatattatgcttttataaagtgttttgtttaatgtaatgtgctgcaagttattttgtattcaagtattgatgtagttgacagggggagaccatgtcttggaataaatcgtaaaaatacttgatttttagtcatgtgtagattacatcatacttatatacatgtcgagtacaactactttttacatgacttggatgcacaattatcatgttcatgatatttcctaatgctcattataaaaacaacaaaaaaaaatctcttctagtttaaagaaacattttttagtggggacatatttttgtgtggttttgatgaaattcattgttaaagggggagagatttcaacacatatacataccatattttacctttattggtgtttctccaacgttttgagatttttcattttcttttcaaaacctgaggtcgatcgaccatattttcttttcaacacatatacataccatattttaccggatcgagggacgaagtttgggagaagctgaggtcgaggatcaaggtcatgcaggacgttcgtgcgaaggaacaatggaagtgaaggctatgatgatccggcagggcaccggtttgtcgtacgttgtttataccggacatgtacggtattggagatattcgatacgtgatggtcgagttttgaagacatcacaagaagagttgatggcatggagtggcatcgacatgaagatatgtaggtccagccgtggctggatgagagctgtttaaagattaaacagtagcgtcatcaagatggcatcggatggaaaagtgttcgacatgaaagtcgtgcgcgtcgtcgagacgaacaacttttcttttggagtcatgtcaatccgaggtcgtatgcgggcctcacgggcaaaatactgacggggacagaggagttcgtgttggattcggactaggtttagggtcgcgaattttcccttataaatagagggcgtcctaactagggttttagcaaggacgtgagggaactcagagctttggatctaaatcaattcttggagagttcttgaatgcatggttgcatcttttgtaatcgatcgacatcgttgcaataaagagattcgttggcggtgtcatctctgtttttctcggatcttcgtggattcttcgtgctagatctttctaacactttgctgcaggtttatcacgagttcataatacttttttgcaggtttaccacaagatcaaggaagatcgcgattatttaatctttcttgttattcctcgaaatcgattatagattaattctcgtaactttctgtcaactgttactgatttgatcatatcttttgattggtaagtccaattgagctgattcttgttgcgttggttagataatttcaatacctttcgttttcatactcatacatattttttggttcatccaatcaaaagttacggctgttttactatcacggacagaaaggtaatttagggtttgaactgttgggaaaagttttaatttgcttccacgcaatcattcacgccccctctgattgcctatctcaatctcacatctgaaaccataacatttcatctttaggggcctgtcacaaccgttattaaagatctgttgacccctcacccaatgaaagaactcaaagctaaggcgagtctgcacttgttttctttttgtccattcatatttttctttttaagtttttgcttggcagtattatagaatatttactcaatgctttagatgtttctggcatgaacggaaggaattgatatttgtgttaaaaacgtcgtgatttgctggggatgtgttttcggttcgtaagagttaagcatggaaaacagttactatattactcacagatgaaggtgtctcatattttagttcttttatgtaaatcgatttttggataccatcttaaaccatcatattgcgcaaacatgccatttggtttgacatttggactaaaattttcaagctgtgctcctaatctgatggatacaactggtattgctgcttaggttgtaatgctcagatacctataatagtatgaattgggatacaactctgttggaccgtcacaaatactattggcaacaccttttcacattgtttttaccagatttgtttgattattgagatagcgttaactgcaaatcgtaaaataatgttcatgtttgcttcttggcacatcatttgaaaacccggtttgatgtttctttgtccggtcatcgcaaaaacttattaaattttaaagaaccctgttcagttgtttgtaagcataaacacttgcagttgtaaccctgtcctagctgaattttgggttgagcctactaagttttgcttgctggcatacttaatagttactgcctccgatccaaaataagtgtctcagttttgaactaagcctagttcaagcctatttcaaaactgcgacacttattttggatcggaggtagtattaaagttcttgaagtttgtactctgttaggttttgaattttggttgggttttggcaactcactgttaaaagttttgataccaagtccacaataaattttggatgttcttcctgatgtagtcctgatgtattacaatttctgttcttccagggcatatataagcatcacaaggagctcagagctgc

SEQ ID NO: 1967 - DNA, 3059 bp, Brachypodium distachyon
  Intron number 11 from transcript Bradi2g28010.1 (locus Bra di2g28010) derived from phytozome v7.0 (chr-ID Bd2; pos 27 199714 to 27202772 reverse strand)
ttggaggagccaagcgtcgtcgccttgtggaagaggtctgtttcaaacttcattatgtgttcattaattctgtaacatgcacagctaagctatcctgtctgatgctattactgcttactagacatgcctgttataacatgtttttctgggaagaacgtgtagctgtggtgaacgctttgaaatgccgtattattaactgtatgaataatgttttggtgatagttttgtaagctgtatcaacaacagatacaatccgaactctcagttcctatgcaaacatcttgtgacatatctttcttgattggacttaatataatagcttcggaagcatgtggtgaagtacttttcctgattgtaaaattattgaagatttatttcatgctgcttcagctttgtcacattaagtaatatatctatactttaatactgcctagtgccgacaccacattttaactacttcctgtaacattatacacgaagacttgttgcatttgaggtgaagtacaaaatgtgtaaatttctcacatctgacaaaagaaaatagatatattactataagctactataagctattagctgaaaaagctgaagcaaccacctttttcgaagttaagctggaatggtcatagtctatttgtgtaactccttgattcatatagtccaatttgaagaaaatatttgaactggtaatagcgttttgaagggccttcgaagtgccatatgaaagattcaagcctttgatgaccatatacatatgttgctttgaagtagtaaattattattctgctctacaacatgtgaacacctgtcccttactccttcaagaattaagaaaatatgtcaacatctatagcttgggcagtgtggtggagcttgatcatatgccttgctcaacactctcttataggcccatggtcccatcgtgcatacgctgccatgctatcaagtgaatttatcctgtctgatggtcgtgatctgcagaacatcttaaccaaccccatcccatatactctttctagtttgcaatttttgtccaagccttaccatgcgaatggtccaagctagtgcccctcgtatggcccctccaaggggacatcagatctgggaaatagctaataagatcaaccttgtatgcttctgttgaatagcatactacatccgttgaatccattttgtagcaataaagaaggtgtagagagtagaagtattgccataagcccataactattgatttctttaatgaacttgcatacttacattgtgaaatgactatttctatggtggaactatattgtgaaacagagtgcattctcgtcaaaatactgttggtaccatcaaagtttttgttcgttgtttttaagatgcagggggtggtgtttgtttgtttctttgtgtgtgtgtgtgtgtgtgtgtgtgtgttctgaagggggcaacctctaaaggctgatgtggacccaacttggatggctatggctacatgttagctcttccttttttcttttgctctctatctccgtctccatccccatttaatcccctatctcgaaccctaaactttttggtttgtttcatagttctaggaccaaatatggaattcagggccaaaagtggaccttttctaaattaataaactaatgggtcattagccaatgctacctagtatcttaagttgcactgattgtatgcatggctatatgaaaattaagactaaataggattgttgttatttttgtaataccagctgagtaatttatcaaatagaacattagagtttgatattaaacaattgcatgatatgctgtatgaggagcagagagagcagtagtaaggtagagggactttgcaccatagctattttgtacagtcgagacttctagaatattattcctgttctcataggttgtaggcgtttgctaacttaccacaatacaagatatgtgattgctttacaaataccatgagattagaagattgagagcctctacttgccattgctttaacaaatcaccaatgtacttagttactgcctaactgcttctattaacatatatcattaaatatacttagttactgccttactggacaattgcaaatcagtagactaaaacatcacaagcaacctaaatgaagcagaacattgaagttgggccttcttgaggaggtggcaggttcgtagggtcatggtcctgatgcagcacaaagttgtggaggagcaactccaccttgctgctataatataaacagcacaaatgttgaaggaaccacttcaacgtgctgcgctagatatcgctctaggggcggggaactgccaagagtttactccaaactcttaacacacaagatctaatccaagatctaagacaaagaacataaagtgctctttattgataggtagtggtacataatctgccccaagatagaggtgtggacctctatttataggtctcatgagcctgcactacttagctctacttagaactagaagcttctagggaacactactcaaagctaggaaaatatcctagttacaacttatagtagaatactctagaaactaccacaacacctatggctaaaatacaagttacttagaatatagcagaagtgtgtagaagccttgagagatctgacttctacttttattttattttgattttctctactgtccctcatcatcatggtggttggctgctgcattgaacccagtagaaaggagctagtgtgatggatggtggacgtggtggtgttgagtgagtgtgtcgggtcaaggcaagtgtgtgttcatcaggctacatagagaatcttggacgttcacacagacatgtcattactgactaactgtggttgtcaatcatgctccgatcattggtcttttactgtttgacacacacttgatattttttttttcaaacttggacttggtacgtataggttgtccactcttatgttcttatgtcactgttatactgtacattttgatttacagaatattgaccatgttgacattcttgtgtttccctgcagatagtcgaaaaacttcttattgctgcagttgctga

SEQ ID NO: 1968 - DNA, 11800 bp, Brachypodium distachyon
  Intron number 9 from transcript Bradi4g13640.3 (locus Brad i4g13640) derived from phytozome v7.0 (chr-ID Bd4; pos 139 86350 to 13998149 reverse strand)
atgtctctgagtttgttgatctagtatcagtttcgatggttttccctgattctgaagttttgtcgtccgtaggtgtctggcttaagtttttcaattatatattgtgctggcattgctgtttgaatcattttgtttttttattacgggatcatttgcgaggccttctcatctctgcatggtcgttatttcttttacatcctaatgcaaaccttgcctagagaatttcggaactctgagaaagaatcaaaactgctgagtaagaattctgataattctgttgatggggaaatactccctccgtttctaaattcttgtcgatgtatctattcctaaaaagtgtctagatacacgtaatatttcgacaagaatttaggaacctaaggaactgaggtagtactttattggaggggtaacatgccgcggtagatgcggccttcttgcccgaaacgatgctatgaacataaatataaaatttgttacaagtgcagaaatggttttgccatagattggtcgctgaacacatggatgctggagtgttcaaaatctagaccgactcgctgctcagacgatggggcgacggtgaaataacagcgatggctcagagcttgctcgtggcggccgatcggtatgagctcgagaggttgaagctcatacgcgagtacaagctgtgcagggagggacgtccgcacgaggagcatggctgccgtgggctcaaggaggcgtgtttatctttcctgaaattttcgagcaaattgaaggcagccgtcgcaagtgaagggttccattctcgaggagcgcagtgttacaaaattaaaccggtttattctcaagcaccggtgcttatttttatattagaggtgtctaattaagtatctatcatatagaacacaagcaccagtgtttagacaaaagccggtttattttatgcaaacaccaccctaaacaccttgcattgaaaatgctctaatgatgctgattgcagccgtagcggaagggatccgggtgtgtaagcttaacaattggatgcaggatgtatttgcaaatctgcagggctgcctttgaccgacttggatcccgagtcattggcacgtggggctgggtccacatgtcagtgactataaagtcaggggatccctctccgactttgacggggggtgggcatgtctttgcaaaaaagtaaggcatgcatcacagggcgatgattttgaatcggatggttggatacgcatgaaagggatgcaaagaaaatggtgaattcagaggatacggttacccagggagtagatagtttagactatataaatggtaagtttatggtaattagggatgtaaatggtggccacttacggcatgtacaatgaggtgacatcagtttttcttagcaatgtcacataggataattgatgacgtggaaaaaaaaaatgaaaaagcttgagccttctcttaattgagagatgatcttttcacaagaatgataagccaaaattgtcattgtactagatttcatctttcttaatatttacttatttaattttattcatataaacattaattgtaagatatgtactaaaagataacctattgtacaacatgttttgttgtttttctaaatgacatgaaacactgagagggtccaatctcataaaccattgtacatgcccttattgtccatttgccaccgtttatgtttaggatcatagatgtgagctgatgagagccattggaactgcttgtggaatgtgatatatactagcccggtgggcaatatacgacgacgttttaatggtaatataaatatggtgggtcgttgtctcattgttttaagagctttgctttgatgcaccccctacaaaagtttttatggatcttaaaattaggttgagaaagagaatttggtacttaattcaattgaagaataaatgcgaatcttatccaaagagcatgttcccacggggcacccaccttcaataccctccacacaacatccaagtggatctcattgatcgacagcagtctatttgtctcaaggcaaactcgttgacatgtcaattcttcgtcttcgatcctgtgagaccgacctctctaattacgagtctctcgccctcaagggtcaaccagccaagtctcctgcccccccatcaccgcacactacaatgacatcacacgtgtgatcgatggttttccacccatctcgcgattcttttgtctttactatgatattttctcctatccaaatcacttacacttattatggatcggaatgagtagtattttttctctttttttgttgtgtgtgtgtggtggggtgggcgggggggggggggggttagttcttctttcatacttttgaaacaagggtgaaataaatcaaaactctttgatattcatgggtccaaggaaatgatcaagtgatcaaccgtactgctttctttcatattagttgcataaataatccttacaagttttcttggatacttttttatattcatgggtccaaggaaatgatcaagtgatcaactgtactgctttcgtttcatattacttttagagtgtaaatcaatcattaatcgttgtgctacttttctagacaaacaatttaaatggtatcattctattggattagagagatgaggaataagtaaagattggagaaagattaaatgcctgatgtaataaatttatgaaatatgaagagggagactaagtggtattttgtccatttgacttattttatctctatgaagttgcatgtagaactaatttgagacggaatgagtattatttagagcatatttcattaacccctatcatgacctaaatctctagcattacagctaatacctgacatgaaaaactatttcctttttctacctttcttacgcctaaccttgggttcagaactaacaataacacagccagtgaaacttcttctattattttaccactaaaattaagggttgcttcaaatagatcagcaatgtctccatccatgatcatcctccgaggcagataacaaattaaccctgcacaagcatcaagatcaaaagtatatgtttttttaatgaagcgtggatccatgtcattatctttttaatactagataaggatgaagcagctctaccttgttcaagatctttgataactttaagattgttatcaacagattcatatcgttccttatatctttatcttctataaaagactcagctggtgggtggcttcggactgcatttgcccgtgcgccgctacggcacaccttacattgtgatggaacataaaactctgtgtttgatttttgtcactactttaatagtccggatgatagggaattggggattagagaatggaggcggctgctgcaggtcgattgggggaggagtcctgcaaaagaaagaagataccggaggagattggagttcgaagcaatagaaaaatgtgaggtcactgtattcggacggacccatttgtcagttgccggtgctcaaggaggagaggcatgggaggtgaattgacgactactaagtgaaaacattgtaactagaaaagaaggaaatatttgacacaaatcattacaatgagaacaaatatggattatatgatctatgagaacaaatatcactactacaaaaacggcgaccagtaacggtcaaaacaggtacatcagtggcgggcgtccttcttgaccgacattgatagcattttgagaatttttttaaaaagcaggcccgtagcctgcaaaattttcacaaatcatggatacagagatcacaaatcacaaatcaatgaatcacggagacacaaaatcacagatcaacgaatcacggatacacaaaatcacagattacaaatagtctcatgggcgttgccgtcctcggctccacggcggcatcgggcttatctccatggcggcgctgatgtgctgcaccgcaagagagatggagaggcggatcccgaggtggcggggttggggcgaccggatctggcgggaggtcgagctcgcggaggtggggaaggcgacgggctcgatctggacatggagagaaagagagatggagagtgagagaaccgagagggagagacatatcataccggaggcggggcgaggctcggggcgagtgtggccggcggcggggcgagcggggccagggcaggggtcggggtcagggcgggatccggcggcggccagggtcggggccgtttgcgtgcatcgtcgccagggtccggcggcggatccagtggtggccggggttgaggtcgccggatccggtggtggaggcggcggccgctgctccttgtgaagtgcatgttgcccacgtgtggttttggtaattaatgataatttttatggactaatgttttagttgagatataattgaaggaatgttttataggcaatgaatgaagaccacttggttaattcaatgataaatatcatgaagataaagatatacattgagttgttgacaattggatgtgtggttttggtatccgatgacaatctttttgcataagttgtttgcattgagctttaattcaaggaatgctagtaagaaaagtatattgaattgaaggcatgaagttattggatttcaatgagtgaatcaaatattaccaagaagaagaaagtgaagttcccgtgaaggattaatatcttgagagaatggttacaagataaggtttcaacatatggtttcatgataaggttatgttgagctcatgagttgagtcatagttaaccaagtcatggagcaagtaatcgagtgaagaatccatttggtgtctcaagattttgtgttagaagatgaagaggactaacgtgatattcatggtatcataaagatggagtaaagcaaatatgaaggttgaccaagaagaagtgcaaagattggattcaagtgaaactcatggatttggatcgaagattgcatatagcccatgagagatgagatcaagtggtgatgtttcatcaaggttgagaagagcaaggccaagaaaagcactccgtcgattatatacatgaatcatatggtaagcaattgtatagtgcacttatggactaacccatattatgtctatgttatttttggttgaggtttaggtgatacatatgagtgagctttgaagaaacaatcttatatagcccatatggagacggtcatcaagattgacaaagggcaagctcaagataagcatcccgagaagatacatgcttaaagcttgccatgcatttggtgataatggagatgtgaagatgagcttaaagtgaaggtctcccacattggagtataggggagcaaattgacaatcttcaccaagtgaccgtgatgaagtgaagtgttccatgagacaagcacgaacgcctacatcaacctaaagtggattgctcaaggcaaaggtatattctatctaggtttttctagttttaccggtctcaaggagtttggtgggagatcggtttattggttcgatagccattctatcaagaggggctttcgagtacgttgcttcaactcgtcgtgcgtagagtgctcaaacctttgtatattttgcatcatctcttttggttgatctttgttgtatttctgcgtgagttcatagatctcgttgttatcttcgaaacaagtccaagttcatcgaaatcggagttcgtttgcaaaagttatcgccgttttcgtgtgtgttgtgctgcagttttgggcagcccggatttaaatccggaatctccgggattgcctccgggtgtgtccagtagcttcgggtttgtccggaatgaatcccgaagcctccgagaatgcctcctggtcgcaaaatctgtgtccaacgggcagattttggggcccctataaacaggggtgttcttccccatcgggtcaagggttccaagagccgaaaatccccattctttgagagctttctccacctcccgcaagccccaaatcttccataaaattgaagggagtttgtagatctatttggagggttcatttgttgagttcctcctttgttcctcctctctaatttctccaatccatttgttgatttgggtgagatttgggagagagggatttgagcatttcttgtgttcttgctttgcatttggtgcattgttttgagctctccaccttgattagttcgagtgagagcccgtgagcttgttactcttggaggttctcctcttagacggcttggtggttgttgccccggtgacctcttcgtggagattgtgaagaggcacaaggttctcctttgtggtgctttgtgaattggttatggagcttgccatctccggagtggaggaataaactagccatcttagtgattgaactcctactttggtgtgggaggctcaagaagttgggtgtgcactttcacggctattcgggttacctcttgtggtgcccgcacctctccaacggtgattagcttcttaggaagtgaacatcgggataaatcaccgtttccgcgtgcctcgggtattactaaaccgagttcattcacttgtgttttaatttgtgatagccatcgtgcttgaagtcatatattatcttatatgtgctatgtgccatgtcctatcttatatatcttgtgctagcttattgattaatataagtgctcatcttgttattgcttaagttgttggtgcactatagttgagcctagcatattcaggatttgtgcttgaaaatatccaactagtttaaatccacatttaggttatatagagccaaatccgtaaaagtttttaaagcgcctattcaccccccctctaggcgacatcgaggtcttttcagctagtgtggagaaaggggagaggggagcttggacacccgcggctagaggaaaagggagagagaaggccaggggatcggaagggaggtagatcgggagaaaatactgggaggaggatgggaagagaggtgggccctagatccgatgcgttctttgctcggccaatagggtaagagcacatggatctgtggttattagcaatgaaaaatcctgagagcattagtggcgggcccaaagataacgaccgccgctgatggtcccaaatatgaataataacatataaaaaatggtaactcatattttttgaacctaaaatttctaaatctctttgactatattgcttgacatgacaagatgcacttatatgcgaaacatgaatatattatcatgaaatatggcatatgtggacaaaagtttgatcatctggcttaaaacctaaagttcaactgtgggaaaagacaagatgtgaagattttggggcccctataaacaggggtcatttttaaaatgttaccatctgatgttattgttccgctatgttaagcaagaaaaaaacaagacttcaataaaaagaatcacatttttttgattttttatgaattagttatgattttttcaatcttcaggggtcatcagtgtcgggctttgcatcaaggcccgccactgatgcgtgtttttgtgatttttgcaatttttcatatttggccgttagtgacgggctctctgtgcgcgtcactgatgagggttcattagtgacgggcgtggtacgcccgccactgctgaggcgtcatcagtgacgggtgttatgcgcccgtcactgatgaacttcatcagtgacggacagggaagccctgtcactgatgacccgtcacttatgttgtgttttgtaatagtatatgaattatatgatcgaagatataataatagataaccctacgtcattttctttaaacaagcatacctttttgtccgtagcaacggatgtgcattcattttattttgtttgaacaagaggcagcgaaacctacaaagcatgttctccaaccggcgttcgtaatcttaaaagcaaatacacatataagtccagaaacactttgggttatcagatcaaacagcctgacaaccgataaagactagcactgaatctacgtactgaatctaaagcagatataaaagaggttccgatcatgatcaaactgtgttatcttccagcctccctcaaattgttcaaactccaacggaatcttctgttaataatctcctttcaccaccaacttgcagcatctttgttcccatctctggtttctccctgacgtcagacctaagcatacccgcccaatatgcaatccaatgacaaacgagaaaaactaaattagtcaacgcacgtgcattgtgctagctagtctacatatatagattgatttctccttttcgaatttgcgtttcctgatggatttgagtgtaacgtgtgactcaccagctgcctcgacgaacacggcgaagaaggcaatgatcgatgtcacgccctctgaacgtacacgcgacgttgcatccatgtggaccaacaatctcttacacattcccgatttcccgttcaccacgctccaagctggatttttgcgagaccatatatgttgccatctacgactagtctgacttggatggatgcctcgcgtgctttctgaaagataacaggagcacctccatttccgagtaaacgtgtactccttccgtttcataattcttgtctcaaatttgtcaaaaaatggatgtatctatttgtaaaaaacgtctagatacatgtaatatttcgacaagagttatgaaacggagcgagtaatgtttaaatcgaagattgctagtctgatggagagaatcacagtctaagaattttacgtgaaataatctaaattaacctaagataagattaaaaaaaacataacctggactggaggcctctaattaataaactagcaatggatctttttcttttgctggcagtatatacttgcaaaacctggcataacctgcagaaatatgtattcgagaggccagagtgtcgtttcgaagaggaaaaaaagaacacattcatcgatcacagtggcaagtttggggtcagggcaaggagaaaaaaatatattgttttaaaagttgaaagacagaaatatacgaatttaggtaagagacaaaatagaatttcatgacaagctgaacgatgaaaaagtatctttctctagaaatctatgaacagtaatgtgaataattttatcctattttcacatgggagcgcacagagagcgaatgttcgcttcttagccctgccacgcaatgggttaaagttgacaccaccacaacattacgtggattcaatgatacccagatttaatattcctttttcgggagatttggaaggtcttgacttttcttatccatgaggatagcgatttgccgcggactaaatttgctacaatcacagaactacaattgccacttatgcagggcaagttgccaccgtggcatgcatttggcgcaatcgcagtcacgtttcctgatgggacgaacaacggagctttcgctccaggagacgaaagggcgaaactttgctccttacaatttcatatatcttttgtcacattacctactatttgtcatgattatttatttatttttcattaactatgtgccacatgtactaaacgctaatgtgaacaattaagagaaaacgagatcagggccaaaaagagtaacgggaaataccacatgtatgattgactcatgactgtacctttacttgtttgccacaaaaataattattggctagtgaatataaatataaatatataactggtgctcaggaatctatttgtcacaatctggatgcaaaaccgtgatgcgcgactcctcgtcttcttccccttgtttagaaaacaaaatatgggttttctctagtcccatttaaaacttcggagtataaatattgatgctcatgaatatatttgtcacaatctggatgccgtcttcttcccttgtttagaaaaaaaatatgggttttctccagcccagtttaaaagtttggagtaacgtgctatcccgagaggaaaatgcatgtcaggacgcaaactttaaaagcaggacgttaaacttggcagactggttcattttagtccaaatcgattcaagcttaattcagccccgctggtagctgatgtggacggcatggccaacttatcaaggtccttttcgcaaattttcgggcgacaaaatcttatgtttaacccctgaaagagttagctctcgaacccgcttcgcccgacatcggcggcgtccacgagaacaatgaaggccaagggaatgggggcagcgacatgaatggaggcggcgactgctacggcgaagtagcgggtgacgattttggaaagaaaggattggagaaaaaatggggaatttggcactaaggttggacgttgattcaggattttgagggatttggctttgtcgaccgcgggttcgagacctaactctcccgagggattaaacgaaaaatttcgtcacccgatgtcagctgctagtgtggccgaattaagcctgaattcattgattcggactaaactgaaccggtctgccaagtttaaggtcccgtttttcaagtttgtaagttaatggatgaaagtttacatgcctgccaagcttcctcctaacccgatgaaagcaatgaatccagctaataaccttatttgccaatacaaggaatcaaagcattttctctccaaagtttaggtaagcacgtgatctaggacatgagctaattgctctgcggtagttattattggtgcaggtcctcgacggtccaggtcccaaagcaaggtttcagaaccaggcgatgcgcaacagtacattcgctcctcttgcgcttcatcggtccagtgtttcagacattctcagttttggaaaggacttatgcggccggttaatataaggatgattttgtttaggtggtatgtttgtcctagagggccaacattcgtttatgggaagatactttcctaggagaatcgcttcttgcttatcaatatccatcattatatcggattgtgcagtgaaaacacgtttttgttgcaacaaccttgacgtcggttcccctaaatataaatttcagcagaacttaattggtgataagtggacgagatgattgcacttggtccagcgcctaatgatggttcaactctgcagaacccgatcgtttttcttggagtttatcctcctcgggtaattttttaagattttggagtttgtttggatgcccaaataacaattttttaattaaactatatttgaaattttcaaatatagtaaacctacttaaaaatccatggaaattttatttgagagttggatatgtgaggacactctataaacttttgggcattttccaaaattttaaatgtgcagtaggattttattttatccatatttaaattcaattacatatttaaaatagaattttcaaacttttcagacttccccaaaaggagatgaaagttctaagttaggtggaaaaaatatttcaagcctacacttacggtttcataagtttttgaatttgtttggtcctaaaaacaaaaccacatctttaacgaaaaacgaaaacacaaactaaaaaggggtgcacacaagcttggccatggtgtcccgtgttcgatccaattgacaacagtatcatcattttgtgacataagtcgcctttaccatcaatcagcacgcaagtaatgtcacgctagccaagttgcggtgcggagccggccgtcgcaacgtttccaaatgttgccatcggctttccagcagagcagcatgctactcaagcacgccatcacttccactttcctgtaaattgtgcatcgtgctcagccctgccctccctctcccgcctcgggttatcggaattctccaccgcgtcatcatgatatttctgcagctctggccaacaaattaaacatagtattagaaaaaaaaa

SEQ ID NO: 1969 - DNA, 3197 bp, Brachypodium distachyon
  Intron number 1 from transcript Bradi1g70300.2 (locus Brad i1g70300) derived from phytozome v7.0 (chr-ID Bd1; pos 686 88813 to 68692009 reverse strand)
ggatagagtggttggttggtggacggaggggaaaggtgggggtctctgcttccttctccgtactcttcttcagaatggcatcttttctcgtagatgtgaggattgggatctttgcctctaatttctagcctaggctcgtgctggtacttatccggttggctaattcggtctgcaattgccctagcgaatgctgcccaagttgttggattcgaacagttcgggggaatttagcgtcgctgcgtcatttcactagttaaatcttgcatgatttttgccatctcatagcaatcctcattgtttttgctcacacacaaatggttgtctgctagtctgcacgcagagcgaacacagctttggatagtgattttgcttttctgttctaggtaggaaggatggccgtgaggcttcttcttctactacttgcgcttgcttgtctacatgctccttggtcggcttcggctcagcagccggaggaagcgacggtcatagttaaaggatcaaacagaattgctgaaaccgatgagaattacgtgtgtgctacgattgactggtggccgccagagaaatgtaactacaatcagtgtccatggggtcaatcctcgattctaaatttggtatgcggttatgttcttgtcttgttaccaataatagggtgttattgcaaattgtggttcatggacttacttttcttgtgccggtgtttccaccaactgcttcattcaggatttggatcacccttttcttgctcaagccattcaaggtatgaatacttggtcttcatttagtaggtgcctaggttgcacggatacggcgatacggatacggcgataccgctgttttttaaaaaccctgatacggggatacgtttgtgtatatatattagaaatataaataatatatataaattagtgatttttatatgaggacgagaagttgagaagtactgtaggaatataggaataccgagacatggttgttggtagaaaatcttgatagtcgcagcagtgcaccttttagcctcatctccacctaattgccaacagttcacaatcagttcacctaggttcaatcttgaagtggagcaaaattcagagaattagagaatagaggagacagagaagaaggaaggaacagagaaggggaagccaggagcccaggagaagaaggaaggaacagagaaggccagaaggggaagccaggaaggagaaagctgacttatgactgctctggtcgagtgctcggcggtgatggcgagggagcagcagggcgggccggcaggggatggcgcacgggcgcagcagcagaggtggcggcggccggcagcggcgatgaacccgcggaggcaacgcagcagcagaggtggcggcgtgtgggactggtgggatgggagagtgggtggggaatggggatagaatgccccaggtttactcattagagcactcccgtgtccaggccagtgtccttcaggtatccgcgatttatcttttattttttttaataaaatgctggatacgtacgggacacgtattttcgagtatccgggcgtatcaccgtatccgggcgtatccgacccccgatacgcccgtaagtgcagtatccgtgcttccgaggtaggtgctgctggttccatataaatcacccttcttagtatgtacagatctatgtaattttgatctattttcagggaaatacctgtgatctaatgccttgctgagatatttttatctcgtgtttcttagtgcaataattttggattgagcattgttgtatgttatatttctgaaaagttggtaagggattgtcgggacctcgtttctcgatggagaagttagtgtaggcaagtgattgatactggaaacataagaaatctgcaaacataagtgctctggtgcagtggtttttttaggataaaaacatgggtgctatattaacttgaaaaagttgggcagtttagtacatctacttgctaaatgtagcaaatacattttagtacatccgaggtcaaatcatgggactagccttttaaccatgctaatcccatgatgtagctccacactacatggaataaaaaaataaaggaaagtctgcgccttctcgtggacctcgatgcagaacaaggaaatccccaaatcaaaaccctaaattaactacacctatgatacacaacacaattggacctaagaagatgaaattgaccgaagacagtagcaaaaacgaccagtgcgtgtcagatcatcgagtccatcctccaaaacccaaagcctccatcggagataacgaggacttaccgtaatctggggtattgcacgccactctatgccaagattctttggcggagctggtcatctttgtggatctcgaactgcaaccgctgacgagctcgctgcagccgctccagctcaatcgcctccctcgtcgcccttaatcctcccgtgagtgcttggtgatagtaagggtgtacataattgggaaagagaagagcacaggggtccttttgcaaaaaaaagaaaaagaaaaaaagaggccctgccgacccggctgcgtgcccaggagtccacgtcagcattgttaacaggctaatccaacaatttgacctcggatgcacataaatggcaagctataaacatgtttgctacagtttgcgagtagatgcactaaactgcacaactttgtcaagttaataacactgcccatgtttttacctttttttagattagttaaaatgtaaaagaatataactcttaattctttagccttctggggactgggcttgtaggcagaaagaatgtgtattgttcatagtttgcccatctactatgaacattttatccaaaggaagttcttttctctttgtgatgatgttctcatttgttacaacctctgatgtactccctccgatcctaaattcttgtctcaaatttgcccaaatatggatgtatctattcttaaaaagtgtctagatacatgtaatatttcgacaacaatttaggatcggagggagtatcaagtaccacagtatagttaaggcaaatcctccaaattctgacatatatctagttgtctagttgaagtcatatcgttggaatcgaattatttttaattgcagaactgtttggttggtttgctgaatatcttaaaagatcttccttgaatttgctgcagcatttgataatttgaggattagactgggaggctct

SEQ ID NO: 1970 - DNA, 681 bp, Brachypodium distachyon
  Intron number 18 from transcript Bradi3g59250.1 (locus Bra di3g59250) derived from phytozome v7.0 (chr-ID Bd3; pos 58 474886 to 58475566 reverse strand)
ttatcagcataaccggttctacactaacatcaaaggttatttagttgacttgcttctatttttgtctcaattattgcagcgaatctcgaaaagataatgtgcactacggtctacatgttagtgggtaaactacaaagacctaacatgaagtctgaacaaatttcagagacctaattacttcatggaagttaccataattggacttttaactttgttggatcagcatgaatacttgagaatcgaaattcatagtgttagagaagttcaaagataactttaatattcttctaattcttacaagccatgtcaaagttttgaaattttgactgaaggtatatggccaaaacttaacttatttgtggactggaggcagtactttgtagtgctctttttgagcatgggatgacacaggatgacagcatatcattgtttaatttaatacagtatatgatattaatagatcattggtagatcgaacttgtaatagtgtcatgttcccgtaatgtgctaaattgtgagatttgactttacatgctgcatcttgcaacaataaacaaagaaagaatttgcatgatcccttgaaagatgggatgatccaccttcactatcgcacacagatgcaagcctatttcctggccaaacaccttatttgttctattttcttcaaacagtggttcggag

SEQ ID NO: 1971 - DNA, 1836 bp, Brachypodium distachyon
  Intron number 3 from transcript Bradi1g64600.1 (locus Brad i1g64600) derived from phytozome v7.0 (chr-ID Bd1; pos 637 66247 to 63768082 reverse strand)
ttgacaagattttgattcgcatcaaacagtttcaggtttgttctcagttctcttcgcgatgttcatggtgtgctgcttgtaatcatgtataaattttttgtatacatacccgcaaaaaaattgaattttttgtgtgcatgttgttttctggggccatgttcatcggctttatgcggaggcatcacgaaacattgcaggttcatattggtgtcatgatctatggtagatcaattgttatttttattaggctaggtacaccacctcgatatgtaggaaagctaactgaaatgctaagctattcctacttgctagtgatttttccagtaatgctcacatagggacaatggcttcgcatcttcagaagagaacttttctagtccctcaagagggaggggagaaggtacctgatttcatgcatttggtatctgtaccttgtccctactgcttaacagggtcgtacccacgaaattagaggcccggtgtggaatccaaaattaggccgtaaatacaacaaaagtcaaaaactatttttttaatcgtatccactatattttttctaaattacatcttatcggaaatacaaatattgaaatctgaactactatattctttaggacaaatccttctagttagaccccaagtacaaaaaaaaagaatcaggaaaacaagtttttttaatcaaaattggaacatatatttttcagcagaaatccttgtaattagtcctaagtacaacaaaagtgagttaggaaaacaagttttcttatcattccattaatgaaactgttaaaagaacttacatctttctggcgtggcttgatgcaacagatattcttcaattagcttttcataggtaactttctccaaaacaagattttcaatcgctagaatgtaactggggcttcatctattttaatttaggaaaaacaaatctctctgctgatgcaaccatcactggaatagttaacaaaatttctaatatgcaaatttttttcatcaggaaacacatgtagttgtttgaaaaaaattagcaaaaaatccaatatttttccttggaatgaaatctgggtgtagcttgacctttgtgtataactcattagatgagaatttgaaagtggcgcgtgcctatttattatcaacaacagatttattttggggaaatggcaaagaaaccaatcaaccagactagctagacgagggtatcaagagagttcagaagagtaatggagtatagcctgcgcttgggagaggaactgggccaagtcgcacacagttggaagagaagaaggaagtgtagatggagagaatgaaaggaggtgtgcgtgatacagaatctgtactaacgagactggttcggtgtgcagaatccaatgtactagtaaagacttttcttcattgcgtagtgcatgagtactgactaaatactggtaattgataaatgatatgtagcagcattggataataaaatgggggccctgtgtaggcacacactctgcacaggtccctggtatggtgggcctgttgcttaagctttgccagaaatagaactttttctgaggcagttctttagggcctctttgattcataggattggagaaatttcctctacgctacatgtaactcaaatatttcttcttgtgattgatcaacttatcatatgttctcatattcttacaagtgataactgtgtaagtcatgccgctttgtagataccggcacttgatttgtgcctattctgataactcttctgtggtgcctcactgtatgacattctttgtttaacattaacctaattcttattgttccaggtgtctctggttttgctggcgtcaaaat

SEQ ID NO: 1972 - DNA, 1774 bp, Brachypodium distachyon
  Intron number 2 from transcript Bradi1g47510.1 (locus Brad i1g47510) derived from phytozome v7.0 (chr-ID Bd1; pos 460 55831 to 46057604)
aggcttaaagtgtaaggccatgaatatatttttcaacttgttttcatgggaaatataatactccctctgacccatattacttgtctcagatttagtacaaagttgtactaaatcagtgacaagtaatccggctggagtgagtagcagttttagctgtattatttgaatcttacctgttcatattaagtttgtgtagagcttagttccttttaagaagcttttgtttctttctcatttccctgttaacaatattcgaaatactttatgattgatgtcattcttgttttattttccaaatccaagggaagtccagtgcacacctaaagcataaatgaacattctattggtgacagttattgtattgtagtgtacctggctgcattccatacccttggctaccccttcgcggacagaacattaggaccctttgtagtttgaaaccaaatgctgcctcagtttttgcacccctcgagacaagtttgaccaagttaggctagtgtttcgtttatcgccacagcttaggcatgctaaacttttttttcagctgggtctcaaatgacatagacatatgctctgtcgcaaggtatatttaggcaggctaagatctggtactccctccgatccatattacttgtcaaaatattacatgtatttagacgctttttaaacatacatacatccatatttgggcgaatttgagacaagtaatatggatcggagggagtaccatttttcactgagacaagcaaaaatatctcacatgatcaggcattctttggatgtgaatcaagcaggccttttgtggaaaaacaaacactgtgaggaacctttgtaatgatattatggatgcaaatgtacttagaagattactgacattacctttggtgattcaaggaatagggtgtgtaggtttcaaagaaaagtagaatggccttttagttgtaggttgccaagcatgccaactgatcaagtgtcagtttaatcattcgcctgtccagatttgcttgtcttgtttttcctggtatttacttgattatattgaacaactgttgttatttaatcaagcaacatctgtactatattagatatttatgattgatgacctgccgagtttttcttctgcctaagcattcctgagcacttctatgctttagatgtttagtttgttcattgaattttagccatactccatgtagattgtgagctttgtgttaactttgttttctatgataacacctagagatgatcttgtagtaatattgattcaataatttgatggcaatgctgtcaattatgaagccatggctttttgtgttctgctgagaaatatggctgcacatgcctgtgaactcagtgaaatttatgtttgaaaagttgctagatatgcatgtgaccacataactcctgttcatttatccccattaaaacaggtttatgttttcttcgtaagcacatggctttgtcaggaataacttaacatatggccttggaagggtcacttgttcttgtcgggcatgcaacaaccggtgatgaaatccttgttttaagtagaacaggaaatacacaactctgtttagtataacttaggcctttatgtgtccttagaacaattgtagcactaatgtttatggagcaataaagatccctttatatcactgcatgaactatgctcttctggcatgggatagttctttatagtaattgttttccatcttgtgatgaatggctttataatgtaggcctcaagtgacaattgctacagctatagtattct

SEQ ID NO: 1973 - DNA, 2244 bp, Brachypodium distachyon
  Intron number 19 from transcript Bradi3g17760.2 (locus Bra di3g17760) derived from phytozome v7.0 (chr-ID Bd3; pos 16 101474 to 16103717 reverse strand)
agaggaaagaatcgcagagctcaaatcccagaagagctaaacagtgtcgatctactgtaggtctgtagcgatgaatggtgattgagacgacaatgtacagaataacttggaacagttagatgacatcatattgcaataaaagcctgaacctttttctctacttatgtgcataattgcatttcttatttactctggccggtcataaaacagtggtaaacccttgatttgttttttattctgatgtctcgatttcagaaaataatagttgtgcctgaatccaacacaaggtagtctgcaaagtcagcagaataactttttttttatcgaacatgccgatcgacgtgtcattttcattgagaagaaagtgcaagaagcacaagtacagcgagacaacaaaatgggacccaacggatccccaaaacaaagaaaagagaagaaagaaaacaaaggccaaaggctactatacaggggtagaaattatcaccgagtccccactattaaggggtagaaatcagcaccgagtccgggagacgcgcgtgtagggggaggcgatcaagtgcccatgcaccggcggcacgccataagtccgcctcgacaaggatatcctcggcaagctgagcccctaccggactaacgccctcgaaaatgcacacattccactagttattctgcaaagtaagcagaataactagtggccaaatcaatgtacacaagtagtagatatgcagagcgatatgtaagttttacaaaatgctaaatttaaatctagtggttaggattttagggagggggtgggagtcataagcaggaattgtatgttctggcatgtcaaccttgttgaataattaagtattttcgatgaatatttaattcaaaaaatcatggcataaatcaagtagcatattacatcatgcaaactagacaaactaaacagcaacgcacagcgatcaaactcgtctaattctacagcatgagtaatataactactaaataaaatcaataagaaagaacagattacgtacagtacggtgcccttctcctgagttggttgttccttgttgatgaatttgttgaagtcggtgacgagtctagcggcgtcgatgttcagccagctgcagcagccgacttggcaatctcctgggcagctgccagcgcctgcgcttgcatctgagcagcagcaaccgcctgttgttcaatctgctgctgttggagtagagcagcctgctgctactgagtttggagttgggcaacctgctgctactgagcttgagcggaagcctgagccgcgggatcatggttgttggggacaatgttggccattggtgatggagaaacatggacgtgatgaagcgagcagtcgcgtgagaacgctctccaaaaatcttattgaccgtcttccgggcaggatcacgaaggtcggggttccggaggtctgctctcccggcaagctgtgcacgcagccgacgggatagagtagaagaaggcggcgaacaaagaaagagattggatcatggacgcgacgccggcagatgtctgttcggtttaaaaaaccaaccaacattgatttataaaaccaaaatcgattccgcaatgccaaaaagataagtacgacccgactcgatcccttgctcacctgaataggcgagcgtaggaggagctcgtgtggggatattctcttgctcaccttgttgataggtgggataccaatattttttatatattggtccaactttccttaaattagcaaggtgggaatatttcactttccaacaaacctcagaaatttgagatttttcagaaattaatttcagattggattttgggccctagtcccaaattccaacaaacttatgggaaatcagaacattatacaagctgctgacatgcgaatactggctaataaaaagtcttctgccaccagctgtcaaaaaaagaagtcttctgccaccaaatagcgatagcattctaggcaccctctaccattaatctcaatctcaatctcagggagggagagaaacagagcagctagcgatgcggccaagacatggaggtttggcgttggtttggccttgtggttgcttgagcggccttgtgctgctgctcttcgcgctgtctgctcgagctcagcggcaagcagagacggatccatccgaaggcacttcctacctcttccattcgattcctctgattaacgcgttcaaatgatcagctgcatacatatatacgcagtggccgcgctcaacg

SEQ ID NO: 1974 - DNA, 2497 bp, Brachypodium distachyon
  Intron number 7 from transcript Bradi3g20810.1 (locus Brad i3g20810) derived from phytozome v7.0 (chr-ID Bd3; pos 198 01735 to 19804231)
acgtatgcacatttcctccttcttctttgctataccttcggcttttattttatttaggttgatctgaaactttttccagaaattatccatcgacaggataatcatcttgccattatcaatattagaattcttgaaaacaaaacatctcttttttcagggtaaaaatttcaatagagcaatatcttcgctctcataggatttttttttgacaaaaagagggctctccctccggtttcattaaaggaaatcatatgtcttttacataaatagtcctgtagttaacacagaaacaaaacaagaggattacatcaaaactcggttgaacaacccacactttcacacacaccgttgctccttccagttttgtcaacaagctcttactcctccagcactcacagcgagctcatatcccctcaggcagttaacctcaacatttgtcggcgcccacccttgcgtcctacggaagacctcacccgttgcttgccaaagccgctaagaacagccccgcagtagctcttgggatgatttttcctgcaagccagcccacgagccaatggtcgaacaaataacaaacatcacagcaacagcagtagggtcgtttggccaaatattacgaaagtaagcatcgttttcgtgttttccaaattgaccacagaacagtagacacaccaacaaaaaccgaaacaaattccttcatacagaagcgcagcagcctgaaatccaaagctacaaagcacaactcgccagacacacctagcaagcgagcacgagaagaacaggtgatcaatactctcctttcttgcacagaaaaggcaaagatcattcccctcaccgcccctttccttgagtacaactctagttaaaatgctccccttaccggccaaccataaaaatgccttgatcaacagaagaattttaacacgccaaagaaaataatagtggggaaaggtaactgagatcttttcatactacgagacaaagagcatactgaaaacctcccccttgcatcaagcttccaaaacagtttatccaacagaaacttataaagtgaattgtctcccatctttcttgacagatagagtaacaacactacaaagctctatgaaaaattaaaacgacacttagaatgagaagatacagacaaggtattgatcacgtggaggcctgccccttaactgatatcttccccaaatctgatcatcctcccattctctcaaacaactacagcagctaatgctaacccctttaacatgcatgaattgctcaaaagacaaagcaataattgagaattctggcactttcaatctcaaattccaacatgaaaaatgtatcacctgcctattgcagactgacacagccaaatctaaactaagagcagaaacaacaaaattcggaccacacaaaagagaagaggtacagtatccttaaattcattcgtgatccaacatggaacccagcgaagatcaaagcaacagtaacaacctccaacggatcagacgaaaatctaacagataaaccaacattgaaagtgggaagagacaaacataggaattgattatccggaggctagccccctcagcaatcattttccctaaatctgtccctcttgcctttccagctttccttaataaacatctactacatctaacaaaaaacctctttaccatgcataatttgcttaaaagacagcacacaatgagatgtctagcactttctaactcagattcgaacagaaaatagtatagccttaattgaactaaaggaaaaacgagctcaatcactttgcacaaacaaaactaaactgagagcagaagcaagaaatacagagcacataggaggctgcggcggtcacacacagcagaatcggaggctcgggaagcaggatgaccccgcccccgtcctcctcctccccggtaacgacgcggggcctcctggctctggcccttgccgagaagctcacaccgacctcctcgccggccacaccgacgccctcataggatgctcaaatagtaacagttacaccttcaaactatatatatcacttcttgatttgacacaaataaaaatcaatttatctctaactaaaaattagacgaattagatatagcaaaaccgatataaattacatgatcaaattaattggtagcagtaaattattttatttaagtgtatgatatagtatttcttagtctttagtccgtaacgacacaactagttaagaaaagaaaaacaagccattaagctgtgtgttaattttgttttgagggcaaagctgtgtgttaattgggcttcatggtctgtataggatttacttctgtattttagtgcggcctcattcggcctggcccattaggattgctgacacaaagtgggctagttatgtcgtggacggggaaatttttgatgcaattcagctcgtcagctttctcaattaagtcgtgtacattggtgttgaattgcagggctggggcctgaccgtggcgctggggatccatcc

SEQ ID NO: 1975 - DNA, 1720 bp, Brachypodium distachyon
  Intron number 1 from transcript Bradi5g04330.1 (locus Brad i5g04330) derived from phytozome v7.0 (chr-ID Bd5; pos 551 6452 to 5518171 reverse strand)
tgcccaagagcaagttcaagatcaaggtttgcttttatttccttttgtttcattttgctttctatgtttggtgattgttgtctaacatagtaacatgcatacttatgggtctactgtacgtaatgtagtggttgtagataaaattgtatatcgttggcattggaattatagtattgatgacatgaaggaaaatggaaacgactcttgagtaagaacactgttttaccgtaaatatggagaatctatgggtgtgcaagaacaatatattttccatatacctaataactttaggaatattcctttctggatcactaatttcttaaatgacaggctgaactgcacttcataaaaattcacccacattgcaccaaattttacagctagcatctttatttgaatctggtagagcctgtcaaattgtggaattttcacctgctgaatgtggtgatactttccaatctggttcaaccattcatttcttttacaaatacattgtccacaatttaattttcctcgttttttggtgagcatatgctgatttatgttaaatgtggtgatacgtttgaacctgtcaaactgccatattttttatatatgaatgcataaatctacgatggtttactcaaaatttaaattggggacctggaatctaaaaatgtgtatccttgtgattttatgatgatcaatcttcatatgatctacaaaaattatgttatgtttagccaaacctacagaatagcaagtaaacaaaaatgtagaataaactgttaaaattgcagtaccatggaaattaggtactgacgattaagaaaactttgggtgacctgcaactttgtgacaaggacttgagcatgcaacttgaggtgactgagacaagaaattttcagacaagcatatttttgcagcgcatttatctattgtgtttgtgttgagctataaattaacagaataacttctttttgtatgtgcatgtagtctattatgcatatctcaatgttgacagatagaggtaaacttctgcatctcagtgctggatacttgtcagaaaaaccccatattttgtttcgaagcctagcagctaagaagtgaactattttgagcaattttctggtcatatttgttttgtaggttactttctgccgcagcagttaacttgctcaactttatcaatgaaaaatgtgtggtgcatttgttctgtggcattcgtccattctaatttggatgaaatgaatgcaattcctgaagcattaatcatcaggttaaatcaaagagaatagaaattggcgcttgggttaattattcttataatcatagttgctttggaagctcatatatgttttaattggctagtgcttctactatccttcaaactcagttttactaattttctacactatatgtagtccctccgttccatattaattggcacgttgtactaaatccgtgccaattaatatggaacggagggagtagttgagtggttggtggttgtgaaccagcgcatcgatgtgctttaaattttgtgttttcagttttttcacttcttgcaagatcattgaggaacatccctatcatgatttgaaaggtggttatgccactcttgttgcttacgtacacaatatgtacctttctagagttttttagaaagcataccttttttgttctgagcaagatgttttgtctctttgtttcaggctggcaaaacactaagtgttcggaa

SEQ ID NO: 1976 - DNA, 1307 bp, Brachypodium distachyon
  Intron number 4 from transcript Bradi3g43400.2 (locus Brad i3g43400) derived from phytozome v7.0 (chr-ID Bd3; pos 448 68819 to 44870125)
agtaaggaactaactacacacattgctttgtaatttctttccttctatttctgtatttcagactaattcttgttgtgtcattgatagttatgttcccttttatttgttttatctgtttgattcccattttgtaagtattgttgtcatatgagtatttccttagtcatgatcctgtaattcttttatatttgcatcagtataattgatcctctgatgtattatatgatctgttgcctttttatgttcctgtaatgggccaagagagaggaagggagtgtttccgattaattgttattctgtccttttgtaattatgttacttttattttttatctgtttgatttgcaagtatttttatgatatgagttttctttgttgttctttgcaagtattatgttttataatttgcttcattcagttcagtttgtgtacagtttggctgtaaaatactcttttccttctaattgcaagtcagtgctcctgccaatttctcgaataataagaatgatttgcttcattcaaatgatcctctgatgttttgtttgacttgttgacttttttttaaatgtttaatggatgacgagggagaagcttgaagtgaattgtgttgtgatcaagtcatgtattatatgcccatatttgatatagatgagaggtcatgttataaggttacgtactcatgggagaatttgaacataagggatttttcgttgaactgtgcctactctggtttgccaatatgctgtctatgcgcttgccatcttcgtctgaatatgtgctatcactacggatcgtgctagaaatttttaggaaatgataaaaataatgaatttgacaacaagccaatctataagggcatcccatctgcattggttgtacacgatcgactgctgtgcattatcaacatgctgcatcttgcaggtgactctagtttttttcttttcccaaagttttgactgctttaaaaacattccgaggagtttgactaaagggcgcggtcaaaccttgatgggacagcaaattctgaaatgctgtaaagtcttaagtgtgcattaaggaagtgctaaatgcagcttcaaggacacgatcaaatcacgttttaatcttttatgctttaactgaaaaacttatgaaatgaagtttcgttttgtgttttcttagtgtgctgctgtccttggacaaaactgttgcttcttgtgtttgacctttgaagctctgtattcccttctgtacttctcttgactgatgcatccaatctccatttcttttgaaggttcaaatctgaggaagaccggatacctctatatc

SEQ ID NO: 1977 - DNA, 2927 bp, Brachypodium distachyon
  Intron number 2 from transcript Bradi1g46220.1 (locus Brad i1g46220) derived from phytozome v7.0 (chr-ID Bd1; pos 446 60126 to 44663052 reverse strand)
tcaagctccaccaattcggaatcgaggggcgcaaggtaaccaaacatgaacaatttttgcctcctttttgcgaaattctctactgtttttttttgttaatgacaattcttggataagtaaaaacccagtgcgtggatagacacgattaaacctttcggtaacacaaaaaacttgcttgccaagagccgaggcgttgattatgtcgcgctgtgcctactactcctagtactatacagttggatgatttgggggagaatccaatgcatccctgagtgaattttcctccttatcaattgacttgtgtgcagaaggcacaaccatctcctaccactaataaaactatctggggattttccaaatttcatggcatatcggcagtggtccctttcagcattgttttgatcaatcaagccagctgtgctgctgattttaaacaattgttttttcgatattccaattgttttttattggtgtattcctgtaactccaaggctaccaatgagtgtgcatcatccccttttgtcagagagcatctccattattcgggagttccctttccattttttttgttagtacttcttttcgtcagttccgtttcttgtttccgtgattttttcactatttctgcaaagtaggtaaatcatggactttttttttttgcaaaaatggtacagaacttttcttgtttagacttaagtattgagctaatcgtgcattatgctgtttagattttgtatttcattttgtaagcagctttatggtcccaacaggctaagcaaagtttttgggaattaaaacaacctaatccacaatgggttcagtaagccgccataacggactctacttttttttttttgatatatgaggcgtattggcgttggcaaccaaggtccaagcattaagttctgaagtgtactgatttagctgtctcaggcaagttgcacaaaatgtataaaaatcttaattactcactgaagtgaagaggataaaaagcacaagaaacatgaatgggtctgtagactgtactggtgcctactgcctagggaaaaaaataaacttcttttaacaacaatgggaaaaaacttgatgcatgtcagtatggcacaatgatactagtacaacgtgcatcaacacatttggttgtgccgtgtgttgttgttttgttattggtgagagggatatctccggaggcctagatctgccacagctcatcgagatctgtaaattgccctgttcaccccaattagcagatggaactgagcatggacaaaataaattggattcttcttactgggagcactgactgctaaaaaaagacagaatagatgttatgtctcaggtttgtcggctggatgattggatcactgtcagtgccagtgcacactgtcgagcagcaatggatctgagcattgaaaaccagttttatagatgaaaccttttcattgtttttgttgtttttgtactatcaagacatgtttggctgccatattttttttctaaatttcctgctcaagcagttgggagtcatgtgaccatgtacatcgctagtgctttgcatttgatcttggtgtgatgtaactatctgcatatatcttaatgcaagcataagcacgggtggggctgctcccccatgcgttcttgctggttgcacttatgcataaaagttgcaatacattgtacttttttgtatggaaaattattttagatgaaaaatgtttcctagggctttacttgtggagatttaggtgtcattattttctcagtttatcaatacaaaattgtactccctccggtccatagtaagtgtctcatattttgtaataacttagtacaaaattgtactaaatatgagacacttataatggataggagggagtattatatagttgtcagcaaaacctctagaaactgctattacatttttttttagatatcatagttgaacatttttttgcgggaatattaattgaacattgtccgaactagccaaaaatatattcagccttcgtagatattctaaacgcaatgctaagttttttactagtccattttgtttggaaacctgtaaagattaatcagattgtagtgttctaaaaaacaatttgctttggattgttactatgaattacttctacatgaaaagaaaacgaaattctcaattatttttgtatttcatgtttcaacttcagatgtcatccatgacctaatgcaaaatcgactagattgtcagttatattgaccttttcttttccttttggcctagggtcatagcttgtcctaatccatggtttggtcacagctgactctgcctcaccatttttgcaaatataattaataggggcatcaaatgtagttcttactccaacctgcaagaaaggatacctgatgcatgtggaccaagatggttgacctcattacagaatgctacttcatttttgtgaagaaagtcatgtcatctgatattctaatagatagacagacatagcaaagttgggttttcttcgcaaattaaataggatcccttttatttactgtaaaaaaaaggatcccttttattagtcctacaataaaaaagtgaagaaggaaaactgggcactcacaagtagctcgccaacggacattatatggcagtccatttttctaccattgttcagtttcctcttttgacgcaatgttttgcacacaatattatcatgaaattttctgtgaattagcaagattattcttcagattttaatcacataaattgattttggatagtataattataattcaacacatcaccttacgtgttacaactgttcattatttgcgtctataagcaatctttcttcatctttgcaaaaaaagcaatcttttctgcatccaaagtctgaaaaactgttgctgcaggaaccatttgtcgaaatacctgacgacaaaatccg

SEQ ID NO: 1978 - DNA, 2766 bp, Brachypodium distachyon
  Intron number 1 from transcript Bradi1g10300.1 (locus Brad i1g10300) derived from phytozome v7.0 (chr-ID Bd1; pos 743 2197 to 7434962 reverse strand)
cagttgtgactggggagacactggttcctcgacaggttagtctggaattagtatgtcttggaaatatgctatgatgatatgtgtgacaactcaggagctgactagcttcaaactttcaacatgacttggtcacaatatgatgtgtagtccatttgcaacagtagattttcctggtttttcgacttgatttgctggagtggtcagggtagatattatcatagctaaatcttagcatgttgtttgattcgaacttaactttgccgcagtttttgctatggtttatgaacggaacgctttcatatgtacagttagtgacttaatagtactgacattttcctctattacaacacaaaatatcaacagatgtgctgcagtgtttattgttgagccatgactgcattttggatactgaatactctcactgtctcacacaagggccatagtttccaatttccatggccccgatgaattatctgggtttgtttgtgatttactattgggtcaggctacctataggaaattaggatttaggaattaccatattatgtgtaaagttgcggtgtctcctagcacatgacagaacaaagacatcttttgaatgtattaatgagcttgtgctttatttgcattaattgcttgcaccttagttactggattcgctaggacaggcgtcaaactccaatctggttcgagcgaaccagttcggggttcaaattcgtccagttcgatccgaaatcgcagcctgattcgtcgtactcaagtcgaaccagaaaaacggattcaattgctgtaggcctgccggtggtcacggcttccagtagctcggcccttatgttgatggccaacggcaaatcaacagcagcgtggctggctagcgacgaatggagggtggctcacacgtggtggcaggagcaacggcggccacaagtcacctccgtgcagtagctcggcgcatcatctccgtcttgggaatggtggatggtgcggtggcggcgggtggcttctcaggggtcagggctagcagacgcgtgagagaagatcgatttttgttgggctgggctggtctagctggatatagtttggatttaagttccagtgctcaaatacgattggtggtgattgaagtacctgtcttttatagcaaacggaaaacgtaccgggagtttatacgcatctagggaaaaattagaggaatattgtcgataagcatgtgatttgttgatatggaaacatgagtggtggtagagagctgtagatggctgagagttacaagaaaggtcgagagccttgtatttagatagcaagctgaactcagatggaaagctttaacgagaatgattcaagacttgtgtatttcatccccaaaggtgactgaaaagtacttatgtgcatttcagttgggtccaataagatggtcactactaagaggtgaagttgtgattttggaaagtaaatggttaggagttaggactggtggtttgtgtagacattttattttcgggattttctgtttagctttacggtatactaggtgaatactattctgtagtcgtgcagatgtgtattttcagtcacacccagtggagttgccttaataacatttgggccatttggcaaatgttggtcaaatctttcggaacttcttgtaagcctgccaaatccatctaaaattatctattttcaggagctagcaggaccatccaaataagtgatatgggcttttttctaggtcatcctagcagatcttctaaaatctcaagcattattgttttcatgccatataaaccgatatcctaaatccacacgcttggggttttctctcccgaaaacttccaacatgctgagatttatgcatcctttccccctatccctttctacatgtcagcaatctcatcatcctttagaagcctatcaagtgtagtccacgacccttggtaacgtaacctgtaatatattcatggtaagctataatatttagtttgctgaaaatgttacaatgtaggtttgtattcacaagccagattcattgaacttcttgttgaatatgcagtatttgtaactggacattggaaaagaatataaatttgtactgaggcttcctactataatgtcatttactgttgtttttagctagaataagtcaaaatgttcgaatgaagtctcggtttgctgtctgaatagggttcatgttatatttcattctaaagattctgtcctggtagtatcttctccagcagccttcaccttcttagtctgctctatgcatgtttatgtccaagtgtcctaccagagaccgcaattctttggttgtatttcaacatacacaccactgcacacactaatatttattgatttttttccatcttgcatttcaatttttgccatgctcattatggccagccactacgcttttgagttcagcctacttcctcggaaagtgggcaggctccaaattatttcaccgaatgtttttcaattgttcaagcggatctttgagttcatatttgccttcgtagttgcatgtgcagtgaggagtttaaagtgatgattttccacctttgtatttgaatgtggtatttttagtgactcaatcaattgtcttgatgtctgttaaaacggaactggcatttctacaggctagagatcctgtagctctctgttaccagatttcctataaaagctctttggttttatgttactggttttttttagtggtatcccactggctttggactcttatgcggcatctctatttctcaggtgagg

SEQ ID NO: 1979 - DNA, 2021 bp, Brachypodium distachyon
  Intron number 1 from transcript Bradi4g32590.1 (locus Brad i4g32590) derived from phytozome v7.0 (chr-ID Bd4; pos 382 36862 to 38238882 reverse strand)
agcagattttggattggcagcacgagttaccagtaaatcttacgcacaattgctgatattttactttgaagctctagatgataagatgagatcttggggatgctctatgttgagggtgactttagtagttactcgttcgaaggaaatggctatctttacgtgcaatttgcagttttgagttgctttattgagaaataaaaactaattagaagtagtaaaagttgaactggaagtccaaccaattggactattcaaggttcgatcgtctgttacaacgattattgttgatggctgtacatagttgatctgcatattttgatatttatctattatcatgttattaggatttagcttaaaaacacatacatctatgatctatcctttaccatgattcctagcatattttgccggtttcccatgtttgtggccatgcgtaattacatatatcagctaatgtagttctaaatgagtcagttggacactgattatactcttaagggctaagggatcaagcaatttttctcgaaacatccaattgcaagaacctatacattctgaaacctgatatatcatttcttacagtcttgagcatttcaaaatttcatggtttgtattatgattgatactgattggtatgttcactcaagtggttaatagcttaaagtgaattgctaaattggtccacttggtatgtgtaactaatagataagaccagctcagttttgcatcaagatttgggctccatcatttctcaagtccttgtttagtctgcactctgcagtgatgaatctttttgctaaatcttgtttaaatctgtactgcatactgatcattgtttttcatggtactgcaaatgaagaaatgttatgcatcataccataaacatatggagtactaaggattagcaagtgcaaatgtgttttggagtcatgaatcggttgcaagtggttatccatggcattacttctttctatccaggagaatcgaagcctggtgctagttgatacttggtcttttttttgtgtgtggtagcgtgcaactaattttggttatttgcatgcaatttggaagttaagaatctacaatggacaatttcatccttgcattgatattatattttttgtggcattctcctacaagtacctgttatgacaagtctgagggcatagtgttcttgagcataccaaacggtcagtgtcatgtttttaatatggtagaatatggtgtgatgcctgtctaaatggagttgtatggtctgtgagttggagttgtcagcatggctgcaggggcagtggttctttaaaacagcggcttaagttctgtaaggtaacagtaacatttagattttagcaattctgcagtatttaccttttatttcaaatgtctctatcctctgttcaagtctaggtagtgcaaacacaatgttaaaagcaatgctgtgtgacactgctttctttgggtgactctcattgattcgttgtagtttcttttgtcacactacaatggcgcatttgttcgtctcaaatgtcactgaaagctccctacaccaagagcacctggcatcaacattgaggactgggacagtagtaactaaccctggaaggcctggtaccgaagctaacccaggaatatggtcctaagtgacaatatttattttatttatatggacttctataatatcaaatcttaaaagtacctaataatctactactaccaccttagcatctataggtgatcctaacgggtggactaaaagtagctaaaatttgtgttgtggagagaggggcagctaatctagatgccaaggcatgcggatacttagatctctaatgccgttttgcttagtctgttatttttgtaacatttggactagggcttgcatctcctgaatagcacaggaccatctattcgggctttgcttgcacaatcatctgtatgaattattagaatctaattttggcttatgtcttctgcctgcaataacaggtcagaaattatctggcattgctgggagcccagct

SEQ ID NO: 1980 - DNA, 2176 bp, Brachypodium distachyon
  Intron number 1 from transcript Bradi3g49630.1 (locus Brad i3g49630) derived from phytozome v7.0 (chr-ID Bd3; pos 509 34362 to 50936537)
ctccaccgtcttctacgacacccctgccactctcggtatggatactcgcgctgcatctttcctgctttagtgattgaattacccgattcgttgacatttgaaaagccctcctgctgcttgatttgcctttggctagcttgtcacttgtcagcctgagctggctttggagttaggaccggtattgtgggcaaggtgctcgcttgattggctttgcggcgcctgcagtagacgcaggatgcagtgaccgttgttaatgggcatcctgaactgaacaagtttggattatcatatacggagtagtattttaatttagggagtgtatttctcagtctaagaaataacaaaaccgtttaatttatcgtacatcccgtttctagttgattggggattggactaggaccttctatactgtaactttgtgttcttgggaacaaatcaccactgttctggaactggagaaagtaacaggattggttgcagtgtcagattagttatagctgtcctcagctaagatgaaatcatgaagatgatcgatctaacaggctattttggtggaattcaaaacttctgaatccacaggagttctgactcatgttctctgtgagcgaaattacaagagatcttttacaataccccgaaataaatataggccgtctatttttcctgatctaatggttgatcttgtccggtactccagtacaagacttgaggagtaccgtctctgtaaattaaggagtaccatgatcttaggggtaaatttgtaatcgtgagtctgtaatttagttgattgggtttaaataaaatggaaagttacacaaagatgaacgatcctcgtagggtatcaataaccttgatccttgaattcactagctgcagcgattaggatgagattcaccaccgcgcagtcaccgccgatgggctcagggagcagctagctaggacgtacgctacttgcatagcctacgttcgagatatccacgattctgcgcctgcatgaagttgtcagtaacgcctcccctggagaggctccgtgaacatgaattactcacaaggtctaaaagcattagatgtctccctgagattgtacaggaaagaatatgcacagattttcatactctaattgattttcgtgagcagaagattgatacgccaattgactacatcccaccccttatggatctagtgggtatcaggattaaatccaaatcaatgcgggagggagaacgcatggcggcgggggaaggcaggactgcaggaggccgccgcgattggagaagaagcagttgcgtgcgattgaccaggaatcgcggagatggagatcaaatttagcccatcactaaaggacgaaattacccctataaatggacggttagatttgttaggtgctccaattgtcattaaggagtactagggtaccgtaaaatttctcaattacaatcacatacataatgctgttgctttgccataatcgggaatttgggatgtcttgttactccatctttggtgtgtaaaaatggtagagaaagttacctttttctatagtcatagatgtcactgacagatttgtaggaccatagctctttgaagacttcattatgctttcttattgaccctctcttttgtgtcttttgatgttaaataaaggtcgcaggcgttattggaagtttaaaggatggtagacatgcatgtcacagtttttatacataatgtattgtttacttattctgttgaaagaaaccgctaatgatataacccaatgtgggtctattcagtttcctcgaaagttggagatcttttctaccaagcaaaattaaacacccccctagtacttgctagtctccattgcagcaggcctcgtcatggactcatgtccaagtacccatcgatgtccaccgccgcatcttctaatcatgacaccgccattacctttacccatggggacgtaatttagttccttttctggatacatgtgcagtaagaacatctcgaaggaccagattcgtttccagacagttacttatcaccatgggtatcagtcgatgtagaggccgggggttatcatccttttagaaaatcaaatttatcaccatgggttatgcacttgtaatttacttttgctcatattgctatgtctgctgcagataaagcagagaggttaatagcagaggctgctggg

SEQ ID NO: 1981 - DNA, 2488 bp, Brachypodium distachyon
  Intron number 1 from transcript Bradi2g11980.2 (locus Brad i2g11980) derived from phytozome v7.0 (chr-ID Bd2; pos 103 09277 to 10311764 reverse strand)
ggaggacgggaggcagcaggtgttcttctggggcggtgagatcggaggtgatggacgtgcttgagtttagttcttcgatagtatttgttttagctttcatttttctcttcatagctctgatttgttggcgtcattagcgtgtgcaactgtcaaaatgaaatgaatcttagaatagtcttcgtgaactttatggattgagatttggttacgctgatacattccttgcttggaaaatgattagacgacttgaactctccgagttttgatttccaaaccatggtctttacgaaccagaggtagattctacttgcttggtgggtgcatgggggtattctatttctatgttgtattggttttagttctttgctggattaaatattacagcagattacttgattcaaaaagactttaattaacatgcatttggttagttgtacatttagtggtttggttgattattgggattgattaatgaacagcctgattggcttgtgttttttttttgtttggcctttgttttgcataatatgctaatgcagtcatatcctataagtgtaaagcaggatataagctatttgatggattgtaagaacggcgaatagggtaaaattagaggcagccagtagatcgttccttacagtgtttggcattatagttaatacttaatacctgggatcttaaccattagaactgtatgttaggggcgagttgtttttgtgacacatggttcttgtactcttaagcttgataatattctaagataaggtacaaatctatcaactatcgtgagaaggtactcatttttctaaaaacacttgttccttctatgctcttagcatcttcttttataggcatgatttttaaggtagcaagtaatttacttatgggactaacaaaccttaagatataactgcaataatttgccttacgtttgtctatagcagatatcttttagagttatgttttccataacacaagtgaaattaagctgaggtcgacactcctgtacttcaaatggagtgatcatattctcccctttcattttggtgtctgttgcgcattctaaaatatttttggcataatgctcggtagctggtattcatttattcactcatgtagtagtgattatacagcataacatacacgatcatggggactaaccgatgattcaatgtaataggcagggctcctgttccttaatgcagtgtcatagttgtttccagaaaaattacttgatgatttggtttagttgttgtactggattattttgtgctaaattaattgggttaacgtcagcattggtagcgcagtttgtaactcggaagtttcaatgccatagttggatcaagccagttttacaatgtatttagttgagattatcgctgaaaattcttggcatggtgtgctttctggaagcatgtttgcactttgtgggttattaacttctgctgacttctataattttaaattagaaagctggtcgttccaaactttgcagtagactttcaattactgagaatgctactccctctgatccatattacttgccgcagctttatttagatacgcatgtatctacacaatgaaacgtgtctggatactgcgtatctagaaaaaattgcgacaagtaatatggatcggaggtagtagttgttttgctatttctttgacatgctggatttagaatgtaaatttagtctagtataaggccttttcaagatcactgaaacagtgtgactgagtatctatagagaaatataaggcttcaccttacagttctcttgttgggtcaattattgttaatggaactagcaaattggaccttggtcattattggctgtcaatccacttgcatgtgaatttcgttgggacatgtaaaaccgttttgaagaaatgatgtagttgcacttaatatcatttcaccatgtaaataaaagctgagctacctgtaagcccaattcggaatacaggaattttgtcactcttgcatgaattgaatttttgtctgcgagactcctgcatttcaaacgtgtcctgaatatttttgaccctgctagcgtgatatgtaataccatagctaagccgcagcatttggcattgatatgtttatattaggatttgaccttctgttgaccatgcagaaggttttggaatttttcagtcgtcctctgggcaaatagtagatgaactgactggaaatcattagtcgctgttatataactatcttgaattttcaccatgtcttggaagatcagtctatttgtgcgcgccgtagataaactgactggaaatcatattaagggctaaaatgggtaatgtcatgatgaaatgcgatgttgatcctggattcatggtgcttgtcttagtgtcgcttgcaaccacctgtgttggaaatgctatattgcattcataccatgctatatttggccatttctgttcttctaaatgctgtacccttttgtattacattgcagattgcatcgctgat

SEQ ID NO: 1982 - DNA, 2456 bp, Brachypodium distachyon
  Intron number 7 from transcript Bradi2g45200.1 (locus Brad i2g45200) derived from phytozome v7.0 (chr-ID Bd2; pos 455 86371 to 45588826)
cggcggcgtaatgccaaacagaacacttgtacttgaggagaccaagtttgtgtcaagttttgaatccgttcattaaactaacagttgatcacttgcgcctttcagttagcattgcctctgaagtgcttgcaagtgcaactagagtatctaactctaatgacttcctgtggtggtttttatttgcaaatgtcattctctgcgtgtcaatgtcttctgtgctattgctgtctgtgctttattctgaaagtgtggacatacctctatggcctatgctttagtactgattatgccacaagcaaacttactttgcagattcttgagacggcaagcaatcaaggtatttgattcgccactttgtgaaagcaaaatttcctttacattaattgcattctgtgttaacgagttcttgcatatctcaaatttggttatctactactccctccccacaatccataataaatgtcgttgatttagtacaacttggtactaaatcaaaaacacttatattggagggagtactgtattctattcttgtaggtgattctttataaataattatcctcttccgttgattctgaaatctgattctctatattgtactgtcgattttaggtgacatggactttacttttgtggacagcctaaaaaatagacaataggatagggagcctgccagagaagtttttgaaccatatttctgaaatacgaccaactataaaaatagcatcaaaggtacatagattttggttcaaaatttgtaggttcttttttctttcgggaaaaatatatattgtaggttcacaaatgatccattgcgattacagaaactgtaaactgtaaatcgtcaacatgccaggaaagaagatcaaattcctcctattctatcatgcagggcccacagtaaggcgtccactaggtctgagcattcggtataaaccaattttatgatcgttagacacgccgcgcttaccacgcatggcacaaaacaaaggcatcaggcctgccatgagcgatacaagcaatagcatgtaggtgaattgaaaatatatgcatgcgtgcatttactttgccaaattgaatctttaaaatgttctaactttcaaatcctttgctcgatttacgatccgtcttcacgattagctttgtctcgacaagatctacaaaactagaccacatattgctatgtttcgggaaaaaaatcgcgttaaaagttgactaccaaaaatatacgaagttgacatcatgttatcaacaaattaccacgagataagttcatacaaaatgtggggataacttgtgaattcaacttaccaaccaataatattgggtatatgaagttgtcaccctaataatgctaagttaacacgtggtaacgtcatacaaaatattttggcaatttatgactgaagttgccaccgtgacaaacgaagttatcattcaataataaatgaagtcactagacggtgataaatgaagttaccatttgtgttaacaatgagttatcacatggtagcttatttcaaaataggatggtgacttcaaacaaaatagggtggtgacttatgaataaagttagcatccaataatttaagaaactgccaccttgttggtaacaagttaccagacttatcacatgacaagttatttcaaaatatgatggtaacttttgcattattgcctggtaacttaagagttcaaaaaagtttgttgaagcatagcaagatgggatatagattcgaagcactcgtcgatacgaagacaacggtgaaaacagattgtgaaacggacatatgaaatgtgctacaaaaaattctaaatcttgaaaaatgaaccagtacaaatgctctcaaatacttactattgcatgatgcacacatgcacaaacacccactgtagtgtgcaaactaacacaaacattgtcacggcaacacatgcatgcgtgtggagaagtgcgcaggagctcacagcgttatgatttgggttttatgattactcatgaaattcattttttataagttcagttaccaaaaggtgttaaccggaattagcatttaaataggcaaaaccaaaaaaattggttaacaacaattttctgtcacgcgaaagcacatcagccacagcgtccgcgtcgctcctggggcggctcgggcgaaaccctagccgccgcccccgacctccccaacgctcctctcccctcgccgtcgccggaggaagccggcgggcaaagcccgtccggcggacggcggcggcggggctctctcgtggttggctggttgcggcaggagatcgaggcgcgtgggcgaggatgcggagcggaggtgcctaggcgtgcggcggtgcgaggagcgggctgtcgggtggcgcctgggcgtgcggcggcggttggcggcacagatccaggcccgcgcggccgcggcgtgctgtttccgggcagcacagcggcggcggccttcggc

SEQ ID NO: 1983 - DNA, 3060 bp, Brachypodium distachyon
  Intron number 1 from transcript Bradi3g19690.1 (locus Brad i3g19690) derived from phytozome v7.0 (chr-ID Bd3; pos 185 72744 to 18575803 reverse strand)
aggtatcaatccgttcctcgtctccgtgactctccttctcgtctcccctcctcacctcacctcctctcccgaaactccctcccacgaagccatggcgtccacctccagatccgagcgttgccccaccgcgtgaaccccatctcggccagatccagggcgaggccggcggcggacgggcgaggtgcgaggcaggcggcggacgggcgaggggcgaggcaggcggcggggaacacagcggagccggcgaaggggaaggcagaggaggggtcagcgaaggggaaggcagaggagggggcagctgaagaaacttgcgatttggagttcctcgatctgaagaaacttgcggtttccgacttggacttggtaaatagcagtactttttggtccatgcttgaatctttgagggagatttctctatgcaccgtcgatctaaaccttttttggtccatgcttgaatctttgagggagaaattttttttgaataacctgttgcgtgtatgcattgtcattttttgatagccatgtatgacttgtagatggtaaagaggatggataggaggcggaatttcctgattaggggagctgcaacgtttgtggttttcgcattggttgcattggtcattcgggatagaataaagaagaggagaccccgggttacctatggacctatttgggaaagagaccaacaaagaatcaattatctgaacaataaaattttcaagtgtgatgtgagatgcagaaatatgttaagggttgaaagagcacccttttttcgattgtgtgaaattttgagagaacgtttgttgctgagagacagtatacatgtatccgtggaggagcaagtagcaatgttcttgaatactattggccataaccttagaaatagggttattggggctaattttgacaggtcaaatgagacggtaagccgctattttagagtagtccttcacgcaataggtgagctacgagctgaatatatcaggccaccttccttggaaactccagtcaaaattgcagggaacccacggtttgacccatattttaaggtattttgagaaacttgtccttccatatttaggtgtgaaattttatggcttataaccctttaaaatatataggattgcattggagcaattgatggtacacatgttcgagcatcagttagtaaagatatggaaccttcctttcgtggtcggaagtctttctactcaaaatgtcatggcagcagtagattttgaccttcggttcacatatgttttggcgggttgggaggggacagcacatgatgtgaccattttagcagatgctagagagcgggagaatggcctgtatgtccctcaaggtaataattttcttaaaacaaatttgcccaatataatttgcatagaattttgtcaccaatttgttttcatgtgttagtaaaattctacctagttgacgctggttatggagccaagcctgggtttttgccaccttttcgtgccatgaggtaccatttgaatgagtgggacagcaatccagtacaaaatgaaaaggaattgttcaaccttaggcactcatctctacgagtgatggtcgaacgtgcctttggaactctcaagagacgatccaaaattcttgatgaggcaaccccattttttcctttcccggttcaagttgacatcgttgtagcttgttgcatccttcataattatgtgctctctcaagggattgaattcgcaccaaatccttcttcttcgtcccgttccctcccgtttggtaccatttattgtggttccagcgccgatttggtaccctcccgctgccgaggttggggagctcgaggtcgggctggacaagggggtcgaggggaggccaggtcgggccttgacgaggagcagacaagggggtcgaggtgaccgcgcggtgtttagggatttaacgagagagagggggtcgggggaaggtggtggggcagataattgagcgagagaggtagaggaattgggggaaggggaggggatttgaggaatcggggaagggaggctctgtcattttttcaggagtcggggacatcttgcttctgttgctgtgctgcgaattggcttgttgctgtttgttgaccattacaacaacacttgaacatgattttaggttgccttaatgatgcggatagtttcacaaactcgttgatccatggaaacagcggcatgtattggagcaagagtcggtttcgtagcccacctgaggagcgaccatcccctcaaaaatttgttggtagttacaagatagtaacaaaatacaggtgagttaaaagtaaggggcaagatttagggaatgatttggaacagagaaatagagaaggaatctttagtgtggttcattgtaaggaactaaggagaagtagataaccaagtttagggaaagggcctgagatgctcttagaatgtgcagatagtatgcgcattgtttgctttagaaaaacaaatgatgtgcatcacttgtgcattatcatttctagttgtcttgttgtaccccctgactgtttgatgccattgatagtcaaaaaggccctgagagagatctttcctatacacagtctgccctatatactactcccttacgttgggaattgggttagtagaaacaggagttaagacatagattgggatgacaaagtagtatagggggtatgttgttttttctttgctcgacaccttgagcaaaggatttcattgctggaccattgtgcatattagttcacaactggatcaccactgattagaaggagagtgacatgtggaattgggtcattacaaaaaggagttaagataatatatttggatgacaaagtaatagagggagtattccttttccttttctcgatgcctcgaccaaaggattacagtgctgaatcattatatagggtttatacttgcccttagacattctcccctagtactaaagcattaaattaaactccactttatacgtatctatcttgctaaagctttatatcctgacatacttttttggtgcccctttgacaattatgctaatattttgaatgaaccagca

SEQ ID NO: 1984 - DNA, 891 bp, Brachypodium distachyon
  Intron number 2 from transcript Bradi5g18200.3 (locus Brad i5g18200) derived from phytozome v7.0 (chr-ID Bd5; pos 212 54292 to 21255182)
tcccgtaagtatagctgctccttgcacgcacctttattttgttctttacgagcacacatagcaaaaaagatgacacactcgaatcagtgattcaggcactgttacaaatttgaaatttccacttcagggcaacatgcaggggcgataatgaaatggcagcaccatgtctcttttctgtcacattattaaatttacctctaatttagcacaaaataagcatggagtaaaaaatgtaaattagttgatgcagtatttattgactcctgagaccatagaattattttgtccacaagtttattttgattgaacttcttaactttgtaccattgcaggctgtgatcaactatggtgcttcatggtatgtaaccctttttttttgtggatggcatgtaactttcttgcctgtgcacatttgttgttcttgacactgagaagattacactaactactagctagcaactacataagggtgttgcataaaattcttgactgcttgataacttgcattgcatactattctgcttatctattttcgggttcagttgagtaatcagccattgttgcagtactatgtccatgttatgtaatgctgcagatttttttactgagattgatatgagccagctctttttacaaagctagattaggtacttttttttttttgaattctgcagaacttatcgtcatgtaccgaattttgtttcattacttgctgtgaaattgagtgaatgcaaacttgcatagcttagcggcccgcctaacacttctgtttggaatttgtgacaacatataggatactgtttcccatgtcctcatattatgtgattagctcaacccatccctgttgattatgcaggtgtggtgtttgcagtcagattcttcgacccttct

SEQ ID NO: 1985 - DNA, 3339 bp, Brachypodium distachyon
  Intron number 1 from transcript Bradi3g18560.1 (locus Brad i3g18560) derived from phytozome v7.0 (chr-ID Bd3; pos 170 42196 to 17045534 reverse strand)
ctggctcgtcgtcttcgggggtggctgcgagggaggtaattgtactcgcgtaacttcagcagtttctttcttgtttggaattgcttgtgttttttctgtaacttgtatcaaaaagaggagtttgatcattgggggtggtaccggaatcaaaacttgctcggactctacaaattatttagagatccttattgtggtctagctatcattcttagtactgtcagaagtcgttaatttaggatgagatcatatggttgctttgattgtgtcagattaagacaacaaattggaagatgatccccatggtagtacgatctatgattttttttttacttcgttggattaataatgacaaaacttcctgcaaaaagagattagtgacaaaacttgtaacaattgttttaaaagagccacactgcagcttagttcagtaaattattatgctggaggaacttcttgaggacttggagagtattacttataacgttttgctatatctaagttgactgatttttagttagagataagttaattcttcaaccgttggatatgatttgtgctttaggatttgaaacggatgatgaaaaaaagaagggcaaaatgagatctagatactaatccaatggctctgattcgtcaacttagatttaagccttttataaatgtagctctgatcaagactatttgacctactgccgtgcttatatagctctgagtagtacagaaataatatgaagtccactaaattctagcttatatagcttgaagccttgaacaaatctaaaacgtataggaattactagaatgtaggggcaaattggttctagtcagccaagttccattggcggttgtaaatccctgagagatgcaagttgcaaaagaagacaaaatcaacaccaaaattagctcctttgtgaatattaccaccctgttccttctttcaaggcattttctccctaaactgagatatagggtctattgctcttgctggtggcagtccatctaggtctgtatgggtggactttgatatgtgcagatcgcttggcacgttggcatggtcgtttcttggtcaaagttcttctacttggcactaagggtgttcaaaaaggttatatataaactatgttacacagtacggggatacgagaaaacggcattttgcaaaaatgctgttacgggaatacggcgaatatatttaattggatttacatcttgcattgtctccacgaccggatggagtagcagctgtggcatatcgtgtaacatgaacccacaaggaaaatttaggattggtatactagttctcctccatatcatcaacaaagttaccgcctatccctttcacagacccaacagcagaagattgggtgtttgaagtatgccagctgttttttagagtatccccgtttttgcatgtatcctgcacgggtatggcaggtttggtccgtatccctgcaacatagcatataaacccgtgaaaaacggcatcatgcagtctagttcagtttcactaattgtaaagactattagagagatcatggcaagttctacctacatgcatcagttagtcagttacagagtagtaggagttgtaacgacgacttctgtcttagcatgagaatagatgtcaaaagtaccctatacaggatatgactacaaaatttaatttttgccctttctaaaattcttaaggttttaacaggtggtgtaccaaagcaatagtcacagacatgctgcaccgaggcgaaaaataaatattgggggcttaaatgaattttaaaagcttgatatgattcattgactgcatgaggccagtccagctaattttattatttcgcttgttttactgattaaatttaattttcgctgcttgctgttttcttcttcatgctagccactgtttatttagatgccaagagcaaaacagagagctccagaaacacatcaaaagaaacagaacaactaaacctaatgacctctttttaattaaatctaaacaccacattatctttgcctatgttggttaatcgccttgtttagtaggttgggccgttggatatgatctccgtaccttggtgtggtaggtctgggaaatgtaagtagtatatttactacccttatgaatatgtaaattagtgttggcagtctgttcaccttccccctccccttacatgttggaccatcttgaaatttggcaaaaacttgtatgccaagcggatatccgctgagcccaaatttggcaattcaaatctgcccaagagtgtggcaacagtggttttatgacttgaggcaatctaatttgttgatctgtagcaaaacacaggtattattatagaatatagttttgattcgagaggataaccttctgtgctcaatatcttttgcaattcatcgatcgcaactcgcaagtgtagtgcttgtgatattgagcaaaactaggtctagcctagcaagtatgcaaaaactgtcatatcacaaataacactttgaaagaggtcttttctcctgttaaataatgtggacgtttctgttcaagacttcaagtattctaatagaagttttcactaaagatgttaattgatgaaacagccgaattttattctgcgattttgtttcaagctaccattctgtcaatacatgtttaacttagtaaaaatggttggtaaatggtactccctccgattcatattagttgtcgaaatattacatgtatctagacgctttttaaggttttagggaaagatacatccatatttgggcaaatgtgagacaattaatatggatcggagggagtacctttaaatctttaatcattagcaatttgaagtttcattggttatgttgtacctattattgtggaattgtctgcttgcattgaattggatacagacaagaaagcatgggcaaaagtaacaggtgctatcacataggcagatgattatacctgatacactagaaatgtcaaagtttaatcgagcaacatttctgttgctggaaatggaacagggtgtgagccttttctctttttttctttttccgttgctcattttgttgatggtgcgagctccccctgggatgagattacatctacacacctctgatcactaaacaaactagtcatattagtgatgcttctgacaaaggtttctatttttagctatgatccattttctttgtggaattatatttgaagtttgcaccttttctgtctctttgtacataaaagaatggttgcattacattaccactctttgtacaaatgtgctatgctttagtttgttcatatccctatcttgtatgctttctgatgttctctgtttctctagttaggtcgccatcttg

SEQ ID NO: 1986 - DNA, 1637 bp, Brachypodium distachyon
  Intron number 3 from transcript Bradi4g19590.1 (locus Brad i4g19590) derived from phytozome v7.0 (chr-ID Bd4; pos 224 12672 to 22414308)
caataaattcacacagtagtaattcgattaatcaggttaggtaactgttagtttcatgtctatctactttgttttgtaaaactcacaggatatatgtaatatactggaaatcagtcgagcgttaagctcttgagatttctgcaactctgagagttggtgttcatttacctaattatcagttgcaagatctacaccgcttgctgagattctatgatgtacaactgctaaaggtcttcacaacgaggaacttagagccaaataccaagaatcaaaacctgcaaagtctcacaatataatactccctccatcacatattaagtgccgaaatattacatgtatctagacgtattttagtatacatatacgtccaattttaaacaaatttgagtcacttaatatgggacggagggagtattaaaggacaactttgttctttgaaaatattttaaataaaatatcttctgaagttgtcaaactataattttgcaccctgcacagaatccaaatttattggctgtatttactatttgggggaattaattgaagtatatgagctttgcattatatatattgaaattgtagtttaagatacattctgcttcttgctgtgtttctcctaaaatttcatctcttcttttagaacaaaatgaggaatcggtatttctctcaaacagaagttctgtagatactgatgtgtatgaatctttaatatagataatataagcaagattttggttgcgaccagtggatttcccatgctgagatggcaggaagtagagggatgaaaagaaaataatcatactttctttattcatatgaaatatgcactctctcttttatagtgtattcttcatacctaaagctagtttctatcccaaaattgtataaaactgactcctttcaaactggaaagtgaacacactaaatccttttaaattaagaaacctaataaatattttcggacacaacctcagttccaaaatatatgttattttataaaaatgctcagtcaaacctttctaactcttagaactaacaagaaattattttccttggttggtgcaaatggtactcagattatcatgaactagttttggggtataatttctttgtaatcttcctctcatatttatacaaagaagcaatggccaaaatttattggagattttccagagtaaaacttcacatatttctttggtgcatctagctgctcctatccatagctgagcaagcatccgtcctttgaaatgctgactcaaaagatgtccacaacagatacatccatccataactgtaaagttcctccagcagtatcatttaaccacctaatttgctttctctagcttaaggcttgatcgagctattctgatgtatatttttctttaacaatgctataggcccatagctgatggtgcagtgggttgcatgttattgacttggttcgtgagactttaatcatttcatattactcaaccaatgtgaagcatgttattaatgttactgaactggtttatcaattttatctttcctatatggtacttcactttctgtagtcctcggtgtaagttcaactcctctaatgctggcttctataattaacagctgcttgggcttgtggagttgaaactaaaggaagc

SEQ ID NO: 1987 - DNA, 2648 bp, Brachypodium distachyon
  Intron number 2 from transcript Bradi1g69040.1 (locus Brad i1g69040) derived from phytozome v7.0 (chr-ID Bd1; pos 674 97805 to 67500452)
acttcccggggacggcctactggaaggccctcaaggtacacacccacacgcacacacatccattccatctgcacacagctaacactgctgattgatagtactgctggtatctagccaaagttgcatgtccctctcggcctccactcgtgcgcacgctcaaattaagatagccccacttttactacatatatgtgtttttttctatgtttccatatataggagccaaaaaagcagctttgtttcataggattggtgttccagttgcaacagaacgaccgtttcataggattggtgttacgattgctacataacgaccgatcgatatatgcaaggtcgttcgagggagatttttattgtaatatcatattcgatccacctatatatgaatatggtatgccttagctaccctgtcaacgttttgtttggtacttaaagtaagaaattaagagggctgctggcctgatcatcggaggggggccgggctacgactaggatatatagctagcgcctagctacaagctatcagctgcgacgacagagtttctccgttccttttttttattttgtagttttgtgtgtagtgtacatatggccaatgcatgcatcgatatatatatatatatatcgatccaggacgcattaatatacatggcagcaccggtgcatgtagtaggggtgtgggtttcgaattgtggatggtccaaggataaaggattggtattgtcgttcacacgtacacgtacggctgcagcaggtccattcaagaccacactggatcttttccattctgctatagccacttcgaccgcaatggctctgctcctctaaatatggaatgtgttatgtaacgtttgcacagaaaaagtttcttatattgacagtcaaataataagtggccaataattggataaggatacgtcattgttgcgtatatggaccttaaaagaacgggattgctattgagaagtcgcatgttttttagttataactaagtcgacgtgtttggctgttggattttaatccaatggcaacacatggaagaagaatagagtggatatggcactcatatcttagtccgacggttctgatgcgtcgactgagatttaagatatttttgcctaaaacagaaactgtttttccaaaaaaacagtgacatacttggttttacattaatttagttcaaaggtgtctgtgtattatctaggtccggcggcgggtgcgtgttttgacactgttttagttagaggagggctaatctttcgatctatgtaaattctctgtttatcaaaattggcaaagagaaaaacaataatttgtatatatatttatgtagtagcgttatacgcggttaactatacggtaggagtagttaacggctagaaaaccatgcatgcacatggacatggtgttacttgtgggacgttgttactaacttgtgagtagatcgctcaaccagcttttctttgcatccaactttgccatcagaggcactgatcatcactcatgggggcataaaatgttgcccgctttttactgcttgtgaggtcacactcaagcgatctttattgattgctcccagatgccgcatgcatgggctttcacacaatctctcacactctttctctcccctacacacggcctgtgctgaacagcatacaattgcaacttgaatttttgacatcttaaaaaaagttaagtgaccaaccttcataatttggcatgattatatgttgggggaatccatcatttatcatgattcaaccgctgaccaactcttgcgccacaaatgtaaccacattaatttcggctggcaagcaattagcaaccctcttaattttgtttaattaatgaagtacatattgagcagtctttttagctgagatcacttcgatcctatatgcctgtttgatcagattgccaataatagaactgttgtaatcaacgttagcatttccttttggaaaaggaggttgtatctgatctgtcctggtgtagcatatgtatatgtgcttgctttatggcatgcttgaagatatttttatttgcacactttttatgtttgttcgagctaccttagaaagtaccccaatgatgaaatataatctaataaaatgattatattgggttttgaggtaaatctatgtccaatcaaaatatttttaaaaatagtgatcaaagtagctttttgaccaaaaccaaaaccaaaacatcgtttttcgaaaaaggaaaggagtgtgtctggttggatggatagccacgaattaacaaataaatgttccacaaataaaaaacatgcaaacctaaaataaaaggtttttttggtttcaagagcgaaaaaaatagagaataattggtgagctagagaagtgccctcttttatttgacggcagctatgttgaaaagatataattttctccaaaacagaaagctatgagccagcctatgacaagacacgatcttagactagtaggcagttaggcaacatcttaacgagagtgacgcgcttgtcgtcctgaacaactaaataactgtgggctgcaataattttattttttgtcccatcctaaaaaattacatcatacaactaattatggactgtgttttaccctgcagtcgcgtgccaccatacttggagtcatagagaggaa

SEQ ID NO: 1988 - DNA, 14040 bp, Brachypodium distachyon
  Intron number 17 from transcript Bradi4g17330.1 (locus Bra di4g17330) derived from phytozome v7.0 (chr-ID Bd4; pos 18 458812 to 18472851)
tgaaggactagttgtaagtaaaaggaaatatcttcttgatcatgttctttggatagaagtcaaaatcacctatttgttactgaaatcttgttagcagcaggagaatgcattacattgttgaatatgattggattgatagcttgataaggacaataagcaaatggcatgaaagtaatatctgtatatatataacctatttctttggtcaactcttgtcatggaggaagcaatttaattttctattaccaaatcctattggtatatatattaagatatatttgcattggcattatagataaaaaaattatattacatttgacgcacatgatgttgtgcagaaatctttactcctataatcaaacaagttggtagtgggggaccgtttgccttgggccataccagccatctgatgtgcttttaacatttgagattagatgggattgcttactgctcacataaatctgtttttgcaaaaacaccataatctaccatgaatttgggcatacaccgagcaacacctcaattcaatgatgttattattcttataaacatacattatcatcattttagtctgtagcaacacatgagtcctgctattattatttaaagcgacttatgtgatgttgacagattgaaggtaaatactatctcaaaattgacccacaaggagaaggagctaggtggcgacgtacattcggtcaggaaatatattcccctttccttcttgctttctcagagcaggtacaatctggaatttttcatattcatgatcggtcaagcgattattctcatattctttttttaactagaagaggttattcttggattgaacattcccctacttgattttacaggatggaggtaattgggtgaattcgcatgttccttcattctcggcaatggagccgacttacagcttacctgataatgttgcattgcttacccttcaggtatgtctttcaatggattttcatacggagtatgtgcttaaaaagttaatatagtcctgattctaaaaagaggtaaatatatttaattatatagatgtgtactgaccaattactacgcggaaggttttcacacattctcatctttagctggacagtatagtactacgtcggaatcaaaactttgatcaacttctttgtatggactgccaagagatactctttgagcagtgtactattttgtattctttatatatgtattgatgcaagctagttttggtatcctgcctggttcgattgttacaacttgcaagtaatatcagtcaattagctacaacaaatggatctctttgatactacttacaagtatatagcttgaaaagctgtgtattttaaatgcatgtgcattgtacaggaactcgaagatggaagtgttctgcttcggttggctcacctatatgaggtcttatactttgatctcttactttctcttgctacaactagacatattctctataagaaattttaagacgcccccaaactatttggatccactcctttcgatccaagggtacaggtagcatagttgtggatatttatcatagaaggaacaatgtatatggaatgaaccaaacaaattgataagatattgctacaaatttccacattggaagcatctgaagaagaaaaaaatggtaatgtgagcttgcaaatggagctaaatttgtgttcagataaaacaagttacatcattgtattgtaaagtgagacaacatatgcttaattatcacctagcggaatttcaacatatactgtaacttacaagacttgtcctgtgcatgtaggctggagagcataaggatctctcagctctggcaagtgtcgacctcaagagggtattccatgataaaaaggttatcttcattaatttgtttaaatttacaattttgtttgaatcttcatgaatattctcaatctctttccaatccgaataatccagattggcaagatcactgaaacaaacctatctgcaaaccaagagcgtgccgccatggagaagaagaggctgaaatggaaggtggaagggcctccctctgaagaaaatgttgtccgtggaagatctgtggatccttccaacctcgtagtcgaactggggccaatggagatccgcacattcgttatcagatttgaccatcgataagaagataaactaatataccaaactttggagctgagcttcttggagagatggaatggcaatgatagctttgtttttcgaaaagaaggtaaaaccccggcctctgcatcggtaggcaaagccaggtagcagtgatagctgatgttatagtgtttctttttactccactgttgcaattttaagcctggctcctctttgtgattagcaataagaaataatgcggccatggtcgtctcaagcatcaccagcttgtgctagtggagagctgcatgttctgacttgcaccactccaataaaaagttcctttggcttggttatattgggcatgcctagtttgcagtcggctgcttgaggcttataccaagcggtcaaattttgacatcctgaaaacaatgtcaggatgaccttccgacagtgatatggagcgacccagccaacccccattttttggagagagctttcaaacttctacaagagatttcaggaattgaataaagaactttcataccaatgatattatgaaatttcagagattataaatccaggcttcatttctcaccccaatttttctggaagttccaaaacatttagaaaaaagttcaaaaatttgttatagaacttctgaagttctaccaataactttacgtaattccagaaattataaacccaactttcaacattcacctaatttggaagttccaaagtttagaggggagaatttcagaattaaagagagaactttcagaaaattcttatagtgaccatttgacatttcagaaatgacaagctccagatttcggctttgaacttcttttgttttaaaggagattgccaaacttgaatagagaagttacagaagaagaaaagaaagtcctaacattggctttcttaaactttcataaattctaaaccttggctttgaacgttcactcttttttccttcgatgtttcacaaattatggaggagatttgaaaagttgaagaaaaaactttgccttctacaattacttccagaactcctaaaaattccaaatcccagcttccaaataatttcagattacaaagtcaggacataaaaaaataggaggcggaggaggctaggcgtgtggatccaacaaagcaccatagccgtccatgtcccagctggccatctcatctctaagctgctgcgggcgtcgctccctccttaggctccaggtgacaactgtagccaagtgaagaaaaataaaaaaggaaagaaaagaagaaaactgaaagtgcaattgaatggcacagtgtgttcttcataaagctcttgtgcactcagtgcaaaatatttaaattgcttaggcgtaccatttgctagattttattcctcacatatttgtcgtgtgtacagcatttgcttcctctcgaatgttagttcctactatcgcttttattcctcacgaccgcaggatcgggttccactatcaaccaataacggaacaaacatcacttcacaccacccacagtttcaatcgcacttgtcattagttcatgtcgtaattctatatcagcatcatcgcgtagtttcaatcgcactagtcgttagttcctatcataattctgcgcatttccaattgccttgccagacatagatatcaacatcatcacgtagtttcaatcgcacttgacttcgggagtttttcttgctcatgtcgttcctccacccggattcgctcgttctgggttgtcactgtatggtttgcctcacataaaaatctggggcttgtgtgctaacgactcaaagatgctttttttttacgaaaagactgtaaggaaaaacctacaacataattgtaagcactaagatttggacgctggtggattgaatcatgcactcacaactccaccaccacaccaagaggtgtttcactgagattgccaccttgggaggcatgtgtttttggattccatgcatgtatccatgagttcgcggaaaccctagatcctgcttgctagatcagtaacggtggtgctcctgtgtcattaccttcttgaaggtgatgtttcttttactcctgaagttgcccttgaggttgcgtcggagttttgggatggggagaaatccttggcgggcttcgctcagacgtgactgcagtgacgcttgtgcgtcattctgtacggtggtggtattgtcttcatcgttggtgaaatcatctgcaatctgtcgcagcttccatgtcggcgtgtttcatgtttcatgttgtgtcagttgactttggctctcggtcagactcacgtcagcgtctcggctgtctgttggtcgtatcatttagcaaaatgctcaggggtgtgtggctttttgaatctggagtcttctatcaaggttcgtgtttttgttcagtctcggtatagcaatgcccttctatagcattggtaccactcctcccagtgatggcaacccgcccctcttcagttggcgaggttgttggcaacaatgatgccctttgacaagattacaacacccgacatgtccgtgcacagacctcttccttgatcgcttagcaagaaattgaagatcgtgaatcctgggcatagtcagcaatgtgacaacccctcgacgacttcgaaggcactcgtctcatgtttttgtcacagattgtttctatgccggtggttctctttttcattagaccgacctcgtagtttttagtcgtctgcagcagttgtccccttgttctagcttttccgtttgtgcaatcggttacggtacatgccggcttgtgacgaagttacctttgtggactttaaacttgagaagcattgatcaaagatagccgtcgtcttgtggcgtgattatttttctcctattttgtaaccataacccttaaataatactccctccgtccggacatgtaaggccgcacggaacgttatgacaaactttgacaaaaaactacattagctatatgagtctattttgacacaaaagagatactgctggattcgtattgaaaacctctttccaatggcttaacttttatacatacattattaatttgttttatgattgttggtcaaaatttgacacgaaacccaatagaggtcttgtaaacttggactgaggtagtatattcgggtcggatgctctcctgcggtgattaactaaaaaatcacctattcacttgttgactattttattttatagcattattaacccttacgcaaccgcaaaagtatattaagcttccttcgatttgggcgagacaatattccaaaaccttgcaaatcaatcataccaccaccagcgacaaaaaacgcttgccctatccaaaaaacaaaacagagctgacaaggcactctaccgtataaaaattgcaagcacaacgccacagcatccacgcagactttgacgtggcacggcgaacccgcaactactccctcctatatacactccgcaagcccgcgcgctgacagaaggggcccgcgttgccgccttttcttagctactcgacttcgccggtcggcccgcagtcactctcgctatccgacgaccaccaccgccgcgccgcccgtccgcttccgctcgcgctcttctagaagcttcccagtggccgacgccatgggccccgtccggcttgccctactcctcgccgccgccgccgtgttgctcggccccggcggcggggccgaggggctgtacatcccctacaacacgtcggcgggggtggtgaaggggaagctcaacgtgcacgtggttccccacacccacgacgacgtcggctggctcaagaccgtcgaccagtactacgtcggatccaataactccatccaggttacttcccgctgctcgaatgcccctgggtttgccgagaatttttcgtcggttttattttagccttttcgctcttgttctgggaaagcttttggaatggttttataccatgttatctttctaatctcgttagttttttctaacggagtctcagttacgtttctagttcatttgttcaacttagtggggaaatgtacccaattctgttgctgttgctcgcagggcgcgtgcgtgcagaacgtgctggattcgcttgtgccagcgctgctcaaggacgagaaccgcaagttcatctacgtcgagcaggtaaggaaatttgcatctacacaagggtcaaacagttcagtctgagaagttttgaggtgtggaattaggagttcgcgagcaatgtacagctacctaaaaccttgttgcttctacaagcatttcgtatttgttagagtaatataggaactctgtagttcctttccttgctgttagtttcaagagttggagctagaccagcaattatacatccaaatggcttctacaagcatttcgtatttgtcagtgtaatataggagctccgtagttcctttccttgctgttagtttcaagagttggagctagaccagcaattatacatccaaatggaataatggatggtgttagacgtgggttcttttttgggttcgatggtgtggtttttatttggcaaaaccgtttatatatgtatgtatgactgcaggcgttcttccagagatggtggaggcagcagaacgacattataaaggatactattaaggggctcctcagctctggacggctggaactcatgtattctcctacttccaaagtttcctttttagtaggttgcatttgtaatcatatctcttctcaatatttgaaaacatattgctgcttgtgtggtcttgaagcaatgggggcatgtgcatgcatgacgaggcgactgtacactacattgacatgatagatcagactacactcgggcacagattcatcaaggaggagtttggtctgattccaaggattggttggcagattgatccatttgggcactctgcagttcaggcttaccttcttggtgcagaagtaattcgctttatctattcatgccatgctttctgattttgtgtgactttgatgcttttacctgaagaaactaagccagagctccttgtccaacttccatgtatcgttaatgcttttttgttacttaatactccctccggtccataataagtgtccgggatttagtacgaagttgtagtaactttgtactaaattccagacacttattatggattggaggtagtagctattagtccagcacaagataacatgaattttaccattatgatagtaactagtcatcactcattaattctgcatactttctatttgcatgataagatgaatttcacactcagtatgttgctactttgttgtggaattccttaataaggtatccctctgatcctaaatttttgactcaaatttgcccaaatatggatgtatctattcttaaaaagcctctagatacatataatatttcgacaacaatttaggatcggagggagtactatgtagtacgtaaacgctgagacataggctttatgtgcttacattacataggacactcataatgggaaatccaatggctacgctttcaagagtgatgtgattgacagcttttcttaacgatgatagttacgcaagtcagtcaatttacaggtgacgcagtgttttgagaaacatgtcagactgaccagcaaagagatggctcaaaacattttgttagcaaacgttgctcagatcctattaggacttgaatcctattaggaattggagatgataaccatgaggtatatccttggcaatctgaggagacaaaatcttatccaaagcaagataacagctatttgaatggcaaaaaaatgatcgaggctaggtttattagcactagaattttgcatagaacaaggatccaagacaaagtgtttgagacgtcatgagtgaataaaacattgtgctcctttgacattatactcaaggaatttgcggtccatttggcaaaatttctcccttgtggagattgtttaatctctgctatttttgttccccctacaaaatttgtctactttgttcttgatacagtacaacattggattggatccatggctgctatgcattatgagtatttaacacattccattatattcaggtaggatttgatgccttctatttcttccgaattgattaccaagatcgtgacacaaggaaggggacaaaagaacttgaggttatatggaggggctccaagaccttcggctcatcagctgatgtgtgtactaagtagcatttttattatccataatataagtgttataaatcactttgatgaggtcctttgaggatctagcctggacctccaacgcaacacacccaggcggtcttaataggtccttttgcctgtatatattttcgaacatttcctttattctttgggtaggcatcactcctgcctgttttcggtaaaccatgtttcatttgtaatgtttgatatctgctcattttctttcagatttttgctggtatcttcccaaaaaattatgaaccaccacctggcgagttttattttgaagttgatgatgattcccctgtcgtccaggtaaattgatgagttatgaaaatttataaaacaatggggatgaaccaattgtccattgcttgcatccatgcaggatgatccccttctttttgactacaatgttgagcagcgggtgaatgattttgttgctgcggctgtggcacaggtctcatatgttcatactttatgctgatgtatatctttgctcagttatatatattggatgaaaaatacattagtgtactagaacttgggtgttgcagtcacagttttgaagtttatatctgaaactgaaaattcagctttggttttctatgccgctttaaccttgtgcattttattacgctgaggagttattgtttggaccgcagaatttcatacttaaaattgttgctctattgagcaatacaggtttcatcctaagttatactcatttccatcttttttgtaggcaaatatcacaaggacaaaccatatcatgtttacaatgggaacagatttcaaatatcaatacgcagaaagttggttcagacagatggacaaattaattcattatgtaaacaaggtaaaggaggagcccggggttacaaaacttaactgtacctttttgttcccttataattccaccacaaagctataaccacagcactacttagtcatatcccttgagctcccaccgtcatgcacttatggactatacaatacatttgaaatgtttcaatcttttcttactaatatatgtgcacatatcgtgggatgcatttgatatttattttttcttgtgtaagaacataaatgcttaagcaagtgttccctctttccttttcttgctattgatgcaacttgatttattttgagcattttaaagtgggaattgtcaaatggtgctggaattttgtataacatacatattaatacataagaacttaccattcttgttttctttgaccatacctcaggatggccgtgtcaatgctctgtattccacaccttccatttacactgatgccaaatttgcttcaaatgaggcatggcctctcaagacaaatgatttcttcccgtatgttctatcttatacttataattggcatggttaactgttctttcacattcatatgactctatttctatcataggtatgcagataagccgaatgcatactggacaggttacttcacaagcagacctgccttgaaacaatatgtccgcatgatgagtggatattacttggtagttttgacttgctttttcgataatatcctccaggtgtccaacaccaatatgatatattgtattggtcacttggtaccattcatttgcttaaggtcaatatactttcactttcaggcagctaggcagctggaatttttcaaagggagaagcaagtcaggtctcacaacagatagtttaggtgatgctctagctcttgctcagcaccacgatgctgttacaggaacagagaagcaacacgttgcaaatgattatgcgaagagattatcaattggctataagaaagtaaacttctcaagaaaattgtttcaattcatatttgatgttgtcttttaagatttgacagattaatttgggttgattcttttccaggccgaggagctggtttcgacatctctcgcttgtttgagtgagtcagggtcaaaatctcgttgttcatccccaaagacaaattttggacaggttgatttacagtttgttttaacagatttctcttgtaatttaaaatatggcgtagtatttactatttacagatatatcccctcttttcagtgtcctctcctaaacattacatattgcccccattccgagttgaacttttctccaggcaaaagcttggtgagttttgttctcaactcatgcatggccccttttaagatcaaattgatatggattttcaactcatccactatgcttttttagaaagtaaatccatataacatctatcatttttttttcgacatttctgttgcaggttgttcttgtctacaactctcttggatggaaacgagaggatgtccttcgcataccagtatgcgtttttgttccctgcaaaacaatacattctattggcattcatacatctgtccatcttgtatatgtataagatgtgcttaaagagtagtgccattatcatgaaactgctccacttgagaatgaaactaaatgtgcccattgtggaattaacaggttatgagtgactccattgttgttcatgattctgagggaagagaaattgaatcgcaacttctgcctatagctaatacctcattgtacacacgggataaacatgtcaaggcttacttgggcgcatcatccgctgcgaagcccaagttttggcttgcttttcctgcttctgtaccaccacttggttttaacacttattttgtctcaagcgaaaagaaatcaggtgaattcatgtctttcatcttgatatgcaacaaatttagaaagcattactccaaaggtttgacaatttttccaatttaatgtatacattgcagcatctgtctcttcgccatccagtctatactctcagggaagtgaaaatagcaatcttcaaattgggcaagggcgtttgaaacttcaatatgatgcagctgtagcactatccctgtactctgatagcaagactcaggtaatttgccagtgatcagtattattttcatctggaacaatttgacctcttgccttgcttccatcttaaaagttgcacacttatgacattagccggggtttatcttccctagctcatatgtgcatttgtggtattggatatggaatttttctttagttttgcttgttatacgaaatcacttgtactcaaacgccattaacacatttgaaggttcaagcaaatttcgagcagaagtacaagtattacataggacaggatggaaatggaagtgatcctcaggtacaagagggacaagtaatctattttccaaaacggagcaattacttatgctgacgtttgtttgcttcttaccggactgtaggcttctggagcatatatatttcgccctaatggtactgttcctatcaacactgatagtcaggtatgatgaagaatcgaagtatgtctggaatagcagatacacacatctctgaagagatcttcaaaagatgccttgttgttcttacatgaaattatggtttcccacttcagtgttcctcccaaaattctgccttcttatatgaatttatgttttccacttcaaggttcatcccacaattttgcgtgggcccatattggatgaagtgcatcggcagattaattcatggatatatcaggttattcttatgaacattcttcgtttgaatcaccactcacgtgggatttatttgctcactcttagttccagatcttaaggttctaattggttttttagcccacacttatgagagtaacagtgagaatcgtctctttgcttgtaacaccttattttgctacagcaacaggtccctattcgttctgaattagcacaccttaggcacataaacttattgttggttactcatcatcttttgcataaccagtaagattcacctatgagcatgattaaatcggagaaatactcatatgtatggcttttggtgaaatgacatatatggaagaaatgtgaaattaataggaccaaaaatatggagttattcctattctttcattccttgttaattgactagtaattggattttgaattgtggataattgatatagtttgtcttatctttgcacagatcaccagagtttacaaaggaaaggactacgtggaaactgaatttatagtgagtgctatgtcaacaaatgcaccttgcattggtttcttctctgaggccttcacattttgcagcataatttgttcctctattcttctctgcattacagttttctaacatcttataactaattgttgttatgcatagattggaccaataccaatagatgatggaaatggaaaagaactatcaactgaaatcattacaaacatggcgacaaacagaacattttatactgattccagtggacgtgatttcatcaaaagggtaagttgcaccggaatttaggattggagggagtagtatataatgtgtacccttttacttccaggtacgggattatcgctcggagtggaagattgaggtgaaccaaccaattgctgggaactattatcctgtaagctcttgtttgctctgttatgttttgagtgaaggaagtataatactccccattgtccataataagttgtactaaatcagcgacacttattatggatcggagggagtatcattaagaattggcttctttcattctttttccataattgagtgaatatctgaaagcggtcatgaattcatcttttgcattttccatgcagtttatacattttctttgtttgttattcttgttttgttgtcacttttcctggaggagtttcgggtttttcttgtacttgatatgttattgatcctaccggaaaatggcaacaagcatttaatggcagcttgctctttaaaaaaatgatggcataagaagttaacatttactggtgaggggttattggtgattatgccaggccgagaatttaacatgtgcagtgccaggttactcatagttttctcaatattttttgatgaacctggcaaattattttattgtttcttttgtagattgtgttgggaatttatacagacatttatagtaccgtgtttattttcaggttaatcttggaatatatgtggaagacggcagcaaagagttgtctgtacttgtagacaggtctgttggaggttcgagcataaaggatggacagattgagctaatgctacacaggtaaatgtcaaggggcacaatatggtgatgcttctttcatactctagcatttctctttgtctgcctctgcttggtttaaaatctttcttactccttgtgtaggaggctactccatgatgatggtcgtggtgttgcggaagcattaaatgaaacagtctgttcaattgatcaatgtgaaggactagttgtaagtaaaaggaaatatctttcggacgatatgcttttagtagaagtcaaaaaagagttgtttgctagagaaatattatcttatcagcaatataaatgtattgcatcattttgctgaagagaatacattgttgaagaggatagttggatagctagctgaaggacaataagtcaatggcttgaaagcaatatcaatgttataacctatttgtcaactcttgtcatagaggaagcaatttacttatcttatctattaccaaatccaactggcacatttattgaagctatatgtgctgtggaattacagaccagtttgttacattatttggcacacaatgttatgcagaaatattgttatagcagcatattataatattgacagattgaaggaaaatattatctcaaaattgacccgca

SEQ ID NO: 1989 - DNA, 13392 bp, Brachypodium distachyon
  Intron number 8 from transcript Bradi3g05920.5 (locus Brad i3g05920) derived from phytozome v7.0 (chr-ID Bd3; pos 420 5884 to 4219275)
gtggatcacttgattttcttagaaataaccaacaggttctcatcttgtcaattacttatctctcttttgttttctttggtttccctcgaagaataaaacaatgtactgaacaaccattgatgatatgatgtagtagtaagaggggcaacacttgtgtttgaagtgtgagcttataatttgctgtcttaatgatggtaaccagccagaacctccactactattaggggttttcacaccaaaagtgggcaatgctccatttagtagagtataaaaaaatgttttaatgaatttacgcaagtgtcgttattactgataatctgggatcatgtgataatcaacaaaaatattaatgtcgctgtttgcatgaatgacagtttgtcaatggaacttgcactagtagaaaaggatgatgccctgacatattttatgtctgatcttttgttggttttcctatggtcaattgtatactatcataatgtgctagagcagccctgacacaatttggttttaccatcaccttagtgaaacttcctgttacccttttattcaacagatagtacctatttccatgcaaactaaggatggttcatgaatccccgttctctttatattgatcgaatgaagtttctaccctattatgttattctatcgtcgaagtaataatagtataacaccattatcttattatttgcagtttcaagcacttcgggaaatggtccatacaaacccacaaattttgcaggttttctgttcttgtttggattttatgctatgcttcatgcaatcttctgtctaaacttttatctggtgttgcgttacagcctatgctccaggaattgagcaagcagaatccccaacttctgaggttgattcaggaaaataatgacgagttccttgggttactaaatgagaactttgacgcaggcgatgggtaagctttgtttggtttgttgattattttttctggttcatttgaatagactataagatttgctagcgctaatttttctttcttaattatatagacttgaattttatcaatctgttctgtctgctccacttccacttgccttggtgtagattctgtggccggtcgttttgattggacttcgtccgatcttgttgacttactccctccattccacaatacaatgcatatagatttgtgcacttggaccaaggcatctctcttttctagtgcctgaccactcatattgggttaataataaatggatgtgagtagttattggccgggtgcaggtatcaagagaaaaatgaggtgtactgtggaacaaatgagaaaaatctatatgcgttgtattttttttagggaatatatgcgttgtattgtggaatggagggagtatcactgtcaatttggtttttgttcagtcctatttcataccagcaatatattcagttgtcacttgtcaggcttgcatgggactccatttgtcagtgtttcgtgtatggcgtatattttgctaatttctgaatataacatgattagctattagcaaaaaaagactagtccttaaagaacatgtgtgctgctttatcgtataatatttattagccgctgcaatcgttcaacctgtacttccatgttctttggttgattgacaatatatcacggtgcttctttctcatagtatttatacaacgatgtatctaattaacatacttgtctgatattaccagggacttcttagaccagcctgatgaggatgagatgcctcatgctatcagtgtgacaccagaggagcaagaggccattgggcgggtatgcgtaacataactacattaatcacctttcactgcataaatttgctatacaccctgtcgcattttcaccctggttggatttatttttgtacttcagctggaggccatggggtttgacagagcacgtgtgatcgaagcattctttgcctgcgacaggaatgagcaactagctgtcaactatcttcttgagcatgctggtgacgaagaatagagaaaagtgagtttacattcggtgagaaatctgccatgatcctctggctggttgtattggtgccttgagtaaccagtatcgctctgtatgagtgcataccctaaccttgtgtttttttttcccgcggtaccatgacagagcttgttctgcacatgagcacatctgacctaaattgatcaagaagcgagtaatcaagttggaaggagctaacactattatctcattgcacaacaagtttacttgctgccttgagcatttaaagacttgtagattgaacttagctatccggaagacgtagtgttactaaaatgttgtattcctgtcgttcttcgatcaatgccagtggtggttaacatcaatttcgatgctatgtatagtggcagaaaatgatgatatatcagggtaaattcaagtgaagacagcaagtaatttcacactgaaatatccatgacgatgctgcgtccagcctccgctatactttagatacggacattcaccttggcattcttaacaggatatccatatctgctgccctcggagatatgttccgcccagattacagatgttcgatttggcaccgttggcatgagagttaatcgccaggagactttgggtcatcccaagttctccttggacgatcatcccaagttgtgtgtctgccgcctacctcttccaattccatggccgccggagtgctggacgagattgggattgtcattgtggatgcgcagcacgcaattctaactagcaccaggaaacattttggacaatttttcttagcgttgaacattgggaattcctgttttgtgttttcagatgaacaaacatcgcaacctatcgcacaagcataaacaggtaaataacttgctttattattactagtagaccttctcgagatgagaagaccgcatatacaaaatcggctgaaggaaacagcagggtgcatcacaaaagcaacattaattcaaattcaagtgagacaaactctctgaaatctacatctcaaagcgtgcagcacagtttagagtccatagacgccaagcagatgcagaatgcttggtagccagtcaatgggtatctacaaaggagagatcttcccgtcagaaaaaacgttaccaagatgaacaattacttagggtgatcactggcttacctaaagtccattatgtacttggacttgccaaccctaccaagctgcaagatagtctgccttccgttctcctgtcgatcatcacaagttggtgaactcatggtaagtttaataggctgatctaacaccaatttaagctttgcagagatgatcttctgatgataacgagaggaatgctacctacctctaaagtcatctggaagttcttcactgatgtctgcaccttgtatcccatcctccctaccctctctctgaagtccagttcataacgctttgtcatctgttgtgagtgcacaaaaatacactatgtgttaccgtcatcgcaactcatgattcttgacgtgctgattcaaagagataatgagaagctgcatacattgttgtagaagggagatcttgagcagagcttgtcagctctactcgccttctcctcccaatcctttggtagcccaccgatgtgctgaatctacaacaatgagtatttcacaattagcaaccacttgaatctcccagtgttccaactgaatttagccaatctacctgagcagaactgttggtcctcaattgcatggactggctcttgggaatccatgccctcatgcttctgaagctcccagtcaaggtagtgatggttggcgcaaacctgcagaaagaaaaaattgataaaagaaaaaccatacaattcctgaatggagtttgcaatggagattggatcttacgcgacaacgccgagaaggcgctttgactggctgttcaactcatcgattcggttcccctacaccggcaaccatgaacactcatcagtggttcatgtgcaatccaccatgataaccaatcaatctctgaatccaagagactgacatcaagaatcgttaagaggagctccatgtacctggccccagatttggtacttggatccaacaagattggcacccacagtccccaggaagttcttgtcagagctgcagaagacgccgtcctggttctgtgccacgatgaactccgacctccctctcctcctccggtgccgggccaccgccagcttgcggtcctgccgcccctgcccctcctgccatccccacaacacagagaaggcgaatttgagcttacggcacaaatctccgcaactaatttgctactccaactcaaccagaggagagattaaacgaaagaggacgggattagctcacattggtgtagagcgagtagagcgccacccctcgaggcccggcggccttctccctgacgacgacgcaggtgcacctcccgacgtccagcggcaggggccggcacagcagcgccctgttggggagggtggcccaggacgcggccggcgccgcctcgctgtcggagaggtcccacgcctcgtaggacgccgccgccgccgccgccggcgtcgcaggaggcagcagttccctcccccttggccccatgaacaccggcaccaccgccgccggtgccgccgcagccaaaggcgcctcgccctccatgcgggcctgcagcgacgacggcttcagcggcggcggtggcgccaccttcaccttctcttccttatccggcccgagattgggggcgccctggttctctttctccgcggaagccgtcgcggcaccgcgtggccgcacgacggcgacggcggcggcgcccgcgttgcagctgagggggcgcaggggctccctcttggccggcgtagtagtggccgctgccatgggagtcagcttcaaggtctcgtctctggccttctctctctggattagcggtggaagtgacgtctggatttggttggagctttgcgttttggggctctctgtggggtggtgatttggagggaggatttaaattcgaaatggccgcgactgatgagtgctactgctaacggtcgccgcctcgggagccgggcctttgagtaatggcgagtttgcttgcttttggactttttccttcctcggattttgctgttcagtcttcatcacaagtgcatggaattcaaaatggactttggactccatgtgccacaaataaacaggcaacagtgggaaaaatatgtataaatgagaagtattcctcattatatttttaatatggaaagaaaaagaagtacagtatacttaaggaaacagttgcacttcaacttggagtactctttcaaatcctacttttgtttgcattgtatatgcagttatggcacgaaacgggtagccgatcagtggaaaaaataaatgaagcctcgagatacgagtacgaggacggcagttgaatagcggcagcagggccgtaacggttgttgataataatatatgataaattagtttaattattagttaattaaatagacagttatttgtaacccctcgtgtcctaagtaatggaaaatttgggacgcgaaggcaaaagtttgggacaccaatgcatgtattggtgcctcttcatcctgtataaatatcatcatcaatcaatgaaatcaacacagagattcattctcattttcattcataacaggttatcacgcacgtagttctacgatcacagagcaaatcaagaggtgacaaccatggcaatcaagcatctgcctctagttgttcttaccgttctagagtttcccagccaccatggaagcagtgggctccacgccgccggtggacctcgtgccgccggcgggcatcccgcagccggcgccttaccggtggccgccgaccgcgccggggtcgccccgcgcccctggcctttgccgcgccggcctccgtgcccctgccgtctgccccaccggcccccgcaccgtcgccttcggccccgctggccccgcgccgctggtgggcgtcccgccgccggacgcgccgccgcgcctctggctcccgctgcgcccgcccctgcaaccgcggccgccgcgcccatggcccgcacctcgccggcccgtgcctcgccggctcctgtctcgccggcccacgccccgctgactccttcctcgccggcctccgctccaccgggctgcggcagaggagcgaggcggacggcggcggaatcagggagagtggcagcggaggcggcgttggggaaccgcccgcgcccgagccctccctccccttaaccgcacgcccctatcccgacctgggccggccgaaaggccgccgagcccaggcccaggacgccgacgcccctgcgcacgtcccctcccccactggttcggccatttgcagaaaagtccatgtgttttcggctatttgcgatttggtccatgtatctatttaaatagttgtattttacatacctataggtctctgcacttatatttatttagattccagtggtttttaggatatattcctactaaagacatattcctatgtaaatgtcaatgtaaatattatcctgttcaatgtgtttgtatcatatgcatcccctattacatgtgatatttacgcctttgcaattgagattagtatttcttgcatttttgagagttttgcttcaacaattaagtcccgaaatagcaccaaaaatgctcaaattagactcgattcaagaaaaatctccattcgtgataaaaataattatcaccatgtgactaccttaatttaatatatacgaatcacaaggtactatagactttcaataacggtaaaacgatataattgcgttgaatgttccgtgggaacatacaccttattgaaagcaacgaataatttcgcgtagtactgagaggtctacattgtgtgcatacgcacaatgactaccttcaccgtgctcttctaatattaaatcacgtaatagccaactagaatgagcgattgaagtgatttgaccagccctaggtgccaacgaccaaatatattcgtgacacgactaggacaaggtaaattgaaagtcacggaaacaacccgccatgctaacgttgccgttggacataggttttcaaggccaaggtgcacataactaaaagttacgccaacgaaaaacaacctttaattgcttaatgcaagacacaagtcttagccacgtaatacaagacaagttgtggaaaattgtattgaaatgtacttcgatccctccattcctaaaaattctttctttatcgtccggattgtactatacatacataaaacctgtagctcatgttgcgtataaaataatttttcaaaatgtcaatacattctagacttggcatggtcgccttggtcaccccggtatcgagatgatacgaaaaattattaataattctgttggtcataatcttaataaagcaaaattctcagaatctcaggattttgtatgcacggcatgtgcacaaggcaagctaattttaagaccttcttatcttaaaatacatgcggaaccattacagttccttgaacgaattcaaggagatatttgtggtcctattcaaccatcgtctggaccatttaggtatttcatggtattaatcgacgcatttacaagatgatctaatgtgtgtctactttccacacgtaaccatgaattcgcaaagataatgagccaaataattaaattaaaagctcattatccagagcatcgaattaaaacaattcgaatggacaatgccgctgaatttgcctcacgcgccttcaatgattattgcatggcattagggatcgaagttcagcactcagttccatacgtccacacacaaaatggtttggccgaatcttttattaagaaaactaagtttattgcaaggcctttattacagaattgtaatctaccaacaacttgttggggtcatgcggttatacatgccgctgatttaattcaattgcgaccaagtgcttatcacgctacttctccccttcaattagtacatgcaaatccaccaagtatttcccatctactaaaattcggttgcgctacatacgtaccaacctcaccaccacaacgtacatcaatgggaccacatagaaaattggggactatgtggggtacaaatcaccgtcaattatcaagtacctagaacctctcacaagggatctattcactgcccggtacgcttattgtattttctatgaggaccatttcccggcattagggggggatttaaagtaccaaaaacaagaatgccaggaaatcaattggaatgtccaaggcatttccgtctctgatccacgtactcaagaaactgaataacaagttcagaaaattataaatttgcaacatattgcaaacaatttaccagacgcatttgttgattacaaaagtgtaactaaatcttataatcctgcacagaacgtaacagaaagagtgaaagtacctataaaaaccactcaacctcctgcacctaccgttcaaaggaagagggggagaagtacgacaactaaaaaggatctagcttccaggaagcaacaaaaggaacaaacaaaggagccgcggcaaagaaaacaaaagaataaaccttctggacctccttcaacaacaacaacaaatgtgagtcaacatttgataaaccaagattaattgggtaatatacaccctgtggataaccaacatccacaacccagctcgatagtgcactcaattactgatgctgggatatcggaaaacctagacttaaccgcaacgggaaatcgcgaacagtcaccaaaggtaaatgaaattttcacaaattatttagatacttgagaaacatataatagaaagactacattcgtggacacatatttctcaactaagattgcagacaaacttctaaatgatcatgatccaaagaccatagctgagtgtgaaaaacgctccgactggcccaaatggaaggatgcaattcaaacagaaatagcctcgctcaataaaagaaaggtatttacagaagtattacctacacctccaaatgttttccgagtgggattcaaatgggtttttgtccagaaaaggagcgaaaacaatgaggtggtgagatgcaaagcaaggctagtagcacaagggtttacgcagagacctggcattgatttcaatgaaacatattctccggttatgagtgaaattactttacgatatttaatctcattgtctgttcaaaatcgtctatctatgcagttgatggacgtcgtgactgcatatctttatgggtcattagattcggatatttacatgaagattaccgatggaatccaaattccgaatattaacgcaagacgcaacatgtactgtgtaaagttgaataaatctttatacggtctaaaacagtctggtagaatgtggtacaaccgactaagtaagtttctcactaaaaatggtttctctaacaatgatgactgcccatgtgtattcatcaagaaatccaaaacaggattttgcattatctctgtatatgttgatgattttaaacatcattggcaacaaacaggatatagatgaggctcgtaatcatctaatgacggaatttgaaatgaaagatttgggtaaaaccaagttctgcttaggtttgcaacttgagcactttccttcgggaatattggttcaccaagctacatatatccagaaaatcttggagaaatttaacatggataaatcctatccatgcaaaacacctatggtagttcgatctctagacgtagagaaagatccattcagaccaaaaggtgatggagaggaaattttgggatctgaattcccatatcttagtgccattggagcattaatgtacttagcaaattgcacccggccggatattgcatttgcagtaaatttaatagctagacatagcacagctccaacaaaatgccattaggtaggagtcaagcaagtttttcgctatctacaaggcactaaagatctaggtctatatttccaaaagaaaaaccaagactctgaattaatcggatacactgatgctggctatttatctgatcctcacaatgccagatcccagaccggtttcgtgttcctgcacggtgggacagccatatcgtggaagtcttctaaacagactctagtggctacatccacaaatcattcggaaataatagccttatacgaagcatctcgtgtgagtgtatggctgcgaagaatgattaaccacatacaacaatcatgtggtattggttcaattgaatcaccaacgattatctatgaggataattcagcttgtgttactcagatgcaatcaggttatataaagagcaatataactaaacatattgcacctaaactattctatcctcatgaattacaacaaaatggggagataaatatcttacaaaccaaatcatgtgataatctcacggatttgtttactaagtcgttacccaactccacatttcagaaatgtgtatatgggattggtatgcgacaacttaaaaatttgcaagcatcagggggagtgttcacctgagtttagcctgttcacaacatcatattgcactcttttcctattatgagttttactcactagtttctcataaaaggtttttagtgagacaatattaacataagattatatgtcatattttctattttccccaccagggttttttagataatatacaagacatatttattgtcgacataattcaatatgaattatcgagagtcaatattcaaaatatgttataccattttctccttagtttgcccattgggtttttaaaaaaagttttcataacatatcaatattattattatttcctcaatatttttctcatagggtttttggaggaaattacaacattacaagattccatgatgatttaagaatatacaagtcaaagtcaaagaagcaaattgatcaacggggagcgttgagaataatatatgatcaattagtttaattattagttaattaaatagacagttatttgtaaccgctccaaaacttgggacacgaaggcaaaagtttgagacaccaatacatgtaaccctgtataaatatcatctatcaatcaacactgcgaccccgtcgtccactcgtcctatataaataaccaagacacgctcgacacgagctgagctatcggcagaaacggaggcgcccggtagacacatcaccacactgttctctcttgtgcctctgcgcgccatagggaggctagctcttgagcttaattcgccaatcgacgtcgccgccgtctcggccatggcgtggtggcgcgagagggtggtcgcgccggtgcgccgggcgtggcgggccgtggcgcggcgggcgcgcaagaacagtaagccgcctccgtctctgaaattctgaaccgcttcgttgtgtttacctttggattcttggtccaactaattaaacagccctttaattaggaaaaaaggatcgttgcaatttgtgaaatgagatgcccgtgttgtttgatgcgctccttgttttatatcactgctgctgttgtagtgccaaaaacatagtagtgccccctccgttttaaatcatagcatgttttatctctgtcctaagtcaaaaaaagtttagattggaccaaggttatagaaaaatgttactgacatccatcatatcaaataagtatataagaagatatatatcatgatgtatttagtaaaactaatttagtgttgtagatgttgctagaattttatacggactatatatttagtgtagcaaaagattatcttatactaatttggaacataggaaatactactatataagtgtagcaaaagaacgggtccatgtttgagcagaaaaagtgaaagcaaaggcgaacactacaatgctactaagtatcctacaaacctatgctgcctttgcttcctacggcctatttggacatatacatatgcatcaacagccttggacaaaaccactttgtaaattgctagggttgaatccttctttggttattcttcttattattgttttttgctagccgcttgtcatcttgttgtcgtacagaaccaacattttctcttgtatatgcaaattaagtattgaacaacactcaccatttttgttcacaaatggggtgcagggagcacaggagtcgtggacctacacagggacatccagacctgtggatacgacgatgttcaggtgatgtggaacatgcggatttgttcctttttgtcaggacccctttgaacacagttgatcatgtggcatcagatttgctgtcaggaagcaatctcgacacaatgattaatcagataatggaaatggggggtggcagttgggacagagataaagtccaaagagctctccgtgctgcttataacaatccagagcgtgcagttgactatctgtattctgtgtgtatttgtttttatccttgtaagttctgaattcggatctattttctgatgctaatagatgatatttgtttcccaaacagggtattccagtgacagctgaagttgctgttccggtggttccccaaggggcaaactcaactgatgcaactcctcctggagtaaccggcctgtctggaatcccaaacacagcaccattaagcctttttccacaggtttattagccaccttttgtttgtgcggtaccattgcagcgttgcctatttgagcatccactgactaatggaatggtgtggcagtgggcttctaatgctggaggtgcagctggtggtggatcacttgatttccttagaaataaccaacaggttctcatcttgtcaattacttatctctcttttgttttctttggtttcccccgaagaataaaacaatgtactgaacaaccattgatgatatgatgtagtagtaagaggggcaacacttgtgtttgaagtgtgagcatataatttgctgtcttaatgatggtaaccagccagaacctccactactattaggggttttcacaccaaaagtgggcaatgctccatttagtagagtataaaaaattgttttaatgaatttacgcaagtgtcgttattactgataatctgggatcatgtgataatcaacaaaaatattaatgtcgctgtttgcatgaatgacagtttgtcaatggaacttgcactagtagaaaaggatgttggcctgacatattttatgtctgatcttttgttggttttcctatggtcaattgtatactatcataatgtgctagagcagccctgacacaatttggttttaccatcaccttagtgaaacttcctgttacccttttattcaacagatagtacctatttccatgcaaactaaggatggttcatgaatccccgttctctttatattgatcgaatgaagtttctaccctattatgttattctatcgtcgaagtaataatagtataacaccattatcttattatttgcagtttcaagcacttcgggaa

SEQ ID NO: 1990 - DNA, 9350 bp, Brachypodium distachyon
  Intron number 1 from transcript Bradi2g23620.1 (locus Brad i2g23620) derived from phytozome v7.0 (chr-ID Bd2; pos 211 90250 to 21199599 reverse strand)
cgacctcgccctaccccgatcaagctgttcacagggtacatcgtgcagcaaagggtcacggatctaatgggggcgatgacaaatttcttgtccgcggtggcagatttgggaggacggggtgaagcaacggagggaacgaggaatgcgacccgtaaaacaccttgaggcagacctcccgagtcccgaacatgttacatatgccagtaaaactttgggtaaattggatacacgccactctctgttccatcagtttcgctctaacttttttatatctctatcaatgccattatgttcacttaagaccaataagtgttcataaaatacatgtatttcaacgcatacaacagtatttaccataatacctatatttacaaggtttagcagtatgttcgagtcttcgaggcgtcataaaggttcaaaaaattcaaatttagcctaaaattcaatcttctcaaaaaaaatctatgaaaaataaaaaaataaaaagtaatatgagtgcaccgttagggaccggatatgaggagcgcgtggggaataaaaagaataaaactgtttgacttgtgatggaaaaaactgtccgtatagagttatgtctatacgtatttagacagtatacgtactggtattggacaaaatggcatgaatagaggtataaaaaagttagagtgacatttctccaagtcaagtttttgtaatggtatatctccaaccggtggaaattataatggcatagatccaattaaccctaaaaatttttcggcaattataaggagcgaacgttcgctccttgtccttcatgcgcgacacgtgctcatcgactcgttctcttcctcttcctctcgtagcattcggctggtgcatcctcgttcccggctggcgcatccccgttcccttcgcgcccgcgcgctgccccatcgccagtgcgtccccgcccctgccctgagatccgtcgccgcgccgcgcgctgatacagccgactgccgcgcgccgccaggagccccgcgcaccgcgtgctgatacagccgccgcccccttccccggcctccccgtcgcagccgcgcacctacgagccaccgcctcgcgctggtctggcctccacagcgaactccgccgccgcgctcgcgtgctgttcctgctgacgcgccgccctgagccccgcccctgcgcgctgtcatagtacggagctttgacaccggggatgcgtgagcaccccccttttaggttcggcagtgcgctacggggatcgctccggcgatcgccggtggggccaatgcaaagcgtatgagcacgacgaacacgagaacactttttacctaggttcgggccaccctgaggtgtaaaaccctacgtcctgcttctgagtttgctattagccaaagaactggggtttacaagttgtcggaggggagtccccgggcgctctctctttccggctaagtaccgtttgctactttgggctattgctagtagtgaactgagaactggtacaaccctttgaccgttggcaagggtccttcttttatactgaaagggatgccacaggtgccacaggtgcatgggtgacaaatggcgagcagggagtcagggcagctccccctcggtgcgctgtcttgcatgcaaaccaggtagccctgcagctaggggtctaggcgcctaaagtttaccccaggcgggtcactgttggcagaaaggatagggaatccccttttggtcggagcattaaatgctggcgtgtgcttcactcctcatcctgacgaaacctgcgtgcggcgtgcctgctgaggcgccacgtggcgccgctgttgctcccgctcgctcctgcctttgtaacggttgcttgtgcccgggaacaccctcctggcaagtgaccttcccgggaagttcccaggcgggattcctcctgctgccccgcaacccggctaaccctgccgggctggcgacttgccgggcatctcgcgcggagctgcttggggcgcgacccttccggggaccaagcgaggtggcccacgcgtcgcgcagtggtggtgccccgggggccactgatgcgacacgcgccgccatggtcaccgccccgagcccggttggtcccgcccgcaccgcccctgccgccacccccgagccccaccgccgcgcgctgctgcagcatccacgctagctctgccttgaacagccgctgacgcccgccgccacgagccgttcgcgctctctccctaaaccgtgccgtcgccgccgtggctgcttcctcatcctgtccagcgttcgcggtgtgaaacagtgttgctcgaggacggaatccatccatggtgttgtagcgggctagcggcttcctcttgccagcccggccttcgggacgaattagcctacttggcctcaagggcgtaatcgagcggtgatggaatcaatggggtggagcgagcggtggtagctctctccggttcgtttagcggcaccgtatgtctacgtccccacgccgatgagatacgaatcgtgtttcactatccaatttccatgattgttttgcttggttcacgggttgcaacaaggggattagcgacaagaagatacatttgtgtggggttgttttgaagaggtggtagctcgatttggagcggaggagatgcgagatgcggtggggtgtgttagttttgaccgaattgtatgaacatggcaatttgtttgctttgggggtggcaattcatgtccatcggggatggcaatttgtattcatcggggatggcaatttttgtccttaggggcgacatggagatagggtttgtgtggattcatttaaattggaggtcaatttgtgtgcattttaattctttagcttaatttggagtgaagtagatgcaagatgtggtggtgggattttgatctaaatgtatggacatgattatttttcctttttgtattcgttagggtgtgacatttgtgtgcattagggctatcaatttgggtgctttaaggggtggcaatttgtgtgcattaggagcgatagggagataggatttgtgtgcttggagtttatacctcgatttggagtggaggaaatgcaggatgcggcggtggatggtagacattgataacatggttatatgtgttcactacgattggcaatctgtgctcattacgagaggcaatgtgtgctcattacgagtggcaatatgcgttcattagggttggcaattcgcattcattaggcatgacatggagatagaatttgtgtagggtcgttttgtatgaaggtgataactcgattttggagttgaggcgacgcaggatgcggtagtggttggtagattttcaccgaaatgatgaacattgttttttgtgttccttagggatggaaatttgtgtttattaggggcgacaacgagatagggttgttgtggggttgcttgaatgaaggtggtagctcgattttggagttgaggagacacgagatgcggtagtgggtggtagattttgaccgaaatgaatgaatattgttgtttgtgttcattagaaatggcaatttgtgtttattagaggcgacaacaagatagggttgttgtggggttgcttgaataaaggtggtagctcaatttgaagtgttgcggttgtataagatgcatgatgcatttgtggaagttagattttgaccgaaacaggaggaacatggttatttgtgttcattaggatgacaacttgtgttaattagcggtcgcaatttgtggggtatatttttgaccgaaatatattcattttaacatggttatttgtgctcattagtggttgcaatttttgttcattacgggtggtaatttgtagatgttagattttttaccgaaatatttttttttgacatggttatttatgtttattaggggtggcaaattttattcattagagtgacaaattttactcatcagaggtggtaatttgcttgcggtatttgtttaaccaaaaatatatatattctgacatggttatttatgttcattagtggtgacaacttttactcatcagaggtggcagtttgcaagtggtagattgtggaccgaaatatattatttttgacatggttatttgtgttcagtacggatggcaatttgcattattggttggccatttaaattatgcgtgccggagcggaggagatgcgagatgcagtggtgggtgatatattttctccgaaattgactttacagtcatgagaaggctgagtgttcgttagatgtggcaatttgtgttcataaaaggagacatggtttatgtgacaactcttcgttttagttttagtagtatattaatcacgtaagaaacaatcatgtgcatgcaatgcttgagtagtattccctccatttcacaaagattggcgtatttcgtttcgcgaagacaaaactttaattaaaaattaatcctaacgaaacaaaatacgtgaagttttgtgaaatggagggagtatattaatcacttaagaaacagtcgtgtgcatgcaatgctcgcccgcttcgagcttcatgacaagccgttcattgagatgattagtttatgtctttgactttgagtgtactccattgattggataagagttgcccggccatctgagctggacagaggccggggtctgtcggagtaatcgttggtagggctcccgcagatgattgctttcttgggatattcggagtatatgggccagagtcgttcggtgttcacggactcaggacgcccgcatgcagcgtcgcgcgatggggttacagcccgcacagcgtcgtgcccgcggacaacagtgcgtacgtcgcgcgctattccactccaaactttttattatgggtcttgttttagcccatttttttaccaaaaccataaattatactcactccgtcccataatatgatgcatgcacgcatctctatatcctaatttgattaattaaatatgtatgtttcttaacaaaaagtacatcattagattcattatcaaaagaactttctaatgatataatttttcaaatatttaatttatatttggttagctaaattaacgatcctgggatgcgtgcgtgcatcacattttgggacggagggagtattgcgagagatgattttctgggccgaaacccagtttctcttctcccgtcttttggcccgtctctcttctccgatctcttcttctctgagccacgtcctaatttttttttcatttttctcagccgcaccttcctttgtcaatctggccagccaccggcacgcgcggccgctcctcagcctcgaactcgagcgagtgcccatcgcatccctgtggctcaaaagaaaaaaagattgcaaggggcctcgccccgttactgccaccgggaattccggacattctggtgaaacggaattcccagggatggaaagtctattctggacagagcaaaggagcttaaggaagctaaaaatctgggcataaatctcaaaggtatactgaaaaactctttttctgggcacaaatctcaaaggtatactgaaaaactcttttgcttcttgctcaaacaatgtgttgttgtctcatgcttcatctgttggtatttctctgaggcctaccccaaatattgttatgaaaaatatcaatcaaattaaaacaattgaatctgttggacttcaagagtttcacccatgatcaccctgatatatttctccctagagaagatagcctacttgatacttgatgaacaaattcatgataaccctgcaaatgatgacactattgatgacaattgttatgatttcattgaggatgaagttgatatctctgaattagcctgagctggttcagttagaagaagtggtagaggtaaaaacaaaatgaaaaagaaattctatgataggactaatatggaatgttgggtggcttaacaaccccaccaaggtctctaaagtcaaagaattaatccaacttcattctccggatttaattggtttttctgaaacaaaaaaggctgacttcataccccatttcttagattctcttactagatatggggattttgtgtggcactggctgccaactgggtacagctggaggtattctagttggtattaatactgaaatatttgagctggttagctggtctcacaaacaatatcatgttcttgtctctcttaagaacaagactgattgcttctgttggaattttgttgctgtgtatggctctagctatgaggaacacaagcaagaattcattgatgaattgcatgatatttttctaaacacctccttgcccactttagtaggggagatttcaatttaatcagatttagccgtgataaaaacaatggacatatccatcaaaactggtctgacaagtttaatgactgggtcaatgcatgtggtttgatggagctgaaacttgccaatagacaatttacattgggaaacaatcaagacaatttggttatgactgctctagacagggtgttcctcacaacctgtgagtcccacttcccccttgcttctctgactgctttaaatagatctattagtgatcacactcctctagttgtagattttggccttttggctgaacatcctagacgccccctttcgttttgaaaaatggtggttggaaattgagggctttagccaactggttgatgagaattggtcccttccttgtactgtttctgatcctgtggaaacctgtcaaactaaagtgagaagatttaggaaatttgctagaggatggagtgccaatgtggactctgctcaaaaaacgatcaaacaggcactgactgctgaatatacctgccttgatattctttctgaaactcaacctctctccccatctgataaagctagaatcaaacagatcagagcttatctcaattctatctggtatagagaagagattaagaccagacaaagatccagagagaggaatatcctggagggggataagaacactaaatattttcaggctttagccaatcagaggaggaggaaaaagaaaatcccgagacttgaaagtaataatggtttgattttagacactcctgagatgttacacattgctgaagactactatcagcagctctttagagttgaggatcagtctgatatttgcctttctcctgatttttgggatcctactatagagtcactgatgaggaaaactccctacttgatcaggagaactctgaggaggaggtcaaatctaatgtattcagctcttatgctgaaggtgctcctggacctgatggcccccatttcctcttctatcagaaattctggcacattatcaaatctgaccctttcgccatgtttaggtgttttgaggaaggggacttggacctgttcatgctgaacttctccatgatcaccctgattcgaaaagaggctgatgcaactagtattaaaaagtacagacccattgcactgacaaattgtagctttaaattttttttccaaactatgtacaaacagacttggcccttgtgccaacagattaattagtctaggacttttctgaaaggcagatacatactggaaagtgtgatcgctgctcatgaaattattcatggagcacaccaagagagctcaccgggacttatcctgaagcttgattatgagaaggcctatgatagagtttctattcctttcttgagaatcatggtccagcaaaggggctttagtcctaagtggaggagatggatggattgtctacttctcaaaggctcagttggtgtgagaatcactgatagagatggtaatttttttgaaactagcagagggcttcagcagggggatcctctttccccaattctgtttaatttggttgctgatgtgtttacaaaaatcctaatgaaggctgcttctctccagctgattgctagactcatgccaactgcacaaccagggggtgtggacagtctgcaatatgcagatgatacactcatttttctgcaacctgatttacctaaagctcaaaatcttaaatggttcccctcactttttgaacaaatctctggatgagaattaatttccataaaagtgacatttattctgttggaatgaatgatgatgatgcaagacaatttgctcaatccttaggttgtaagctaggtgactggcctatgaagtatttgggggtgcctttgcaccatagcaagctaagaaaggaagatttgcaacctgtgattgacaaagtgattaagagagtggcaggatggagggggaggttgctctcccatggaggaaaactggtcttacttaaatcctgtctggacagtatccctacctacttgctgtctgttatcaaattccctaagtgggccataaaagaaattaactctcatatggcccactgcctttgggacaattatgagggacacaggaagtaccaccatcttgccaattgggatctggtttctatgagacaggaatatgatggtttgggtgtgcccaatcttagagacctgaacctttgccttttggccaattggatcaagagatataaccatgaccacaacaagctttggaaacagattattgaagtcaagtaccacccaagtagaactaatattttttcctgccctgactataatgcttctcctttctggaaaggggtactttgggcagctcaagctgcaaagatggggtattcctggaggattggaaatgggaaaaatgtgatgttttgggaggaccattggataggaggctcaagcctggctactcagttttgggacatttatttcatctgtaatgaatagaaaaaaacagtgcatgatatctgggatggggtggacataaagctcacatttaggagaggctttgatgtacatctcatggccctttggtatgaattagtggctgtcatttctactgtgcagcttacacaggagcctgaccatttggtttggcaacttcatagcagtggaatatacaacactagatctttatatgggatggttaattttagagggatcacccctgttggtatccaacatgtctggaaactacatattcctcccaaggttaaaacttttttgtgcttagttttccacaacaagatcctaactacagataacctatgcaaaagacaacatgttgctgacacctcttgtctcttttgtcaagaggaggaaactgaacaatacctcttttttcaatgcattgtggctaagaatatgtggagttatattgaaattatcactgggagaaagatggggcttaccctggaacagatgtcctccctatggatggggaacaaaactcatgaagttcttaacatgataattgatgctttactatggatcctgtggaaatttaggaataatatgttttttcgttctgtttcttggactggtatgcaggtgctgtggcga

SEQ ID NO: 1991 - DNA, 2732 bp, Brachypodium distachyon
  Intron number 1 from transcript Bradi3g19690.4 (locus Brad i3g19690) derived from phytozome v7.0 (chr-ID Bd3; pos 185 72744 to 18575475 reverse strand)
atctgaagaaacttgcggtttccgacttggacttggtaaatagcagtactttttggtccatgcttgaatctttgagggagatttctctatgcaccgtcgatctaaaccttttttggtccatgcttgaatctttgagggagaaattttttttgaataacctgttgcgtgtatgcattgtcattttttgatagccatgtatgacttgtagatggtaaagaggatggataggaggcggaatttcctgattaggggagctgcaacgtttgtggttttcgcattggttgcattggtcattcgggatagaataaagaagaggagaccccgggttacctatggacctatttgggaaagagaccaacaaagaatcaattatctgaacaataaaattttcaagtgtgatgtgagatgcagaaatatgttaagggttgaaagagcacccttttttcgattgtgtgaaattttgagagaacgtttgttgctgagagacagtatacatgtatccgtggaggagcaagtagcaatgttcttgaatactattggccataaccttagaaatagggttattggggctaattttgacaggtcaaatgagacggtaagccgctattttagagtagtccttcacgcaataggtgagctacgagctgaatatatcaggccaccttccttggaaactccagtcaaaattgcagggaacccacggtttgacccatattttaaggtattttgagaaacttgtccttccatatttaggtgtgaaattttatggcttataaccctttaaaatatataggattgcattggagcaattgatggtacacatgttcgagcatcagttagtaaagatatggaaccttcctttcgtggtcggaagtctttctactcaaaatgtcatggcagcagtagattttgaccttcggttcacatatgttttggcgggttgggaggggacagcacatgatgtgaccattttagcagatgctagagagcgggagaatggcctgtatgtccctcaaggtaataattttcttaaaacaaatttgcccaatataatttgcatagaattttgtcaccaatttgttttcatgtgttagtaaaattctacctagttgacgctggttatggagccaagcctgggtttttgccaccttttcgtgccatgaggtaccatttgaatgagtgggacagcaatccagtacaaaatgaaaaggaattgttcaaccttaggcactcatctctacgagtgatggtcgaacgtgcctttggaactctcaagagacgatccaaaattcttgatgaggcaaccccattttttcctttcccggttcaagttgacatcgttgtagcttgttgcatccttcataattatgtgctctctcaagggattgaattcgcaccaaatccttcttcttcgtcccgttccctcccgtttggtaccatttattgtggttccagcgccgatttggtaccctcccgctgccgaggttggggagctcgaggtcgggctggacaagggggtcgaggggaggccaggtcgggccttgacgaggagcagacaagggggtcgaggtgaccgcgcggtgtttagggatttaacgagagagagggggtcgggggaaggtggtggggcagataattgagcgagagaggtagaggaattgggggaaggggaggggatttgaggaatcggggaagggaggctctgtcattttttcaggagtcggggacatcttgcttctgttgctgtgctgcgaattggcttgttgctgtttgttgaccattacaacaacacttgaacatgattttaggttgccttaatgatgcggatagtttcacaaactcgttgatccatggaaacagcggcatgtattggagcaagagtcggtttcgtagcccacctgaggagcgaccatcccctcaaaaatttgttggtagttacaagatagtaacaaaatacaggtgagttaaaagtaaggggcaagatttagggaatgatttggaacagagaaatagagaaggaatctttagtgtggttcattgtaaggaactaaggagaagtagataaccaagtttagggaaagggcctgagatgctcttagaatgtgcagatagtatgcgcattgtttgctttagaaaaacaaatgatgtgcatcacttgtgcattatcatttctagttgtcttgttgtaccccctgactgtttgatgccattgatagtcaaaaaggccctgagagagatctttcctatacacagtctgccctatatactactcccttacgttgggaattgggttagtagaaacaggagttaagacatagattgggatgacaaagtagtatagggggtatgttgttttttctttgctcgacaccttgagcaaaggatttcattgctggaccattgtgcatattagttcacaactggatcaccactgattagaaggagagtgacatgtggaattgggtcattacaaaaaggagttaagataatatatttggatgacaaagtaatagagggagtattccttttccttttctcgatgcctcgaccaaaggattacagtgctgaatcattatatagggtttatacttgcccttagacattctcccctagtactaaagcattaaattaaactccactttatacgtatctatcttgctaaagctttatatcctgacatacttttttggtgcccctttgacaattatgctaatattttgaatgaaccagca

SEQ ID NO: 1992 - DNA, 1163 bp, Brachypodium distachyon
  Intron number 4 from transcript Bradi5g10400.1 (locus Brad i5g10400) derived from phytozome v7.0 (chr-ID Bd5; pos 136 28633 to 13629795)
ctttacatcttcagcttcataataagcacactttggtatgatgagttcctcacatcctaatacatgttgacttgcttcctttgtcagaatatttgtatcttttccttcgaagaggagaccattgtttaatttcatgagggaatcatctaacagcagcagcaatcaatatgctatccttttctataagtaattgcaagagaactgtgtcataagtatgcatgtgtcaaacctcgatggtacaaacaacgttgttggtcggttgatattgtttccgacatgtgtgggccacatgtaagtgtttacatgcaaaaatacctaggcaacgacccgacccgttaacacttatccaatccgcggtcacccggaggagatcaagaacatgtcgagtacacgctgagtaaaaagctcattaagagatgatgtagcacttacatgtgggcctatcggaatcgctgccaaaacacacgaaacaagtagatttgagttttttgagaaaacgtgtctcaagattagtggttctatgagaaaattagcagtaattgtggttccgtgaaaacttatcccaaaatgtgtgcttgtagttgccactgtttcaatttcagctgccaatttctgttactcttaaatatgatgtatgtaccagcaattatgtgcgtaaacttcagatatgccagcaagccactctagagcctcgttacatcagattttcttttttgccgttggagtgcaccatggcccaagttctggaacacattattttgtcacctaattgatgtttttatgactagtttgatttaacaaggctcacctgtgcacatgtttattactggatatgggagatgtagctaaatgttgaggcgagttgtgattttgcattaggtagatggaactgctcaatcaatgctgtttttgtttcttaatattctgtgtgttatatattggcactccttgggtttcaacaccacagattaaaatgaaaagaagttaaacttgcatttagtgaaggaagtttgcgtataatttttctatggaaattcaattcttgattttttgttgttacaggtacaaaatattgttttactatcctcaagattaacacgtttgagatgctgaacaagagattatcccgtaccttttgtgatgttgaccatcttacgccaggt

SEQ ID NO: 1993 - DNA, 1065 bp, Brachypodium distachyon
  Intron number 9 from transcript Bradi1g60210.1 (locus Brad i1g60210) derived from phytozome v7.0 (chr-ID Bd1; pos 595 01507 to 59502571)
ctgcatttgatacaggtatgaacatattgccccataatcctgaaactgagcagcatttgttttgcacactacttctggtacttaacattctgtgcattattctctaaactttttcccctgggacttctaactttcttttgacattccctaaatgtagtcctccctgatgatctaacttcatcattttatacttcagaaagaaaagaagaagaaactcacacatatttttttgggttatatggccgtacaggcagcacttattgtgatacatgaccttcatatctgaaatgcagttgcttactactccctccattccaaaacacaactcatatagatttttctcatttgttccacaatacacctcatttttctctagaaacccgcacccggccaataactactcacatccatttactattaatccaatatgagtggtcaggcactagaaacgagagctgcattggtccaagtgcacaaatctatatgagttgtgttttggaacggagggagtagtagtgcttcttaaagacttgggcccttatgcaactgattgaatacttggttatgcttttggaggacatgattctctagtcctctcaacacaaaagatcattttcaatagcaccctccttattgttcccgtcaaaaataaagaaataaatacatgacctccataatgatctttgttctttactttagaagaaaggaccaatttacttatttcccaattgatgtataaacaggatatttcttgctgacgattgagattagaattttctgaggatggaaatatgtcttactaagttgataaaattagttatatagctatttatataatggaaacttatacttctgtttttttgtgggagatttgatgagatgccctatgtaattcctcactctggtggcaaaataaaagcaataacaaaatcattatccaataaacttaactttgtattaaactgtactataagatgtaggaatttttccaaagtacaaggtagtactttgcaaggctgaaaatttcctttcttatttgttacatcagggtcaattgagggtcga

SEQ ID NO: 1994 - DNA, 3356 bp, Brachypodium distachyon
  Intron number 1 from transcript Bradi4g02960.1 (locus Brad i4g02960) derived from phytozome v7.0 (chr-ID Bd4; pos 219 7642 to 2200997 reverse strand)
gggtatttggagatttttggttggcctcataataggtagtatttgaaaatagggttttttctccgtttcgattttcctttttagttttttccgttctcaaatacataattttgctagtgtttcccgttctcaaacgacattatatctctctccatccagaaacgaaaaaaaaaatccatcccgtttgaaggttccattagctgctcttatttacctctttcggtggttcttgctcacactagcatgaagtactcccaagtgcttttacctatgctcaaattatatttgtaattttgtgagtttatataaggtatccaccacttcggcgtaaatcaatgggaactttgtttacaagcgttcaaaattctaaaaatcatagtggacacagttggaggatatgacagacctggtgttttgggtgccctttattttaaaaaaacgaaaatcatatttctaagtttcaaaaaattctgaactttttttccagtgtaaacatagatgtatactacgcacatgtacattttcatcaagaaatacactgatttgtgctctgtgcaaaaattataaatctgaaaatctagaatagtaaagtgtagatctatttgaaatctacagatttgtgattttttttgcacaggtcacacatcaacgcatgttttgatgaaaatgtacaggtatgtactatacatctatgttttagttggtttgaaacttagaaatattattttcgtagccaaatgcagtttccgggatatgatctatgaccttgtggaattttcattatgaagctcgtttacatctggaagttttcattatgaagctcatttgataaatcaaagagtgctgaaacatgaaacgctatgcaaaatctgctattgtctttctgtttatcccaaatgcaatgcaattaagctcttgccatgaaaggtcatacaactcacttgatatttacatttcttggaagcttgcacaaaaagtccttattggttcttacctaatatatctgctaaagtttctctaacaacttgctctcaattgacatggcaggtggggtcacaagatgagcaaatctatcacacgatgcaatgagtgcatcatatatctaccataattgttaccaaaagggtgactgtagaaagagtttcatcaaggttgtgactggtgatttcatggtaagtccttgttgtccgctgtccttgggtagcaaggtgtctcatgtatgattgataggccggcattgcctgggagaatggacacattaaaacagcgatttgattatactgattctgaagttgtgagttttgaaattgagcttgatgtatattttgtcaaaacaatactcgcagcatgtctggacaatcaaaattctgtttatagtacttggttttccagtactctgttccttttcaaatggtgttcaaaaaccctgtggtcaacaaattctatcctattttgtggggaaaagttgtcgaagtcacatgtcacagaaagtgaaaattcaacagaatttttcagaaaagaactgggagggggagtacaagttaccagcacccatctcgttataaaaataataattaaaggcatgacggtgatctagtgattaatgatctgttgtacacaccgcagcaagttcaaactatcatcctaaaagaatccgcacgggcatcctggtatgcagacaaccaatccatagcagcattcaaatatggtctacctggcatgtcgggacggcggtaccgaaaattggcgcaacagccgtcctctgcgagcgatcatcttgtgcagctagccagggctgcaaagtgttcgggtcgtgcggtgtcgtggctcacttgcgagtagtggatttcgggacagcggtcctgaaaaattgcatccgtgagcgatcatcttgtgtagctagatgcagagtgcacgggccatgcggcgttgtggctcgcatgcgagtggtgcatgtcggcgatcccggaccttggtgtgacgtgttggggtttcaggttttttgctaattaattgaaaactagtaaaaaaacccgtgcgatgctatggaacaacggaaagtgtatcaagcacgagccggtggaggcgaagtctggacattgatttttcgattggattgatttccatactaagattgataccgaaattttttgtttgggtttggattgatttccatactgagatggatacgaagatttggatttcatgctaaggagattgatttattttacgactgttcgtattatgttgtgacaaatttggaccgtacgataactttcggtaaatctaaaccgtagaatttctactactgaaatcgtgaataaggcgggagggaaaaaaaataagggacagtggcatattgattgtaattttaacgaagttaaccgaccaacaccgaccgacgccgtccacccatcaccaccgattccaatttaatatattattataatatattataaattgaaaatactgagtaggagcatagaataccgcttcccttgttatggaaacggacgagcatgcattctgctccggcgacccctggcctgggcgtccgggccgagcttttggtggctcggcacagctcgtgctcggcccgcaatgcaaaaaaggctcgatccgagccggcctgcagagctcgtttagatgtcgggccgagagtcaagatcggcctctttgactcgagcccaggcccaggactccgaccgtcgaatttctttatcggttctccaataacagatccttctgctaaaaaaacacacacaccaataaccgatccccttcttccgagcgagcccccgaccccgccgccgccccccaccctgaactgaggcgccgacgcctccctctggctctcctaagtggccgccatagctagtgccctgcctcgaagctttgccggccgcccgtcgtcgctgcagcctgcagctgctggagaagagctcctgctgccctgctggcttcttctgctgttgccgctggcctatgctactgcttggaagcttagaacagctgctgctgccggtgctgtcagcaagctcggcccgtgtccaccctctcctaatctccctcccaagctcggtgctgtcagcaagctcgacaccgaagcccgcgtcgccgctgtctcgcgcatcttgtccacccacctgggactccgaatttgccccctttctgtttatttagattacccaaaggagatcgaatccgactaatcttcagtctccgaggtggaatcaaagcccctagtagatgatatgctcagcaacttgcctgatgacattctgctcactgttcttgaccgactcgatgtccgcgatgcagccagaactggcgtcctctccacacggtggagtcag
